United States Patent Application Publication US 2017/0114356 A1 - sequence listing, part 90

SEQ ID NO: 145613 - DNA, 2532 bp, Zea Mays
tcgtcctcctcttcgcattagcgcggccagagagagatgcgggtgggagttgggatacctcggaggcggcgacgacaggatcgcagtggtcagtagccgggtcggccggtggccgcagattctcaccagcagcgccatccctcgccgtcgcccggcgctccagcccagtctactactcatgcaagaagaatcgttcacacgctgaagaacaagaatcggtgtgtatttgcagggcaggagaggaggccactctgactgtcactctgagcttcgcgtcacctgagtactgacggacgacatgggagaagttgaggacatgtacacccaagacgggaccgtggacatgaaagggaatcccgccgtgaagaagggcaccggcaactggcgcgcctgcccctacatcctcggtcagtgctcagtagtcatttgtgtccattgccgctctgctttgtgctcgctctgtttgtttgttgtcgactccattgacggccgctgatacttacatggttgatggttcagcgaacgagtgctgcgagaggctggcttactatggcatgagcaccaacctggtgaactacatgaagacccgacttggccaggtgaactccgttgcctccaacaacgtcaccaactggcaagggacgtgctacatcacgccgctcatcggcgccttcttcgccgacgcgtacatggggaggttctggaccatcgccatcttcatgatcatctacattttcggcctggcgctgctgacgatggcttcgtcggtgaaggggctggtgcctacgtcgtgcggcgacaaggatgtgtgccacccgacggacgcgcaggcggcggtggtgttcgtggcgctgtacctcatcgcgctgggcacgggcgggatcaagccgtgcgtgtcctccttcggcgccgaccagttcgacgagaacgacgagcgggagaagaagagcaagagctccttcttcaactggttctacttctccatcaacatcggcgcgctggtggcgtccacagtgctggtgtacgtgcagacgcacgtgggctggggctggggcttcggcatccccgccgtggtcatggccatcgccgtcggcagcttcttcgtgggcacgccgctgtacaggcaccagaagcccgggggcagcccgctgacgcgcatcgcgcaggtgctcgtcgcgtgcgcgcgcaagtggaacgtggccgtgcccgcggacaagtcgcggctgcacgagacggtggacggggagtccgtcatcgaggggagccgcaagctggagcactcggagcagctggcgtgcctcgacagggctgccgtggtgacggccgaggacggcgcggaggcgagcccgtggcgcctgtgctcggtgacgcaggtggaggagctcaagagcgtgatccggctgctgcccatctgggccagcgggatcgtgttcgcggcggtgtactcgcagatgagcaccatgttcgtgctgcagggtaacacgctggaccagagcatggggccccggttcaagatcccctcggcgacgctgtccatggtggacaccatcagcgtcatcgtctgggtccccgtgtacgaccgcgccatcgtgcccctggtgcgctcctacaccgggaggccgcgcgggttcacgcagctgcagcgcatgggcatcggcctcgtcgtctccatcttctccatggtggcggcgggcgtgctggacatcgtgcggctgcgcgccatcgcgcggcacggcctgtacggcgaggacgacatcgtgcccatctccatcttctggcagataccgcagtacttcatcatcgggtgcgcggaggtgttcaccttcgtggggcagctggagttcttctacgaccaggcgcccgacgccatgaggagcatgtgctccgcgctgtcgctcaccaccgtcgcgctcggcaactacctcagcacggtcctggtgaccatcgtcacccacatcaccaccaggcacggccgcatcgggtggatcccggagaacctcaaccgcggccacctcgactacttcttctggctgctcgccgtgctcagccttctcaacttccttgcctacctcgtcatcgccagctggtacaagtacaagaagacggccgatgattaccctggcgccaaaggggagcacggtacagagcactgatgggcgagagatggcggaaattgagtgatttctatgtgtggttagctgtctgcctgtctgtcgacttgttttgccacagtttgggtgcttaaacgttaacgtacgtactagttcaatatagtgtctcgggggcgaattggttgtttacatgtcatgtgtttatatatgcgcaatgttcgatcttagtggaataagtcaagtgctcttatgaatcaaggagtgttgatgatttgatgcgtcaagttttaactcgacgcgccataaagaagcaatatgctgcaaaacaacaatacatcatagataaattacaaataaatctgacatgtaacatgaaaactttatttaaccatacaaaacaacaaaaaataatatgacacgt

SEQ ID NO: 145614 - DNA, 2950 bp, Zea Mays
ctcttctttcttcttctatctcagccgccgattgaccgccctacccgacggcgtagttgacaccatagccacacgacaccagctgggtcaaggggtccaagcctgcgctgcgcggccaagcttttgcccagaccatcattgctcctctcatctttagttggggaagtgggaaagtggcaatcatacggacccatcaaaagaggccccttcatctttggtggcctagctggattggatatttggacgagtgttcttcttggcttggccacccgcctactccgtcttcttcatacgagacaagccgtgcgcttcttcttggcctagcccttcgagcaggtgcgtgcgagcggcctcctcgccttcatgattccgtcctcgcatcgcatggccttctgcgtcagcagatgcctgacgggtggagatttgggagaatcccagtgattctgtgaatcctttttgttctctgcttcgtcggttcggggttttaaggtttttgcgctcaatttcttccctgcagttcactttgggcactaatggttgctgctgtctagtcactgaaactctactttgcggtaggttcgtttcagatatattttcttatagattctggcttccccattgctgtcttgaaaaatccaagtagttaatagcgaaattgagttcccctccaccgaatcgtgcagtattcttgaagaaatctagtcactatactgaaatgtctgtttctgcacttcttcatgttcatgcctaatatgctaatcgtaggtttcgttttttttaaaaaaaaggggaactgctaatcgtagacgtcattggagggattgtttctgattgtccatggttccttttgcacattgtttcagtctactactcatgcaagaagaatcgttcacacgctgaagaacaagaatcggtgtgtatttgcagggcaggagaggaggccactctgactgtcactctgagcttcgcgtcacctgagtactgacggacgacatgggagaagttgaggacatgtacacccaagacgggaccgtggacatgaaagggaatcccgccgtgaagaagggcaccggcaactggcgcgcctgcccctacatcctcgcgaacgagtgctgcgagaggctggcttactatggcatgagcaccaacctggtgaactacatgaagacccgacttggccaggtgaactccgttgcctccaacaacgtcaccaactggcaagggacgtgctacatcacgccgctcatcggcgccttcttcgccgacgcgtacatggggaggttctggaccatcgccatcttcatgatcatctacattttcggcctggcgctgctgacgatggcttcgtcggtgaaggggctggtgcctacgtcgtgcggcgacaaggatgtgtgccacccgacggacgcgcaggcggcggtggtgttcgtggcgctgtacctcatcgcgctgggcacgggcgggatcaagccgtgcgtgtcctccttcggcgccgaccagttcgacgagaacgacgagcgggagaagaagagcaagagctccttcttcaactggttctacttctccatcaacatcggcgcgctggtggcgtccacagtgctggtgtacgtgcagacgcacgtgggctggggctggggcttcggcatccccgccgtggtcatggccatcgccgtcggcagcttcttcgtgggcacgccgctgtacaggcaccagaagcccgggggcagcccgctgacgcgcatcgcgcaggtgctcgtcgcgtgcgcgcgcaagtggaacgtggccgtgcccgcggacaagtcgcggctgcacgagacggtggacggggagtccgtcatcgaggggagccgcaagctggagcactcggagcagctggcgtgcctcgacagggctgccgtggtgacggccgaggacggcgcggaggcgagcccgtggcgcctgtgctcggtgacgcaggtggaggagctcaagagcgtgatccggctgctgcccatctgggccagcgggatcgtgttcgcggcggtgtactcgcagatgagcaccatgttcgtgctgcagggtaacacgctggaccagagcatggggccccggttcaagatcccctcggcgacgctgtccatggtggacaccatcagcgtcatcgtctgggtccccgtgtacgaccgcgccatcgtgcccctggtgcgctcctacaccgggaggccgcgcgggttcacgcagctgcagcgcatgggcatcggcctcgtcgtctccatcttctccatggtggcggcgggcgtgctggacatcgtgcggctgcgcgccatcgcgcggcacggcctgtacggcgaggacgacatcgtgcccatctccatcttctggcagataccgcagtacttcatcatcgggtgcgcggaggtgttcaccttcgtggggcagctggagttcttctacgaccaggcgcccgacgccatgaggagcatgtgctccgcgctgtcgctcaccaccgtcgcgctcggcaactacctcagcacggtcctggtgaccatcgtcacccacatcaccaccaggcacggccgcatcgggtggatcccggagaacctcaaccgcggccacctcgactacttcttctggctgctcgccgtgctcagccttctcaacttccttgcctacctcgtcatcgccagctggtacaagtacaagaagacggccgatgattaccctggcgccaaaggggagcacggtacagagcactgatgggcgagagatggcggaaattgagtgatttctatgtgtggttagctgtctgcctgtctgtcgacttgttttgccacagtttgggtgcttaaacgttaacgtacgtactagttcaatatagtgtctcgggggcgaattggttgtttacatgtcatgtgtttatatatgcgcaatgttcgatcttagtggaataagtcaagtgctcttatgaatc

SEQ ID NO: 145615 - DNA, 2512 bp, Zea Mays
ctcttctttcttcttctatctcagccgccgattgaccgccctacccgacggcgtagttgacaccatagccacacgacaccagctgggtcaaggggtccaagcctgcgctgcgcggccaagcttttgcccagaccatcattgctcctctcatctttagttggggaagtgggaaagtggcaatcatacggacccatcaaaagaggccccttcatctttggtggcctagctggattggatatttggacgagtgttcttcttggcttggccacccgcctactccgtcttcttcatacgagacaagccgtgcgcttcttcttggcctagcccttcgagcaggtgcgtgcgagcggcctcctcgccttcatgattccgtcctcgcatcgcatggccttctgcgtcagcagatgcctgacgggtggagatttgggagaatcccagtgattctgtgaatcctttttgttctctgcttcgtcggttcggggttttaagggcaggagaggaggccactctgactgtcactctgagcttcgcgtcacctgagtactgacggacgacatgggagaagttgaggacatgtacacccaagacgggaccgtggacatgaaagggaatcccgccgtgaagaagggcaccggcaactggcgcgcctgcccctacatcctcgcgaacgagtgctgcgagaggctggcttactatggcatgagcaccaacctggtgaactacatgaagacccgacttggccaggtgaactccgttgcctccaacaacgtcaccaactggcaagggacgtgctacatcacgccgctcatcggcgccttcttcgccgacgcgtacatggggaggttctggaccatcgccatcttcatgatcatctacattttcggcctggcgctgctgacgatggcttcgtcggtgaaggggctggtgcctacgtcgtgcggcgacaaggatgtgtgccacccgacggacgcgcaggcggcggtggtgttcgtggcgctgtacctcatcgcgctgggcacgggcgggatcaagccgtgcgtgtcctccttcggcgccgaccagttcgacgagaacgacgagcgggagaagaagagcaagagctccttcttcaactggttctacttctccatcaacatcggcgcgctggtggcgtccacagtgctggtgtacgtgcagacgcacgtgggctggggctggggcttcggcatccccgccgtggtcatggccatcgccgtcggcagcttcttcgtgggcacgccgctgtacaggcaccagaagcccgggggcagcccgctgacgcgcatcgcgcaggtgctcgtcgcgtgcgcgcgcaagtggaacgtggccgtgcccgcggacaagtcgcggctgcacgagacggtggacggggagtccgtcatcgaggggagccgcaagctggagcactcggagcagctggcgtgcctcgacagggctgccgtggtgacggccgaggacggcgcggaggcgagcccgtggcgcctgtgctcggtgacgcaggtggaggagctcaagagcgtgatccggctgctgcccatctgggccagcgggatcgtgttcgcggcggtgtactcgcagatgagcaccatgttcgtgctgcagggtaacacgctggaccagagcatggggccccggttcaagatcccctcggcgacgctgtccatggtggacaccatcagcgtcatcgtctgggtccccgtgtacgaccgcgccatcgtgcccctggtgcgctcctacaccgggaggccgcgcgggttcacgcagctgcagcgcatgggcatcggcctcgtcgtctccatcttctccatggtggcggcgggcgtgctggacatcgtgcggctgcgcgccatcgcgcggcacggcctgtacggcgaggacgacatcgtgcccatctccatcttctggcagataccgcagtacttcatcatcgggtgcgcggaggtgttcaccttcgtggggcagctggagttcttctacgaccaggcgcccgacgccatgaggagcatgtgctccgcgctgtcgctcaccaccgtcgcgctcggcaactacctcagcacggtcctggtgaccatcgtcacccacatcaccaccaggcacggccgcatcgggtggatcccggagaacctcaaccgcggccacctcgactacttcttctggctgctcgccgtgctcagccttctcaacttccttgcctacctcgtcatcgccagctggtacaagtacaagaagacggccgatgattaccctggcgccaaaggggagcacggtacagagcactgatgggcgagagatggcggaaattgagtgatttctatgtgtggttagctgtctgcctgtctgtcgacttgttttgccacagtttgggtgcttaaacgttaacgtacgtactagttcaatatagtgtctcgggggcgaattggttgtttacatgtcatgtgtttatatatgcgcaatgttcgatcttagtggaataagtcaagtgctcttatgaatc

SEQ ID NO: 145616 - DNA, 2414 bp, Zea Mays
ctcttctttcttcttctatctcagccgccgattgaccgccctacccgacggcgtagttgacaccatagccacacgacaccagctgggtcaaggggtccaagcctgcgctgcgcggccaagcttttgcccagaccatcattgctcctctcatctttagttggggaagtgggaaagtggcaatcatacggacccatcaaaagaggccccttcatctttggtggcctagctggattggatatttggacgagtgttcttcttggcttggccacccgcctactccgtcttcttcatacgagacaagccgtgcgcttcttcttggcctagcccttcgagcagttcactttgggcactaatggttgctgctgtctagtcactgaaactctactttgcgggcaggagaggaggccactctgactgtcactctgagcttcgcgtcacctgagtactgacggacgacatgggagaagttgaggacatgtacacccaagacgggaccgtggacatgaaagggaatcccgccgtgaagaagggcaccggcaactggcgcgcctgcccctacatcctcgcgaacgagtgctgcgagaggctggcttactatggcatgagcaccaacctggtgaactacatgaagacccgacttggccaggtgaactccgttgcctccaacaacgtcaccaactggcaagggacgtgctacatcacgccgctcatcggcgccttcttcgccgacgcgtacatggggaggttctggaccatcgccatcttcatgatcatctacattttcggcctggcgctgctgacgatggcttcgtcggtgaaggggctggtgcctacgtcgtgcggcgacaaggatgtgtgccacccgacggacgcgcaggcggcggtggtgttcgtggcgctgtacctcatcgcgctgggcacgggcgggatcaagccgtgcgtgtcctccttcggcgccgaccagttcgacgagaacgacgagcgggagaagaagagcaagagctccttcttcaactggttctacttctccatcaacatcggcgcgctggtggcgtccacagtgctggtgtacgtgcagacgcacgtgggctggggctggggcttcggcatccccgccgtggtcatggccatcgccgtcggcagcttcttcgtgggcacgccgctgtacaggcaccagaagcccgggggcagcccgctgacgcgcatcgcgcaggtgctcgtcgcgtgcgcgcgcaagtggaacgtggccgtgcccgcggacaagtcgcggctgcacgagacggtggacggggagtccgtcatcgaggggagccgcaagctggagcactcggagcagctggcgtgcctcgacagggctgccgtggtgacggccgaggacggcgcggaggcgagcccgtggcgcctgtgctcggtgacgcaggtggaggagctcaagagcgtgatccggctgctgcccatctgggccagcgggatcgtgttcgcggcggtgtactcgcagatgagcaccatgttcgtgctgcagggtaacacgctggaccagagcatggggccccggttcaagatcccctcggcgacgctgtccatggtggacaccatcagcgtcatcgtctgggtccccgtgtacgaccgcgccatcgtgcccctggtgcgctcctacaccgggaggccgcgcgggttcacgcagctgcagcgcatgggcatcggcctcgtcgtctccatcttctccatggtggcggcgggcgtgctggacatcgtgcggctgcgcgccatcgcgcggcacggcctgtacggcgaggacgacatcgtgcccatctccatcttctggcagataccgcagtacttcatcatcgggtgcgcggaggtgttcaccttcgtggggcagctggagttcttctacgaccaggcgcccgacgccatgaggagcatgtgctccgcgctgtcgctcaccaccgtcgcgctcggcaactacctcagcacggtcctggtgaccatcgtcacccacatcaccaccaggcacggccgcatcgggtggatcccggagaacctcaaccgcggccacctcgactacttcttctggctgctcgccgtgctcagccttctcaacttccttgcctacctcgtcatcgccagctggtacaagtacaagaagacggccgatgattaccctggcgccaaaggggagcacggtacagagcactgatgggcgagagatggcggaaattgagtgatttctatgtgtggttagctgtctgcctgtctgtcgacttgttttgccacagtttgggtgcttaaacgttaacgtacgtactagttcaatatagtgtctcgggggcgaattggttgtttacatgtcatgtgtttatatatgcgcaatgttcgatcttagtggaataagtcaagtgctcttatgaatc

SEQ ID NO: 145617 - DNA, 2511 bp, Zea Mays
ctcttctttcttcttctatctcagccgccgattgaccgccctacccgacggcgtagttgacaccatagccacacgacaccagctgggtcaaggggtccaagcctgcgctgcgcggccaagcttttgcccagaccatcattgctcctctcatctttagttggggaagtgggaaagtggcaatcatacggacccatcaaaagaggccccttcatctttggtggcctagctggattggatatttggacgagtgttcttcttggcttggccacccgcctactccgtcttcttcatacgagacaagccgtgcgcttcttcttggcctagcccttcgagcagggcaggagaggaggccactctgactgtcactctgagcttcgcgtcacctgagtactgacggacgacatgggagaagttgaggacatgtacacccaagacgggaccgtggacatgaaagggaatcccgccgtgaagaagggcaccggcaactggcgcgcctgcccctacatcctcgcgaacgagtgctgcgagaggctggcttactatggcatgagcaccaacctggtgaactacatgaagacccgacttggccaggtgaactccgttgcctccaacaacgtcaccaactggcaagggacgtgctacatcacgccgctcatcggcgccttcttcgccgacgcgtacatggggaggttctggaccatcgccatcttcatgatcatctacattttcggcctggcgctgctgacgatggcttcgtcggtgaaggggctggtgcctacgtcgtgcggcgacaaggatgtgtgccacccgacggacgcgcaggcggcggtggtgttcgtggcgctgtacctcatcgcgctgggcacgggcgggatcaagccgtgcgtgtcctccttcggcgccgaccagttcgacgagaacgacgagcgggagaagaagagcaagagctccttcttcaactggttctacttctccatcaacatcggcgcgctggtggcgtccacagtgctggtgtacgtgcagacgcacgtgggctggggctggggcttcggcatccccgccgtggtcatggccatcgccgtcggcagcttcttcgtgggcacgccgctgtacaggcaccagaagcccgggggcagcccgctgacgcgcatcgcgcaggtgctcgtcgcgtgcgcgcgcaagtggaacgtggccgtgcccgcggacaagtcgcggctgcacgagacggtggacggggagtccgtcatcgaggggagccgcaagctggagcactcggagcagctggcgtgcctcgacagggctgccgtggtgacggccgaggacggcgcggaggcgagcccgtggcgcctgtgctcggtgacgcaggtggaggagctcaagagcgtgatccggctgctgcccatctgggccagcgggatcgtgttcgcggcggtgtactcgcagatgagcaccatgttcgtgctgcagggtaacacgctggaccagagcatggggccccggttcaagatcccctcggcgacgctgtccatggtggacaccatcagcgtcatcgtctgggtccccgtgtacgaccgcgccatcgtgcccctggtgcgctcctacaccgggaggccgcgcgggttcacgcagctgcagcgcatgggcatcggcctcgtcgtctccatcttctccatggtggcggcgggcgtgctggacatcgtgcggctgcgcgccatcgcgcggcacggcctgtacggcgaggacgacatcgtgcccatctccatcttctggcagataccgcagtacttcatcatcgggtgcgcggaggtgttcaccttcgtggggcagctggagttcttctacgaccaggcgcccgacgccatgaggagcatgtgctccgcgctgtcgctcaccaccgtcgcgctcggcaactacctcagcacggtcctggtgaccatcgtcacccacatcaccaccaggcacggccgcatcgggtggatcccggagaacctcaaccgcggccacctcgactacttcttctggctgctcgccgtgctcagccttctcaacttccttgcctacctcgtcatcgccagctggtacaagtacaagaagacggccgatgattaccctggcgccaaaggggagcacggtacagagcactgatgggcgagagatggcggaaattgagtgatttctatgtgtggttagctgtctgcctgtctgtcgacttgttttgccacagtttgggtgcttaaacgttaacgtacgtactagttcaatatagtgtctcgggggcgaattggttgtttacatgtcatgtgtttatatatgcgcaatgttcgatcttagtggaataagtcaagtgctcttatgaatcaaggagtgttgatgatttgatgcgtcaagttttaactcgacgcgccataaagaagcaatatgctgcaaaacaacaatacatcatagataaattacaaataaatctgacatgtaacatgaaaactttatttaaccatacaaaacaacaaaaaa

SEQ ID NO: 145618 - DNA, 2588 bp, Zea Mays
ctcttctttcttcttctatctcagccgccgattgaccgccctacccgacggcgtagttgacaccatagccacacgacaccagctgggtcaaggggtccaagcctgcgctgcgcggccaagcttttgcccagaccatcattgctcctctcatctttagttggggaagtgggaaagtggcaatcatacggacccatcaaaagaggccccttcatctttggtggcctagctggattggatatttggacgagtgttcttcttggcttggccacccgcctactccgtcttcttcatacgagacaagccgtgcgcttcttcttggcctagcccttcgagcagtctactactcatgcaagaagaatcgttcacacgctgaagaacaagaatcggtgtgtatttgcagggcaggagaggaggccactctgactgtcactctgagcttcgcgtcacctgagtactgacggacgacatgggagaagttgaggacatgtacacccaagacgggaccgtggacatgaaagggaatcccgccgtgaagaagggcaccggcaactggcgcgcctgcccctacatcctcgcgaacgagtgctgcgagaggctggcttactatggcatgagcaccaacctggtgaactacatgaagacccgacttggccaggtgaactccgttgcctccaacaacgtcaccaactggcaagggacgtgctacatcacgccgctcatcggcgccttcttcgccgacgcgtacatggggaggttctggaccatcgccatcttcatgatcatctacattttcggcctggcgctgctgacgatggcttcgtcggtgaaggggctggtgcctacgtcgtgcggcgacaaggatgtgtgccacccgacggacgcgcaggcggcggtggtgttcgtggcgctgtacctcatcgcgctgggcacgggcgggatcaagccgtgcgtgtcctccttcggcgccgaccagttcgacgagaacgacgagcgggagaagaagagcaagagctccttcttcaactggttctacttctccatcaacatcggcgcgctggtggcgtccacagtgctggtgtacgtgcagacgcacgtgggctggggctggggcttcggcatccccgccgtggtcatggccatcgccgtcggcagcttcttcgtgggcacgccgctgtacaggcaccagaagcccgggggcagcccgctgacgcgcatcgcgcaggtgctcgtcgcgtgcgcgcgcaagtggaacgtggccgtgcccgcggacaagtcgcggctgcacgagacggtggacggggagtccgtcatcgaggggagccgcaagctggagcactcggagcagctggcgtgcctcgacagggctgccgtggtgacggccgaggacggcgcggaggcgagcccgtggcgcctgtgctcggtgacgcaggtggaggagctcaagagcgtgatccggctgctgcccatctgggccagcgggatcgtgttcgcggcggtgtactcgcagatgagcaccatgttcgtgctgcagggtaacacgctggaccagagcatggggccccggttcaagatcccctcggcgacgctgtccatggtggacaccatcagcgtcatcgtctgggtccccgtgtacgaccgcgccatcgtgcccctggtgcgctcctacaccgggaggccgcgcgggttcacgcagctgcagcgcatgggcatcggcctcgtcgtctccatcttctccatggtggcggcgggcgtgctggacatcgtgcggctgcgcgccatcgcgcggcacggcctgtacggcgaggacgacatcgtgcccatctccatcttctggcagataccgcagtacttcatcatcgggtgcgcggaggtgttcaccttcgtggggcagctggagttcttctacgaccaggcgcccgacgccatgaggagcatgtgctccgcgctgtcgctcaccaccgtcgcgctcggcaactacctcagcacggtcctggtgaccatcgtcacccacatcaccaccaggcacggccgcatcgggtggatcccggagaacctcaaccgcggccacctcgactacttcttctggctgctcgccgtgctcagccttctcaacttccttgcctacctcgtcatcgccagctggtacaagtacaagaagacggccgatgattaccctggcgccaaaggggagcacggtacagagcactgatgggcgagagatggcggaaattgagtgatttctatgtgtggttagctgtctgcctgtctgtcgacttgttttgccacagtttgggtgcttaaacgttaacgtacgtactagttcaatatagtgtctcgggggcgaattggttgtttacatgtcatgtgtttatatatgcgcaatgttcgatcttagtggaataagtcaagtgctcttatgaatcaaggagtgttgatgatttgatgcgtcaagttttaactcgacgcgccataaagaagcaatatgctgcaaaacaacaatacatcatagataaattacaaataaatctgacatgtaacatgaaaactttatttaaccatacaaaacaacaaaaaataatatgacacgt

SEQ ID NO: 145619 - DNA, 2140 bp, Zea Mays
cctcgccttcatgattccgtcctcgcatcgcatggccttctgcgtcagcagatgcctgacggttcactttgggcactaatggttgctgctgtctagtcactgaaactctactttgcgggcaggagaggaggccactctgactgtcactctgagcttcgcgtcacctgagtactgacggacgacatgggagaagttgaggacatgtacacccaagacgggaccgtggacatgaaagggaatcccgccgtgaagaagggcaccggcaactggcgcgcctgcccctacatcctcgcgaacgagtgctgcgagaggctggcttactatggcatgagcaccaacctggtgaactacatgaagacccgacttggccaggtgaactccgttgcctccaacaacgtcaccaactggcaagggacgtgctacatcacgccgctcatcggcgccttcttcgccgacgcgtacatggggaggttctggaccatcgccatcttcatgatcatctacattttcggcctggcgctgctgacgatggcttcgtcggtgaaggggctggtgcctacgtcgtgcggcgacaaggatgtgtgccacccgacggacgcgcaggcggcggtggtgttcgtggcgctgtacctcatcgcgctgggcacgggcgggatcaagccgtgcgtgtcctccttcggcgccgaccagttcgacgagaacgacgagcgggagaagaagagcaagagctccttcttcaactggttctacttctccatcaacatcggcgcgctggtggcgtccacagtgctggtgtacgtgcagacgcacgtgggctggggctggggcttcggcatccccgccgtggtcatggccatcgccgtcggcagcttcttcgtgggcacgccgctgtacaggcaccagaagcccgggggcagcccgctgacgcgcatcgcgcaggtgctcgtcgcgtgcgcgcgcaagtggaacgtggccgtgcccgcggacaagtcgcggctgcacgagacggtggacggggagtccgtcatcgaggggagccgcaagctggagcactcggagcagctggcgtgcctcgacagggctgccgtggtgacggccgaggacggcgcggaggcgagcccgtggcgcctgtgctcggtgacgcaggtggaggagctcaagagcgtgatccggctgctgcccatctgggccagcgggatcgtgttcgcggcggtgtactcgcagatgagcaccatgttcgtgctgcagggtaacacgctggaccagagcatggggccccggttcaagatcccctcggcgacgctgtccatggtggacaccatcagcgtcatcgtctgggtccccgtgtacgaccgcgccatcgtgcccctggtgcgctcctacaccgggaggccgcgcgggttcacgcagctgcagcgcatgggcatcggcctcgtcgtctccatcttctccatggtggcggcgggcgtgctggacatcgtgcggctgcgcgccatcgcgcggcacggcctgtacggcgaggacgacatcgtgcccatctccatcttctggcagataccgcagtacttcatcatcgggtgcgcggaggtgttcaccttcgtggggcagctggagttcttctacgaccaggcgcccgacgccatgaggagcatgtgctccgcgctgtcgctcaccaccgtcgcgctcggcaactacctcagcacggtcctggtgaccatcgtcacccacatcaccaccaggcacggccgcatcgggtggatcccggagaacctcaaccgcggccacctcgactacttcttctggctgctcgccgtgctcagccttctcaacttccttgcctacctcgtcatcgccagctggtacaagtacaagaagacggccgatgattaccctggcgccaaaggggagcacggtacagagcactgatgggcgagagatggcggaaattgagtgatttctatgtgtggttagctgtctgcctgtctgtcgacttgttttgccacagtttgggtgcttaaacgttaacgtacgtactagttcaatatagtgtctcgggggcgaattggttgtttacatgtcatgtgtttatatatgcgcaatgttcgatcttagtggaataagtcaagtgctcttatgaatc

SEQ ID NO: 145620 - DNA, 1333 bp, Zea Mays
ttccgagcgtgtgcttggtcaactgggccaccgcgcacaaaacccattgcagttgtagcagggactctttccccgtgccacggacgacaatgactgccgacgcggcgctcctcgccatcatcgtcgccttcctcctcccgctacgcctcgtctccctcggcctcagcctggcgtccgggcgtcacggtactagctccagacgcgtccgccgttcctgtgccgctttggccgtcgcagccgcgctcctcgcagtcatcttcgccctcccgcgtgaccacgtccgggagtgcgccgctccgatcgcttctgtctccagtgccggggatgatgacggcggtttccgcgaggagctgcggttggaggtcgagcagcttaagcagcagctggcgcggcttgaatctctttgggatagtaaatcgaaagctgtggatgataaacttgattctttagaggaggataatggccgtgtaatgagagcaatggcactcgatgtccagtctctgatcaatgagcgggaaaatatcaagattcaggaatcattatgcagctcatattttggtaacagtatcaaggaaatggaaaatgaggttcaaattctaaaagatgggtcaagaaagatgaattctgatatatcatcagtagcaaaggacacggcagaaaaggtcgaagttttgcattcagctatcgagaaggttcaagttatagctgatgaatgggtcaagatgaactatactattaacagaatatggtcattcactaaggagacagagaaaagggtggaaggtctatattcagatttaatgaagggcttcaagcagacgaagagaaaagtgccgttctggagagactgatgatgctgtggacctgatgtttgaccactgtcattgacgacccgcttggaattgacacaccgaagctgctagcaacttaatccgcttccatccagtgtttatattttcgcgtccttagtgcttgtgagacgtcagtgcaaggttgtggttgatgagaccttgtgcgacccgacttgctaactgtttgcatgccgtcatggccccataatgggactatctctatctatagcagcttatctataattatatttaaattacactgtacaaataatacaatacagcccaaaacggtgtaaaacggtgtttttgtgaccatatggtgcaatgctgacattataatgtttgtagactgtaatttgaatatgagtaaagctcgagatagttttatgcgctaccaccactgacgatggatgtccctaggaatatgaattgttattttttcctatatataaaatacacaatagatctccgtattggagagg

SEQ ID NO: 145621 - DNA, 346 bp, Zea Mays
tattttttttctgttgtatgctgatatattttgaactgtgtttgcagaatctctttgggatagtaaatcgaaagctgtggatgataaacttgattctttagaggaggataatggccgtgtaatgagagcaatggcactcgatgtccagtctctgatcaatgagcgggaaaatatcaagattcaggaatcattatgcagctcatattttggtaacagtatcaaggaaatggaaaatgaggttcaaattctaaaagatgggtcaagaaagatgaattctgatatatcatcagtagcaaaggacacggcagaaaaggtcgaagttttgcattcagctatcgagaaggta

SEQ ID NO: 145622 - DNA, 771 bp, Zea Mays
attaacagaagaaaagagtccaaaatagaccaaagtacaatgccaaaaaaggcagaacacgagaccaccaaactcctgcagcgcacagtactccagcctccgtctgctcatgaaaacagcaggacacacaaggacacaaggaggcaaatagcaaaagtgccaggctccacacacacctgctctacactacacacccagaataatggcagcaccaaggtccaagccctcaagatgcttggcacagggcttcaagcagacgaagagaaaagtgccgttctggagagactgatgatgctgtggacctgatgtttgaccactgtcattgacgacccgcttggaattgacacaccgaagctgctagcaacttaatccgcttccatccagtgtttatattttcgcgtccttagtgcttgtgagacgtcagtgcaaggttgtggttgatgagaccttgtgcgacccgacttgctaactgtttgcatgccgtcatggccccataatgggactatctctatctatagcagcttatctataattatatttaaattacactgtacaaataatacaatacagcccaaaacggtgtaaaacggtgtttttgtgaccatatggtgcaatgctgacattataatgtttgtagactgtaatttgaatatgagtaaagctcgagatagttttatgcgctaccaccactgacgatggatgtccctaggaatatgaattgttattttttcctatatataaaatacacaatagatctccgtattggagagg

SEQ ID NO: 145623 - DNA, 774 bp, Zea Mays
atggcgggcagcagacggacgccgctcgtgcgggagctcccgcacgatatgctcgtcgagatcgccgcccgcgtcgccgcgacatcgccgcatccgatggaggacatctgcagcctacgcgccacgtgccgggccacgcgcggggcgtgcgaggagggcgccgtcgggagccgcgtggcgctggagcgggaggaacgcatgaggtggctcgagcccgaccgctacctcgccctcgtcggcaacctggccgccttgggcaacccggaggcctgcttcgtccgcgggctcgagctcgtcttcgcggccgcggccgaggctgcggtgcgcggcggcgtcgagtggctccggcgcgcggccaccgcgggccacaagacggcggcctacgtgctcggcgtcctccactacggaggggacgacaggcaggaggccgagcggtacatcaggcaagtcgaaggcgaggacgggggcgagggcggcggcgcccaagggtgcgagcagcaggccggccggaagaccaaccgggagtgcgtcaggtgccgcacgctagccgtccacgcggtccgcgaggtgacatggaaggtggtggacggagcgaccatgggctccgtgccggtaccgccgccggaaaaaagttgcaagggtggcggctgcgacgtggcggaagggtggaacttcggctgcgccgtcttttgtagcgatggctgtaggattaggcacgagtactcgcagttcttttcgcgagtgccattccctgttgatttactagtagtatag

SEQ ID NO: 145624 - DNA, 1863 bp, Zea Mays
gacgaagtcgaatgtgtcgtgttttataatgtcaaaaatctcagcgacgaggggcaacagttttctcgaagaagggaaggcagcctcttcctcgtcgccggcgacgtcaccctcagcggctatcagggatgccggtcagggtggtagataccgccacgccttcctcccagccctccccaggttcccttaccctcctcgcatcctccatctccaataaatacgctatgcgcatcaggtccgctttatacgatcaggtctagatcttatcggattatcgtttttttttgttgcctgggcgtgatgtgatttcgttggattactgttggaagctattttttctgatctagattggcctaaaagcaactccaagaaggagttctaaacttgagccttaaaatttgtattaggaccttttgatttatttaggatctccaacaaccaggccttaaaatcaggatacccagctgggatccttacccagcttccatcttctctgcacgaggcaacgcgcttttttctagcatatccttctcgtcagctacgcattcgttcgcaatcggccgcatgaggcccacatcatccttcctcaagggctgcacagttaagcgcgacggctgcacacggctgcaaggtacagctcgacggctgctggtaggggcatcaccgcatcatccctgcacggtaggctcttgacccctgcacaatacggctggagggctacgagacgagtggtggcggagtctgctcgctggaggttgggcgcgtggacgaggtgaatagttcatttagaacctgctgcagatttgcaacaaaaacatgtatgcaactaggagatctatgatccatctcgaagatgaagaattagatgatgaacttgaccacctcatgcttctcatgatgggtgaatatcggaagaggaagcataagcagcgaaagaagcatcgaggttcagtttttggacacaaggtttacaatcaaaatagagatgaacacgggcaagaagcaaatactggacacccatctcctcctagctgttcactcttaagtgctggaagatcttttgctggaactcaaaatgtttcaagcctgcagaaggatgaagcatggaaagtgaatgtacgcatccatggttgtgatcttgatcagggttatctatgtggaacgatggaagcgcttaatgttccattagcagatacacctgttgtgactttctgggagggggagatagtggatgctaaaaattacacatttttcactggaaagtgggaggcatcaccagaggatgatataagacattggtccaagttcccatcatttacacctcttctgggtcagattgagacagatggtggcaagtctctggactttagcaactatccttatatatttatgagatggaaagagcaatattttgtcaatgttggagtcgactgtgggttaaccatcgctggtttctactacgtctgcttttcttgtagcgatggctccatcagtggattttattatgatccaaatagcagtccatttcagaagctcgagctgaagtgtaccaatgagaaaaaatccgggttcaccttttcatcctacgagctgcagtgacaggacacagatgtcctcgacagacaactttctgttagcatatagtgtgtgtactgaactcgtactccctaatgaaaggaatgagtggtcgtttacgtaacagtttgttttctagcaagacgaagcaaactgtcactttgtaatctgcagaagcatcctgtcctttctaaaatctaccttttgtattacgtttctattccacaattgttatctgcaattggggatttctatttatgatatacacattgtgcgtggttcctgatt

SEQ ID NO: 145625 - DNA, 1442 bp, Zea Mays
gacgaagtcgaatgtgtcgtgttttataatgtcaaaaatctcagcgacgaggggcaacagttttctcgaagaagggaaggcagcctcttcctcgtcgccggcgacgtcaccctcagcggctatcagggatgccggtcagggtggtagataccgccacgccttcctcccagccctccccagttaagcgcgacggctgcacacggctgcaaggtacagctcgacggctgctggtaggggcatcaccgcatcatccctgcacggtaggctcttgacccctgcacaatacggctggagggctacgagacgagtggtggcggagtctgctcgctggaggttgggcgcgtggacgaggtgaatagttcatttagaacctgctgcagatttgcaacaaaaacatgtatgcaactaggagatctatgatccatctcgaagatgaagaattagatgatgaacttgaccacctcatgcttctcatgatgggtgaatatcggaagaggaagcataagcagcgaaagaagcatcgaggttcagtttttggacacaaggtttacaatcaaaatagagatgaacacgggcaagaagcaaatactggacacccatctcctcctagctgttcactcttaagtgctggaagatcttttgctggaactcaaaatgtttcaagcctgcagaaggatgaagcatggaaagtgaatgtacgcatccatggttgtgatcttgatcagggttatctatgtggaacgatggaagcgcttaatgttccattagcagatacacctgttgtgactttctgggagggggagatagtggatgctaaaaattacacatttttcactggaaagtgggaggcatcaccagaggatgatataagacattggtccaagttcccatcatttacacctcttctgggtcagattgagacagatggtggcaagtctctggactttagcaactatccttatatatttatgagatggaaagagcaatattttgtcaatgttggagtcgactgtgggttaaccatcgctggtttctactacgtctgcttttcttgtagcgatggctccatcagtggattttattatgatccaaatagcagtccatttcagaagctcgagctgaagtgtaccaatgagaaaaaatccgggttcaccttttcatcctacgagctgcagtgacaggacacagatgtcctcgacagacaactttctgttagcatatagtgtgtgtactgaactcgtactccctaatgaaaggaatgagtggtcgtttacgtaacagtttgttttctagcaagacgaagcaaactgtcactttgtaatctgcagaagcatcctgtcctttctaaaatctaccttttgtattacgtttctattccacaattgttatctgcaattggggatttctatttatgatatacacattgtgcgtggttcctgatt

SEQ ID NO: 145626 - DNA, 2076 bp, Zea Mays
gacgaagtcgaatgtgtcgtgttttataatgtcaaaaatctcagcgacgaggggcaacagttttctcgaagaagggaaggcagcctcttcctcgtcgccggcgacgtcaccctcagcggctatcagggatgccggtcagggtggtagataccgccacgccttcctcccagccctccccaggttcccttaccctcctcgcatcctccatctccaataaatacgctatgcgcatcaggtccgctttatacgatcaggccttaaaatcaggatacccagctgggatccttacccagcttccatcttctctgcacgaggcaacgcgcttttttctagcatatccttctcgtcagctacgcattcgttcgcaatcggccgcatgaggcccacatcatccttcctcaagggctgcacagttaagcgcgacggctgcacacggctgcaaggtacagctcgacggctgctggtaggggcatcaccgcatcatccctgcacggtaggctcttgacccctgcacaatacggctggagggctacgagacgagtggtggcggagtctgctcgctggaggttgggcgcgtggacgaggtgaatagttcatttagaacctgctgcagatttgcaacaaaaacatgtatgcaactaggagatctatgatccatctcgaagatgaagaattagatgatgaacttgaccacctcatgcttctcatgatgggtgaatatcggaagaggaagcataagcagcgaaagaagcatcgaggttcagtttttggacacaaggtttacaatcaaaatagagatgaacacgggcaagaagcaaatactggacacccatctcctcctagctgttcactcttaagtgctggaagatcttttgctggaactcaaaatgtttcaagcctgcagaaggatgaagcatggaaagtgaatgtacgcatccatggttgtgatcttgatcagggttatctatgtggaacgatggaagcgcttaatgttccattagcagatacacctgttgtgactttctgggagggggagatagtggatgctaaaaattacacatttttcactggaaagtgggaggcatcaccagaggatgatataagacattggtccaagttcccatcatttacacctcttctgggtcagattgagacagatggtggcaagtctctggactttagcaactatccttatatatttatgagatggaaagagcaatattttgtcaatgttggagtcgactgtgggttaaccatcgctggtttctactacgtctgcttttcttgtagcgatggctccatcagtggattttattatgatccaaatagcagtccatttcagaagctcgagctgaagtgtaccaatgagaaaaaatccgggttcaccttttcatcctacgagctgcagtgacaggacacagatgtcctcgacagacaactttctgttagcatatagtgtgtgtactgaactcgtactccctaatgaaaggaatgagtggtcgtttacgtaacagtttgttttctagcaagacgaagcaaactgtcactttgtaatctgcagaagcatcctgtcctttctaaaatctaccttttgtattacgtttctattccacaattgttatctgcaattggggatttctatttatgatatacacattgtgcgtggttcctgattaaatgggtcgtgaatacatgtttctgatacaaatcatggtgccaagctttactgaaggtgaaacttcatcaaggtcgctgattgctttctctcactcaagttcctggtgcaaaagctgtggagaccttcctgcagctattgtatgttttcacctgtgacagttctatatgagcaagataaacttggggcatgttcttcgcctttgccttcagcttcttgacattgcaagcggggctcgggaccggtggattatgtcttggtgatgcttccaggaacacctcagacgccctctctgaatcgccctctgtaatgtgcacgatagaacacttattaacatgcatgctccaccatagtgatgccatgctacagtttggtgtctggactgaattcagctgatgtga

SEQ ID NO: 145627 - DNA, 1853 bp, Zea Mays
gacgaagtcgaatgtgtcgtgttttataatgtcaaaaatctcagcgacgaggggcaacagttttctcgaagaagggaaggcagcctcttcctcgtcgccggcgacgtcaccctcagcggctatcagggatgccggtcagggtggtagataccgccacgccttcctcccagccctccccagggctgcacagttaagcgcgacggctgcacacggctgcaaggtacagctcgacggctgctggtaggggcatcaccgcatcatccctgcacggtaggctcttgacccctgcacaatacggctggagggctacgagacgagtggtggcggagtctgctcgctggaggttgggcgcgtggacgaggtgaatagttcatttagaacctgctgcagatttgcaacaaaaacatgtatgcaactaggagatctatgatccatctcgaagatgaagaattagatgatgaacttgaccacctcatgcttctcatgatgggtgaatatcggaagaggaagcataagcagcgaaagaagcatcgaggttcagtttttggacacaaggtttacaatcaaaatagagatgaacacgggcaagaagcaaatactggacacccatctcctcctagctgttcactcttaagtgctggaagatcttttgctggaactcaaaatgtttcaagcctgcagaaggatgaagcatggaaagtgaatgtacgcatccatggttgtgatcttgatcagggttatctatgtggaacgatggaagcgcttaatgttccattagcagatacacctgttgtgactttctgggagggggagatagtggatgctaaaaattacacatttttcactggaaagtgggaggcatcaccagaggatgatataagacattggtccaagttcccatcatttacacctcttctgggtcagattgagacagatggtggcaagtctctggactttagcaactatccttatatatttatgagatggaaagagcaatattttgtcaatgttggagtcgactgtgggttaaccatcgctggtttctactacgtctgcttttcttgtagcgatggctccatcagtggattttattatgatccaaatagcagtccatttcagaagctcgagctgaagtgtaccaatgagaaaaaatccgggttcaccttttcatcctacgagctgcagtgacaggacacagatgtcctcgacagacaactttctgttagcatatagtgtgtgtactgaactcgtactccctaatgaaaggaatgagtggtcgtttacgtaacagtttgttttctagcaagacgaagcaaactgtcactttgtaatctgcagaagcatcctgtcctttctaaaatctaccttttgtattacgtttctattccacaattgttatctgcaattggggatttctatttatgatatacacattgtgcgtggttcctgattaaatgggtcgtgaatacatgtttctgatacaaatcatggtgccaagctttactgaaggtgaaacttcatcaaggtcgctgattgctttctctcactcaagttcctggtgcaaaagctgtggagaccttcctgcagctattgtatgttttcacctgtgacagttctatatgagcaagataaacttggggcatgttcttcgcctttgccttcagcttcttgacattgcaagcggggctcgggaccggtggattatgtcttggtgatgcttccaggaacacctcagacgccctctctgaatcgccctctgtaatgtgcacgatagaacacttattaacatgcatgctccaccatagtgatgccatgctacagtttggtgtctggactgaattcagctgatgtga

SEQ ID NO: 145628 - DNA, 2104 bp, Zea Mays
ccttttcctccccgtcgcggcgtcgccggctcccacggtccaccgacgactcttcttcctcacctcctcccgctccagctccagctcgtctctctcctcgcctcgcgtagggtttcgcttcccgtctcgccgccgtcagcatgggggacaactacgatgacgaaggcgagccgatcgtgaacctcgacgaacgggaaccctcccctgagcatcagccgtacgaagacctcgatgacgacctcgacggcggcggcgattggacccgcgaccgctctccgacccccgtccacggcgacgacggcggggcagggtcctcctccaagccccgaaagcgccttctcaagaagggcggcggtggaggcatgcccggcgatgacgggctggatgactttgggttggaggacgaggacgcggacccttcggctgaggcgaggaagaggaagggctcgtcgtcgctgagggacctcgcgaggggcggggcgggcagggagaagaaggctaagaaaatgcggatggaggacgacgggagggggagggacactgggatggtgagggataggcggggatcaggaggaagggactcaggcggtagggatgaccaggatgatggggagagggagatccaggagctctgggataccattgctggtggtgagtcagaggatgaccaagaaggtgttagaaccgtagatgatgataatttcattgatgacactggagttgatccagctgatcgttatggcagcgataatgagcgacattcacctggacgttatgcacaggctgaggagggtgaggaggacgatgaaatcgaacgactcttcaagggtggtaagaagaagaagaagaagaatgatcgccctcgtgcagatattggccttatagtggaacaattcattgctgagtttgaagtagcagccgaagaagatgcaaacttgaataggcaatcaaaaccagccattaacaaacttatgaagcttcctctgctcatagatgttctctccaagaagaatcttcagcaggaatttcttgaccacggagttctcactcttctaaaaaattggcttgagccattacctgatggaagcatgccaaacatgaatattcgatctgctgtactgaaattattaactgattttccaattgacttggaacagtatgaccgaagagagcagcttaagaaaagtggtctgggaaaggtcattatgtttttgtccaaatctgacgaggagactactgcaaataggaaattggctaaggagctggttgataaatggagtcgaccaatattcaacaagagcacgagatttgaggacatgaagagatatgatgatgaaagagcaccttacaggcggccacaaatgaagaagtaagtgcatgcacttattgggcatttgaggactatatcttcttgtcctgtatattatgtgtactttgtcttcttattggttaacctttgtgtcatactgtcatgaagaccttcatcgagtagctctggaatggaatccagagatgatgatcttgatgctgacttttcacaacgcaagtctgggcaaagtagttcaaggcagcacgcttctaggccggaagcctcgcctttggactttgtcattcgtccacagtccaaaattgaccctgagcagatacgggctcgtgctaagcaggctgtccaagaccagcgtcggctgaagatgaacaagaaattgcagcagctgaaagcgcccaagaagaaaaaccttcaggcgtcgaagctcagcgtggaaggccgtggcatgatcaagtacctgtagatcacccgctatggcatccgcagtcagcagtgcccagcacattatacaggacctgcatgggcccagggattgctggattactaagaagcatcctatcaccattccatggcaaacagcccggcatcaataattccttggatcttttttccaaatatttttcttgcctggtagggtgcagcatctgcgcttcagaaaccggttgatttgagcactatctatgagcatgtataaatatggtgcttttcaagcagagtggtgcctttatattgtataaaatatttgtcatgcttatgagttacagttaactctgtcta

SEQ ID NO: 145629 - DNA, 2175 bp, Zea Mays
ccttttcctccccgtcgcggcgtcgccggctcccacggtccaccgacgactcttcttcctcacctcctcccgctccagctccagctcgtctctctcctcgcctcgcgtagggtttcgcttcccgtctcgccgccgtcagcatgggggacaactacgatgacgaaggcgagccgatcgtgaacctcgacgaacgggaaccctcccctgagcatcagccgtacgaagacctcgatgacgacctcgacggcggcggcgattggacccgcgaccgctctccgacccccgtccacggcgacgacggcggggcagggtcctcctccaagccccgaaagcgccttctcaagaagggcggcggtggaggcatgcccggcgatgacgggctggatgactttgggttggaggacgaggacgcggacccttcggctgaggcgaggaagaggaagggctcgtcgtcgctgagggacctcgcgaggggcggggcgggcagggagaagaaggctaagaaaatgcggatggaggacgacgggagggggagggacactgggatggtgagggataggcggggatcaggaggaagggactcaggcggtagggatgaccaggatgatggggagagggagatccaggagctctgggataccattgctggtggtgagtcagaggatgaccaagaaggtgttagaaccgtagatgatgataatttcattgatgacactggagttgatccagctgatcgttatggcagcgataatgagcgacattcacctggacgttatgcacaggctgaggagggtgaggaggacgatgaaatcgaacgactcttcaagggtggtaagaagaagaagaagaagaatgatcgccctcgtgcagatattggccttatagtggaacaattcattgctgagtttgaagtagcagccgaagaagatgcaaacttgaataggcaatcaaaaccagccattaacaaacttatgaagcttcctctgctcatagatgttctctccaagaagaatcttcagcaggaatttcttgaccacggagttctcactcttctaaaaaattggcttgagccattacctgatggaagcatgccaaacatgaatattcgatctgctgtactgaaattattaactgattttccaattgacttggaacagtatgaccgaagagagcagcttaagaaaagtggtctgggaaaggtcattatgtttttgtccaaatctgacgaggagactactgcaaataggaaattggctaaggagctggttgataaatggagtcgaccaatattcaacaagagcacgagatttgaggacatgaagagatatgatgatgaaagagcaccttacaggcggccacaaatgaagaaaccttcatcgagtagctctggaatggaatccagagatgatgatcttgatgctgacttttcacaacgcaagtctgggcaaagtagttcaaggcagcacgcttctaggccggaagcctcgcctttggactttgtcattcgtccacagtccaaaattgaccctgagcagatacgggctcgtgctaagcaggctgtccaagaccagcgtcggctgaagatgaacaagaaattgcagcagctgaaagcgcccaagaagaaaaaccttcaggcgtcgaagctcagcgtggaaggccgtggcatgatcaagtacctgtagatcacccgctatggcatccgcagtcagcagtgcccagcacattatacaggacctgcatgggcccagggattgctggattactaagaagcatcctatcaccattccatggcaaacagcccggcatcaataattccttggatcttttttccaaatatttttcttgcctggtagggtgcagcatctgcgcttcagaaaccggttgatttgagcactatctatgagcatgtataaatatggtgcttttcaagcagagtggtgcctttatattgtataaaatatttgtcatgcttatgagttacagttaactctgtctatgttgtctcgatgtactaggtctcaagccctcttaatggagggttgtgatagggtaagcaagtcaacgttaaatctccataaaatgataggttaagcgagtcaacattaaatgtctccaatttaatggagatgaaatccgaaagaaaggattctgttgaggcgtaattcttggatccct

SEQ ID NO: 145630 - DNA, 1068 bp, Zea Mays
ataaagtaatcctctttattgacatgacattctaatctgatggagcaggatgaccaagaaggtgttagaaccgtagatgatgataatttcattgatgacactggagttgatccagctgatcgttatggcagcgataatgagcgacattcacctggacgttatgcacaggctgaggagggtgaggaggacgatgaaatcgaacgactcttcaagggtggtaagaagaagaagaagaagaatgatcgccctcgtgcagatattggccttatagtggaacaattcattgctgagtttgaagtagcagccgaagaagatgcaaacttgaataggcaatcaaaaccagccattaacaaacttatgaagcttcctctgctcatagatgttctctccaagaagaatcttcagcaggaatttcttgaccacggagttctcactcttctaaaaaattggcttgagccattacctgatggaagcatgccaaacatgaatattcgatctgctgtactgaaattattaactgattttccaattgacttggaacagtatgaccgaagagagcagcttaagaaaagtggtctgggaaaggtcattatgtttttgtccaaatctgacgaggagactactgcaaataggaaattggctaaggagctggttgataaatggagtcgaccaatattcaacaagagcacgagatttgaggacatgaagagatatgatgatgaaagagcaccttacaggcggccacaaatgaagaaaccttcatcgagtagctctggaatggaatccagagatgatgatcttgatgctgacttttcacaacgcaagtctgggcaaagtagttcaaggcagcacgcttctaggccggaagcctcgcctttggactttgtcattcgtccacagtccaaaattgaccctgagcagatacgggctcgtgctaagcaggctgtccaagaccagcgtcggctgaagatgaacaagaaattgcagcagctgaaagcgcccaagaagaaaaaccttcaggcgtcgaagctcagcgtggaaggccgtggcatgatcaagtacctgtag

SEQ ID NO: 145631 - DNA, 125 bp, Zea Mays
gcagaggtcttcctagccgctgcgggtctgcctcgcgtcgccactgcaccgacccgccacagccccactagcctgactccaccgccaccctaggtataacctctatttccgcatcatggtcgtag

SEQ ID NO: 145632 - DNA, 225 bp, Zea Mays
gttgcatctttgcggaccgctggcgacggcgaaatccaaagaattgaagaataccccatcggcacccatgtaattccttgtcatagaacccagaatcctgatggtgcaacagctgggccatttggtattctcccgccagaaaagaagagggttgttccttatgagcaccacacagtccacccttgtgctttacttgccacctgtcatgaacagactgtccactaa

SEQ ID NO: 145633 - DNA, 2212 bp, Zea Mays
ctagccagctcaggagaaactcagaatagtactatagccaagtccatccagtcctttcgcggcgtcttccttgctcaccgcggctccggcgatgtcggccgccggctcggcggctctacctctccgtctacaactgggtcgtcttctccgtctacaacagccgccatcatggagattcttcatgggcttgtagggttggtgaggtctccagtctctgcaactcttccacaaattggatccagattattcctcacgtgaggtgtcttgtggagttttcccgagacccagtcacatcttcttgctactgccctgatcataagctggtctgtcactgagatcatcaggtactctttctttgcaatgaaggaggcatttggatctgcaccttcctggttatcatggctttggtaaatttggatttttcctccgaatctggagagtaatcctaccacctttgccaaggaaatttcccttgaacgtgtttttgcgtactgatcgtctgcacgtacagcagctttatgctgttctatcctacttgtatctctagtgaagttggtctgatctacatggctttgccttacatgaaggtacaccgatcctactagaaaaccgaagaggtatagtatgcatgctgttcacatctcataactaccatttttaaccgttttttcttgtgggaccacaatttcaagcatcggtcttaggccctgtttgggagggcttcacttcaattattacagctttgattttgcagcttcacaatgaaagcctcaacagattagtcagcggtgttcaagagtgtttggtttgcacatacactctaccttttataatacagtaaatttgtgtgatttttccttaaatatccttgatgattagcgggtgaagaaagagatctaaatcgataagtcatgtaatcaatgtcatgttttttttttaaactatagccggtggaggtaaaatagacttgaaattcttgaagtgaagctctccgagccataagatgcgcaacacatggaacttgtcatacgactacttgtacccatctgttcttgccctcctggtttatgttccagttggattgcaaaagaccccttcgctaatcggaacaaaaaaaaatcccgttcgccggctcctcccgtcgtgccctcggatatatggccatcgattctgagttctggccacatcaatccccgggatttagaggctgtttgttcgtggctaaatatgtcacactttgattaagaaaggagaatttgctggccatatacttggatttagcgtgggtgcctgggtggtgtactggtgtctggtaaccagtagcggctagcaacagccgtcaaagccaccaccttaaagccatgggcagcagcatctcagggtcttcgtcttcctccctgcagcgcttcaatggcggcgggtgacgacgggtcggcggttcggcggctctacctctccgtgtacaactgggttagcttcttcggatggttgcaggtgctgtaccacgtgaccttggcgctgttgggtagcggccatcaggccgtctacgctgctgtcaaactgccactcctgttctcacaaactgctgccctagcagagattcttcattctattacagggctcgtgagatctccaatcagcgcaactcttccacaagttggtgcgaggatatttgttacctggtgcatcgtctggagttttcctgagacacagtcccatgtcctcgttacttccttggtcctaagctggtctatcactgaggtcatcagataccctttctttggcttgagggaggcatttgggatcacaccttcctggctcctatggctcaggtacagcacgttcactgtactctaccctgttgggctgatcagtgagctcggcttaatcttcactgccatgcctcacatgaagggaaggtccttctacatctgcgctgcactgaccactatctacattccagcgttcccgcacatgtacggtcacatgctcgcccagaggaagaagaacctgtccaaggcgaaagccgcatgacgctccagacgagcctaggcctcactgtcccagacggagagtaaccactgtctctaaccacgggatgtcagagtgcactactcttatcaggtggcaataacaccggggttgtaccaaggaatatactggatagctcttccatgggcaaatcaataataaataaaatcaccatttatat

SEQ ID NO: 145634 - DNA, 720 bp, Zea Mays
accctaaccattctacttctttccccaggcgccacaaaaaaatctggccggccgccaggatctattggccgacggcgcctctcctcctctctctgtattctattttctctctcagccacgcagaacttcagccgccataaaattctggttcctggccgaccaatcccttcagctgggctgtgcgccacagagagatttttgcttctcactgttctttttatttcttctggccgcactagtactcggccgccagggagaaccggtcaatggcactgtgcatttgaactcgaccggcactgtcttttctctctgttcttgccttcagctcaccgtctattcatttttttaaggcgttctgttcagccgtcggcaagctatcccttctctctctgttattgtgcaccgagctgctctctgtttttatttaattattccgagcagctcgtgctagtgacctcagccgctggccctatggagacttgaggaccggaccccgcagaccttgccgctggtgagctcatccccgcgcatccccgcgggcgggtgagccgctgtcggctgggagctgacgatggtccaaaacgtcgggtcgaaaaaattgagtcggttttataaccgtcttcaacctttgaactcggatctagtcctcatttactcgaatcctccactgtgaatgaatgtaagaaatggatctaatgtaatattcgggatcgagttatg

SEQ ID NO: 145635 - DNA, 471 bp, Zea Mays
gccgccgaaaaccagtaattttcggcggctaagtaagccaccaaaaataaagcatacattttggcgcttctacagagaccaccgaaaaaagcctatttttttttgtagccaacccaaatttattgtacagtcaccatttcctgatatgtatgcagctgggatactctatctcaggtggaaaggaaaaggtagtgaaaaggataggcgagagagagatcaggccagtgacgaagatgaggcagccacttgcaatccctgcatcctggattgcctttttctcaggtatgctgtggttggctttctagctagctagctccctttctaccttccatacaaggtccatccgtcaattatgctccatggatgtgtgcgctttccagattgtcaaattctcatgctttctttttcaagcggcacaagtagcatcgtattttatatcttagctgccactaatcttgattttgttctgtt

SEQ ID NO: 145636 - DNA, 2251 bp, Zea Mays
cgcgtcttttctcctcccttcccgtattttctgctccccccttctcccccgtcgccggcgagagctcgggcggaggcgccacagcacccgcaggagagcgtttctccccgggaaaaagggggccctccggagcggagggctctttcttcctctattccccaagggctgctgccgctggattgggctgaaagatctcggttctatttccgaaagaaggatttctcgtcgcgaatccggatctgtcggtggtgggaagttgcctcttttatgtggcgaggctgtgagaaacccgtgtgcctcccatggacgtgctgagccctgattggcgcaccaggcgagaaaggggcagcaggcagtaggtggtgacagagcaggaagacgagggagaggagacagactgtcggtatagaagacatcaagacaagcaggcgacaataggaaggacaaaggagaaggagaggagggagctctccatgggggagcccctcctcacctccctctccatggaaaacagcaacagccacccctgcacgctcctctccatggaccctgccggttcacgcccggcctctgctgagtcttcgggtggtggcggcgctgccaccaatggggttggcagtggtggtgatagggaactcttcatcgttccacggcgtgagtcggcgcacccaggcccgccagacatcaacctcccgctctctgcagatcccttaccgccacctccgtcgtggagcctcgacacgtttgacatacttgatgtcactcttggaacacacaattatgagtccgaggtcgcgcttacgcttccaaagtcgaccggcaacggcaatggcagtgctactgctactgtcagtgtcggcacgaggaagtgtgctaagagaggagacagcatctggggtgcatggttcttcttcaatcactacttcaagcctgctcttgtggagaagccaaaggggaaggtgacgcgagacgcgtctgggagcatctcgggcttcgacaagtccgatctacgccttgatgtcttcctggtgcagcatgacatggagaacatgtacatgtgggttttcaaggagcggcccgacaatgcccttgggaagatgcagctcaggagcttcatgaatgggcattccaagcacggggagccgtctttcccattcagtgccgataagggcttttccaggtcacaccgcatgcagcgaaagcaataccgggggctttcgaacccgcagtgccttcatgggattgagatcgtgggctcaccgaatttgtcagcagttcctgatgcagacttgaagaggtgggctgaactgacaggcagggaacttaatttttcaataccatctgaagccagcgacttcgaggcatggagaaatcttcccagcactgattttgaacttgacaggccacatccaccggcagcaaagagtgccactcatggatctcatagccataagaagggattgaatggttcaggtcttaacctttcaactccaccatcatcagacgatgggatggacctttcaccaaaatgtgccaaacgccgcaagggtttctttggccatggcgtagaggaggactgtgtgatggcaaacaattcttgttctgacagagagcaagaggtagaagctcacgcgggcgagccatcatggatgcacgagttcaccggtgttgccaagcacgcaagcgggcctgtcactgctgccaagacaatatacgaggacgaggaagggtacctaatcgtggtgagcatgcttttctccgacccgcatagcgtcaaggtgtcctggaggaacacgctcacgcatggcatcgtgaagataacgtgcgtgagcactgcccggatgccctacatcaagagacacgacaggacgttcaagctgacggacccttcccccgagcactgccctcccggcgagtttgtgagggagatacctctggccacaaggattccagaagacgcgaagatcgaggcgtattacgacgagacgggaactggactggaaatcatggtcccaaagcaccgggttggaccggaggagcatgaagttcgggtgtgcatgaggcccccgcatcttggcgacagcgatcttgtgctatcctagaacgaggaaaacaggtagctttcggattttccagtgccatgtttattgccatgagatactcgaacgtaacaggtggtgccatggatcagtgagagccatcatatttgctgctaaacatgtagcttataagttgagaaattcttttcctc

SEQ ID NO: 145637 - DNA, 2042 bp, Zea Mays
aacgacaacctccacctcgccttcaactcctccacgctcccgtcctctccacctctcgctcccacctcccccgccgtcaccaccaccaccacagcctctcccccgcaacgcgttccttcccggtgcatgaaaccctaaacctataccccactcccctccccgagccatcctctccccccgcggcgatggccaaggcgctgctctactcctccctcctccccgggctgccccgcgctgtcgggagcagccggagcgctgccgcgaggctgctgctgctcccgcctctccggctgcggcgcggccggcgcgccgcctccgcgtgcgcggtgagggcgggcctgcacgggctcgactccgtcggcgggccccacctccaggccgcgctggagcgcgccgaggcggcgctctacacgctcgccgacgcagcggtagccgcggcggacgccgccgcgggcgcgggggacgacgccggccaagctgcggcggcggtccagaagaacggcggctggttcggcttcatctccgaggccctcgaggtcgttctcaaggtgctcaaggatggtctctcagcagttcatgtgccgtactcctacggatttgccatcattcttcttactatcattgttaaggctgcgacattgcctttaaccaaaaagcaggtggaatcaactatggcaatgcagaatttacagccgcagcttaaagcaatccagcagagatatgcgggcaaccaggaaaggatacagctagagactgctcggttatacaggcaagctggtgtcaaccctttagcaggatgttttccaacattggcaacaatacctgtatggattggtctttaccaggcactttcaaatgtagcaaatgaggggctattgacagaaggatttttctggattccatcactgggtggtcctacaacaattgcagctcggcaaagtggtgctgggatttcgtggctcttcccatttgtggatggccatcctccgctaggctggtatgacacgatatgctaccttgtattgcctgtgctacttgttgcttctcaatatgtctctatggagatcatgaagccacctcagagtgatgacccgtcacagaagaacacactcctcgttttgaaatttcttccatttatgattggctatttctctttgtcagtgccatcaggattgtctatttattggttcacaaacaatgtcctcagcacagcacagcaggtttggttgcggaaaatgggaggagccaagcctgtagtgagtgagggggataggaggataattacagcaggacgagcaaaacgctctaatgctcaaccagctggagaaaggtttaggcagctaaaagaagaggagagcatgagaaaagtcaacaaagcactcgctgcaggagactcaaatgcatcgtcatcaacgtatgacatggaggatgaagagtcggatgacgagaccacagaagagggagggcccgtggaggaagcatccagtactggcagtgacaagaagcctccaagttactcagggaagaagggcaaaagatccaagaggaagcgcatggtgcagtgatcgtcacagctcaatcggatgcgattttcgccacaactggttgattcagttgaccagttaggtgccgcagtggatcacggagacagttttggcggtctgctggagccctatatttggggtgcagacaaaatgaacagcttccggggtcacaggtatttgctgctaagcttatgcaaatggaggtagctgagtatatatgctaggcctgagggtgagtgatggaccggagaacaggagtcgggtacgcgtgcaagcagagagacagggtctgtagaagtagataaggtgtaatctctcgtcaagctgggttccagaatctggattgtcctcaccattcgtatgcattgcattgtatttgctttcctcttgtaacctaatgaaccactgttttggagggtatgatcgcgcaagctgacaaccatccagtcgtatacaaatgagttcgaattcgtcttgtcagaactcgttaagagaatg

SEQ ID NO: 145638 - DNA, 1910 bp, Zea Mays
ctcctccacgctcccgtcctctccacctctcgctcccacctcccccgccgtcaccaccaccaccacagcctctcccccgcaacgcgttccttcccggtgcatgaaaccctaaacctataccccactcccctccccgagccatcctctccccccgcggcgatggccaaggcgctgctctactcctccctcctccccgggctgccccgcgctgtcgggagcagccggagcgctgccgcgaggctgctgctgctcccgcctctccggctgcggcgctctacacgctcgccgacgcagcggtagccgcggcggacgccgccgcgggcgcgggggacgacgccggccaagctgcggcggcggtccagaagaacggcggctggttcggcttcatctccgaggccctcgaggtcgttctcaaggtgctcaaggatggtctctcagcagttcatgtgccgtactcctacggatttgccatcattcttcttactatcattgttaaggctgcgacattgcctttaaccaaaaagcaggtggaatcaactatggcaatgcagaatttacagccgcagcttaaagcaatccagcagagatatgcgggcaaccaggaaaggatacagctagagactgctcggttatacaggcaagctggtgtcaaccctttagcaggatgttttccaacattggcaacaatacctgtatggattggtctttaccaggcactttcaaatgtagcaaatgaggggctattgacagaaggatttttctggattccatcactgggtggtcctacaacaattgcagctcggcaaagtggtgctgggatttcgtggctcttcccatttgtggatggccatcctccgctaggctggtatgacacgatatgctaccttgtattgcctgtgctacttgttgcttctcaatatgtctctatggagatcatgaagccacctcagagtgatgacccgtcacagaagaacacactcctcgttttgaaatttcttccatttatgattggctatttctctttgtcagtgccatcaggattgtctatttattggttcacaaacaatgtcctcagcacagcacagcaggtttggttgcggaaaatgggaggagccaagcctgtagtgagtgagggggataggaggataattacagcaggacgagcaaaacgctctaatgctcaaccagctggagaaaggtttaggcagctaaaagaagaggagagcatgagaaaagtcaacaaagcactcgctgcaggagactcaaatgcatcgtcatcaacgtatgacatggaggatgaagagtcggatgacgagaccacagaagagggagggcccgtggaggaagcatccagtactggcagtgacaagaagcctccaagttactcagggaagaagggcaaaagatccaagaggaagcgcatggtgcagtgatcgtcacagctcaatcggatgcgattttcgccacaactggttgattcagttgaccagttaggtgccgcagtggatcacggagacagttttggcggtctgctggagccctatatttggggtgcagacaaaatgaacagcttccggggtcacaggtatttgctgctaagcttatgcaaatggaggtagctgagtatatatgctaggcctgagggtgagtgatggaccggagaacaggagtcgggtacgcgtgcaagcagagagacagggtctgtagaagtagataaggtgtaatctctcgtcaagctgggttccagaatctggattgtcctcaccattcgtatgcattgcattgtatttgctttcctcttgtaacctaatgaaccactgttttggagggtatgatcgcgcaagctgacaaccatccagtcgtatacaaatgagttcgaattcgtcttgtcagaactcgttaagagaatg

SEQ ID NO: 145639 - DNA, 187 bp, Zea Mays
ttattttattttattttgtatgatatgtcgaccagtcataaaactctccgtcaagacttgtctaagagccatattaggatacagcggcaacttactaactagcagccaaaactatctccagcgtaccatggtaaaaaacatgtgttgaacttgaactactacggcagctttattttgcaaaccctac

SEQ ID NO: 145640 - DNA, 2446 bp, Zea Mays
gccacgtggttcagccacgcccgcgatctgagcagtgcagactgacccaaatgtttttcttacaatttgttagaagcataaaattattttagtttaaaatataaatagagtctgattttagtctaatccgatcctttaatttataggtctcatttcgtttttttaatttgtcgcttttttaaaaaaaattagcagatcagaagtattcgagaacgatagtataaaatttaaagtccatcattaggtggtaggtaccagtgtcgcgagggatcggagaatgtgtaccagtttctttatatatatataattggaatgcttcgcatgcgctagttttttttttctgccaaagtatttgccctgctctggaatctgtattaataattttagatagcagagccggcagcggcaggtaacccatctttatattggcaagttgcttcatgcttgtatcccgtcgttttgtgggacggcttcggaacattctccgtccagtgtcttttttaatcacataaaatatacacttaacgttccaagtgaaaaataatcaccgtctttggcacgtaatttccagcagtccggaaaattgtgcacggaaacatctctcaaaaaaaaagagaaatatttttttttgaacgaagcaaaacagcgcgctctttctgactgcagctctccgcgtgtgtttgtgctggtgccaactccaggacatgtacgcggcggacccggcggccaagtacaggggcgcgctggccgcgggcgtcccgggcgagctggcggggctccacgccgcgtggtcgcggtacgggcggctgccgtggcgggacctggtggcgccggcgatccgcctcgcgcgcgacggctacgaggtggtcccgtacctggcccgcgcgctgcaggagtgcgagggcgacgtgctcgcggaccccggcctgcgcgccgtgttcgcgccgggagggcgccgggtgctggcggcgggggagacgtgccgcaacccggcgctggcggccgcgctggagcgcgtggcggaggagggcgccgcggcgctctacggcggcgccgtcggggaggccctggtccgcgacgtcagggcggcgggcggggtcctgacggtggacgacctcagagggtacagggtggaggtgggcgccgccttgcgagccgacgccatggggttcaccttcctcggcatgccgccgccgtccagcggcaccctcgggatggcgctgatcctgaacatcctgcaagggtacagctcgctcgagttcttgaaggagctccttggcatccaccgcgtcatcgagtccatcaagcacatgctagccatccggatggacctcggcgaccccgacttcgtggacgtgaccagcgacgtcgccgagatgctgtccacgacattcgccgacaaagtccggcagaggatcgtggacaacacgacgttccctcccggctactacttccccaagtggagccagctggacgaccacggcaccagccacctgtgcgtggtggacggcgaccggaacgcggtggcgatgacgacgaccgtcaacgcatacttcggcgccaaggtgctgtctccgtcgacgggcatcgtgctgaacgacgagatggacgacttctccgtccccgcgaagcgcacgccggaccgcctcccgcccgcgccggccaacttcatagcgcccgggaagcggcccctgtcctccatgacgccgctgatcatactcaaggacggtgagctcgccggcgtcctcggaggcagcgggggcacgaacatcatcgccacggtggtccaggtgttcgtgaaccacttcatcgtcggcatggaccctctggcggccgtccagcatcccagggtgtaccacaagctgatcccgaacgtcgtgacgtacgagaaccagacagtgggcgacggcgaggtgatcgcgctgggcggcgcggcgagggcgttcctggaggagaggggccaccggcttcgcagcacggactcgggcgccgtgtgccagttcatcgtgcacgagctggcggagccgccggccgcgcccggacacggcgtcttccgcgggaggctcaccgccgtgagcgaccccaggaagggcggcagccctgcggggctgtgattgtgatggaggctggtgcgcgtggatagttgcgccttccgatccaactttcgtgcgtggatctcatctcctccctgtagatagatagaaagattcatagacatatcatgcattgtttcctgtccagcattcgcatggagagtagacgaaaaggacatatataattcatctcttgtttatgtatattgcctagatgggaatccatcaaactgctttcgtgaactagtggacatgcacgaccagtgaaagtttcgagaaacaatagtgaacatttgagagaatttatatgtaacaggtgacgagatttaatataatgtctatttgcaacaaga

SEQ ID NO: 145641 - DNA, 2556 bp, Zea Mays
gccacgtggttcagccacgcccgcgatctgagcagtgcagactgacccaaatgtttttcttacaatttgttagaagcataaaattattttagtttaaaatataaatagagtctgattttagtctaatccgatcctttaatttataggtctcatttcgtttttttaatttgtcgcttttttaaaaaaaattagcagatcagaagtattcgagaacgatagtataaaatttaaagtccatcattaggtggtaggtaccagtgtcgcgagggatcggagaatgtgtaccagtttctttatatatatataattggaatgcttcgcatgcgctagttttttttttctgccaaagtatttgccctgctctggaatctgtattaataattttagatagcagagccggcagcggcaggtaacccatctttatattggcaagttgcttcatgcttgtatcccgtcgttttgtgggacggcttcggaacattctccgtccagtgtcttttttaatcacataaaatatacacttaacgttccaagtgaaaaataatcaccgtctttggcacgtaatttccagcagtccggaaaattgtgcacggaaacatctctcaaaaaaaaagagaaatatttttttttgaacgaagcaaaacagcgcgctctttctgactgcagctctccgcgtgtgtttgtgctggtgccaactccaggacatgtacgcggcggacccggcggccaagtacaggggcgcgctggccgcgggcgtcccgggcgagctggcggggctccacgccgcgtggtcgcggtacgggcggctgccgtggcgggacctggtggcgccggcgatccgcctcgcgcgcgacggctacgaggtggtcccgtacctggcccgcgcgctgcaggagtgcgagggcgacgtgctcgcggaccccggcctgcgcgccgtgttcgcgccgggagggcgccgggtgctggcggcgggggagacgtgccgcaacccggcgctggcggccgcgctggagcgcgtggcggaggagggcgccgcggcgctctacggcggcgccgtcggggaggccctggtccgcgacgtcagggcggcgggcggggtcctgacggtggacgacctcagagggtacagggtggaggtgggcgccgccttgcgagccgacgccatggggttcaccttcctcggcatgccgccgccgtccagcggcaccctcgggatggcgctggtcagtgcttgctttgctcctgctctgcaaggggttcgatccaaacgcaagcgacgtgcacttatttgttcgtttcttggtatcatgcatttgtatgatgaccaatgcagatcctgaacatcctgcaagggtacagctcgctcgagttcttgaaggagctccttggcatccaccgcgtcatcgagtccatcaagcacatgctagccatccggatggacctcggcgaccccgacttcgtggacgtgaccagcgacgtcgccgagatgctgtccacgacattcgccgacaaagtccggcagaggatcgtggacaacacgacgttccctcccggctactacttccccaagtggagccagctggacgaccacggcaccagccacctgtgcgtggtggacggcgaccggaacgcggtggcgatgacgacgaccgtcaacgcatacttcggcgccaaggtgctgtctccgtcgacgggcatcgtgctgaacgacgagatggacgacttctccgtccccgcgaagcgcacgccggaccgcctcccgcccgcgccggccaacttcatagcgcccgggaagcggcccctgtcctccatgacgccgctgatcatactcaaggacggtgagctcgccggcgtcctcggaggcagcgggggcacgaacatcatcgccacggtggtccaggtgttcgtgaaccacttcatcgtcggcatggaccctctggcggccgtccagcatcccagggtgtaccacaagctgatcccgaacgtcgtgacgtacgagaaccagacagtgggcgacggcgaggtgatcgcgctgggcggcgcggcgagggcgttcctggaggagaggggccaccggcttcgcagcacggactcgggcgccgtgtgccagttcatcgtgcacgagctggcggagccgccggccgcgcccggacacggcgtcttccgcgggaggctcaccgccgtgagcgaccccaggaagggcggcagccctgcggggctgtgattgtgatggaggctggtgcgcgtggatagttgcgccttccgatccaactttcgtgcgtggatctcatctcctccctgtagatagatagaaagattcatagacatatcatgcattgtttcctgtccagcattcgcatggagagtagacgaaaaggacatatataattcatctcttgtttatgtatattgcctagatgggaatccatcaaactgctttcgtgaactagtggacatgcacgaccagtgaaagtttcgagaaacaatagtgaacatttgagagaatttatatgtaacaggtgacgagatttaatataatgtctatttgcaacaaga

SEQ ID NO: 145642 - DNA, 2349 bp, Zea Mays
cttctctggacgtctggtgggctatgtacggaacacttcagcatgcgacctctcctgcagcgggccggcccatttctacacaccagtccatcccgctttctgttcagagatctcggacgttggacctgaggcccgagccgggtagccgagcaaagcgagagctcccctctccctgtctcctcgtctgtgactgtgcgccgccatcgcccgtcgaccagcgccgtccgcccgctcgaaaactgagacgcacgctgcccgcgcatcgccgtggcctgctccagtctgtggaaaagtgacgaaccaactcggggaattctactctcgaggccgccacctccgcctccgcctccagccctccaccgactactgtctggaactggaagtgtaccactactattcaattggccctagccctcgcatagcacgatgccgccgccgctgcttgagttcgcgatcctcgccactgcctgcaggttcagcaagccccttaccgttctcaggaggcttggcgttcttggcccaccaaccgttcgacgcaatgccgcagaggcgttcgtgccttcaccgtttcgccaggttgtcgttcagagtggaaagcttcttgggacaccaaggttctgccacaccactgccggcatgtcagaatgtctcccggacgtctacgccagtcaggtactgaaggttctcaagtccaccagtgctgacaacacggatctcagcggtgctcttcatcagttcgcggtccacatggatgaggatattatcctcatggtcctccagaagcagcggtccaactggcaggtcgccctggcattcttcaactgggcggcaaccctgccggggtatgcccacgggtcaagggcctacaccgagatgctggacattcttgggcggatgaagaaggtcagacacatgaggcagctgtttgacgagattcctgaggagcgacgtcaggtggtcgtgacgaataagatgtttgccgtgctgttgaaccggtacgctggtgcgcacaaggtgcaggaggcgatagaggtgttctacttgaggaaggattacgggtttgagcttgacttggtcgggttccagatactactgatgtcgctgtgcaggtataagcatgtcgaggaggcggaggcgctgttccgtgagaagaaagatgagttcccgcatgtcacaaagagctggaacattatactaaatggttggtgtgtcaagggaagcctgagggacgctcaaaggatttggaatgatatcattgcatctaaggttgaacgagacctattcacctttggtacgttcataaacgcattggccaaaaatggcagaattagtgccgcggtgaagctgttcaaacagatgtgggagaaagggatcaatcctgatgttgcgatttgcaattgtatcatcgaccagctgtgcttcaagaaaaagattccagaagcacttgagatttttggtgagatgaatgaccggctttgtcaagccgatgtggctacctacaacactttgataaaatacatgtgtaagataaaaaggatggagaaagtttatgaacttttggatgacatggaagcaaagggctgccctccaaacaataggacatactcctacattctgaagacgactgagaaacccaaagatgtcattgccttgatgcagaggatggagcgaaccggctgcaaattggattctgatatatacaacttgatattgaacctttatatcaaatggaaatatgagaaggggatgcaacagatatgggatgagatggagagaagagggtcaggcccagatcagcggtcgtttactattatggttcatggtcttcattcccaaggcaagctcgatgaggctctgcagtattacacaacaatgaagtctagagggatgattccagaacctaggaccaagatactggtgaaagctatgcacatgaagaaggacggggctgccactgaagatgactcggcaagtatggcagggaagcatctaaaattggatcatcgttcaagactattcaatgttcatagatagtctgcttccaggtctttgttctataatctgagcaggggatgctgtccatataggtttatgggttgaaagaaagaaaaacagttcttttttctatgggtgtctaaatcacaatggctgcaccttgggctaaaaagaatcatcagcatagattcattggcaatatgatttctcagtaacttttgctcagactttcagtgccagggtatgtttttccccttcaaatatctaatataggatctgtattgcaagtactgttttttttttacatgcttgtagtctgaagtatatatacggatatgtcatggaccttcggtc

SEQ ID NO: 145643 - DNA, 3104 bp, Zea Mays
tctgatatcatgcatttggatggctgcgacctgtatcggcgtcctctctcttggctgcttctttgagcaagaaactccgagagcgacgacagaaaccaagcagttctcagtttcagctgtggcgacatggttggtgtttgtgtgcaaccacatttttgcatcggctatctcccagattctctctgggagagcatcctctgaaaacctgtgcaagtccaatgatcctctgaacatctcatcagttgggctccttcccgtgaacatctcaagcaacagtatgcccacgctataaacatctccaagagtcgaaacacaagacccttcaccgtactctgttatatatattacggaaaaaagaatcgatcaaaaaccaaccagttttatacaagaaacaaggaacaatgaatagaaacccaaacacacgtatagtttcagtcacctggagcaacgtagccgatggagcctcttattccagctgtgctgcttgaattctgcagggtgttacttcttgcaatctctggaaggatccttgatatgccaaagtctccgacccgggcactcatgtcctgtgcgagaaggatgttgcttggcttgagatcgcagtgaacgattggtggctgacagtggttgtgaaggtaatccagaccgtccatgacatctacagcaacgttgagcctctgtacgatgctaagagtgttactcactgtgggcatgctgctagtgctaggttttggatgaagccagtcacctaggctaccatttggcatgaactcaaaaaccagagccttgaactcccggccctggcggtcgatgctcgagcaacacgtgatgatcttcatgaggcaacggtgacgcacccttcgcagcgcctcgcactcggccacaaagcttctactagatccagattgctcgaggtcgaaaaccttgaccgcggcaagagtagtcccctcctcgtcttgaaaggagcatctatagactgtcccaaagcttcctctaccgagcaagttggtctctgaaaacccgccggttccgttttctaatgcatggtaagaaaccttttcgtactgttcctcgatcattggtggccggaacgagctctgcttgaccctttgtcgtctgcgcttccagtagatcaacccaaagacaagtgccataaaggccagaaacaggaacgctgatgttgttgctagagctatcgtaagagacttgacccgcctcttcttgcttcctttcttcagagagttcttgcggcatggctgtaaacgaagctgaggtatgccgccacaaagcccactgttcccggcgactgaaaagtttcgggaaatcctgaatattcctccctctggcacttggccttgtagactgttgaaggacagatctaactctgacagtgatgtcaagttctgcaacgacgttgggatcggccctgacaagttgttgtgtgctagatccagttgctgaaggttgcgaatggcaccgatgccttctggaatagtgccggatagcttgttcatggacaggttgagtgcgagtagatccgtcatattcttgagagactggggtatctccccctccaatgagttatcctccaaccaaagcccctgcagcatgatgcactccccgatgctgtcaggtagctcgccggatagctggtttccagatagatccatgctgttaaggttcaccaagctaccgacttgaggaggaagagggcctgacagcgagttagacgacaagtccaagtacttggagaggagtggcagttcgaaaacctctgcggggatcgaactgttgagacggttattagctagatcaagggatattaggttcttcagctgtccgaagctcgttggaattgcgccctccaggttggcatgctgcgcgtacagctcaatcaacctcgagaggtttccgatggatgtcggtatgaggcctgacacctgagtgttgtacagacctaaccgagccaagtttcctagcttgcccatgctgtccggaagcacgccggagacggacgtgaaccccagaccgaggagttcaaggctggccaggttgccgatggctgaggggatgcttccggatatcccgtcgttgtattctaaacggaggatctgcagggccgtcgtcgagaggttgcctaccgaacctggcagccgccctgtgaagctgttgtcggcgatgtttagatcctggagctgggtacagtttgacagggaagccatgaattcccacccgtttctgtcgtctgcttccagctcgttttggaacaagtacaggagctgcagacctctgagtctccccagcgccggaggcacgcgcccgtggagcatgtttacagagagctcgacccgctggagcgtcgtgaggttagtgagcgaagcggggatggatcccgtgaactggttccaagagaggctaaggatcgacatgctgggaaatctgctgccgatctcggcggggatggtaccattgagcttgttcgcttggatctgcagtctttccagcgacgacaggttgtacagagagcgtgggggctcgccggagaggtagttgaaggcgaggtcaagtctcgtgaggcctacgatgctgccgaggctacgagggatggcgccctgtagctggttgaatgcgagggacatgacacgaagcgacgacaggttgcctatggactccggtacggtgccagtgaggttgtttcgaaacagtatgagctcctcgaggcgtgcgagcttgttgccgagctcagagggcaggcctccgcggaggtggttggactggaggcgcaagtccaccaggctggtgcatgagcttaggttggcggcggagagcttaccggagaaggcgttgtagcttaggtcaagcgcacggaggtggcgcaggcggccgaggctcgcggggatggcgccgctgagggcgttggagctcaggttgagaagcctcagggacgaaaggttaccaaccgccggggagaggacgccggtgagcccgcgagagggtaggaacagcgccaccactcgacgccgcctgccgctgcctcggcacctcaccccttcccagctgcagtacccgccgccgccgcctgcgctaccgttccacgaggcaag

SEQ ID NO: 145644 - DNA, 240 bp, Zea Mays
agactggacaggatatcatgcatggccactaatgaattatcgatgaagctcttgatcgacaccaaagaggctcagaaagtctgctttgctgaggctgggaacgacgttgtcgtgttcctctccacgctcttgtgcctccctgtgactgtgagcaccataatcagcttggttaccaaggagcgaatggtagttacctattaaagctactgaacggatcaagggcaaatcagctataatctc

SEQ ID NO: 145645 - DNA, 2121 bp, Zea Mays
gtagatttttttttatatatatagcgggtctaaaatgtattttttcttatagcgggcctagaacgtgttgacccacaatagagaaaggcaccactgccgtttccgtcccgtttgcttacgtcaccaagccgccgagaaccagagacagacagagaagaaaaactgcagccgccgagctcagcctcagccgccgcgacggggacagggaaagatggccgacggcagtgcctccgcctcgccgccttccgtttctccgcaccagtaccaccgcgacgccatcaagtcctcagtgcgtaatacagctgctaataggaggagggaacatgccattgcaatagggaaagaaagaagggaagccttgatgcgtgcaaagcgtgtatgccgagctcctctttctggcagtgatgaggctgcaggagaagagggtgacatggttgttgatgaggagaaagcagatcttgagactagaacgactcaggctgttgaggagctgaaatctgctttgtcaagccagggaaaaggtgcacagaataggaagacagaagtgcttcgtgctttaaggcgtttgttgtcccagtctgaagtacctccagttgatgcagcaattaaagctggagcagtccctctattagtgcagtctctgtcatttggatcgccagatgaacaattgctagaggcagcttggtgccttacaaacatagcggcagggaaacctgaggaaactaaatccttacttcctgctctaccattgctcattgctcaccttggtgagaacagctctacacttgtcgcggaacaatgtgcatgggccattggtaatgttgctggtgaaggagcagagctgagaaacacattacttgctcaaggtgctttgtggcctcttgcccgtttaatgctgtcaaataagggttccacaacaaggactgctgcttgggcattgtcaaatctcatcaaggggcctgattccaaggctgcgaatgaacttattggtatcgacggcatactgaatgcaatcattcggaacttggaaaaggcggatgaagaacttgtaactgaggtggcatgggtggttgtctatctttcagcactttcagaaaaagctaccagcctaatagtaagaagttcgatgccacagttgctgatcgggcgccttctagcatctgaaaacttgcagttgctcattccggtacttcgcggtttaggaaatcttgtagccggtgatggttacatggttgattcagtccttattgttggaaacagtgtaacagatcaagccttatcaagtcttatcaagtgtttgaagagcgaccatagggttctcaagaaggaggcatcatgggccatgtcaaatatagcagcgggcagttttgagcataagaaactgatatttggtagtgaggcgactcctttgctgatgcacctcctcaggactgcacagtttgacatccgcagggaagcagcatacacgctgggcaacctgtgtgttgtcccagcaggcagtggtaaccccccaactataatcgttgagcatttagttgccatcgtagatggtggagcccttccaggatttataaatttggtgaggtcggccgatatagagagtgcgagacttgggcttcagttcctggaactggtgatgagaggataccctgacagccagggcccaaagctcgtggagacagaggacggcattgaggccatggagaggttccagttccatgagaacgagatgatgaggaatatggcgaatggtttggttgataaatactttggcgaagactatggcctgtgagttgtgccgccgatacatctgggtaaacgtggagctatttgtgggtttgaaatgtaacgatcctggaacagaaggatgcgccgttcatcatggtttccatgtaatttagcccctaatatatagctggaaatgtgaatgtgttgaaactgaccgtgagctggagatgttaagtgtggataccttagatagacatagactgacatcttgcacagtgcttcctctatctcaaaatattttttcgtctcgtattttaagtgtggaaatgttggagatgctcttagagtacaaatatatgactgattaatctgatgatgtttataatgtaccat

SEQ ID NO: 145646 - DNA, 975 bp, Zea Mays
taaagaagacgtatcagtatcaccgttgttgcagtagcatgacaaattctagcaccaaccaaacccatttatcagctaaaaaaaccctggtgggctataggactaggaggcagcagcagtggttttgatctcgtctcttgctcgcatttcgtcgagcacgtccctggcgggcggtgagaccgtggtctcccattccgcgaagtcctcctccacctccgccgcctcctcctggaagcccagccgcttcatcccccgcgccatcaccctgtacacgtacgcgtccacgttgaggcctcccttcctgacggccgcctcgtacaccctccacgccgcgcggcccctgcccttggccaccagcgcgcgcagcagcctcgtgagcttgtacacgtcctcctccccgtccacgaacccgccgccgctcgccttctcctccaggaacgcctccacgagcgcgtcaacggcggcctcggcgtctccctcgccgccggagggcgagtgcggcgcggaggacacgaaggtggcgtacagcgccgggtctgggcggtaccagggctcggcgcgggcgatgtggagcgcggcgagggcgagggaccagtggccctgccgctggagctcggccatggcggccacgaggtcggccttgaggaggcggcccagggcggtggctgctgcggccgaggcagccgccggcgagcggtcggcggaggtgaggcgcttcagggattggatcgccaggatggcctccgtggagagggagcggccgcgctggaggggcccgcggttgtcgcgcggcccgcaggtgatggacacgggcctaggcttgtgaccggcactgggtcctgggttggaacatgggctccgggtgaggcgcgggaccaagaggagagacgccattggagcggaagcagggaagccacgaagcggtaggagaaagagaacagaggaagtcagtggatgctgcggattttgggttcc

SEQ ID NO: 145647 - DNA, 1908 bp, Zea Mays
ctccccaaaattctcatctagtcaccggccattcggttgtgtccattggctgtcagtcacttccagtcctagccaactcctccgatgctccaatcatcaacactctctacctgtgtccgtgtgctctgctactctgcaccaccaaccaaccagtgctgccctccgccgatccactgacctaccgcgagcgccaatggcgaccgccgcggtcctggccgccacattagcgctgttcctccgcgccgccgccgcaacggccgcgacggctgcggcggaggcggaccggatcggcaggctgcctggccagccgccggtcaacttctccatgtactccggctacgtcaccgtggacgcggcggcggggcgggccctcttctactggttcatcgaggcggccggcgtgcccgcggagtccgcgccgctcgtgctgtggctcaacggcgggcccgggtgctcctccgtcggctacggcgcgtcagaggagctcggcgccttccggatcaacgccgacggcaggacgctctacttgaacccctacccctggaataaagtggcgaacatgctgttcttggactcgccggccggcgtcggctactcatactccaactccacctccgatctgtacactgctggtgacaacaagacagcccatgactcgtacaatttcttggtgaactggctggagcggttcccacaatacaagcatcgcgatttctacatcacaggagagagctacgcaggccactacgtgcctcagttgtctcagctagtctaccggaacaacaaaggcatcgagaagccgatcctaaacttcaaaggcttcatggtcagaactcagatctttatgaatctgtatcttttactgatgttctgcttgctcatttctgttgaaatgataggttggaaatgcggtaattgacgattaccacgacttcatcggcacattcgagtacttgtggacgcacgggctgatctctgacgaaacctacgagaagctgcggcttgcctgccagttcgacgtatctgagcatgcgtccaaggagtgcaacaaggtcttcgacatcgccgaggccgaggaaggcaatatcgatgcgtacagcatctacacgccgacttgcaagaagacttcactccacaagcgcaggctaatcagaggaagaacgccctggttgcccagagggtacgatccctgcacggagaagtactccacgaagtactacaacttacctgaggtgcagagagctctgcatgccaatgtcaccggaataccgtatccctgggtaacctgcagtgacccagtgtatgatttttggaaagattcaccgaggtccatgcttcctatctaccgtgaactcatcgccgcgggcataaggatatgggttttcagtggcgacgctgattccgttgtcccgctcaccgcgacaaggtactccattgacgccctctttctaccgactatcacgaactggtatccttggtacgacgacgaagaggtcggtgggtggtgccaggtgtacgaggggctgacactggtgacggtccgaggcgcagggcacgaggttcccctgcaccggccgcggcagggcctgaagctgttcgagcacttcctgcggggtgagcccatgcccaggcctgtagatagcgtccagtcgttttagaactggttgctgtctccccgcttggtgaaggaggagacctggctgcgctgcgcattcttgttgctgtaaactcatccgttgccacattttactggccaacgtggtttgcttgttcaataatcaacattaggccagccgtcacactccgctgttaggatagactttgctgaaaatcagaacgtaatgttgctcgtttcagtgagcagattgggtatttagcaatgtctcgttttgacagtaaaccatgctt

SEQ ID NO: 145648 - DNA, 1875 bp, Zea Mays
ctccccaaaattctcatctagtcaccggccattcggttgtgtccattggctgtcagtcacttccagtcctagccaactcctccgatgctccaatcatcaacactctctacctgtgtccgtgtgctctgctactctgcaccaccaaccaaccagtgctgccctccgccgatccactgacctaccgcgagcgccaatggcgaccgccgcggtcctggccgccacattagcgctgttcctccgcgccgccgccgcaacggccgcgacggctgcggcggaggcggaccggatcggcaggctgcctggccagccgccggtcaacttctccatgtactccggctacgtcaccgtggacgcggcggcggggcgggccctcttctactggttcatcgaggcggccggcgtgcccgcggagtccgcgccgctcgtgctgtggctcaacggcgggcccgggtgctcctccgtcggctacggcgcgtcagaggagctcggcgccttccggatcaacgccgacggcaggacgctctacttgaacccctacccctggaataaagtggcgaacatgctgttcttggactcgccggccggcgtcggctactcatactccaactccacctccgatctgtacactgctggtgacaacaagacagcccatgactcgtacaatttcttggtgaactggctggagcggttcccacaatacaagcatcgcgatttctacatcacaggagagagctacgcaggccactacgtgcctcagttgtctcagctagtctaccggaacaacaaaggcatcgagaagccgatcctaaacttcaaaggcttcatggttggaaatgcggtaattgacgattaccacgacttcatcggcacattcgagtacttgtggacgcacgggctgatctctgacgaaacctacgagaagctgcggcttgcctgccagttcgacgtatctgagcatgcgtccaaggagtgcaacaaggtcttcgacatcgccgaggccgaggaaggcaatatcgatgcgtacagcatctacacgccgacttgcaagaagacttcactccacaagcgcaggctaatcagaggaagaacgccctggttgcccagagggtacgatccctgcacggagaagtactccacgaagtactacaacttacctgaggtgcagagagctctgcatgccaatgtcaccggaataccgtatccctgggtaacctgcagtgacccagtgtatgatttttggaaagattcaccgaggtccatgcttcctatctaccgtgaactcatcgccgcgggcataaggatatgggttttcagtggcgacgctgattccgttgtcccgctcaccgcgacaaggtactccattgacgccctctttctaccgactatcacgaactggtatccttggtacgacgacgaagaggtcggtgggtggtgccaggtgtacgaggggctgacactggtgacggtccgaggcgcagggcacgaggttcccctgcaccggccgcggcagggcctgaagctgttcgagcacttcctgcggggtgagcccatgcccaggcctgtagatagcgtccagtcgttttagaactggttgctgtctccccgcttggtgaaggaggagacctggctgcgctgcgcattcttgttgctgtaaactcatccgttgccacattttactggccaacgtggtttgcttgttcaataatcaacattaggccagccgtcacactccgctgttaggatagactttgctgaaaatcagaacgtaatgttgctcgtttcagtgagcagattgggtatttagcaatgtctcgttttgacagtaaaccatgcttcagtttttgtgattttttttttccggtagaaggacgtttt

SEQ ID NO: 145649 - DNA, 1883 bp, Zea Mays
ctccccaaaattctcatctagtcaccggccattcggttgtgtccattggctgtcagtcacttccagtcctagccaactcctccgatgctccaatcatcaacactctctacctgtgtccgtgtgctctgctactctgcaccaccaaccaaccagtgctgccctccgccgatccactgacctaccgcgagcgccaatggcgaccgccgcggtcctggccgccacattagcgctgttcctccgcgccgccgccgcaacggccgcgacggctgcggcggaggcggaccggatcggcaggctgcctggccagccgccggtcaacttctccatgtactccggctacgtcaccgtggacgcggcggcggggcgggccctcttctactggttcatcgaggcggccggcgtgcccgcggagtccgcgccgctcgtgctgtggctcaacggcgggcccgggtgctcctccgtcggctacggcgcgtcagaggagctcggcgccttccggatcaacgccgacggcaggacgctctacttgaacccctacccctggaataaagtggcgaacatgctgttcttggactcgccggccggcgtcggctactcatactccaactccacctccgatctgtacactgctggtgacaacaagacagcccatgactcgtacaatttcttggtgaactggctggagcggttcccacaatacaagcatcgcgatttctacatcacaggagagagctacgcaggccactacgtgcctcagttgtctcagctagtctaccggaacaacaaaggcatcgagaagccgatcctaaacttcaaaggcttcatggttggaaatgcggtaattgacgattaccacgacttcatcggcacattcgagtacttgtggacgcacgggctgatctctgacgaaacctacgagaagctgcggcttgcctgccagttcgacgtatctgagcatgcgtccaaggagtgcaacaaggtcttcgacatcgccgaggccgaggaaggcaatatcgatgcgtacagcatctacacgccgacttgcaagaagacttcactccacaagcgcaggctaatcagaggaagaacggtattacgccctggttgcccagagggtacgatccctgcacggagaagtactccacgaagtactacaacttacctgaggtgcagagagctctgcatgccaatgtcaccggaataccgtatccctgggtaacctgcagtgacccagtgtatgatttttggaaagattcaccgaggtccatgcttcctatctaccgtgaactcatcgccgcgggcataaggatatgggttttcagtggcgacgctgattccgttgtcccgctcaccgcgacaaggtactccattgacgccctctttctaccgactatcacgaactggtatccttggtacgacgacgaagaggtcggtgggtggtgccaggtgtacgaggggctgacactggtgacggtccgaggcgcagggcacgaggttcccctgcaccggccgcggcagggcctgaagctgttcgagcacttcctgcggggtgagcccatgcccaggcctgtagatagcgtccagtcgttttagaactggttgctgtctccccgcttggtgaaggaggagacctggctgcgctgcgcattcttgttgctgtaaactcatccgttgccacattttactggccaacgtggtttgcttgttcaataatcaacattaggccagccgtcacactccgctgttaggatagactttgctgaaaatcagaacgtaatgttgctcgtttcagtgagcagattgggtatttagcaatgtctcgttttgacagtaaaccatgcttcagtttttgtgattttttttttccggtagaaggacgtttt

SEQ ID NO: 145650 - DNA, 1960 bp, Zea Mays
ctagtcaccggccattcggttgtgtccattggctgtcagtcacttccagtcctagccaactcctccgatgctccaatcatcaacactctctacctgtgtccgtgtgctctgctactctgcaccaccaaccaaccagtgctgccctccgccgatccactgacctaccgcgagcgccaatggcgaccgccgcggtcctggccgccacattagcgctgttcctccgcgccgccgccgcaacggccgcgacggctgcggcggaggcggaccggatcggcaggctgcctggccagccgccggtcaacttctccatgtactccggctacgtcaccgtggacgcggcggcggggcgggccctcttctactggttcatcgaggcggccggcgtgcccgcggagtccgcgccgctcgtgctgtggctcaacggcgggcccgggtgctcctccgtcggctacggcgcgtcagaggagctcggcgccttccggatcaacgccgacggcaggacgctctacttgaacccctacccctggaataaagtggcgaacatgctgttcttggactcgccggccggcgtcggctactcatactccaactccacctccgatctgtacactgctggtgacaacaagacaggtgaattggcagagtggtttagacatttgtctagttctaggactctacatgtattcattatcctgctgctggctgttgtgattcttgctcttgcgaatttttccggctaacgctcttctgcagcccatgactcgtacaatttcttggtgaactggctggagcggttcccacaatacaagcatcgcgatttctacatcacaggagagagctacgcaggccactacgtgcctcagttgtctcagctagtctaccggaacaacaaaggcatcgagaagccgatcctaaacttcaaaggcttcatggttggaaatgcggtaattgacgattaccacgacttcatcggcacattcgagtacttgtggacgcacgggctgatctctgacgaaacctacgagaagctgcggcttgcctgccagttcgacgtatctgagcatgcgtccaaggagtgcaacaaggtcttcgacatcgccgaggccgaggaaggcaatatcgatgcgtacagcatctacacgccgacttgcaagaagacttcactccacaagcgcaggctaatcagaggaagaacggtattacgccctggttgcccagagggtacgatccctgcacggagaagtactccacgaagtactacaacttacctgaggtgcagagagctctgcatgccaatgtcaccggaataccgtatccctgggtaacctgcagtgacccagtgtatgatttttggaaagattcaccgaggtccatgcttcctatctaccgtgaactcatcgccgcgggcataaggatatgggttttcagtggcgacgctgattccgttgtcccgctcaccgcgacaaggtactccattgacgccctctttctaccgactatcacgaactggtatccttggtacgacgacgaagaggtcggtgggtggtgccaggtgtacgaggggctgacactggtgacggtccgaggcgcagggcacgaggttcccctgcaccggccgcggcagggcctgaagctgttcgagcacttcctgcggggtgagcccatgcccaggcctgtagatagcgtccagtcgttttagaactggttgctgtctccccgcttggtgaaggaggagacctggctgcgctgcgcattcttgttgctgtaaactcatccgttgccacattttactggccaacgtggtttgcttgttcaataatcaacattaggccagccgtcacactccgctgttaggatagactttgctgaaaatcagaacgtaatgttgctcgtttcagtgagcagattgggtatttagcaatgtctcgttttgacagtaaaccatgcttcagtttttgtg

SEQ ID NO: 145651 - DNA, 372 bp, Zea Mays
gagctccagccactgcttcgtgggcctcccctgcagcttctccttccgcgcctgagccgtgccgtcggggaacctgagccgcaggttcaccggcaccgaccacccgtacgccggctccgtgagcatcacctggaaggccacgtcgtagctgcaccccggcgtgaggtgcgacagctccagcctcccgtgcacctccagccagcacacgttctgcagcgacgcagcctcgacgatctcggccacgtacttggtttctctgacgggatgccagatccagtatctgggatcgtcgccccaagtgatggacagcgctctagcgaacagcacgaagcagttgcacctggtcttctcgtccacccagtacttctgcat

SEQ ID NO: 145652 - DNA, 147 bp, Zea Mays
atggggtcgaagaacgggaacgtggtacgcggtacgctactaaaactaggatttaacactactggaacgagattgttcccacgttcccggaacggaacgaatgttcctggaacgaggaacgtggccaagttcccagttcccggttac

SEQ ID NO: 145653 - DNA, 627 bp, Zea Mays
atggcgccatggcgggtcagacgggaagatcccgttcggattaggggggaaggcggtgaggtcggaggcggctggggaggtggattagaggtggaggtggtgagggcgccaagcgcatcgcaaagacgaacaggaatgggtgcgggatgggagagggtccggacgatgctggaactcgggggcgggggcatatggaggtgtggatgtgagcggagcggagacggaccttccatcgaccgcgcagaggctgcctttccatcgacccagcgccattatagttgggtgaggaggcgagaaggcggggtgagggcaagggtggaaggcagcgctgatggcgtgggtggaggaggcgagatttccagggggggcgagggagcgcgactgaccgtggtgaaagagcgcgatttgtgggggaggcatctgtgcgcggagggagcggcggtgggggaggcgcggtggcagaactggcgcacaggtgtgtggacggggggaggggaatgcgggcgcggcggggactgcgggcgttgctggcgcgaggacgacggcggggactgcggacgtggggaggagaatcggaacgcgcgatggcagaacacacaactgtggacgcctacactaaacacataa

SEQ ID NO: 145654 - DNA, 270 bp, Zea Mays
atggagaaggcggcgggcgtgagcgcggcgaggctggccgtggcggcggcggcggtgctgctgtgcctgctgctgctgctggcggcggggccgcagggggtctccggcgccgacgggaggaggaagacggcatcgccctacgataagttgatcagctgcagggtgctgggcaactgcgacaagaacaagggcccggaggccacccgccccgggaagccggtcaacaagtacacccgcggctgcagcaagatcgacaagtgccgcgactga

SEQ ID NO: 145655 - DNA, 895 bp, Zea Mays
gatctggtttgctccgcgtcgtcgctccctggacgtcgccgccctagtggttcgcttcgccgcttctcgcgctctccggcttctacgctggtggtcggttgttcgagagcggctccggcgggcggcgtagatcggcggtccaggtggtgtattagacatgtctttcaggaagcgccaaccttccagtaacggagcttccattaatttagctcccctgggttttccaagtcaggaacttgagaaggttaatcctgtaaattcagtgatgtcaaccgattttgaatccatggatggtgttgatattgatatgagggaagtttactttctcattatgcattttttatctcatggtccattcaaacggacctttggagaattgtgcaatgaactcctagaacatcaactgctacctagaagataccatgcttggtattcacgtggtggtttccatagtggcgaagaaaatgatgatggcatatcactccctttggattatgtaaagctagctgagaggtacccccacattggtaaagaccacttggtgaagctattaaagcaactgatggctagttcttatcacccacacaacttgattggaagagtttctccaaatgctgctgatgtcccaacacttcttggctccaactccttttcacttcttccatctgacaggcaagataagggaactcccaggctgccaagttatcttcgttggcctcacattcagactgatcaagttcatggtctaagtttgagagagataggtggtttcactaagcattgtcgagctccctctgtacgtgcatcttgctatgccatcgcgaagccatccacccttgttgaaaagatgcaaatcataaagagattgagggggcatcaaaatgctgtgtattgt

SEQ ID NO: 145656 - DNA, 557 bp, Zea Mays
atgtgcagttgcatcaagatctttttcatctgattccagtcatacctctaaggaagaaaatagcctgaagttaagaaattcttggttcacgcataatattgttacctgctcccgtgatggcagtgcaattatatgggttccacgatctcggaggtcacatggaaagattggacgttggacgcgtgcttaccatcttaaagttcccccacctccaatggctcctcaaccacctcgaggtggtcctcgtcaaagataccagccaactcctcgtggtgtcaatatgatagtttggagtctggacaaccgctttgtgcttgctgctatcatggattgcagaatttgcgtatggaatgcttctgatgggagcttggtgcattcactgattggccataaggaatcaacgtttgtgctagatgtgcatccgttcaatcctcgtatagcaatgagtgctggatatgatgggaagacgatcatctgggatatatgggaagggaaacctgttcagatctatgaaacaggacaatttaaactagttgatgggaagttctctccgtaag

SEQ ID NO: 145657 - DNA, 3057 bp, Zea Mays
atggagctcgtcggggaccacctccatgggagcacactggatttggcctggcctccaatgacccacaatgatgacacgaccgaaacacagcttgcaccatacaggagaaatatgcaagaccttttgtgcgacgctggtatgataccatatccagagcccttccagagtatgtaccagaaacgccggttgggtacccttggtctcgagtggcggcctccctctgtaaattttgctgttggccccacttacaatgcaacaactggtgaataccaaactatcccaattattgatccggataggtgggaaccgcttccagagataacagatttcattgagcttgaacctgaaaatgaagttatctctgacgatactgattctgagtacaatggcatggatgagtattcaagtgaaggagaacaggatattatgagtggtgattcttcaggtacttcatattcgagtggagaaattgatgcagataaccctgatagtgctcatctccgccgatcaagaagaaagaagaaaaaatctgaggctgatcttgttacttcatctggtcggcgagtcattaggaaaagatttttggatgatcctggtgtagccacagtgtcaaggccacatagaggaaggaaatctaggaatggatgttctagtaaaaagaaaagatcccctaaatccaggggtttgcgacctcggagacgtgctgctgaaaccgcattaattactttcccaaagaaaggagtttcaacagaagaggatgaagatgactccgagagtttctcagatagtgaattgaacacggatagcactgaagctgaacagttagaatggagtggtcagttaagaactagaagagagattaactccccatttgacatcgatgatgttacagatccttctcagtttactgataataaggaaaattctggaactggtaagaaactagttctcagaataccacgacgtgatttaagaactcaatttcctttaggaagcggaaaagcagaatgctccatacaggataaagcagtgaagtctctttctctagctaatcatgaaccagttgagcacgaactgactattgaaccaggacattcccctgcctccaaggctgaattaacaattgatggtgatctgcatgatagttctgctgtttgcagtaataactcaattaggtggggtgaggttaagatgcgatcctcaaagcgttgcaagtacagtgagccagctggaggtttgtggtcctcttcaaataacgttgctttgcaggatatcgagggatcgagcagtcagcagatacctcatgaatatggcgatggcatccagccaagtgttgtgcaaaacgtacaagaagtgcaacatggaacaattctagataacattccggaaaacaacagtactgatgaacacactagagaaaattttggggatttagaaaagatagctaacaatattaatgctcatgcagacggagtgaatgacactgtacaagttcccaatacttctcagcctcaactaaaagttaagtttaagtcaagaggctctgcagatgcagtaggaaatatcatgaactccaagcatgtcaaagattcagtgcagtgtggcgatgattcttccatcaatcaaccaagaaatgctgacttctatattgtgcccaaaagttctcaggaatgcctagataaaagcactagtttgcatgattcaaaaaaaccgtacttggatgcttcaaagaagtacactgcagtgtacaaaaggtcaaagcgaaagaacaagaaaaaaatggattcagatgaatgtccgaacgaggatagcacttctatctccaatgacgatggtggataccaacctgcagaatacagtcctgttgcagctgcaagcagtagattgagaagaagtgctaggaagtcatttgcatacaatatcaatggtacaacacaggatgatatctcggaagtgaaagtttcttacggttcccatgaagcatcaactagtggaagacgagttgtcacagatgtgcgtgaagggatgtggcgacaaaactcaagaagtgttggtttaaggtctgctaggaacaaaagagaaagtaacagcttccttgatacacatccattgggtagaaggcaccaggtttcttttaagtattcatggttaatgttgcttgagcatgaagatagctaccgttatattcctcaactcgatgatgaggttatgtacttggggcagggccatgaggaatatcttaaacaagtgcaatcatctgaattttgcccttggaaccggataaaaggacttaaagctgtagaactttgcaaaatacagggtcttgattatgccacctacagaggatctggtgaaagctgctgtaaattaaccattgaatttgttgattgcacgtccagtggatttggcaaaacatttatgatcacgttgcgtgagctggtcaactttccagattttcttgtggagagaacaaggtacgaagctgctatggagcggaactggacccacagagacaagtgcaaagtctggtggagggacgaagaaggacaggtaggaggaacttggtgggagggacgggtgatggcagtaacacctaaatcacctgattttcctgagagtccatgggaaaaatatgtcatacagtataaggaggatggttctgatcacgctcatagcccctgggaacttcatgagacaggcagtttatgggatccatggaaacatccacatatggatctcacggttcgagataaattgttatcagaaatggaaaatttacaggaaatgtcacacagggatcaggatcattatggtgtttttaaactggacaaggttgcagaaaagtcagatttcatcaacaggtttcctgttcaattttctattgaggtgatcaaggcaagattagcgaacaaatattacagaactctgggggctgtcagacatgataccactgtgatgctttcaaatgcagaatcttacttttcaaagagcagtgaaatgaccaaaaagatccgcaagctctctgagttgctcgaccagatcttttcatcactgtag

SEQ ID NO: 145658 - DNA, 100 bp, Zea Mays
gagacattaatgttgatgctatccatgatcacctagctttaattaagaaacaaaatgatcacatagctcaacttaatgctaagattaatgagcatgactt

SEQ ID NO: 145659 - DNA, 540 bp, Zea Mays
gtttatgcatccgggggctcaacttggatcatcgatagcgggtgcacaaaccacatgacaggggagaagaagatgttctcctcccacgagaaaaaccaagatccccaacgagttatcacattcggggatgggaatcaaggtgttactgtctttagaagaagtgatgattcaatagcatttaagggagtgttagagggtcagctatacttagtagattttgatacagctgaactcaacacttgcttaattgctaagactaacatgggttggctctggcatcgccgactagcacatgttggaatgaagaatcttcacaagcttctaaagggagaacacattttgggactaacagatgttcattttgagaaagacaggatttgtagcgcatgtcaggcagggaagcaagttggtattcatcatccacacaagaacatcatgacgtctgacaagccactcgagctcctacacatggacctattcggcccaatagcttacataagcatcagcgggagaaaaatctcataccccaagagaccttag

SEQ ID NO: 145660 - DNA, 1698 bp, Zea Mays
atgtcagcgtcttacggatccgaagactaccgcggcggcggcggtggcggaggctacggtggccgaggtggcggcggcggtcgtgggcgcggaggcgggggaggatatggaggtggcggcggtggaggaggatatggaggtggcggtagtggaggctacggcggcggcgggggtggaggtggccgaggcagtggcggcggagggttcggtggtggaggacgaggaggtggtggaggtggccgaggcggtggcgggcgcgggggtggacgcgaaggagactgggtttgccctgacgcgagttgtggcaatgtgaactttgcgaggagggctgaatgcaataagtgtggagcaccttgcccaagtggaggtggtggcggcgggggtgggggttataatagatctggtggaggtggtggaggatacaaccgtggcagtggtgattatggttctggaggtggtggtttcgaccgagatggtggagactataattctggtgggcgtggtggtggaagcgggggtggaggaggctacaatcgaagtggtggcagtgaccgtggttttgatgaccaccgtggtggcagaggtggcagctatgggggacgagatcaggagaaccaaaggggtagtgaaggtggctacagtgctggtggctatgggcaagctcctccacaagctcctccttcgtatggtggtcctgcgggtgattatgcagcacctccgagctcctatggaggcaacaatgcttatggttcagattctgcagtgccgcctcctaatagctacagtggtggcccaggctcatacccaccaagctatggtgccccgcctccacaccaatatggtggtgccccaggggggcaagggggtctgcctcctacatatgatggtggatatggtggtcggtccatgcctgggggtggaggatctgggggtgcaccaccgccttatcatggtggcggcagcggttatactggtagtgctgaccctgaaccagctggaaaagttaagcagtgcgatgaaaattgtgacgagacatgtgacaacgcaaggatttacatctcaaatttgcctcctgatgtcactgttgaggaattacaagagctatttggaggaatcggccaggtcggaaggatcaagcaaaagcgtggttacaaagatcagtggccttggaacataaaaatctatgctgatgactctggaaaagccaaaggagatgcttgccttgcttatgaagatccttctgctgctcattcagctggtggattttacaataattatgacatgagaggttataaaatcagtgttgtgatggctgagaaatcagcacccagagcggcaccctcatatgggcatggcggtggtcgtggtggtggccgcggtggtggtggacgcagggataattacagagatggcggggggcatggacccaatagaaaccagggtggtggttcacgttcacgaccatactgaaaacaaaacaattgttgttactgtgattgtcatctatgagaaaccatttctattcctgttatacagatttgtactcatacaggctcataaggtaggttgtcagctttccttattgaacttatgttaaattgtcatacaccagtcttggtcggacttatgtttgtccacaagtgattgatctatgttgtatgaatttttgcatagaggcagatggatataagctccaaa

SEQ ID NO: 145661 - DNA, 1844 bp, Zea Mays
atgtcagcgtcttacggatccgaagactaccgcggcggcggcggtggcggaggctacggtggccgaggtggcggcggcggtcgtgggcgcggaggcgggggaggatatggaggtggcggcggtggaggaggatatggaggtggcggtagtggaggctacggcggcggcgggggtggaggtggccgaggcagtggcggcggagggttcggtggtggaggacgaggaggtggtggaggtggccgaggcggtggcgggcgcgggggtggacgcgaaggagactgggtttgccctgacgcgagttgtggcaatgtgaactttgcgaggagggctgaatgcaataagtgtggagcaccttgcccaagtggaggtggtggcggcgggggtgggggttataatagatctggtggaggtggtggaggatacaaccgtggcagtggtgattatggttctggaggtggtggtttcgaccgagatggtggagactataattctggtgggcgtggtggtggaagcgggggtggaggaggctacaatcgaagtggtggcagtgaccgtggttttgatgaccaccgtggtggcagaggtggcagctatgggggacgagatcaggagaaccaaaggggtagtgaaggtggctacagtgctggtggctatgggcaagctcctccacaagctcctccttcgtatggtggtcctgcgggtgattatgcagcacctccgagctcctatggaggcaacaatgcttatggttcagattctgcagtgccgcctcctaatagctacagtggtggcccaggctcatacccaccaagctatggtgccccgcctccacaccaatatggtggtgccccaggggggcaagggggtctgcctcctacatatgatggtggatatggtggtcggtccatgcctgggggtggaggatctgggggtgcaccaccgccttatcatggtggcggcagcggttatactggtagtgctgaccctgaaccagctggaaaagttaagcagtgcgatgaaaattgtgacgagacatgtgacaacgcaaggatttacatctcaaatttgcctcctgatgtcactgttgaggaattacaagagctatttggaggaatcggccaggtcggaaggatcaagcaaaagcgtggttacaaagatcagtggccttggaacataaaaatctatgctgatgactctggaaaagccaaaggagatgcttgccttgcttatgaagatccttctgctgctcattcagctggtggattttacaataattatgacatgagaggttataaaatcagtgttgtgatggctgagaaatcagcacccagagcggcaccctcatatgggcatggcggtggtcgtggtggtggccgcggtggtggtggacgcagggataattacagagatggcggggggcatggacccaatagaaaccagggtggtggttcacgttcacgaccatactgaaaacaaaacaattgttgttactgtgattgtcatctatgagaaaccatttctattcctgttatacagatttgtactcatacaggctcataagaggcagatggatataagctccaaatgctggtaggtttgtgatgttatttcagccggtggatcactcatgtaagctttggattttgctgcgaagaacaggtagggaggttttgttctgtgttaggtttattagatttcgtgtacattagacgacatatcaaccaccaatcatagaacgttccatatccgtttctgcttctgggcactcagcttattttggtgaaagagccaatttttttatcaaggttgcagccccatcacttgtgccctaactcatcgtcccc

SEQ ID NO: 145662 - DNA, 195 bp, Zea Mays
atggccgagattcacatcaggtgcccaagacttttccgaaagcgtggtacaggtagattacgagggcagcacggcgaatgcaatgagatggttcttaccggaagtggtggcaggtacggggcgaccacgactgcgtgcccgccaatggtgttccgcgacccaccgaggagcagaggggttctggcaaatgaataa

SEQ ID NO: 145663 - DNA, 195 bp, Zea Mays
atggccgagattcacatcaggcgcccaagacttttccgaaagcgtggtacaggtagattacgagggcagcacggcgaatgcaatgagatggttcttaccggaagtggtggcaggtacggggcgaccacgactgcgtgcccgccaatggtgttctgcgacccaccgaggagcagaggggttctggcaaatgaataa

SEQ ID NO: 145664 - DNA, 342 bp, Zea Mays
atggcgcaaggaaatggaggtggcgccccgactccacttccccagctcggtgcacgggccacggccaccctgtctctacctcaacggcaagccacaacagcgtctaccgcagatccgactctgaatcatccgacctccattgaggatggcgtcggtggcagatcttcgttcacgccaacgccgagtgcaagcccaactgttgtaggcagcagctcggacacaggtaacaagcgaggtaggaaaaccacctctgatgtgtggaatgacttcgagcaactctacaaacaagttaatggtaagaaagtcagatatgcatcagctatctatgctgactcctaccag

SEQ ID NO: 145665 - DNA, 1531 bp, Zea Mays
aagagccacaggccagaggccacgcggccacgccgtcctcttcaccccagggttgccgacgcggcgactccgatcacccaccaccgctgccccctgtcctccctgctgccgcctgtgccggggctagcccgccgcggagccatgtcgcggtccttgagcatgagagggagcatgagggcgcgccgcgacctgcctcctcctgagaagacaattgaaaggcttgagagtatggtggatggaggaaatttctatgaagctcaacaaatgtacaagtcaaccagtgcaaggtatattgctgctcagaagtattcagaagccttggacatccttcagtcaggcgctttggttcaattgaagcatggacaggttacctgtggtggtgaacttgctgtcctctttgttgacaccctcatcacaggagagcttccatatagtgaacaaatttttgatcgtatcagaaagatgtatgaggcattcccaagggtaactgttccacatttccttggagatgactatgatgatgaggggcatcaattatctgaagctatttctgctgccaaagtgcgggcagagagttgctcatcattcatgaaagctgcaatcaggtggtctgctgagtttggaacatcaagaaatggttcttctgagcttcacgttatgttagcagaatacatatattcggaatctccagagacggacatgactaaagtctcaagtcattttgttcgtggaaatgatccaaaaaagttcgcttctatgctggtgaactttatgggcaagtgttaccctggtgaagatgatactgcaattgcacgtggggtcctaatgtacctatctcaagggaacttgagagatgcaaatttacttatggatgagatgaacgaacaactaaaatctgctaactcggaatttccgaaaacagatttgattcagttcatcaagtatcttttaccaacacttgagagagatgcttaccctctttttagaacacttcgacagaagtataagacaagtacagatcgtgatgctgtgtttcaggagttactggatgaaatagctgcaaaattttacaatatacaacgccagaaccctttagaaggccttttcagcgaaatgttcaagatataatgcacgagaaaagaattttatgtcgatgctttcatctaaaccattggctggaataatacaattggtcaacaaaggtgtttgctcaactatgaatctccaaggccatacatttagcatcatgctgcatgaagatatatacttagctctgcagcaaaatcgtcgattagtgtcagattgttactgagcatgtgtaactgaattttgttttctattacttgtttctctttgttgacttgcccttgattgttattgaccatgcataactgaattttgttttcttttacttgtttctccttgtcctgttcacttttggagatgtattttgtgtacccacagatcaaaactataacctatttaaattcattgattttaatatatggtgttatcagtaaagttcattgaa

SEQ ID NO: 145666 - DNA, 849 bp, Zea Mays
atgaattttgaaatattgctgcacgaaaaatttcactaatgggggatattcatgcttctggatacaaaatctgtgctattaagagattcgctaggtattttctttatgacaaactggtcctgcactttgaacatattaatgtcacgatatatgcttgaaataatcttaatggaacatttcatgttgtttcaacttttgttacttggtatatgtcatggaatatattttttgtttccagcactctagcttttgtaacatgtgacgctgtttacagacttgagagagatgcttaccctctttttagaacacttcgacagaagtataagacaagtacagatcgtgatgctgtgtttcaggagttactggatgaaatagctgcaaaattttacaatatacaacgccagaaccctttagaaggccttttcagcgaaatgttcaagatataatgcacgagaaaagaattttatgtcgatgctttcatctaaaccattggctggaataatacaattggtcaacaaaggtgtttgctcaactatgaatctccaaggccatacatttagcatcatgctgcatgaagatatatacttagctctgcagcaaaatcgtcgattagtgtcagattgttactgagcatgtgtaactgaattttgttttctattacttgtttctctttgttgacttgcccttgattgttattgaccatgcataactgaattttgttttcttttacttgtttctccttgtcctgttcacttttggagatgtattttgtgtacccacagatcaaaactataacctatttaaattcattgattttaatatatggtgttatcagtaaagttcattgaa

SEQ ID NO: 145667 - DNA, 860 bp, Zea Mays
  misc_feature (655)..(754): n is a, c, g, or t
cgcggggtgtttgacccgcgcccggcctgcgcctgccagattagccgcaccggcaccgcggtggcgcgcccacgtcaaaaccggagcggacgcagcgcagcgcaggcagccaagcggcggcagcgtcagaggtgggagagggggagtcagtctgcgtctgcgtgtgtgggacacactgggacaccgacacctgcagcgttttacgcggcgggggagggagagagagatccagggagggggggccgtagaagatctggctgctgctgctgccctgcccagaaggagaaacaactaggataccaccgccaccggcccccggcaggcggcaggcggcaggcgggcgggagagacgaaatctagggaggactgactggacggaggaggaggaggaggaggagcggggagatctctcgctcttccgcccatggaggagctgggagacgccggccagggaccgcaaggcgacgcctccggggcccttgtcaggaagaagaggatgcggaggaagagcactggccccgactccattgccgagacgatcaggtggtggaaagagcagaaccagaggctccaggacgagagcggctccaggaaggcgccggccaagggttccaagaaaggggaacgaatcaagcttgaatcatcaaaccaccgnnnnnnnnnnnnnnnnnnnnnnnnnnnnnnnnnnnnnnnnnnnnnnnnnnnnnnnnnnnnnnnnnnnnnnnnnnnnnnnnnnnnnnnnnnnnnnnnnnnnaaatcaaccttgattcgttcctttgtgttgagttcctgtactatagtagggatgagttcgtgtttaatgagctctcttggctgttaatattgcacatttgttcggg

SEQ ID NO: 145668 - DNA, 247 bp, Zea Mays
cccccaaataaattaacttttatagttaccttaagttcaacatttctaacgtttgcaaaagtttggctcaattcacctctagaagttgatttgttcacggacggaagtagtataagtagggggggggggaggcagcaaaatttctctcaacccaggtatactcggaccaacgtggtaggagtaggaccagcaggagggcaaaggctgcgaaccatgagtgactgctggttgcaaaaaaaaaaaaaaa

SEQ ID NO: 145669 - DNA, 411 bp, Zea Mays
atgacgacaacggggctggctggtcgcgccgccgcactggggcaccacaggggtgtgtgcccactggacgccacaaccagaggctctgggcgaggccgcaatggggctcagctgtggcctattgccgtgtcccaggggccgtgccctggccagttgagtcgcggggctcgcaagcgcagggggcagggcggcgagctgccgcccctggggacgcgttggagctccggcgtggctgtacgacgggggcagcaccggccatggctgctcagagcacggcaacgcgaggatctgcaggggctgctcggtaagggaagggttgggcacgccgagggactgggagggagaaggagagactcacctgctcgcggtgatcgtcgaccacaggacaagctcggcgcggttgttacatga

SEQ ID NO: 145670 - DNA, 285 bp, Zea Mays
gtgtgcgcatacgtgatttgagcgctcacggccgtacccgtacagaaggagagagagaattagtgaacttcggtcgccgttgttgcgcaccggcgattgccgtcgatcttgggcgacccatgcactcggggcagctcggcttgggttggtgggcgtcgtcaggaggaattgcggggcggtatacggcctgcgcgcagaggattcctcaccggtgtgccatcctcgccgtgcaatccgcacatcgccgtcgacgacgcgcctgcggtcgccaaactaaggtgagga

SEQ ID NO: 145671 - DNA, 513 bp, Zea Mays
cacctcccgcaagaatggcgcgcaccacaaaccacgcaccgtcgtagactgcccacgggccccgcgcggcggagcacgggtcagagccgtgagcgcccgtgcaacgccacgacctcctcgacgccgtcgaggtacaggccgtccacgaagtgctgcggcggcaggccctcctgcccacgcgccatcaacgcccggatctcctccctgtaggccgcgtgcatggagatgtggaggccctccagcagtcgtcccgcacggagacgcggaggccctgaagcaggcggacgcagtctctggggtcgacgacgcgacagcggctgcgcgggcaaggtcgacgacgcgcgcggggccgcgggcggcgacagagagtactgaaggttgatttcaaagaaatttaagaggttttctataaaattatggttctacattttaccaaacgtgccattaaattgtatacaagtaatcaaagtgttaaatcgaaacacggtaaagataatgtgcttagaatcaccc

SEQ ID NO: 145672 - DNA, 2286 bp, Zea Mays
atgtggaagctgaaggtggcggcggagggcggcggcggccccttgctgcgctcgacgaaccgcttcgtcgggcggaccgtgtgggagttcgagcctgacctcggcacgccggagcagcgtgccgaggtggaaaaggcgcgccgggacttctccgaccaccgcttccagcgcaggcattctgccgacgtcctcatgcgcatgcagatgcagcagtattcaaaaggcacccctcttaagctggaccttcctgctgtcaagaagctgggggaggacgaagacgttacggaggaagctgtatcgacctctttgaaacgggctatcaaccgcgtctctgctctccaggcgcacgatggccactggcctggcgattgtagtggccctctcttccttttgccaggcttgattataacgctgtatgtgaccggagcattgaacgcggttctatcttcagaacaccagagggagatacgccgctatctctacaaccatcagaacgaagacggagggtgggggctgcacatggagggccacagcgcaatgctgggcacaaccctcaactacgttgctctgagactgatcggcgagggcccggacagtggtggagatgatggagcagccatggagagaggccgcaactggatcctacagcgcggtggggcaacctatacaacgtcgtggggcaagttctggctaacggtgctcggagtatacgattggtctggtaacaacccgctgccaccagaaatgtggctgttgccctatcacctgcctttccacccaggtcgcatgtggtgtcattgccgagcggtgtacttgcccatgtcttacgtctatgggaagaggtttgttgggcgtattacaccacttgtcttggaactcagaaatgaactctacggagacccatacagtctgattgattggaacaaggctcgaaaccaatgcgcaaaggaagatttgtactatccacattcattccttcaggatgtcttatgggccactctccataagtttgttgaaccggttatgatgcattggcctgggatcaaatttagggagattgctttgcgcacagccatgcgccacattcactatgaagatgagagcactcgatacattaaccttggtcctgtaaacaaggtattgaatatgcttgcttgttggattgaagacccaaactcagaggcattcaagctccatgttcctcgaatttatgattatttgtggcttgctgaagatggtatgaaaatgaagggttataatggcagccaactatgggatgcaggtttaacagttctggcaattgtgaataccgatcttattgaagagtttggtccaactcttaaactagcacatgcctttgttaagaattcacagatcattgacaactgcctcgaagatttgaaccagtggtatcgccacatgtcaaaaggtggatggccattttctacagctgatcatggttggtgtgtatcagattgcactgcaacaggactagaggcaactctattgttatcaacgatttctcctcaaatagttggtgaggcgatggaagttggtagagtttatgatggtgtaaattgtctcatttctcttatgaacaataatggtggatttgcaacatttgaacttacaaggtcatatgcatggttggagcatattaatccttccgagacctttggaggcataatgatcgattacccgtatgttgaatgcacgtcgtcgtcaattcaagctctagctttgttcaagaaactctacccaaggcatcgtacggaagagatagacagttgtatcagcaagggtgcaaacttcatcgagagtatgcagagaaatgatggttcatggtacggctcttggggtgtttgtttcacctacgccacatggtttgcagtgtttggattggcttgtgctggtcggacattcgaggacagtcctgcaattaaaaaggcatgtgagtttctgttgtcaaaagagcttccttctggtggctggggagagagctacttgtcatgtcaggacaaggtttacacaaatctcgaaggcatgcgacctcacgcggtgaacactagttgggcaatgctggccctaattcgtgttggacaggctgaaagagatccagcaccattgcatcgggcagctagggttttgatcaacttacagtcagaggacggagaatttccacagcaagagatcattggagtgttcaaccaaaattgcatgatcggttactcccaatacagaaacatcttccctatatgggctctaggagagtatcgtaccaaggtc

SEQ ID NO: 145673 - DNA, 749 bp, Zea Mays
ctcgtcactgagcggcgaccgaaccgccgcctcctcccctcatggcgtcgtcgccgccgcctggacctccgtcgtggtcggtgacactgagcctgaagcaccgcggggggctagaaatccgcgccgccgcggagaacgtgctcccggggtggggccgcggcggggagcgcttgtccctactgctccggctccgccgccgcctcctcctctccgtcacgtcccaatgtggcggccgtcgagcggcgtccacagagccggggacgccgccgcgcgggagcagggtcgtccgcctcctgcgcagcgcgtgggcacggctgccgcgggccacctccatctggaggcgcaagaagcaggccccggcgcgcgttgtgccgcgggaccgccggggccaggtaatccggtctcccctgttcttcttgaaacaatcgcgtcatccgcagagtccaacaccggcgcggcctggcttctgggcagtggcatggacgccgacgtcggcggcgacgctgcggttcgtagccgttgtcgtcgccatcgctgccgtcctcgccgtggcgttggctatcgacgcggcgttccgcgtcacggacgacctcggtaaccgcagaggaggctgggacagcaaaccaatcgcgcgctgggccacgttcttggagttgatggagcatcctcctctcccctggaactacaactacaagtggctgccgggtgcgccgaaacgagggctggagtggatcttcagcaagtagata

SEQ ID NO: 145674 - DNA, 660 bp, Zea Mays
atggcgtcgtcgccgccgcctggacctccgtcgtggtcggtgacactgagcctgaagcaccgcggggggctagaaatccgcgccgccgcggagaacgtgctcccggggtggggccgcggcggggagcgcttgtccctactgctccggctccgccgccgcctcctcctctccgtcacgtcccaatgtggcggccgtcgagcggcgtccacagagccggggacgccgccgcgcgggagcagggtcgtccgcctcctgcgcagcgcgtgggcacggctgccgcgggccacctccatctggaggcgcaagaagcaggccccggcgcgcgttgtgccgcgggaccgccggggccagagtccaacaccggcgcggcctggcttctgggcagtggcatggacgccgacgtcggcggcgacgctgcggttcgtagccgttgtcgtcgccatcgctgccgtcctcgccgtggcgttggctatcgacgcggcgttccgcgtcacggacgacctcggtaaccgcagaggaggctgggacagcaaaccaatcgcgcgctgggccacgttcttggagttgatggagcatcctcctctcccctggaactacaactacaagtggctgccgggtgcgccgaaacgagggctggagtggatcttcagcaagtagata

SEQ ID NO: 145675 - DNA, 1221 bp, Zea Mays
gagaaatgtgcaagagaatgtgacctagaccctaaaaaatctctttccttggatgttgcaacaagatggaattccacatatattatggttagagatgccatttactataagaatgcttttgatcgccttgcaaaaaaagaaaaggatagatatggtcatatcaatccttcagctaatgattggttgaatgcattaaacattagcaagtgtttgaagaagttctatgatgtcacattacttttttctggcacttcatatcctactgcaaatcatttctttcgtaaattctctgagataaagatggctattgcaagatggtgtgatagtagtgatcccataatctgcaccatggcatattctatgagagacaagtttgataagtattgggaaatgaacaatatggctttggcagtgggagcatttcttgatcctaggtacaaacatagaatggttgagctatacatgtctaagatgtatgatagtgagatggctgatttggagaaaatggcattcatgaatgttattaatgaattattttcttgctattcatcaaccatcaatgcaaaatcaaccaaaaaagggactagctcgaaggattttgttccaaataaacaagttttgatggctgatgatgatgagaatgaggttgattttgatgagttgtatgcagcaacagacaatgagaagaaagtgtcagaattggatctatacatgagtgagggcctagtgaaggctaatgaaagtgatgcaccatttaatgccttatcatggtggaagggtcaagtgacaaatttccctattctttctacccttgctcatgatgtactatcaatgcaggtgtcaactgttgcttcagagtcgacatttagctctggtggacgcgtggttgatgcctttcgtttgaagcttaaacctgaaattattgaagccttggtttgtactaaggattggaagattgcttcagagaaagatttggagtgtgaaataaaaactatagctgaagttatgaatgctatgaaggtggacgatgatgttgcgacttgagatcttcaagcaagcatggattgcttgcactattttatgccatttgaaaactaccttttattgtaatagtctattgtgttgaactatcttgtgctatgttagactcttgtgtgatgtgaacttatcgctattatatttgaactattgtgttagactattgtatgctatgaacttatt

SEQ ID NO: 145676 - DNA, 113 bp, Zea Mays
cgtacttaaaaaattctgaatttttcatcatggaaataaaatgccacaacctgaaagaccaaggtacagcgatcctacataaaaggcattagaaactaaattcatgtaattat

SEQ ID NO: 145677 - DNA, 2005 bp, Zea Mays
cccggaagagagagagagaggatcatcaaaagggcaggccacaaaatatcctcaaagcctcccagaaaaattcctcccaccgcgcccgcgacagcgacgacgacggcgacgagcacggggcccctccaccgcctccgcctccgcctcgccgcgtgcggccaccgcgccgccccgacgtcgtcccctccgccctccccctcggccctcgacgcgccgccgcccgccctccgccgccgccgccgccgcggcgggctcggcctcctctggaagctcccctccgcccgcgcgccgccccgcccggctccgatggacgcgcgcgcgcccccgcctccgcagccccatccgccgcgcgccccgtcgccgcagcccccgcccgcgccgtccaggaggtacggcctgcacttctcggcgtccagcttcatccaggcgccgctcaccgcgctgctcgagtactccggcatcctccggcccgatcccggtggtggaatccaacagccagggaccggggccaggccgggcgaggtgtcgatccggattgtggcgcccggcgaggcgggcacgtcgtctgagagggccgaggaggtgatcgtcgaggaagaggaagaggatggacaggcaacgaggacgcgccccgaggacccatcacctgccgctggcggcggggagggcggcagggaatcctcgtcgtcgtaccagcggtacgacatacagcaggtggccaggtgggtggagcagatactgcccttctcactgttgctgctcgtcgtcttcatccgacaacatttgcaaggtttctttgtgacaatttggattgctgcggtgatgttcaagtccaacgatatcctgtgtaagcagactgctctgaagagggagagaaaaattccagttcttgtcgggattacaatattatttgttgttcatgtatctggattttactggtgttacaagaacggggatcttataagacctctcatgatgcttcctccaaaagaaataccaccattttggcacgcaatattcatcatcttggtgaacgatacaatggtgcgccaaactgctatggttgtcaaatgtttactgctgatgtactataagaacagcagagggcgtagctatcgtaggcagggtcaaatgttgacgattgtggaatattttctacttttgtatcgtgcattattgcctacacctgtgtggtaccgttttttcctgaacaaggagtatggaagcctattttcgtctctaaccactggcttgtatctcactttcaagttgacatctgttgtggaaaaggttcagtcttttttgacggcattgagagcattatctcataaagacttccattatggttcatatgcaacaagtgagcaggtagttgctgctggagacttgtgtgcgatatgccaagaaaagatgcatgttcccatccttttgcgctgcaaacatatcttctgtgaagattgtgtatccgaatggtaattcacatacccccaccctcgccgtctaccgtgcgtgtggcctttcctatgcactattcttacacatctttcactgatttcattacccatttctgctttcttggcgttgtttggactatggaaggttcgagagggagcgaacgtgcccgctgtgcagggcattggtgaagccagcagacctccgctcgttcagcgacggttcaacaagcctcttcttccagctattctagtccgagacagccaaaagagcggcaagccggagcgctccacccgatgatgcagatgttagctgtgtgtgtgcgtgtgttgctgcttgcaacgcctgcgagcagtgcggccctgatgcggtgctgggagagtgtacaccaagctgaagctgaaggcgtacatgattgtgtattgtgactgcacatattttcatcatcccctgtataggctctcgcgttgatgcttgagcacctgaggattttacctgaccatatacggcacaaattattacataaatagaaatggtgagtatatacaacgat

SEQ ID NO: 145678 - DNA, 1970 bp, Zea Mays
cccggaagagagagagagaggatcatcaaaagggcaggccacaaaatatcctcaaagcctcccagaaaaattcctcccaccgcgcccgcgacagcgacgacgacggcgacgagcacggggcccctccaccgcctccgcctccgcctcgccgcgtgcggccaccgcgccgccccgacgtcgtcccctccgccctccccctcggccctcgacgcgccgccgcccgccctccgccgccgccgccgccgcggcgggctcggcctcctctggaagctcccctccgcccgcgcgccgccccgcccggctccgatggacgcgcgcgcgcccccgcctccgcagccccatccgccgcgcgccccgtcgccgcagcccccgcccgcgccgtccaggaggtacggcctgcacttctcggcgtccagcttcatccaggcgccgctcaccgcgctgctcgagtactccggcatcctccggcccgatcccggtggtggaatccaacagccagggaccggggccaggccgggcgaggtgtcgatccggattgtggcgcccggcgaggcgggcacgtcgtctgagagggccgaggaggtgatcgtcgaggaagaggaagaggatggacaggcaacgaggacgcgccccgaggacccatcacctgccgctggcggcggggagggcggcagggaatcctcgtcgtcgtaccagcggtacgacatacagcaggtggccaggtgggtggagcagatactgcccttctcactgttgctgctcgtcgtcttcatccgacaacatttgcaaggtttctttgtgacaatttggattgctgcggtgatgttcaagtccaacgatatcctgtgtaagcagactgctctgaagagggagagaaaaattccagttcttgtcgggattacaatattatttgttgttcatgtatctggattttactggtgttacaagaacggggatcttataagacctctcatgatgcttcctccaaaagaaataccaccattttggcacgcaatattcatcatcttggtgaacgatacaatggtgcgccaaactgctatggttgtcaaatgtttactgctgatgtactataagaacagcagagggcgtagctatcgtaggcagggtcaaatgttgacgattgtggaatattttctacttttgtatcgtgcattattgcctacacctgtgtggtaccgttttttcctgaacaaggagtatggaagcctattttcgtctctaaccactggcttgtatctcactttcaagttgacatctgttgtggaaaaggttcagtcttttttgacggcattgagagcattatctcataaagacttccattatggttcatatgcaacaagtgagcaggtagttgctgctggagacttgtgtgcgatatgccaagaaaagatgcatgttcccatccttttgcgctgcaaacatatcttctgtgaagattgtgtatccgaatggttcgagagggagcgaacgtgcccgctgtgcagggcattggtgaagccagcagacctccgctcgttcagcgacggttcaacaagcctcttcttccagctattctagtccgagacagccaaaagagcggcaagccggagcgctccacccgatgatgcagatgttagctgtgtgtgtgcgtgtgttgctgcttgcaacgcctgcgagcagtgcggccctgatgcggtgctgggagagtgtacaccaagctgaagctgaaggcgtacatgattgtgtattgtgactgcacatattttcatcatcccctgtataggctctcgcgttgatgcttgagcacctgaggattttacctgaccatatacggcacaaattattacataaatagaaatggtgagtatatacaacgataaatcaatatggtccttgtttatgctgtgctctgtgttgggatttagaactagtcgataaatccttgtgatccttgcttatgccgtgcgccc

SEQ ID NO: 145679 - DNA, 2411 bp, Zea Mays
atgattcattatcacctctacgtccgattaaattactattttgctaagtaccaagtcgccatgcttatattctcaatccttagatcatggatccgaaatctaaaaacaaaacaagtaattacacgcgcaagctggcgtgcgcgccagttaactagttttcaataaactagattccggacatatacaaccagtttttccttacctgtttctagaaaccgggatagaaaccacaagttcttataaatcgtgggcccttcaaacatgctcacgctgtcacgcatccggcggagggagcgcttcccgagcccccctctctgcccttccgggtccgggcgcccggccttcgcttgcgccactcccgtggcgcccacggccgcgcacgcgtggtcgcctcccctcggcctcgcctgcaaccgttcccgccggcctcccgcgtcgcggcgcaagaggataccctggatttcgtccgtggcgagtggctaccgcttgtgctccttttgtgacagctgaatctttgtggttcgaaggcgattgacttgggttcactgacgcggtgacgcccaatgagctcccacgtctccacatcgcggggtcttcatcccccaggcaagcttgggacgttggactcacccggtgcgtggcagccgccagcacctatggctcagcccgaagcaggccgcggtgatgaccaggaggtcaggctgttgtcggttgcttggaatcaggattgtggatgctttgctgccggtaccagtaacggattcaggatctttaattgcgagcctttcaaggagactttcaggagggatctcaagagcggcgggttcgcgattgtcgagatgctgttccgttgcaacgtccttgctcttgtaggtggtggctccaatgtgctgtacccgccgaacaaggtgattatctgggacgatctcctgagccgttgcattggggagttcgcctttcgctctgatgtccgagctgtaaaattagcaaaggactacatcgtgattgtcctcgagcgcaagatatttgtctacaacttcaccgatctgaagctgctctaccagattgacaccctgtcaaatcccaatggactttgctgcctctctcatcattccaatacttcagtgttggcctgccctgggttgcaccaggggcatgttcgcgtggagcatttcgggctgcagatggtgaagacaatcccagctcacgattcacacatctcttgcatgtcactgacaatggatggtctcctgctggcaacagcgagcacgaagggcactttgattagaatattcaacacaatggatggcactcgtctacaagaggtacgcagagggcttgacaaagcagaaatatacagcattgcattgtcgcccaatgtgcagtggttggcagtgtccagcgacaaagggactgttcatattttctccctgagagtcagagttgctggagtggattcaagcaatgagcaacgcgctcttgaaggtccacggatggatcaccagaactcttccagttctattgatcctcttattcaggcgaacactggatccaatgctagttcatcactgtcttttatgagagggatcctgccgaagtatttcagttcagagtggtcatttgctcagttccatttaccagaagtcactcgttacatagtagcctttggtgcccagaatactgtgatgatggttggcctggatggcagcttctacaggtgcagctttgaccaagcgaatggagggcagatgttgcagagggaacatttccggtttctcaagtccgacagcccacctttcaggactgcagccgcttgacctgcagcacaaggatcatccatcccaccatgtaaatgtcgaaggtccactgtacatatcgccttctcgccggcgaagttataggcagccggaataaggagagctggctgttggatcgaagcctacaggattccaacgttcggatcggcgccccgtccaaattgcaggcatttctttgccgttccctcttctatcttcaaacgagaacacacacccattgctggtacagaacatgacataaaagattcagtaacgtgatatttgaccgtgtggctttgtggtgcctgcaaggccgtgtagcgaatctcagacctgttcttgccggtggcttgttgatgctgatgactgttacgcactacctcaatgttctttctgcatgttgtgcgattgcgttgctgattgcatgaagggccttcttatatgcttactctttttttttgttcctgttagcaataatgatcctttaagattgtcttcgcgggctttcttatttacttatttttcaacgagatttgggaaagggtgggaaaagcacttcgtccacctccagcggttgcgtccacggacgcccgagctcgccggcacgcacggtcc

SEQ ID NO: 145680 - DNA, 831 bp, Zea Mays
atttttggaatagtttctattcagttatttgtagggttgatttagacgattctgttcctatctagcgattgccccaccaacttccaagcatggcttgtttcaatatataaccacgttcccctctccagcttctacaggtgcagctttgaccaagcgaatggagggcagatgttgcagagggaacatttccggtttctcaagtccgacagcccacctttcaggactgcagccgcttgacctgcagcacaaggatcatccatcccaccatgtaaatgtcgaaggtccactgtacatatcgccttctcgccggcgaagttataggcagccggaataaggagagctggctgttggatcgaagcctacaggattccaacgttcggatcggcgccccgtccaaattgcaggcatttctttgccgttccctcttctatcttcaaacgagaacacacacccattgctggtacagaacatgacataaaagattcagtaacgtgatatttgaccgtgtggctttgtggtgcctgcaaggccgtgtagcgaatctcagacctgttcttgccggtggcttgttgatgctgatgactgttacgcactacctcaatgttctttctgcatgttgtgcgattgcgttgctgattgcatgaagggccttcttatatgcttactctttttttttgttcctgttagcaataatgatcctttaagattgtcttcgcgggctttcttatttacttatttttcaacgagatttgggaaagggtgggaaaagcacttcgtccacctccagcggttgcgtccacggacgcccgagctcgccggcacgcacggtcc

SEQ ID NO: 145681 - DNA, 1497 bp, Zea Mays
atgcgggcggtggccagcgccgtcgtgtggaccgcggtcgtgcaggtcgcctccatcgccgggctgttccgcccgcgggtcgtcgccgactgcggcgggaaaggcggcggcggcgccgcggccgggctcgccgctctcgccggcgaggacagcgccgccgcgaggctgtcgccgccggcgctcgtgcccaagagaatttacaagagcaacggctatctacgagtgacttgcaatggtggcctcaaccaaatgcgagccgggatatgcgatatggttactatagcacgccatctaaatctaacgcttgtggtccctgaattggacaaaaggtcgttttgggctgacccaagtgattttggagatatttttgacgtggaccacttcattaattccttgagagatgagctgatgatagttaaagagctgcctttgaaactccagttaataagaactaagaagagactgtactccatgtctcctgtcagctggtcgaatgaaacatactacctaaagcggatactacctcttgcaaggaagcacaaagtaatccatttcgataaatcagacgcccgccttgcaaacaacggccttccagttcagctccagatgctgcgttgccgtgtaaacttcgatgctttgagattcaccccacagattgaggcccttggcagacagcttatctccactctccagagaagcgggcaattcgttgtgcttcacctgcgctatgagatggacatgctctccttttcaggctgcacgcatggctgctctactgaagaagctgaggagctcactagaatgaggtctgtgtctttcaccgttacacactactcaactctttgcgctacttcgacgcttcgctggaaaaagagattggttctgaagcgaagaggcttcagggactttgcccccctcacgccagaggagattactctagtgcttaaagctctagggttcacaaaggacacgctgatctacattgcttctggtgagatctatggcggcgaaaggcgcttggcagtgctcaaggctgcgtaccctaaactagtaaggaaggagaagattctatctcctgatgaactgcggccgttccagaaccattcgacccagatggcagcgctggattacatggtctctctagcgagcgatattttcattcccagctatgacggaaatatggcaagggttgttgaaggtcaccgcaggtatatgggtttccgcaagaccattgctttggacagaaagaagctcgttgagctcttggaccttttccaaggacgcgctctatcttgggacgagttctcaggcgcagtgaaggaggcgcacaagagccgcacggggcaacctacggatagaaaggccatccctggccagcccaaggaagaggactatttctacgctaaccctcaggaatgccttggctctagtatcctgacagctcgtcctgggaacccgttgccaatgaataatggcgcctcgacgactgtagtatag

SEQ ID NO: 145682 - DNA, 76 bp, Zea Mays
atgttcatacaatttattgtgattttacccctcgttatattgtgtaactgtgattttactcgtgttggggttgcat

SEQ ID NO: 145683 - DNA, 832 bp, Zea Mays
attcgcatagcacagttggctctcccacgcgtccatggcgcccggcacatcaatgagcaaatccccgggataatccagatcatcgaacgagaggaaatggaccatgtcgctgtcgccaccgccaccgtcgctcgcatcgctctcgtcacccgcgttctgccgcatactcgcagtagtcgacgactgtggactcttgccgctgccgggagacgaaatgccgccgccggctccgtcgggcagctggcacccgaagaccgggaaccgcgccgggatgggcgtaggctgggccgctggcggcggcgcagcgttggccgaatcctcctttcctcccgcggccgcggcccccgatggctcggccgcgctgtcaccgccgtcgccgcagcctgcagctctggaggcggcggcgttgaggcgcttcctgatgcgggagttccagtagttcttgatctcgttgtccgtcctgcctggcatcctcgccgcgatagtcgaccaccggttgccgagcgactgctgcagggagatgatggtctcctcctcgcgcttggagatgggctccttcttgaggtccgggcgcaggtagttcagccaccgcagccggcagctcttgccgctcctccgcaggcctgtgcattcagcatttaagaagagattaatcataccgcgttgtgctgtccgatagctgaaatagaatcaggtaccgagagtcccgatcggtttgcaagaactgaatcttgcctgctagctgcgcgacggagctccaggtggagacgccgtggtaggtgatgtgggtgaagagccgctcgtcctcctccggcgaccacaaccccttcct

SEQ ID NO: 145684 - DNA, 414 bp, Zea Mays
atggtctgccaccccgggatcacgatctccgcggcggcccccgtcccccgccagaactcctcgaacatggtcgggtcgccgtggtcgaggttgatcaccgagtccggcgtcaccggcggcttgccggtggacggcgccccggcggccttgggcacggacgacagagacgaagacggcggcctgcaggttccagatcggcgcccgcctcctgggcttcccggccagctgggctttcccgcgcggccttttggtgggccggagcgcggccaggtcagagccaggccctccgccgttggccgtctcctcccgacggctcggcgcgccgccgccgttagcggtgaggaggcgcgcggacggcaccatgccgccgccggcgccttggaagctgccctcgaccgccgtgccgagatttaa

SEQ ID NO: 145685 - DNA, 702 bp, Zea Mays
atggtctgccaccccgggatcacgatctccgcggcggcccccgtcccccgccagaactcctcgaacatggtcgggtcgccgtggtcgaggttgatcaccgagtccggcgtcaccggcggcttgccggtggacggcgccccggcggccttgggcacggacgccgccgacgccgccgcctccacctcctgcctccccctactgctgcggctgacgccgccaccgtctagatgcgtcgggcaggcctggtgctcctgccggtgcccgtggtcgtggtcgtggtgcgacggagctgtgctgttgacgtggtgctggaggaggaggccgacgttgaggacgacagagacgaagacggcggcctgcaggttccagatcggcgcccgcctcctgggcttcccggccagctgggctttcccgcgcggccttttggtgggccggagcgcggccaggtcagagccaggccctccgccgttggccgtctcctcccgacggctcggcgcgccgccgccgttagcggtgaggaggcgcgcggacggcaccatgccgccgccggcgccttggaagctgccctcgaccgccgtgccgagatttaatgccgccgaaggcatgccgccgagagggaaagaaagagagcgtgctgccaacgcctacagcagcctgctcgtgctagctccaaactcggccggtgggccgctcgctagctag

SEQ ID NO: 145686 - DNA, 1091 bp, Zea Mays
gatgacctgctaacatacaaaatcataaaattgacagtccaacattcggttacttagattttttaacggatgcgactcatctctcggctaaaaaattagacaagtctccttttcataacctacactacatttttcctcagctagtacctaccggccagtagtcgtcgcgtctgcaggcagatctgagttagccggcggatccgatccgtgcgcgtgctgctgtgtgtgtgtcggtggagatggccacagcttacgctcccatggcgagccaggtgatgaagagcagcctcgtcgtgcactcgaggccgaggggcctgtcaggcgctgctgcgctcacgaggcggcccggccggttcaccgtcaaggccatccagcccgagaaggcaacgtaccaggtggtgcagcccatcaacggcgacccgttcatcggcagcctggagacgccggtcacctccagcccgctcgtggcgtggtacctctccaacctcccggcctaccgcaccgccgtgagcccgctgctgcggggcgtcgaggtcggcctcgcgcacggctacctcctcgtggggcccttcgcgctcacgggcccgctccgcagcacgcccgtgcacggccaggccggcgcgctcggcgccgccggcctcgtcgccatcctcagcgtctgcctcaccatgtacggcgtcgcctccttcaacgagggggacccgtccacggcgcccacgctcacgctcaccggcaggaagaaggaggccgacaagctgcagaccgccgacggctgggccaagttcaccggggggttcttcttcggcggcatctccggcgtgctctgggcctactttctcctctacgtgctcgacctcccctacttcttcaagtagaaatcatcaaagatgcgtatatatatagctccggccgatcctcctctctagctgcatggtatgtaggtggtgtggtccttgtttcatttcactccagcggtgatcagcgccgtgtataaatgtaattcctctgctttgcacatggatggattgggatgtaacctgttcaacttttttttaccttattggatgcatcattcagagctagtttgttaa

SEQ ID NO: 145687 - DNA, 948 bp, Zea Mays
tcatcactcctgaaacccaaggagcgccacacatgcctgagccatatcacgcctgcaggccccatgcatccatgcgtgcacaggatttcctcctaaagatcgatcgcagactttacttaggccgtcacaagcagatctgagttagccggcggatccgatccgtgcgcgtgctgctgtgtgtgtgtcggtggagatggccacagcttacgctcccatggcgagccaggtgatgaagagcagcctcgtcgtgcactcgaggccgaggggcctgtcaggcgctgctgcgctcacgaggcggcccggccggttcaccgtcaaggccatccagcccgagaaggcaacgtaccaggtggtgcagcccatcaacggcgacccgttcatcggcagcctggagacgccggtcacctccagcccgctcgtggcgtggtacctctccaacctcccggcctaccgcaccgccgtgagcccgctgctgcggggcgtcgaggtcggcctcgcgcacggctacctcctcgtggggcccttcgcgctcacgggcccgctccgcagcacgcccgtgcacggccaggccggcgcgctcggcgccgccggcctcgtcgccatcctcagcgtctgcctcaccatgtacggcgtcgcctccttcaacgagggggacccgtccacggcgcccacgctcacgctcaccggcaggaagaaggaggccgacaagctgcagaccgccgacggctgggccaagttcaccggggggttcttcttcggcggcatctccggcgtgctctgggcctactttctcctctacgtgctcgacctcccctacttcttcaactccggccgatcctcctctctagctgcatggtatgtaggtggtgtggtccttgtttcatttcactccagcggtgatcagcgccgtgtataaatgtaattcctctgctttgcacatggatggat

SEQ ID NO: 145688 - DNA, 1125 bp, Zea Mays
atatcacgcctgcaggccccatgcatccatgcgtgcacaggatttcctcctaaagatcgatcgcagactttacttaggccgtcacaagcaggagaccctcctcagctagtacctaccggccagtagtcgtcgcgtctgcaggcagatctgagttagccggcggatccgatccgtgcgcgtgctgctgtgtgtgtgtcggtggagatggccacagcttacgctcccatggcgagccaggtgatgaagagcagcctcgtcgtgcactcgaggccgaggggcctgtcaggcgctgctgcgctcacgaggcggcccggccggttcaccgtcaaggccatccagcccgagaaggcaacgtaccaggtggtgcagcccatcaacggcgacccgttcatcggcagcctggagacgccggtcacctccagcccgctcgtggcgtggtacctctccaacctcccggcctaccgcaccgccgtgagcccgctgctgcggggcgtcgaggtcggcctcgcgcacggctacctcctcgtggggcccttcgcgctcacgggcccgctccgcagcacgcccgtgcacggccaggccggcgcgctcggcgccgccggcctcgtcgccatcctcagcgtctgcctcaccatgtacggcgtcgcctccttcaacgagggggacccgtccacggcgcccacgctcacgctcaccggcaggaagaaggaggccgacaagctgcagaccgccgacggctgggccaagttcaccggggggttcttcttcggcggcatctccggcgtgctctgggcctactttctcctctacgtgctcgacctcccctacttcttcaagtagaaatcatcaaagatgcgtatatatatagctccggccgatcctcctctctagctgcatggtatgtaggtggtgtggtccttgtttcatttcactccagcggtgatcagcgccgtgtataaatgtaattcctctgctttgcacatggatggattgggatgtaacctgttcaacttttttttaccttattggatgcatcattcagagctagtttgttaacctcattttttcaaaggatttccattttcccaagaaaaattagttcattttctcttagaaaaatagaaa

SEQ ID NO: 145689 - DNA, 1269 bp, Zea Mays
atatcacgcctgcaggccccatgcatccatgcgtgcacaggatttcctcctaaagatcgatcgcagactttacttaggccgtcacaagcaggagaccctcctcagctagtacctaccggccagtagtcgtcgcgtctgcaggcagatctgagttagccggcggatccgatccgtgcgcgtgctgctgtgtgtgtgtcggtggagatggccacagcttacgctcccatggcgagccaggtgatgaagagcagcctcgtcgtgcactcgaggccgaggggcctgtcaggcgctgctgcgctcacgaggcggcccggccggttcaccgtcaaggccatccagcccgagaaggtcagtagacaagaaaacaaaagaagagcgcgcgagaatttgtgcatgctgctagtgctatccattccgatccagagctcgtctctagctctagctagctagctagcttactgctctactcgattgttccgtacacgcatgcaggcaacgtaccaggtggtgcagcccatcaacggcgacccgttcatcggcagcctggagacgccggtcacctccagcccgctcgtggcgtggtacctctccaacctcccggcctaccgcaccgccgtgagcccgctgctgcggggcgtcgaggtcggcctcgcgcacggctacctcctcgtggggcccttcgcgctcacgggcccgctccgcagcacgcccgtgcacggccaggccggcgcgctcggcgccgccggcctcgtcgccatcctcagcgtctgcctcaccatgtacggcgtcgcctccttcaacgagggggacccgtccacggcgcccacgctcacgctcaccggcaggaagaaggaggccgacaagctgcagaccgccgacggctgggccaagttcaccggggggttcttcttcggcggcatctccggcgtgctctgggcctactttctcctctacgtgctcgacctcccctacttcttcaagtagaaatcatcaaagatgcgtatatatatagctccggccgatcctcctctctagctgcatggtatgtaggtggtgtggtccttgtttcatttcactccagcggtgatcagcgccgtgtataaatgtaattcctctgctttgcacatggatggattgggatgtaacctgttcaacttttttttaccttattggatgcatcattcagagctagtttgttaacctcattttttcaaaggatttccattttcccaagaaaaattagttcattttctcttagaaaaatagaaa

SEQ ID NO: 145690 - DNA, 4222 bp, Zea Mays
cgtttctcgctgctttcctgctccacctttccctctctcctgctcatcggcgtataacagctgcactgcatccacgttgtggcgcatggccgtggcagtggcgtgcctctgcctcttcttctccctccgctaaaacctgttgtcttgtcagtgaggcttcgcttaaacctcgccaccaatccacctactccctggctttgcaagcaaagcaaagcaaagccgcagagccactttctttgcgctgcgctgctgcttccggcacaagcaacgacacagatttgcaagtgacaccagctgcagctgatcctacagcaccgcctcacctcatcctcctcatcggcttcatcgtcgtagtttggtcgcctgcctgggtggatatgctctgggagtgaagtgtagtatctctcaagtacagtgtcaaacgctgtcggctgcctgccgacctggcaggctgtggtttcgtaagctgagctgcagaggaggatgcctcctgacgtgatgaacgggaggtggaggagcgcgtgcgcggcggcggcggcgccgctgctgctgtggtgcgcgcttgtcctggcgtgcatgggcagcgcgctggccgtggacgcgcagggcgcggcgctgctggcctggaagcgcacgctgcggggcggcgcggaggaggcgctgggggactggagggactccgacgcgtcgccgtgccggtggacgggcgtgtcctgcaacgcggcgggccgggtcacggagctcagcctgcagttcgtcggcctgcacggcggcgtccccgccgacctgcactcctccgccgtcggcgccacgctggcgcgcctcgtgctcacgggcgccaacctcacgggccccatcccgccgcagctcggggacctgccggcgctggcgcacctcgacctcagcagcaatgcgctcacggggccgatcccggccgccctctgccgcccggggagcaggctcgagagcctctacgtcaactccaaccgcctcgagggcgccatcccggacgccatcggcaacctcacggcgctgcgggagctcgtcgtctacgacaaccagctcgagggccccatcccggcgtccatcggccagatggccagcctcgaggtgctccgcgccggcggcaacaagaacctccagggcgcgctcccaccggagatcggcagctgctccaacctcaccatgctcggcctcgccgagaccagcatctccggcccgctcccggcgaccctgggccagctcaagagcctcgacaccatcgccatctacaccgcgatgctctccggcccgatacctcccgagctcggccaatgcacaagcctggtcaacgtctacctgtacgagaacgcgctgtccgggtcgatcccgccgcagctcggcaggctcagcaacctcaagaccctgctgctgtggcagaacagcctcgtcggcgtcataccgccggagctcggggcgtgcgcggggctcgccgtcctggacctgtccatgaacgggctcaccggccacatcccggcgtcgctcgggaacctgacgtcgctgcaggagctgcagctcagcgggaacaaggtgtccggcccggtcccggccgagctcgcgcgctgcgccaacctcaccgacctcgagctcgacaacaaccagatatccggcgccatccccgccggcatcggcaagctcacggcgctgcgcatgctctacctctgggccaaccagctcacggggagcatcccgccggagatcggcggctgcgcgagcctcgagtcgctcgacctgtcgcagaacgcgctcaccgggcccatcccgcgctccctgttccggctgccgcggctctccaagctgctgctcatcgacaacgccctctcgggcgagataccgccggagatcggcaactgcacgtccctcgtccggttccgcgcgagcggcaaccacctcgccggcgcgattcctcccgaggtcggtagacttggcaacctcagcttctttgacctgagctcgaacaggttgtcaggcgccatccccgcggagatcgccgggtgccggaacctcacgttcgtcgacctccacggcaatgccatcgccggcgtcctgcctccgaggctgttccacgacatgctctcgctgcagtacctggacctgtcgtacaattccatcggcggcgcgatcccgccggacatcggcaagctcagttcgctcacgaagctcgtccttggcgggaacaggctcacgggccagatacctccagagatcggctcgtgctcacggctccagctcctggacctcggcggcaacacgctgtccggcgggataccggcgagcatcggcaagattccggggctggagatcgctctcaacctgagctgcaacggtttgtcgggcgctataccgaaggagttcggcggcctcgttcggctcggcgtgctcgacgtgtcgcacaaccagctctccggtgacctccagcccctgaccgcgctccagaaccttgtggccctcaacatctccttcaacggcttcaccggccgcgcgcccgcgacggcgttcttcgcgaagctgccggcgagcgacgtggagggcaacccaggcctgtgcctctcgcggtgccccggcgacgcaagcgagcgcgagcgcgcggcgcggcgcgccgcccgcgtggccaccgcggtgctggtgtccgcgctcgtcgccctcctcgccgccgcggcgttcctcctcgtcggccgccgcggacgctcgtcggtgttcggcggcgcgcgctccgacgcggacggcaaggacgccgacatgctgccgccgtgggacgtgacgctgtaccagaaactggacatcaccgtgggcgacgtggcgcgcagcctgacgccggcgaacgtcatcgggcagggctggtccgggtcggtgtaccgcgcgagcgtgccgtccacgggcgcggccatcgccgtgaagaggttccggtcgtgcgacgaggcgtccgccgaggcgttcgcgtgcgaggtgggcgtgctgccccgggtgcgccaccgcaacatcgtccggctcctcgggtgggcggccaaccggcggacgcgcctcctcttctacgactacctcccgaacggcaccctcggcggcctgctgcacagcgccggcggcgggtcggccggcgccgcggtggtggagtgggaggtgcggctctcgatcgccgtcggcgtggccgagggcctcgcgtacctgcaccacgactgcgtgccggcgatcctccaccgcgacgtcaaggccgacaacatcctcctcggcgagcggtacgaggcgtgccttgccgacttcggcctcgccagggtcgccgaggacggcgccaactcgtcgcccccgccgttcgccggctcgtacgggtacatcgctcccgagtacgggtgcatgaccaagatcacgacgaagagcgacgtgtacagcttcggggtggtgctgctggaggccatcacggggcggcggccggtggaggcggcgttcggggagggccggagcgtggtgcagtgggtgcgcgagcacctccaccagaagcgcgaccccgcggacgtggtcgaccagcggctgcagggccgggcggacgcgcaggtgcaggagatgctgcaggcgctcgggatcgcgctgctctgcgccagcgcgcggcccgaggaccggccgacgatgaaggacgcggcggcgctgctgcgcggcctccggagcgacgacggctccgccgaggcgcggaaggtcagcgggtcgaggccgccgccgctggactcggccaggtgggccgctgcctcctcgcccgccaaacccacggccctcccgcggccgtcgccgtccgcgtccagctcgctggcgtactcaatgtaacagctagcgtcgcccgccggaggactaactcagaagaggaggaggaccgagaccgacggcgacggtggcgccacccctaagcttggctcagacatggtaggtaacattggctggacgctgtcgagagcctatgaaccgtcggcgtgcagacgggccgccgctcgtcacagtgcatggtcatgtggaccacaggaccagaggatgtggggtagggaggaggacgaagggcgcgccaccatgacatggatgagtgaatgaatggatctaagcaaagcaataattcccattgtaccatacgtacgcatagctgtagaacagtgcatgttacccaatgaccaattgcatccgtaacctgatatgattttgtcgccaa

SEQ ID NO: 145691 - DNA, 1341 bp, Zea Mays
atgcatgcagtaactaaacgagggactagatgtagcttatatatgactagcagtgttgctattatacgatccatgtccggccggttgatgagcgacgacgatgcaactccggcagggtcggtgatccgtacgttcttcttcactctctgtatgtctatctgtgcacgtatattcatggtcgtacgtcgtcgggcgtcggctaccaacagagacagagacagatcacgggcagtgcacgttcctgccgggccctccgtagtagaagtagttcccccaggcggtgttgtagccgccctggatgtcgtagcagcccgggcggtcggcgacgaggcggagcgcggcggcggcgacgaggctgttgtcggcgtcgacgacctgcaggttgcggaagtaggctgcgcggttggatccctcgcgggggaagtggccgctccccatctgcgtgggcgtgtgcgcccccgccgggcgcgagttcaccacctcgccgccgaactgcaccatgtcggcgtgggcgcccaggtgcgtgaacaggagcgacggccagtaccccaccagcgggcccgaccccagctgcagccaccagttcccccggtgcgggtccttccatatgagcaggctgatgtcgaactgccggccgttgtagaccgaggtaggcgagatggcggctccaatggcgatccggctgttcgtctggacgaagccggagcagtgcaggttgtagcacccagtctcctggtacgcatcggtcgtccaatacgtgaagaacctcgggctgctgtcgccatacagctcagggctcacctgccatccggcctcgatggtgttgaggtcgttgccgaaggagccggagatgacccagatctgggacaggctgaactccgccgccgacgccaccttggccggccacacgttcaggctggccttggcgccgtagaactggtcccccgtcacgtaccccaccgcgtgctcatggccgctgctggtggagtcgcggcgggcgttgctgctgctgctgccgccgccgcgggccttcatcccgaaccggcgcgcggagctggcccgcagcacgtcgcgcgccgccgtccgccgtatcggcaccgtccccgccgggcaccgcttgctgccgccgtcgctccacgcctgcgggaacacgccggcctcctcctcggcggcgccgcccttggacatgggcctctccacgggctcgtcctggggctcctgccctctcagcctggggtggtcgaacgccggctgcaggtgcgccggcacgcagtggatgacgtcgccgtcggggctctgcacacgcgcacgcacacgcacgagacacgacgaacgagctag

SEQ ID NO: 145692 - DNA, 917 bp, Zea Mays
ggaccgattttgctaaccctgagcccaacgcgacccaacctcttcgtctccgatagtccgactccacgaagcgaagccgctcaacatcctcttccgctgcgcctgcgcgcgcgggaggacgaaatacggcaagaagctactcgagaaaggccacgcacgatgatggcgtgtcggcggctggcgagggacgccgtcgcggcctcgctccggcggagcgccgccaccgagaccaccgcctccacgcccgccttcttctcctcttcctccgccgctgcgtcctcctgctcctccggcgcaccagtcgccggcagccccattcgccacttcctggcgcgctattcaagccccgctttccagatccagcctagcgctgcggggctcggcccttcgttcgccgcgagagtggcccttggtctccggccgcagttgtcaggcctcaatctgatcaaaggatttggaacaagcaccatgctagcgatgacgcttcatcagggacaggttactgctgccacaaaagagcaaccatcaaaagccatagctggaccaccccaggggtctttgaaaaccaagcttggttcattttggcctttggtcaggaaacttcagctgccagttggattgatttttctgattatgtctgggttacacagcccattaagtctcaccctaaatattttgcttctcctctactgctcaagtccaagccgctattcaatatatttgtttcttcaggaggttagtcaaatgttgatgttattttatgaataaatatgtttgcaactactgatttgtgttgctcaacaatgtatgatgttttagatttcatcatgccgtgcaaaagttgactcacaggaggtcaatctgttttttttccttctgaactaatataccgttaattattttagcttcatcatagg

SEQ ID NO: 145693 - DNA, 1453 bp, Zea Mays
ggaccgattttgctaaccctgagcccaacgcgacccaacctcttcgtctccgatagtccgactccacgaagcgaagccgctcaacatcctcttccgctgcgcctgcgcgcgcgggaggacgaaatacggcaagaagctactcgagaaaggccacgcacgatgatggcgtgtcggcggctggcgagggacgccgtcgcggcctcgctccggcggagcgccgccaccgagaccaccgcctccacgcccgccttcttctcctcttcctccgccgctgcgtcctcctgctcctccggcgcaccagtcgccggcagccccattcgccacttcctggcgcgctattcaagccccgctttccagatccagcctagcgctgcggggctcggcccttcgttcgccgcgagagtggcccttggtctccggccgcagttgtcaggcctcaatctgatcaaaggatttggaacaagcaccatgctagcgatgacgcttcatcagggacaggttactgctgccacaaaagagcaaccatcaaaagccatagctggaccaccccaggggtctttgaaaaccaagcttggttcattttggcctttggtcaggaaacttcagctgccagttggattgatttttctgattatgtctgggttacacagcccattaagtctcaccctaaatattttgcttctcctctactgctcaagtccaagccgctattcaatatatttgtttcttcaggagcttcatcatagggaggtgggtcaaaaccatgctgtgtcgaaggaggagtacatgcgtacaagaaatattattactgaagattacaagtttttttcaattggaaccattgaattagtagatgggagggtgctgcatctcattggaatgctgggcagctggtggatctaccgtgtgtcattcaagtgcaaagagctggtgtagaatatattttagttctgaaggaagagcgagttaaccatgtggtgctgaatagcagatattttgaatcatttctaactgaagtaggtacttgaattggcttttcagtaggtgctgtattactgttttttgaaagcagtgatgtccaatgttttgctagagtattttgcaagaatataatggaagtatggagcccggtggccggtgctatttctcacagggcataaagcaattccatgtggaagatacatttcttgtcacatagcacatcgttgtcctgggtgtgttttctgtacaatcgccaatggattgcattatgtcccaaatgttgcttctctaggtttatcatctgtaaacaaggacatgattataatgaacactagtagctgccgcacgcacctgcgcgctgccgccatggtgctagattcatagtttatcatttgtattaggatatgtataagtataaaagtttaatttttgaataaattttagtctctatattcagagttcatgttctcta

SEQ ID NO: 145694 - DNA, 1068 bp, Zea Mays
atttccatgtcgcatctctttgtttatatatatatatagggaaatttggatccataccattaaaagatcaccactttagattcataccattactatctaacttacatgtgggtccacatgagtcaataacatgtgggatccatgatatatatctaaagtttggatcttttaatggtatagatccaattgttccatatatatatataaggatctggccaggccagcaggagggaacaccatacctgaaacttcactgcctttttaattgtcaggcacactggtctggaaatcagtagcctgttggctgctgttgctattaatcagttgggagagagggagatggccaggaggaacatcggagtcgcagtggacttctcgtcgtgcagcaaagcggctttgcggtgggcgtcgacgaaccttgccaggaacggcgacaggctcatactcatccacgtgaacagctcctgccagaacgagcggggcgccgttcatctctgggagcagagtggttccccattgatccctctggccgagttttcagacgtcgccaggacatacggtgtgtcaccggacaaggagacgatcgagatcctcactcgagcggcaaatcatagagggatcgaagtctttgcaaaggtgttgtacggcgacccagcaaagaagctctacgaagcagccgacctggtcccgcttagctgcatggtcgtcgggagcagaggactaagcacgctcaagagggctctgatggggagcgtgagcacgtatattgtgaaccacgcggcctgccccgtgacggttgtgaaggagatggtgtagcgtgttgaacaccgctgtttacaagcctcaccctagccagattgaataagcgtgcttgataagcactgatcagggggatcttgctacttatacgacattttgtgcttgagatttgggtaactaggaccgggcagaacatgtctacgtgttgggctcatggcactgacatctgaacatatgccattatgccctaagcctgttgtaatcgcaaaatacttttgcttataaaatcagttaagaaaatatatggct

SEQ ID NO: 145695 - DNA, 125 bp, Zea Mays
gtttttttttttttacatgcggggggttctgttgttggtcggatggcccgtgatcagtctctgcaccgaaccgaaggtgggccagtggaccgggcccaagactcactcaacccgctcgtcacgtc

SEQ ID NO: 145696 - DNA, 444 bp, Zea Mays
taacagacactcatctcaatataaactatgcggacggcatttacaacagccttcgacatagattgtacatgacattaaacacacatcagttgtccatggtttcgtccaaaattcatccccatgcgtttgtttacccaggattgggttatatcattgggagtacactagcaaagtcaagttttaacgctttacaacccacaggcacggaatcaagcgtctcccagacgtcaaatcaagatagcaggagaccgttagggttcagaccatcacatccttggatctaagcaggataagaaaaggaaataatataacttgttagggtgccatcttctacttggtttcgtcaccatcgcaaaaattggattgcacctagtggatgcaatcaccagttggaaacttccacgggcttgccaggaggacttctgctcctggcacggaatccat

SEQ ID NO: 145697 - DNA, 532 bp, Zea Mays
atgagagattatccatattgttgtactagcaccacatcaacgaatccatacaggcctttagcagcacacttgaaaaaacaaccatgttttaattctgaactctgaagtcgcctttacaaacagcactgcaacgcagaaagctacacaagctacaccagacaaggggcaacacaatctcgtcatctggtgcagtacatagtagttatgatttatgaacaactctaactcctatcgtcccaccatgcacaatgcacttattatcactcaataactataaaaacactgctatctgaactttcagtatctcaaacacaaacagagaagccatggcgctgcctgcagcctgcagcctatgtggtgaggatgggcgggaggtaatccgacttgttgccgaggacgcgggcacgggtgtcagggaagttctccatcccgggcagctcagtaacggtgccgtcggcagtgacaccgatcgggtagctgaggaggtggcccgggaggtcctgctccaggtcatcactcgagtacaggtccc

SEQ ID NO: 145698 - DNA, 1472 bp, Zea Mays
tggggctgtaactggcgtactgccactgatgctgtgaatctgtgatgcacgacgaagaaggcgactccgtagctcgtggatcattgagagccacttgtgcatttgacatggcagggcatcccaaataatcaatgcagttggtggtgttcatggttgatgcggacgggcgggccagctataaacaaattttcatagtgtatacttgggcagacccgatcatcagacgttttccaaaatgaaaaaaaaaacagcatcagatcaggtgacatggcatctcattatctcaacgctgctcacctcgaggttttagctgctgctgcgtgctgcccgtgtcaagtccggagcaagagcaaccaaccaaccacctcctcccctctccgtctcccagtccggcctcgctcgccactcggagtctcggagtcaaccgccagcgcctcgatccggcgaagccagcccagcccatggcctccggcgccgtaccaccgcagcgggtcgccctgctggcgctcgccgccgccctctccgtcgtctcattcccgcacctgtccctcctcgcctcgtcccatccgctcccgcaggaagctgctgctgctgctgcgggtgcggcggcgggaggcgaggcgtccgagcctcacggcaccgccgccgatggtgccgccgtggcgcggcgcgcgtgcacgtacacggtgcagatcaagacgagctgcgcgtccccgcggagctccgcggacgcggtgagcctcgcgttcggggacgcgtaccgcaacgaggtgtacgcggcgacggtgacgccgcggcgcgggttcgagcgctgcgccacggacacgttccgcgtcgccgggccctgcggctacggcgtctgctacctctacctgcgccggtcgggccgcgcggccgggtggacgcccgagtgggtcagggtgtacgagccggcgtccggcgcgccctccaccttctactacggcgacccgctccccgacggcgtctggtacggcttcgaccgctgcgtcaaggccggggccggcgcctctgccgagcatggtgccgcggcgcggacgctgtgacggacggacgcggacgccgccggtctctgggcgacagggcgaggtagcagagcgccactcgtggcgcgcggtcctgctgccgtgtcaagcgatgattgctggggcacggcgtctctttctgtgcaagtggagtattcatttcgggtggctgctagtagtaatagcttctctatttggtctatttgcgttacgtgtagtacgtgccacgcataataaaaagtagtacgtatgtctgaaaaagaaaatatgagtcctcaaaggattttctatgcaacgctagcaataaaaaccgatccaatctgtgagttgtttttttctagttcgcctctcatcagggccctgttgccaattcgacaacgatcccacactgtatgcccggtctgattagctgccttccttttgctgtct

SEQ ID NO: 145699 - DNA, 1284 bp, Zea Mays
gcatttgacatggcagggcatcccaaataatcaatgcagttggtggtgttcatggttgatgcggacgggcgggccagctataaacaaattttcatagtgtatacttgggcagacccgatcatcagacgttttccaaaatgaaaaaaaaaacagcatcagatcaggtgacatggcatctcattatctcaacgctgctcacctcgaggttttagctgctgctgcgtgctgcccgtgtcaagtccggagcaagagcaaccaaccaaccacctcctcccctctccgtctcccagtccggcctcgctcgccactcggagtctcggagtcaaccgccagcgcctcgatccggcgaagccagcccagcccatggcctccggcgccgtaccaccgcagcgggtcgccctgctggcgctcgccgccgccctctccgtcgtctcattcccgcacctgtccctcctcgcctcgtcccatccgctcccgcaggaagctgctgctgctgctgcgggtgcggcggcgggaggcgaggcgtccgagcctcacggcaccgccgccgatggtgccgccgtggcgcggcgcgcgtgcacgtacacggtgcagatcaagacgagctgcgcgtccccgcggagctccgcggacgcggtgagcctcgcgttcggggacgcgtaccgcaacgaggtgtacgcggcgacggtgacgccgcggcgcgggttcgagcgctgcgccacggacacgttccgcgtcgccgggccctgcggctacggcgtctgctacctctacctgcgccggtcgggccgcgcggccgggtggacgcccgagtgggtcagggtgtacgagccggcgtccggcgcgccctccaccttctactacggcgacccgctccccgacggcgtctggtacggcttcgaccgctgcgtcaaggccggggccggcgcctctgccgagcatggtgccgcggcgcggacgctgtgacggacggacgcggacgccgccggtctctgggcgacagggcgaggtagcagagcgccactcgtggcgcgcggtcctgctgccgtgtcaagcgatgattgctggggcacggcgtctctttctgtgcaagtggagtattcatttcgggtggctgctagtagtaatagcttctctatttggtctatttgcgttacgtgtagtacgtgccacgcataataaaaagtagtacgtatgtctgaaaaagaaaatatgagtcctcaaaggattttctatgcaacgctagcaataaaaaccgatccaatctgtgagttgtttttttct

SEQ ID NO: 145700 - DNA, 136 bp, Zea Mays
ttcttttttttatttctatcctcttctctagttcaagtttacaatattcaattcaaattcaaatttcctttctcattccaatcctaagttcgattctgaatttcaagcatatatttgatgcatcaaacataaatca

SEQ ID NO: 145701 - DNA, 307 bp, Zea Mays
cggttgtgcctgctggggtggcggtggcgggaactaggtaagggagggaagggtatgtatgaggtagagcagagccgcaacggtgatgctgtcacacactgtttctagaccaccagatctcgcagctgtaggattgcaagttcatgccggcggtggaggtcaaggcgctatgcgagcacgcaaaggcgatcctcatggaggagtggaacgtcactgtgtgtggcgacatccacagctagttctatgaccccatcaagctcttctgcatcggcagcaacgcgtctaacaccaaccaccactttatgtg

SEQ ID NO: 145702 - DNA, 1125 bp, Zea Mays
gattagcctcctccgttgcagctgcaggttctcgccgactccccttctccttcgacctccgccgctcgccgccgtttcccgtccgcggcggcgcctcctcccctcccactcttcctcgttgtcgatctcgtctcgggtaccatggcaagatcactctccaccgccctcgtgaggggacttatgagatcgtcccgtgcatcgacatcagctgctgtgtcacgaccagctatccagcagtttatgaactattcatcaggtcttagtggcactcctaatgcaaatggggactcagtgacaacacgagtagctgctgatcacgacacccatcaagattttcagccaacaagtaaaagttcagatatgtctttcagtgacattgttgctcaggatgtgaaggagcaccctgttgtcatctatatgaaaggttatcctgatgctcctaggtgtggtttcagtgcattagcagtgaaggtcctccagcaatatggtgtccccatcagtgctagagatattctttcagatctaaagctcaaagagagtgttaaagcatacagtaactggcctacgtttccacaaatatttatcaaaggagagttcgttgggggatctgatatcatactcaccatgcaccaggcaaggctttaaacttttaatctagttactgtatgacccagatggcgttaaacggagactgaatttttcttcacccctttcttcagaagggtgaactgaaggaactgcttggcgatattgcacaaaaagccgaacaaagtggttcttcatgaaacaagcatcagtatttgtgatgcaaacttcccggactggatgttccttctcagaagattttaggtgatcttgcattgttgccctgtggcttcggatttgaatacgttctctgttttgttctgttctgttcttgccagttgtgatggaagatccactcaaggccgaattgcaggagtaaccaaagttatagttctcgataaataaatgccaatgctcgacactattcttttatgcatctagctgcctgccttagcttaagcttgggtgctttaagttgcttttaaactgaacggtgctgttgaaacatgtaattagtatgtgacatgcttatacgctcta

SEQ ID NO: 145703 - DNA, 1112 bp, Zea Mays
gattagcctcctccgttgcagctgcaggttctcgccgactccccttctccttcgacctccgccgctcgccgccgtttcccgtccgcggcggcgcctcctcccctcccactcttcctcgttgtcgatctcgtctcgggtaccatggcaagatcactctccaccgccctcgtgaggggacttatgagatcgtcccgtgcatcgacatcagctgctgtgtcacgaccagctatccagcagtttatgaactattcatcaggtcttagtggcactcctaatgcaaatggggactcagtgacaacacgagtagctgctgatcacgacacccatcaagattttcagccaacaagtaaaagttcagatatgtctttcagtgacattgttgctcaggatgtgaaggagcaccctgttgtcatctatatgaaaggttatcctgatgctcctaggtgtggtttcagtgcattagcagtgaaggtcctccagcaatatggtgtccccatcagtgctagagatattctttcagatctaaagctcaaagagagtgttaaagcatacagtaactggcctacgtttccacaaatatttatcaaaggagagttcgttgggggatctgatatcatactcaccatgcaccagaagggtgaactgaaggaactgcttggcgatattgcacaaaaagccgaacaaagtggttcttcatgaaacaagcatcagtatttgtgatgcaaacttcccggactggatgttccttctcagaagattttaggtgatcttgcattgttgccctgtggcttcggatttgaatacgttctctgttttgttctgttctgttcttgccagttgtgatggaagatccactcaaggccgaattgcaggagtaaccaaagttatagttctcgataaataaatgccaatgctcgacactattcttttatgcatctagctgcctgccttagcttaagcttgggtgctttaagttgcttttaaactgaacggtgctgttgaaacatgtaattagtatgtgacatgcttatacgctctatgttttgttcttttttgacatcaactctgtttgcagttctactcaaatagatgtactgctttgttccaccacc

SEQ ID NO: 145704 - DNA, 619 bp, Zea Mays
gttcttctccgtaccccaatcactgctactcaacagccaactctttcgcaaccaaatatttcttctggcgttttggggtttgcaaaccgctatcaacattggagttggagcagaatgtgatctgtccaattcttctcttgtcttatttttggcgtgctttgctcttctttccccctatttcctgaggaggggttcccgtcttaatctcttgcgtttagtgtggcttcgaagagttagcagctgccatggcacataatgtgtgggaggcggacaagatgttggattcctacatttatgattacctgttgaagaggaacctgcagaacacggcgaaggcattccaagccgaaagcaacgtgccttcggctcctgtttcgattgatgcgccaggggggtttctcttcgaatggtggtcggttttctgggacgtcttcattgcaagaacgaacgaaaaacattccgattctgccacttcttaccttgagtcaattaaagcacgggagcagcagcaacaatcgcagcaccagatccagacgcagcaactcttgctacagaggcatgcgcaacagcatccgcaagagcagcagcaatggcggcagcagaagcaacagcagcgcag

SEQ ID NO: 145705 - DNA, 504 bp, Zea Mays
atgtacccggcccagccattacaacaccagctccagtttctcactcctcagcagcagcatgctctaattcatgttcaagcacaacaaaatgccacttcacctggagacatggataacagacgacttcggatgctttttagcagccgaaacttggttcctgggagagatggtcaatcaactggtttcactgaaattgttcccagtgttggccagtcattgcaaaacatgtgcttacctatgcagcgcactgagacagatatgctgatgaagaagatagctgctctacagcaacaacagccgagtaacaatctgcaacagctcctccaacatccattactgagtcagcaacaacaaagctcaacttatcttgaaggtgagcaggaaaaaatgggtgctggaattgtaacagtggcttttgctggaaatgaacaggtttctaagaatcgaaatgggcgaaagcgcaaacatcctatctcctcgtctggcccagccaatagctctggt

SEQ ID NO: 145706 - DNA, 3900 bp, Zea Mays
atgagagatgcctgcccttatttacttcaaagctgtaattgcagcaaacatggttattcaattcgtacgttcactgggcactcagcatctgttatgtcactcgatttccacccgaacaaggatgacctcatttgttcttgcgatggggacaacgagatacggttctggagcatcaagcatggaaatgctgtccgaattttcaagggaggttcgacccagctgagattccaaccacgttatggaggactccttgcaacggcttcagacaatgtagtctctatcctggatgtggagaggcaagcttgcgtgaggagatttgagagccacactaagggcgtcgattccgtgtgctgggatcccaccggcgagtacgtggtgtctgtcagtgaagacacggtgaaggtgtggtctttgaacgacgagagcttcgtgaacgagcttagctgcggcgggagaaagttcagttcgtgcactttccatcctacgtacccatccttgcttatcattggctgttaccagtctctggagctgtgggacatgtccgagaaccggagcatgactgttgcagcgcacgacagcctcgtctcggccctggcatcgtcgagctccggcctggttgcttcgagtggccatgacaagtatgtcaagctgtggagatgagcttcgactttcctgccctggcatgttaagtacggttgtggacgcgccccaacccttttggcaccattagctatctgcttgcattgcagtagcgctcaggagttaggatggtgactcgaccgcctgactgaacatgtgtccgctgaagtagcgtgcagtaaaaccctgaagaagtgggtttagcgcctagcttttgtataggaaattagaacacgggttatgttaagtatccaatgtctgtcactaccttgacatctgacatggcttgaaagcttttgctgctgcaactcggcttccgaaagggatcacatttctgtgctcgtgggtggcgtgtgtggtgtggtgttgcgtacaagacaagatgcaaggctagaaagataacggcagtcccaacttagaagaaaggaacccttgtagcccgtgatgcctagctaacgcaacgagattcccgtgttcaattctaattcgcacgtaggagtagcagatctgcggatctgccgttccgattcctctacgaggaagaacagctatgcctccggtcattcaagatctgtggccttgtttgctatgcctgcgtcgaatcatcttcttcgtctgcagacttgttcgagacgccaccctcccccgccgcgcgccgccgcccgcggacatggatctccttcgctctcatctccacaaggtccggatccccgagccaaccaaccgcatccacaaggacgagtgctgcgtctccttcgacactccgaggtcagagggaggcctgtacgtggacatggtctcgttcctggggttcgggagggagtacgtggagtggaacttcgagaagacggggaaccccgtgtacctccacatcgttcagcgccggaagccggagcccgacgaggcggatcgcccgcttaagaagcccaccctcctcgctataggtgtggaaggaggttttggtgatcaagaaccagaatatgatgaaacttttgaaatagtcatcttacctgattttatttgtcttccatttccgtcagttgatttgccagagaaggttaggcttgcggttgataaagttttacttgctgaaagtgctgatagaaaagaacaactggctgcttgggttgctgacaaaaagaacattagtgcatatgctatggacctgcagcagctagacaatggtgttattgtgcctcctactggatggaagtgtagcaaatgcgataaaactgagaacctctggctgaatttaactgatggtatgatcctttgtgggaggaagctctgggatggaagtggtgggaataatcatgccattgaacattatgaacagactaaataccctcttgcggtgaagcttggaacaattactgctgatttggaagcggcagatgttttctcgtaccctgaagatgatagtgttgaagatccgctattagctcagcacttatcacattttggtatcgatttttcttcactccaaaagactgagatgactactgctgagagggaacttgatgctaacacaaattatgactggaatagaatacaagaaagtggaaaagacgctgagcttctgtttggacccggctatactggtcttgcgaatcttgggaatagttgctatatggcttcaataatgcaagtcatgttttcaatccatcctttcatatcaaggtacttcgagaaacagagtttgaaagctgcatttgcaactgcacccgctgatccaacagtagacctaaacatgcaactgacaaaactagcgcatggtttgctctctggtaaatattctgctccagcaaaggaggggcaagaagggatacgttctcgcatgtttaagtcagttatcactgcgaaccatcctgaattttcaagcatgagacaacaggatgtccttgaattcttccttcaccttattgacagagttgagaaggcaaaccctggagaccgtgagctaaatcctttttccggtttcaagtttgttgttgaagagagggttcagtgcccttctgggaaggtttcttacaacaaacgatctgacaacgttctttctttgagcataccactgcatgaggcaactaataaagagcagctagaagcttttaatgagaagaaagctgcaatgaacttggatggaaaagaagtgtctaatgaggatattgtcaggcctagagtcccattggaggcatgcttgtcaagtttttcagggccagaggagattccagatttttatagcactgcattaaattcaaagactaccgtcactaagacagctggtttcactacctttcctgattaccttgtgctgcacatgcgtaagtttgtaatggaaacaggatgggtgccaaagaaactcgatgtttatatagatgtgccagatacaattgatatcacacatatgcgcagcaaaggattacagcctggggaagagctgctacctgaaggaggttctggtgacgacagtgccgagcctgctaatcctgttgccagtgaggatattgtaacccagcttgcaagcatgggcttcaactaccttcattgtcagaaagctgctattaacacatcaaacacaggagttgaggaagcgatgaattggctcctctcgcacatggatgatccagatataaacgacccaatatcaaaagattcacgtgcttatgagccatctgttgacgaagcaagtgttcaaactctcatctcctttggattccaggaagacattgccataaaggccctgaaagcttctggtggtaatatcgagaaagctacagactggattttcagccaccccgaagcatctacctcagcatctgctgattcttccactagcaatgtaaatgctgatgacacatatattccagatggaagtggcagatacaagctgatggcgttcgtgagccatatgggcacctctacccactgcgggcactacgtagctcatgtcctcaaagacgggaggtggacaatctttaacgacagcaaggtcgcagtatctgttgacctgcccaaggaaatgggctacctctatttctttcagaggattagcaactaggcacgtcacacacaatggaaagaatggtgggctgttaggatactgtcttgctgattttaaagcgaacgtttactcacatcctgccatgctggttactgaatggtcaaccgggatatttgcttttttgttccttgagacctcgattggcatcttccggttacataagaacaaaatcgcaatgaaagaaagtagacaataagaca

SEQ ID NO: 145707 - DNA, 3857 bp, Zea Mays
ggttattcaattcgtacgttcactgggcactcagcatctgttatgtcactcgatttccacccgaacaaggatgacctcatttgttcttgcgatggggacaacgagatacggttctggagcatcaagcatggaaatgctgtccgaattttcaagggaggttcgacccagctgagattccaaccacgttatggaggactccttgcaacggcttcagacaatgtagtctctatcctggatgtggagaggcaagcttgcgtgaggagatttgagagccacactaagggcgtcgattccgtgtgctgggatcccaccggcgagtacgtggtgtctgtcagtgaagacacggtgaaggtgtggtctttgaacgacgagagcttcgtgaacgagcttagctgcggcgggagaaagttcagttcgtgcactttccatcctacgtacccatccttgcttatcattggctgttaccagtctctggagctgtgggacatgtccgagaaccggagcatgactgttgcagcgcacgacagcctcgtctcggccctggcatcgtcgagctccggcctggttgcttcgagtggccatgacaagtatgtcaagctgtggagatgagcttcgactttcctgccctggcatgttaagtacggttgtggacgcgccccaacccttttggcaccattagctatctgcttgcattgcagtagcgctcaggagttaggatggtgactcgaccgcctgactgaacatgtgtccgctgaagtagcgtgcagtaaaaccctgaagaagtgggtttagcgcctagcttttgtataggaaattagaacacgggttatgttaagtatccaatgtctgtcactaccttgacatctgacatggcttgaaagcttttgctgctgcaactcggcttccgaaagggatcacatttctgtgctcgtgggtggcgtgtgtggtgtggtgttgcgtacaagacaagatgcaaggctagaaagataacggcagtcccaacttagaagaaaggaacccttgtagcccgtgatgcctagctaacgcaacgagattcccgtgttcaattctaattcgcacgtaggagtagcagatctgcggatctgccgttccgattcctctacgaggaagaacagctatgcctccggtcattcaagatctgtggccttgtttgctatgcctgcgtcgaatcatcttcttcgtctgcagacttgttcgagacgccaccctcccccgccgcgcgccgccgcccgcggacatggatctccttcgctctcatctccacaaggtccggatccccgagccaaccaaccgcatccacaaggacgagtgctgcgtctccttcgacactccgaggtcagagggaggcctgtacgtggacatggtctcgttcctggggttcgggagggagtacgtggagtggaacttcgagaagacggggaaccccgtgtacctccacatcgttcagcgccggaagccggagcccgacgaggcggatcgcccgcttaagaagcccaccctcctcgctataggtgtggaaggaggttttggtgatcaagaaccagaatatgatgaaacttttgaaatagtcatcttacctgattttatttgtcttccatttccgtcagttgatttgccagagaaggttaggcttgcggttgataaagttttacttgctgaaagtgctgatagaaaagaacaactggctgcttgggttgctgacaaaaagaacattagtgcatatgctatggacctgcagcagctagacaatggtgttattgtgcctcctactggatggaagtgtagcaaatgcgataaaactgagaacctctggctgaatttaactgatggtatgatcctttgtgggaggaagctctgggatggaagtggtgggaataatcatgccattgaacattatgaacagactaaataccctcttgcggtgaagcttggaacaattactgctgatttggaagcggcagatgttttctcgtaccctgaagatgatagtgttgaagatccgctattagctcagcacttatcacattttggtatcgatttttcttcactccaaaagactgagatgactactgctgagagggaacttgatgctaacacaaattatgactggaatagaatacaagaaagtggaaaagacgctgagcttctgtttggacccggctatactggtcttgcgaatcttgggaatagttgctatatggcttcaataatgcaagtcatgttttcaatccatcctttcatatcaaggtacttcgagaaacagagtttgaaagctgcatttgcaactgcacccgctgatccaacagtagacctaaacatgcaactgacaaaactagcgcatggtttgctctctggtaaatattctgctccagcaaaggaggggcaagaagggatacgttctcgcatgtttaagtcagttatcactgcgaaccatcctgaattttcaagcatgagacaacaggatgtccttgaattcttccttcaccttattgacagagttgagaaggcaaaccctggagaccgtgagctaaatcctttttccggtttcaagtttgttgttgaagagagggttcagtgcccttctgggaaggtttcttacaacaaacgatctgacaacgttctttctttgagcataccactgcatgaggcaactaataaagagcagctagaagcttttaatgagaagaaagctgcaatgaacttggatggaaaagaagtgtctaatgaggatattgtcaggcctagagtcccattggaggcatgcttgtcaagtttttcagggccagaggagattccagatttttatagcactgcattaaattcaaagactaccgtcactaagacagctggtttcactacctttcctgattaccttgtgctgcacatgcgtaagtttgtaatggaaacaggatgggtgccaaagaaactcgatgtttatatagatgtgccagatacaattgatatcacacatatgcgcagcaaaggattacagcctggggaagagctgctacctgaaggaggttctggtgacgacagtgccgagcctgctaatcctgttgccagtgaggatattgtaacccagcttgcaagcatgggcttcaactaccttcattgtcagaaagctgctattaacacatcaaacacaggagttgaggaagcgatgaattggctcctctcgcacatggatgatccagatataaacgacccaatatcaaaagattcacgtgcttatgagccatctgttgacgaagcaagtgttcaaactctcatctcctttggattccaggaagacattgccataaaggccctgaaagcttctggtggtaatatcgagaaagctacagactggattttcagccaccccgaagcatctacctcagcatctgctgattcttccactagcaatgtaaatgctgatgacacatatattccagatggaagtggcagatacaagctgatggcgttcgtgagccatatgggcacctctacccactgcgggcactacgtagctcatgtcctcaaagacgggaggtggacaatctttaacgacagcaaggtcgcagtatctgttgacctgcccaaggaaatgggctacctctatttctttcagaggattagcaactaggcacgtcacacacaatggaaagaatggtgggctgttaggatactgtcttgctgattttaaagcgaacgtttactcacatcctgccatgctggttactgaatggtcaaccgggatatttgcttttttgttccttgagacctcgattggcatcttccggttacatctgtgttttttttattactgatttgcattggtggttgtcttgtgttct

SEQ ID NO: 145708 - DNA, 219 bp, Zea Mays
ccaagacattataattaaacgaagtttgttccaacagtatctaaatcatttgaaggataaacaatttattatttatccctgtacaaacgataatatctgtttcatgaaaggaatagaacaaacagctccaagtagaaatcatcaacacgcacgccacgctggggcactggccaccaaatgtgaaacctgttccacgtactggagtgcagaaacggaccc

SEQ ID NO: 145709 - DNA, 1652 bp, Zea Mays
ggaaaaatttagggtaaccgttgcagatagtctcacctcgccgccttagaacaccctggccgcgatggcgtcagcggcggcggaagctccgggcgcatcggcctcttccgcggagaacaggctcctgcagtccctcgcagagcgggggtggcgcttccgtgaccccaccgacgaggccatccaagccctgctcctcgcctcccccactccgtcgccggaggccgtggagtccgagctcgtcagcatggacctgaggatgtttggcggaaagtgccttcccgatcgggccgccgccggcggcacgtcgaagcggctttcgtacctccacggccccgtcgtcttgcagatagtctctttaagagatatatatcacagcagcattgatgcgtcctttaagaacccgcagcagcgtcgccttctgcgctttggtctcactgatgggatatgtgaagcagtagccatagagttttctcccatcccattcatcaccgaagagatagctccaggtaccaagattcgcctcgagaatagggttccaatcaataatggcatattgtgcttaagcgcgaaaaatgtgactgttattgggggggctgtccaatcattgtatgaagaatggcagatgaaccagaaatactctggcttatcccgtccatcattgaggttgtctccaagtgatgatggagttgggcctccaccatttgagaagttagacattgaagcacgcccctgcagggaaaccaaagttcaagcatatcctgctaggaagttggcagttactcatgaccatggaccagttaattctggtggcaagccaatgaatgagggttcaaacgatgagaacagagacaatattgagagtaaggttgaatctaagcaaattactcaagacagcaggccaaaagaggtcagcgaagctgttccagtccagaaccaagctgccgcgcagaagctactgcagaaaatgtcgcaggccgtgcctgaggacaggcgcggtcgcggtcatagattcaagggcaaaggcaaggaagaagatgctcaggtttttaccctcgatgaatgggagaagaggaaagccatcagttcgaagcccgctgcggaaagctacgtgcatgacactagccgagacgaggagctggcgaggcaactgcaggaacaactagacctagaagacttgcatggtggggcaggtgcaggcgttctccatggcggggccgagagctcggatgctgaacggttacggatgagcatgttcagcttcagtggccctgacgaagcaggtggtggtaggagagattttcgaggccgcggcaggggaaggggcggagggcgacgcaggggcagaggaagattttaggcccggccacacagttgtaggtttattggtttgttgcgtgttcagtgtagtccaccggttgtatgggtaaaagtggcgcgatgatatccttctcaaatcctgtttctgaatttctctagcctcatggcgagagcagatgctagtcagattaaggaacagtttgtagacttcctggagtttttgaactgttcttagatgcaggagcacatcgtacattgtttttggaagaacgagttaaaagtctgaaatttacatgacttgtatcttctgtttacgtgtgctgttcagccgtttg

SEQ ID NO: 145710 - DNA, 1463 bp, Zea Mays
ggacgccatggaagcgacgatgcttctcctcctagccctcctcctcctagcacggcaatgcacggcctccgatgctgccggtgaagcaggcgggttcagcgtagacttcatccaccgcgactccgccaggtcgccgttcgcccagccctcgctgcccccgcacgcccgggcgctcgcggccgcgcgccgctcgctccggggcgccgcgctcgggcgctacgtcggcggcgcgtcgcccgcgcctgggcccgtgcccgaagccgacggcggcgtcgagtccaagatcatcaccaggtcgttcgagtacctcatgtacgtgaacgtcggcacgccgccggcgcagatgctcgccatcgccgacaccggcagcgacctcgtgtgggtgaactgcagcagcaacggcggcggcggcggcgccagcgacggcgccgtcgtgttccacccgtcccgctcgacgacgtacagcctcctgagctgccagtccgccgcgtgccaggcgctgagccaggcgtcctgcgacgcggactccgagtgccagtaccagtacgcgtacggcgacggctcgcgcacgatcggggtgctgtcgaccgagaccttcagcttcgccgccgccggcggcggcggcgagggccaggtgcgcgtgccccgcgtcagcttcggctgctcgacgggcagcgccggcagcttccgctccgacgggcttgtggggctcggcgccggggccctgtccctcgtgtcgcagctcggcgccgcggcgcgcatcgctcgcaggttctcctactgcctcgtcccgccctacgccgccgccaactcgtcctccaccctcagcttcggcgccagggccgtcgtgtcggatcccggcgccgcgtcgacgccgctggtgccgtcggaggtggactcgtactacaccgtcgctctggagtccgtcgcggtcgccgggcaggatgtggcgtcggccaacagctcccgcatcatcgtcgactccggcacgacgctcacgttcctcgacccggcgctgctgcggccgctggtggcggagctggagcgccggatcaggctgccgcgggcccagccgccggagcagctgctgcagctgtgctacgacgtgcaggggaagtcccaggcggaggacttcggcattccggacgtgacgctgcggttcggcggtggcgcctccgtcacgctgcggccggagaacaccttctcgttgctggaggaggggacgctgtgccttgtgctggtgcccgtgtcggagtcacagcctgtgtccatcctcgggaacatcgcgcagcagaacttccatgtcgggtacgacctcgacgcgcgaacggtcaccttcgccgccgtcgactgcacccgctcgtcggcctccagctgaccgacatgcggacccctgtaaaaacatgagaataagatcatttggtataagatggaaaactctgtgatcgtggtttgagtttaca

SEQ ID NO: 145711 - DNA, 205 bp, Zea Mays
gggaaccgtgggttatacatgataattcacaactaaaattttttagcgtgcctctaataatcattgtttgcgaaaaactttttaacgttcttttgggttgttctaaagcccatacgacggaaatattgttttctggcacaattggcaaaagggatcaaaatacctgcaaaaccttaattcaaggggcttttgctacactattggc

SEQ ID NO: 145712 - DNA, 93 bp, Zea Mays
gcatggctgcatccactccagcgccccgcttcgcccggtcatcgcctcgctgccgccttcctcgacccgcacccgcaaaagctaatggcgtaa

SEQ ID NO: 145713 - DNA, 1592 bp, Zea Mays
taacacagctcagctcccccaaactccctgaatcgagggggtctgggagttattcagcaggtaacacacacacactgacaaacaatcaccaccaaccaatgcatccacgctcccccaccccccatccaatccaataccaatcctgccttcctcgaatccagcacaggcaggcagagctgctcagctcagcagctggtgtcgagcatgccgtcgtggaaggcggcgacgcggtccggggtgacgcactgcgtgatgagcctcgccccgggcttgtgcgcccacggcttcaccaggatgcacgtggcgatgtagtccaggttggtgagcggcacgacgtgcgcgggcgggccccagccgtagtccacctccgcgaagccgaggcgcgtccagtcggacaccagcagcgtgcggtagtcggccgtgatctggtacgggtcgacgccggcggcgccggcctcgcccgtcgcccaccgcgcgaactccgcgggcatccgccgcttgccgtccttgacgatcctcaccacctccgccaccgaggagcccgccaccttccccgcgggcgccgacacgcgcatgatgtagtagcagttgccgtagaacccggcgcctccgcgcgggagcgagccgtgcagcgcgggccgcgcgttcacggcgaagcagacgtggacgagggtgtccggctcgaaccccgccgcgcgggtgcggctccgccacgccttggcgatgagcacctcgaacgcggagcaccacccggcgcccgccgcgtgcgccgcgctgtactccgccttgtagtgcccgatgtagtcggcggagatgtccatggcgaggtacgccagccgcctggtgccggcgtcgggggtcgggagccgccccaccagcgccgccgccgggtccgggatcgcgtcgcggccccactgcggctccaccgacaccgcgccggcgccggcgcctccggcgctggcgcgggccagctccccgaccgcggtcatgaactgcgcggcgcccgggccgtcggcgacggcgtggctgaagcggaagcccacgacgaagccgccgcacgcgaaggcggtgacctggacgagcaggaccagcgcgcgctcgtcctcggcggccggggtgggcgggaggaggtcgtccttgggcaccatcagcggggcctccaggtagtccacgtcctcgagcgtgcacgcggcctgggcctccgtgaaccacacgccggcgttgctgcagtccacggcctgctgcgcgccggactccgacaggaccaggcggcccgccagagggtagtagtggaccaatgcgcgggcgagggcgcgctcgatggtcccggccgggctgcctctggcggcggccggccggtcgggggccgccttgaagacgtggagcgactcgatcagcgccatctgcgtggggtaccggtccagccaggagaggcggagcgggccggctggcgtgggctcggccgggaccacccggcgcgccggcagccgctcgatggacttgggcgccgccgccatggatgggtgggtcggtcacggggtggagatggagttgggggaggtgttgaaaagtggtgggtgatgggtcggggg

SEQ ID NO: 145714 - DNA, 761 bp, Zea Mays
gtgcgcatgcgcggtcaagagttccggtgcttcgtcgctgttgcgttggccgttggggtgcctatcttctaactgcatttggtactgatttgtcaacggggagatatggtggattagtttccgactgctaatctgaaaaggtttcagctcaggtacaggagactgtcggactgtgattgcgtgtcgttttacagcatggaattcgaaggatgtggatgcctacctaaacgctagcgcgatataagctggggcccaaattttcttctggcacgatggtaatgatgtaaagttctcttgccgttgaacaacaatgcattcgattcgagtgtagctgtagctctctgtagagttgatgtacaagcccaaccatcttgagtgaacataatagaaggataacatcagatgctccaatggaacacacatgactgatcaaagcttggaaagggcaaaaaaatatcagggaaggaaatttatcaggacagaccacgtcgagggtaaaaacttgggatgtgtaatgcgcggcgtgtctgaccaaatacaaggaataaccaggcatggttacgggatctaagtaaataaaccattacagcttgtcttatacaaaaaaaggttgcccttctaatctcccacgctataatctcaattcacgaacccgctgatctgccctgaatcagtggatcgccaagccttgcatcccttgtgccccctcttcggtgactttgttagcttgtattgtgttgatagctctggcaatgtttccc

SEQ ID NO: 145715 - DNA, 601 bp, Zea Mays
cggcgagcagcaagctctaccggggtccctcgacgggatgatctcggccacgtcggctcgctcgggagttcaacaaccgcgcgtccaagatcgggctcgggatccaccagacctcccagaaagctagcccgccttgccaaattggcaaagagaacgtctgtttttgatgatcctacattagagattcaagagctgacctcagttatcaaaaaggatatcacggctttgaatactgctgtcgtagacctacaagctctctgcaattcacaaaatgagagtggcagtctctccaaggacacaacaaaccattccactacagtcgtggacaaccttaaaaatcgtctgatgagtgcaacaaaagaatttaaagaagttcttaccatgcgaaccgagaatttgaaggttcatgaaaatagaaggcaaatattttcttcgtcagctgcaaaggatgagtcaaatccattcatccgtcaacgaccccttgttgctagggatccatcggagtcctctgtgcccccagcaccatgggccagcgactctgcatctaccccactattccagaggtacggttacacacacaatactccatgaatttgtactt

SEQ ID NO: 145716 - DNA, 438 bp, Zea Mays
ctgacgtgttacctatgacagaatcgacgagaacatggaggaaaccgtggctaacgtggagggagcgcagggccagctcctgaagtacctcaacagcatttcgtccaacaggtggctgatgatgaagatattctttgtgctgatggtgttcctcatgatcttcatattcttcgtcgcttgaccttctgtaatcattctgcccgagacgctctggctgctaaacgcatagcattcttttatttttaactcatactacaccgtgtacacaattttcacccctggatgatgagcagagtcgttcacccttttgtggtcatgtaaatcgggaggagttccagtacttaagtttactcttgattggtaatatctccactgtatttgatgtatcagtatgctgaacagtaatagtaataggcaggtggtagcagtgttacaata

SEQ ID NO: 145717 - DNA, 1513 bp, Zea Mays
ctgtgcctctctctcgtagtcgtatctgcgttgcgccgctgcttaaacaaacgccggacaggggagggccgcggcacgcgtctccagtctccaccctccacggctccacccatctcaaaaccctagcaaccgcgcctccatcggtccatccctaccccaaatcccaatccaagttcggtccccaggcggcgaggaccctcccgcgccgactcgtccccgcagatcggcgggcggggcagattcagattcgggtccgtggttcgctcggctagcctcgccggggtcccaccgcggcggtcggggagcatggtgggaggggggaggcggggaggagcggcggcggaggaggtgaagctcaacaccggcaacgtgttcgcggcgctcgagtccctcaagaagaagaagaagggcgacaagggcagggcggccgggccgtcctccaggaagaagcacggcgcgggggccgcgcagcagcagcaggagccgccgcagaaggatgtcttctgggctcccgcgccgctcaccaccaagtcctgggcagacgtcgaggacgacgacgacgacgactacttcgccaccaccgcgccgccgcgccccgtatgggccgccgccgccgccgccgagcccgccaaggaggaggaggacgtcgaggatgctgtccgcgccgcccttcaggaggacgttgagagtgacgacgaggaccttgatgacgaggaccttgatgatggagctgagcatgaagtggaagatgccccagccgaacttgctgtcaaaacagttgaagccctggctgcgccacccaaagatacagaaaggcagctgtctaaaaaggagttgaaaaagagggaactagcagaacttgatgcagtattggctgagctgggactttctgggaactcaaccagcgctgcacaggatgctgagaaggaaggtgccaaccaagctggtgatgcagagaaaaaggaagatgctactgtcccctcagagagcaagacctccaagaagaagaaaaagaaggacaagagttcaaaggagggaagaaaagaaacacaagaagcagccgaggggtcagaggagactgccagtgcaggacctgatgaagaagataccactgctgtggacgtgaaggagcgtttgaagaagatggcttcaatgaagaagaagagatcgagcaaagagacggacaccggtgccaaaatcgccgctgccgaggccacagcaaggagcgcaaggcttgcggcggccaagaagaaagagaagagtcattacaaccagcagcctgtgcggtaaatgggcataaagttttggatttgggtgctctgaattttatatttccttgtagttggactcacaataatacttttttgatctgtcgtatttatgaccgggaagttcctttgagttccatttcagaattcatgaaaggcctttgtggttgcaaacggtggtgtaattgtgttttaaattgttcatccagcgaaaacttcatggacaacacgaccaattagggcta

SEQ ID NO: 145718 - DNA, 1579 bp, Zea Mays
ctgtgcctctctctcgtagtcgtatctgcgttgcgccgctgcttaaacaaacgccggacaggggagggccgcggcacgcgtctccagtctccaccctccacggctccacccatctcaaaaccctagcaaccgcgcctccatcggtccatccctaccccaaatcccaatccaagttcggtccccaggcggcgaggaccctcccgcgccgactcgtccccgcagatcggcgggcggggcagattcagattcgggtccgtggttcgctcggctagcctcgccggggtcccaccgcggcggtcggggagcatggtgggaggggggaggcggggaggagcggcggcggaggaggtgaagctcaacaccggcaacgtgttcgcggcgctcgagtccctcaagaagaagaagaagggcgacaagggcagggcggccgggccgtcctccaggaagaagcacggcgcgggggccgcgcagcagcagcaggagccgccgcagaaggatgtcttctgggctcccgcgccgctcaccaccaagtcctgggcagacgtcgaggacgacgacgacgacgactacttcgccaccaccgcgccgccgcgccccgtatgggccgccgccgccgccgccgagcccgccaaggaggaggaggacgtcgaggatgctgtccgcgccgcccttcaggagtgcaagaaaaactaccacattgacactgagccaaattgtactgaacgtaaacggttcagccaacaggacgttgagagtgacgacgaggaccttgatgacgaggaccttgatgatggagctgagcatgaagtggaagatgccccagccgaacttgctgtcaaaacagttgaagccctggctgcgccacccaaagatacagaaaggcagctgtctaaaaaggagttgaaaaagagggaactagcagaacttgatgcagtattggctgagctgggactttctgggaactcaaccagcgctgcacaggatgctgagaaggaaggtgccaaccaagctggtgatgcagagaaaaaggaagatgctactgtcccctcagagagcaagacctccaagaagaagaaaaagaaggacaagagttcaaaggagggaagaaaagaaacacaagaagcagccgaggggtcagaggagactgccagtgcaggacctgatgaagaagataccactgctgtggacgtgaaggagcgtttgaagaagatggcttcaatgaagaagaagagatcgagcaaagagacggacaccggtgccaaaatcgccgctgccgaggccacagcaaggagcgcaaggcttgcggcggccaagaagaaagagaagagtcattacaaccagcagcctgtgcggtaaatgggcataaagttttggatttgggtgctctgaattttatatttccttgtagttggactcacaataatacttttttgatctgtcgtatttatgaccgggaagttcctttgagttccatttcagaattcatgaaaggcctttgtggttgcaaacggtggtgtaattgtgttttaaattgttcatccagcgaaaacttcatggacaacacgaccaattagggcta

SEQ ID NO: 145719 - DNA, 82 bp, Zea Mays
atgcttgtcatctttgtgtagtcctttctggtttggcaacttatcttatctgccctcatcttgggaaggaaatatatttcgg

SEQ ID NO: 145720 - DNA, 1271 bp, Zea Mays
acgcttcccatgtcacttgggccacccagaccccagtaaaaaccctagttcccttctccatccgcaccctcgcttccttttccttctctatccgcgagcctcgtaccggcgcagccatggcggaggagcccgccgttgtcgtggcctcctccagctacgaggttgacctcgggaacctcatggcgtacgatccgtcgcatcacgtcgccaccgcctccagggaggagctgagacaggagtgcctgcggaagggtacagagctggcgcaggcggtggccgacgtcctcttcgcgctgccgcccaacgaggaccgcgacggccccattatccacctcccgccgcccaccttcagactcccgcgggagaagcatctacccaagcccaagccaccgaccaagtgggagctgtttgcaaaggcgaaaggaattaccaagcgcaaaaagaacaagcgtgagtgggatgagcaaactcaatcctggaagcggactcatggctatgaccgtgttaatgatgacaaagacattccaatcattgaagccaaattgactgacgagcctggtgttgatccatttgcgcaaagaagggatgagaagaagaagagggttgaaaagcaagaaaaaaacagactggataacttaaagaaagctgcaaaggttggcgctttgccaagtcatatacagcttgctgcgaaggcgttgcccatcacaggaacaaaagctgaccttccaaaaaaatctagaaaagaggatcttgagagtgttgtcggcatggcttcatcagcaacagcaagtggtgggaagtttgatgagaagttgcctggcgagaaacctccaaagcaccctggcaaacacagaaagttcctcccagttgccgaagggaagggaatgggcagcctggagaaacagcagaatgacaaaatcctgaactctctacttgccagaaactctgatgaaccacttgatgtcggcaaggcaattacaatgtacaaggtgaaaaaggagaagcagagaaggaaagagaaaggcatgtcatcgaaatctgataagcttaagccccagaagaaaccccacaagaagtcatcgaagaaaaaggcttaggtccacatctttcaggtgaccacagttttgaaagctcaagcaaggaggcctgtcagcatattcaattgtatttttctgctttgaatctatgagagaaatattgttattccgtttactggctatgacacaaaaacctgaatgctgttataatatatgcccatcttgtaccttttc

SEQ ID NO: 145721 - DNA, 654 bp, Zea Mays
tctcaggaagttgccttctagaattacagctatccaatatattttgtatgcagtcatatacagcttgctgcgaaggcgttgcccatcacaggaacaaaagctgaccttccaaaaaaatctagaaaagaggatcttgagagtgttgtcggcatggcttcatcagcaacagcaagtggtgggaagtttgatgagaagttgcctggcgagaaacctccaaagcaccctggcaaacacagaaagttcctcccagttgccgaagggaagggaatgggcagcctggagaaacagcagaatgacaaaatcctgaactctctacttgccagaaactctgatgaaccacttgatgtcggcaaggcaattacaatgtacaaggtgaaaaaggagaagcagagaaggaaagagaaaggcatgtcatcgaaatctgataagcttaagccccagaagaaaccccacaagaagtcatcgaagaaaaaggcttaggtccacatctttcaggtgaccacagttttgaaagctcaagcaaggaggcctgtcagcatattcaattgtatttttctgctttgaatctatgagagaaatattgttattccgtttactggctatgacacaaaaacctgaatgctgttataatatatgcccatcttgtaccttttc

SEQ ID NO: 145722 - DNA, 2166 bp, Zea Mays
atggaatccagtggcggtgataaacccactgcaacagatgctaccgaatcagtggtgggtttagatggcgaggagactttgtctgagagggaatctgttggagcaagacatggccctgccttgtctaatgggggtggaaaggaggctccttcgagcagttcatctgcagggaataagaggaagcacggcatcttgggttctaatcaaatggaactcaatgaaccagggatgccaagttccagctcaggtgattccacatggagtttagatagtctggatgaccgtcaccagatctcattgttgagaagtaagaatgaacactctgaacattcagttacttcagctggagttacagtgatcaggcagcctcgtggcgtcttgaggttaaggaagcgggatcagaatgtcagtactgagagttggactggtggtcataatattccacaagctaatggagttcctaggtcttcccaactcctgaggcggaacaagaaggggaaatcaactgtgttcgagcagaatagaattggtggtgatgaacctgtcagttgcttgagaactgagaatggtacttgtgatcaggataccggctccaagttctgttctgaaactgagttctcagctgaaaagctgtcacatctttcaggtgaagccccaaaagctgttcatgttgacaagggtgggtgtgaccatgtcaaagatgatgatggtgttagtctggaagaaaatgctgctatgatgctttgttctttatcagataacatatgtgctggatcaccaaggaagggaatgaaatcatctgatacgtcatcaaagagatgtattcctcagcattcaaatcattttaagagttcaaacaaaaaaatcaaggatgtacctagtcctgctagattgctgcggaagcgtgatggtaaagttccattcaggaagcgtcgtccgcgtcggcatttttatgaagttagccctagcgacgtggatccattttgcattgtaaaagagaggatcagagttttttggcctcttgatgagacttggtactttggcttggtcaaggaatataatccggacacaaggttacatcatgtcaggtatgatgataaagatgaagaatggatcaatcttcaaaatgagaggattaaactcctgttcttaccagcggaagctcgcaatagatctaaatgcaccaactcaaggtcagtgtttgacctgaagcatgaacagggtgacagagaagacatggatggaagcgaaggcaatacagaaagttctgagtcaggtcccattggctcatggttagctcgatcaaaccaagcaaaatctgctgcactttgtaacatcagcaagcaagatcacagtcattccaatattgttccaatttcatttgaccaaaagcagtgccgtggttctgatgctaaggagtctaatgattatataccatgtgattcatttggaaatgggagtgcaaaagttctcaaggatagaaccacacctgaggacaggaggtttcgctttgtttattctaggaaacggttttgcagaaaaacgaatggttttcttagcatttccgaacagcattctaattgtcagataagagcaagatttgctatggttcttgctgcatgtcctggtatggaatctagttctgcaactggtgcttcagtcacatatgtcatacctgcattgagcctcccactgaaacctgtttacaagttgctttgtgaagcctgttgtgtttcgttttccaataccttctttctccattgtggtacaatggttgctttatggcctgttgtacatctggacatactttttgataatgctttaggcttgaaacattttcttctcgacacatgcttgatatcggcagtatcacttctctgtttacttgctggaagcttcaagcagtgttctaggcagagaactaccaaggaagctagaataccttgtacttcgatcagatttcagatatctggtgggcatggtagaagcgaagtagtatttatgttattcaactttgttggtgtagagaaatcgaaatgggaacaccttcaaggaaagcttcaatatcactgttctaaatcggagttgtctaaagattccacaaaatgtactggtcgaagagccctttcttcaatggatctcttctccaaggtatcttcctgcctt

SEQ ID NO: 145723 - DNA, 419 bp, Zea Mays
gcgatgatgaagagtggatatcaagctggcggaaatccttagtaagagacaacaccaccacacttcagtttgcagaagatttgtttgagagggttatggacaaactagagaagtttgcatatagccacaactgtaatggactcagcattgatcagatgaaggaactggagactgatgatgtacctctgcacactattgaagtgatacatgcatattggcaagacaagaggcagaaaaggggaatgccacttattcgacattttcagtcggctatgtggaagatctacgagcagcagctgcatgaatgggaatcaaaagtatgcagaatgcagagttcgtcaaatgggtaccaagaaaagaaattgcctcccaagcctgcattgtttgccttctgtttgaggcctcgtggactccatgta

SEQ ID NO: 145724 - DNA, 282 bp, Zea Mays
atggagcagccccctgccagtggcgcggccggccttcaccaaggaggaggaggtgggtgcgtcggtagagatggtgctgctagagctggagctgggtgcggcgcggtagagatggtggtggatgtgggagcgaataagggagggcgtggaagaggcggtggtggctgcagccatgccaagggtgaaaggcctcggttccaaacttccactggccttgattcccgttacactacatgtggctcccgccgcccgccagtgaatacgcatacgcccatcgaatag

SEQ ID NO: 145725 - DNA, 747 bp, Zea Mays
atggctagtgcgatgaaagcacatagtcccattaagtggaacgaagttctatcttcgaatcagcctatgtcccatgttcctaaggaacagaaaatcgcttatatcagagatctgcacccatttgagaataaggatagggaattcttggtgacagtcactgtaaaaaagattggtgataggtggtggtacaatgcatgcaaaaaatgcacccgcacagctgtggctcatggggattcctacaagtgcagcgatcaagtttgcgctaacattggcacgcctagccagaggtacaaactgcttctcgctgcaggggatgagacgggtgacatagacttcatcctctttggtcggatggcgcaacgcatcatcaagaagccgtgcgatatgctcattgtcaacaatccgatcgactttattcctgatccaatcacagatctgctcgagaagacgtatatatggaatgtcaacgcagtcgtggcagagataggtactgcaaaggacttcatccaagcatcttcatcaaggccaaaacagtcacaacctgtgttgttgcaagacgcacccagtggcgttgaagacactcctaacaaagcctctaacttggtcatgccttcgaccccgctcacaccacaaagttccgcaaccagtgtgcaagataagactttttgtgttggcagcagcactatggttccaggtgctattcccgctataacaaaggaactgacatccacgcctaggaagaggtaa

SEQ ID NO: 145726 - DNA, 1185 bp, Zea Mays
acaactattaagacctaaatgtagactgcccccgcctaatcccacccgccgctctgcctcccccgcggcgaatcccgcccgcgcctcccccgccatagaacccgcctccaaccgtgaatcgcccgccgtgccttcacccgccgctcctccatctcctcctcctcgtcgtcgccgccgccgcgctgcggggggcgccgttggcggacgccggcgcggacacctgcaaggcgtggttggtgcagtccatccccacggacatgccgcacctgagccgcatccccggggtcctatccacggccgtcactacgtatatccatccattgggctgctgatttctgtgggtcctgacctcaggagatgtgctccagtggctctcggggaatgcaacgaagagtctggacatccttgcgcagtactggcagttcttgccccagccgaacaatccgaaatcgggggactacgggttctccaagagtgacatgaggagattcggggccgacgagggccgccgggtttacaaggcactggaaaatgctgcagaccgtaagatcaaaatcaggattgtccagcactctggatttgctcctgattttgaccaagagagcgcagatctggctgcaggaagaccaaatgttgagaacgcaactgttcttttcgaggactggtggggatctggtgttgtgcacgcaaaggtctggatatcagataagaaggatgtgtatataggttccgcaaacaacgactggaaatcccttacttaggtcaaggagcttgggatttattttgctggttgcccacagatagcaaaaactgtggaggtctattttcaaaacctgtggacgctttcaaccctcaactcaactttttacaccaaacaagcctgggatacgcagtggcaagtttctagaaaggttccatgctggtctcatttcctacagcccaaagaaagatgcaggtttgcatctccctctgcaggtcacagcgatctactacttagtgcacaaatttgaaggggaaaaatggctggtacatagatggcaataaattatgtacaatctaagcacacaaatttgaaggaaaaaaatggctggtacatagatgggaaataaattatgtacaatctatccattaacctatattgtctgcatttatcttagtgctgaatctgatccatcttcgattctg

SEQ ID NO: 145727 - DNA, 843 bp, Zea Mays
ccaaccgtgaatcgcccgccgtgccttcacccgccgctcctccatctcctcctcctcgtcgtcgccgccgccgcgctgcggggggcgccgttggcggacgccggcgcggacacctgcaaggcgtggttggtgcagtccatccccacggacatgccgcacctgagccgcatccccggggtcctatccacgggagatgtgctccagtggctctcggggaatgcaacgaagagtctggacatccttgcgcagtactggcagttcttgccccagccgaacaatccgaaatcgggggactacgggttctccaagagtgacatgaggagattcggggccgacgagggccgccgggtttacaaggcactggaaaatgctgcagaccgtaagatcaaaatcaggattgtccagcactctggatttgctcctgattttgaccaagagagcgcagatctggctgcaggaagaccaaatgttgagaacgcaactgttcttttcgaggactggtggggatctggtgttgtgcacgcaaaggtctggatatcagataagaaggatgtgtatataggttccgcaaacaacgactggaaatcccttacttaggtcaaggagcttgggatttattttgctggttgcccacagatagcaaaaactgtggaggtctattttcaaaacctgtggacgctttcaaccctcaactcaactttttacaccaaacaagcctgggatacgcagtggcaagtttctagaaaggttccatgctggtctcatttcctacagcccaaagaaagatgcaggtttgcatctccctctgcaggtcacagcgatctactacttagtgcacaaatt

SEQ ID NO: 145728 - DNA, 255 bp, Zea Mays
atgccggccatgaagatgtcgtcgtcgtggaaggaggaggaggaggagcaggaggacagcggggacgcgccgctcgtgctgttctcggcttcctcttcctccagctgcatctcctggtcccggcagtcggcgctgcagaatgccttctcgccgctgcaacaccacgcaaccaagattggtgagaatgtggacgaattatacgatggcgagtgttcagttcagctggatggaatggaagggcctgtgctctgctaa

SEQ ID NO: 145729 - DNA, 568 bp, Zea Mays
gagtgtttagtagtccgcagcagcttttgatggccaaaagctgcgaaaagccgaaacaaacaggggcttaggcgatgcatgcatgcagagcagatggaggcaatcagggacgaacacaggaagcacgcagtgcgcttcaggcttcaggcttcagccgggtatagtaataaaagctaaggatctttcacgtgctagttattagtgccaatgtacccagccatttctgcccatctcgtcatttgaagcattctttcgacacaagccgcagcttagagggtgtttgagagtgaagttttttcacagttttggaagaatactgtagtattctcaaatactgcagtattatatacagaatggtgtttggcaagctagctaaaatctctgttttcaaaactgaagtattgcaaatactatagttgttttaaggcattctaaacttagctctggacctcagttttcaaaactgcggtattgtaaactgcggtattgtcataactaaagtatactgtagtatttcaaaaactgtggttttcaaaaactttgttcccaaacagggccttaaactaaa

SEQ ID NO: 145730 - DNA, 603 bp, Zea Mays
atggcgacgcggtggcagcgctgcgcgcagctgctctcgtcccacccgtaccacgccgcgatatcgtcctcgccgtccttctccctcggcgcgcgcgacgacgacgacggtgatcacgccgccggaagcagcctcgcgccgccgcacgacagcggccgcgtcgccgtcgccggcgcgctggcctcgccgcggacggccagcgagctgccccctggcgcggtgctcgcctccgaccgcttcttcgtctcgccggcgcccacggcctcgctcgtcgacgacacggcggccgcgggcgagagcgatagcgaggccctgcggggggcggtgctggtggagacgtacgcgagcgaccccagggcgcagttcctggagtccatggccggcatggcggcggcgtgcggcgccgaggggatgcccgagccggagtaccgcgagttcatggaggagctcctgtcctgctacctggaccacaacgaccgccgcgtccaccgccacgtcctcgccgccttcgccgacctcaccgcgcgccggtggccgcccaagcggaggcggcccatcctggaactgatgaagatgaatccttgtgttagcggcagatggtaa

SEQ ID NO: 145731 - DNA, 89 bp, Zea Mays
attttcaattatactaaatgatgatgcaaggttggtattttggatcaacttatacaacgtgcacgtacgtgattttgaaaactttagtt

SEQ ID NO: 145732 - DNA, 66 bp, Zea Mays
atggcgactttcgcgaagcctgagaacgcgctcaagagagccgaaggcacttgcgaattacgataa

SEQ ID NO: 145733 - DNA, 2931 bp, Zea Mays
aagcagacaagcgtcctgaggacctcatgctcagtttgttagtggggagaaagagaaggaccgatcagataaagaggtgtaactccatggtttaagttcttctgagagacatacaggactgttctagagatactgaggaacaattcaaagcttgaagcgttatatgctatggctgctcatagggcttttcaattctgtaaacagtataagaggacaactgaattccgtaggttgtgtgagataatcagaaatcatctcgccaatctgaacaaatatcgcgatcaaagggatcgtcctgatctgactgcacctgaaagtttacaactatatcttgatacacgtgttgagcagcttaaagttgctacagagctttgcctttggcaggaagccttccgatccgtggaagatatccatggtctgatgagcatggtgaagaaaatgccaaaaccttctatcttggtggtgtattatgcaaagctgaccgaaatcttctgggtatctgatagccacctttatcatgcgtatgcgtggctcaagcttttcaacctgcaaaagaactacaataaaaacttgtctcagaaggatctacaattaatagcatcttccgtcttacttgctgcactatctgtggcaccttatgacaaaaaatatggtgcatctcatcttgagacagagaatgagaaggagcgtaacatgaggatggccaaccttgttaacttctcgcttgattccaagcgtgaaaatagggaaatgccttcaagagcatctcttctatctgagttggtatgtgctgttttcctgcagctgtgttatccatttttttggatgttgtctctgtcatcacatgcattcttttttgagcaattttgtttgttatcattttgtttgatcactccgcaaagatatcttgctcaggaagaattgtttaatgcatgtgatattctatttacatgaaggtcttgtgtggttattcttgtattcatctcaatccacatgtgttgaggcggattggagtgtaaattagtttaagttccacctcaacacgtggattaagatagataccagggtaaactaacaaggcctataccagggtaaactaacaaggcctaaacggttcagtatggaaatgtcagtcaaggagctttcttctgaggccactgtgctactttgttatttttatgttataaagtaaacatttcaatattaccgttgtcagttggatagatgaaatatgaaaacatttataatctctttactctggcccatcaatattaaatgaatgttatagctcttgctgtcatagatagctatcaatatctatctatttttatggcttgttaggcctccaaaggagtcctttcatgtgcttcccaagaagtgcgagatttgtacaaccttttggaacatgagtttctacctctggaccttgcatcaaaagtgcagccacttctttcgaagatttcaaagatgggagggaagctttcatcagcttcttctgttccagaggttaagttatctcagtatatttcagcattggagaagctgacagcattgagagtgttacaacaggcctcttgtattttccagtcgatgaagattgatatgctctcaagaatgattccgttctttgacttttttgttgtggagaagatttctgttgttgctgtgagacgcaattttgttgctataaaagttaaccatttatcaggagctgttcattttggtactgtggacatagaatctgatggcttaagtgatcaccttagtgttgttgcggattcattaaataaagcgaagattcatatttgtccaccagttaaaaagccatctaaactcggtgaaagttttattagtttggctggaatagtggagaatgagcataagaggcttcttgcaaggaagtccataattgaaaaacgcaaagaagagcttgagcgtcaaatattggagaaggaaaaagaagaagaaaaaaagagaatgagcagtcaaaagaaaaccgcagatgaggaaagggtgaggcttctcaatgaacagagacagagggagcaggaccggattcgtagagagatagaggaaaaaaataaagccgaagcaaaaaagttgctagaagacttgaagaaggcagggaaaaaacatgtcgttgttgaaggggagcttactaaggaggccataatggaattgacacgaaatgaacagttgaaggagcgccacgaaatggagaaaaaactgcagaagtttgcaaaaacaatggattatctggaaagagcaaaaaggcaggaagaggcaccactgattgagcaagctttccaaaaacgtcttcaggaagagaagatccttcacgagcaagagcagcttcgggagattgaactcagcaaacaacaccatgctggcgacttgcaagagaaaaacagactttctcgaatgttggaacacaagaatgctttgcaggagagaattgtccaacttcgtgaagctgagtttggtcgtctgaagaaagagagagacgaacggttcagtcagttgatatcatcgagaaagcgtgaaagggagagagtgaggaagttgatgtattatctgaaccgggaggaacagcggattgaaatgcttcgtgaggaagaggaagctagaaaacatgaagaggaagagaggaggaagagagaagaggctgaaaggaaagctaatcttgatgctattgctgaaaagcagcgattgagagagatagagttggaggagaaggcaaaggcgaatagggagaagctcttaaaggggtctgaggcaggtgctgctccctcttctaataaatatattcccaaatttaaaaggcaagatggtcttcctgcacgacaggatgcacccccaccccgccaagatggccctcctccgtctactgaccgctggcgtccatcaagatattcctcaacctcttcgtca

SEQ ID NO: 145734 - DNA, 2637 bp, Zea Mays
aagcagacaagcgtcctgaggacctcatgctcagtttgttagtggggagaaagagaaggaccgatcagataaagaggtgtaactccatggtttaagttcttctgagagacatacaggactgttctagagatactgaggaacaattcaaagcttgaagcgttatatgctatggctgctcatagggcttttcaattctgtaaacagtataagaggacaactgaattccgtaggttgtgtgagataatcagaaatcatctcgccaatctgaacaaatatcgcgatcaaagggatcgtcctgatctgactgcacctgaaagtttacaactatatcttgatacacgtgttgagcagcttaaagttgctacagagctttgcctttggcaggaagccttccgatccgtggaagatatccatggtctgatgagcatggtgaagaaaatgccaaaaccttctatcttggtggtgtattatgcaaagctgaccgaaatcttctgggtatctgatagccacctttatcatgcgtatgcgtggctcaagcttttcaacctgcaaaagaactacaataaaaacttgtctcagaaggatctacaattaatagcatcttccgtcttacttgctgcactatctgtggcaccttatgacaaaaaatatggtgcatctcatcttgagacagagaatgagaaggagcgtaacatgaggatggccaaccttgttaacttctcgcttgattccaagcgtgaaaatagggaaatgccttcaagagcatctcttctatctgagttggcctccaaaggagtcctttcatgtgcttcccaagaagtgcgagatttgtacaaccttttggaacatgagtttctacctctggaccttgcatcaaaagtgcagccacttctttcgaagatttcaaagatgggagggaagctttcatcagcttcttctgttccagaggttaagttatctcagtatatttcagcattggagaagctgacagcattgagagtgttacaacaggcctcttgtattttccagtcgatgaagattgatatgctctcaagaatgattccgttctttgacttttttgttgtggagaagatttctgttgttgctgtgagacgcaattttgttgctataaaagttaaccatttatcaggagctgttcattttggtactgtggacatagaatctgatggcttaagtgatcaccttagtgttgttgcggattcattaaataaagcgaagattcatatttgtccaccagttaaaaagccatctaaactcggtgaaagttttattagtttggctggaatagtggagaatgagcataagaggcttcttgcaaggaagtccataattgaaaaacgcaaagaagagcttgagcgtcaaatattggagaaggaaaaagaagaagaaaaaaagagaatgagcagtcaaaagaaaaccgcagatgaggaaagggtgaggcttctcaatgaacagagacagagggagcaggaccggattcgtagagagatagaggaaaaaaataaagccgaagcaaaaaagttgctagaagacttgaagaaggcagggaaaaaacatgtcgttgttgaaggggagcttactaaggaggccataatggaattgacacgaaatgaacagttgaaggagcgccacgaaatggagaaaaaactgcagaagtttgcaaaaacaatggattatctggaaagagcaaaaaggcaggaagaggcaccactgattgagcaagctttccaaaaacgtcttcaggaagagaagatccttcacgagcaagagcagcttcgggagattgaactcagcaaacaacaccatgctggcgacttgcaagagaaaaacagactttctcgaatgttggaacacaagaatgctttgcaggagagaattgtccaacttcgtgaagctgagtttggtcgtctgaagaaagagagagacgaacggttcagtcagttgatatcatcgagaaagcgtgaaagggagagagtgaggaagttgatgtattatctgaaccgggaggaacagcggattgaaatgcttcgtgaggaagaggaagctagaaaacatgaagaggaagagaggaggaagagagaagaggctgaaaggaaagctaatcttgatgctattgctgaaaagcagcgattgagagagatagagttggaggagaaggcaaaggcgaatagggagaagctcttaaaggggtctgaggcaggtgctgctccctcttctaataaatatattcccaaatttaaaaggcaagatggtcttcctgcacgacaggatgcacccccaccccgccaagatggccctcctccgtctactgaccgctggcgtccatcaagatattcctcaacctcttcgtcaacctgggggcgggcacataactgatccttttttttttattttgctgactacatttataattttggagcttgtctcataggctatcgcaccttaccgttcactatactccatgcatattgtcggtagttgctgactgcattttatgatgtttttattggttcatatatttgttctcatgtctttggatgttgatgtctggcacgagttccgttttgcagttgggttgtgatacggtttggttgtctaactataaagtcgtcaatt

SEQ ID NO: 145735 - DNA, 266 bp, Zea Mays
cacagtgcaggtggcttctgtttgatacatagttcaacttgtgatgctgtacatagaatgccttaccctataacctgttggaacataatcttagtgtcaatattgttactctagctagtagagttagaataggtcagaatgctttgcaggagagaattgtccaacttcgtgaagctgagtttggtcgtctgaagaaagagagagacgaacggttcagtcagttgatatcatcgagaaagcgtgaaagggagagatgcaaatactaa

SEQ ID NO: 145736 - DNA, 1288 bp, Zea Mays
aatcactccacaaacactcacatcgatgcagcccttataaagatgcttcccccagaaccacctccacccttctcattgctatccccaccggcggcgagcactgtgccattcatgaccagatcatcagcaaacagccacacgatgccaccaccggcaccaccgtagtccttctcaacactggtcgagccccctttgctcccgtagctccaagggtgttcgaggtcagaccatgcataggcatcaccaccccatgaatcctcctgagtctgcccttccttgacgaagcagctggcgccacggccaccgtgcccgccaccgtcgccgtgcgtccctgtgggaacgccactggtccggtcagggggggcgccagcgagcgcggtggtgttcacaacgaccgtgtcggcgactgtgatgttggtggcaaccaacgagaccctgccggctctgacgcgcacgccgcggctgaggtgcacctcgccggagagattggcagatataacgcacccgaccttctcgcaggtcagggaggcgccagagaggagcacgaggctgccgttccccgtgatgtagatatcgtcgcccagttccacctcctcgaagacctcgcagtgcgtgcggaagtcccccttcccgtggaggtctccctcacaggtcgccgtcgacgacgccgggtccgggggcgggagtgggggcgacggcggcgagtagtcgtgccacgtcaggatcgagtacgggtccggctcagcccgatctgacgcctccgccccgccggcgcggacaaggacggcgtttccgaggacagcgccgagcagcagcaagagtcggagattgaagaggggggagagatggcaggccatgaactggggctcatcagagtccaggctgttggggttggtagtacagtacaggttccggacaccgcgcttgtagtggctggccgccggcgatggcggcggggggcgtgcgttccgggctgggtttggtatcgatttgggtttagctatttttccccttctgattttgctccgtttctctcccgcagtttgatgatgcagttgcattttggaagggaagagtgtggagggagaaggctgttgcgccgttggatttgcctctagattcgtaaattaggtgcggggttcgctggcggttgtggactatggcagcgacaagtggagcacgagggtcggttttgtcacttgtatgtgtgtttctgaaaataatcctatttaggtgcttcagcttcataaaattttgtaaagttaatgaaacatatcattacaagctt

SEQ ID NO: 145737 - DNA, 1191 bp, Zea Mays
gcactgtgccattcatgaccagatcatcagcaaacagccacacgatgccaccaccggcaccaccgtagtccttctcaacactggtcgagccccctttgctcccgtagctccaagggtgttcgaggtcagaccatgcataggcatcaccaccccatgaatcctcctgagtctgcccttccttgacgaagcagctggcgccacggccaccgtgcccgccaccgtcgccgtgcgtccctgtgggaacgccactggtccggtcagggggggcgccagcgagcgcggtggtgttcacaacgaccgtgtcggcgactgtgatgttggtggcaaccaacgagaccctgccggctctgacgcgcacgccgcggctgaggtgcacctcgccggagagattggcagatataacgcacccgaccttctcgcaggtcagggaggcgccagagaggagcacgaggctgccgttccccgtgatgtagatatcgtcgcccagttccacctcctcgaagacctcgcagtgcgtgcggaagtcccccttcccgtggaggtctccctcacaggtcgccgtcgacgacgccgggtccgggggcgggagtgggggcgacggcggcgagtagtcgtgccacgtcaggatcgagtacgggtccggctcagcccgatctgacgcctccgccccgccggcgcggacaaggacggcgtttccgaggacagcgccgagcagcagcaagagtcggagattgaagaggggggagagatggcaggccatgaactggggctcatcagagtccaggctgttggggttggtagtacagtacaggttccggacaccgcgcttgtagtggctggccgccggcgatggcggcggggggcgtgcgttccgggctgggtttggtatcgatttgggtttagctatttttccccttctgattttgctccgtttctctcccgcagtttgatgatgcagttgcattttggaagggaagagtgtggagggagaaggctgttgcgccgttggatttgcctctagattcgtaaattaggtgcggggttcgctggcggttgtggactatggcagcgacaagtggagcacgagggtcggttttgtcacttgtatgtgtgtttctgaaaataatcctatttaggtgcttcagcttcataaaattttgtaaagttaatgaaacatatcattacaagctt

SEQ ID NO: 145738 - DNA, 432 bp, Zea Mays
cccgtaagagtgaggcccagaaatcgaggggcaaaaaggagagggagagaccgaatacagccgcttctgttctgtgagggggaaaaaaagagaaagagagggacagagagagagagagggagtgccaggccagctgtggggtgtgtgtgtgcctgtgtgggggaactgctggggatggagagcgagatggcggacgcgcccgccgcggcgatccccgccgccgccgccgaaccgctcgcggcggtggcggaggaaggggaaggggaagcggagggggaggcgcccgccgaggcggcggtggggtccaccctcaccatggagcgcgtcgccgccgcgaagaagttcatcgagaaccactaccgttcgcagatgaagaccatccaggagcgcaaggagaggtactgtaccgtgccggccgtgctgatcccgtga

SEQ ID NO: 145739 - DNA, 1937 bp, Zea Mays
ttttttttatcagaatcactctaatgtttttcagagaccatttaaagattaactaatcaacaccctgctgtattgtatgcgataaaatcaaaattattctgatgtttttaaaatgaccataaaagaacgatttccttccattatttgagagttgtgttaatggagttctttattattgcctctattaggtggaacatgttagagccgaaagaaacttgttggcggaagttgctagtcactgcattgtgaagctttactattctttccaagacaccgagtatctttacctaattatggagtacctccctggtggtgatatcatgacccttctcatgagagaggataccttgactgaacatgtagcgcgattctacattgctgagacaattcttgctatccaatccatccataaacataactacatccacagagatattaagcctgataatttgcttctagataaaaatggtcacatgaagctgtcagattttgggctgtgcaagccaattgactgttcaaagctctcaacgttgaatgaaagatgaacccatgggtgatgacaacatgagggaatcaatggatattgatagttctttgtccaatacagcaaatggtagaagatggagaagtcaacacgaacagcttcagcactggcagatgaacagaagaaaactggcattctcaactgtcgggacaccgggattatattgctccagaggttctgctgaagaagggatatggaatggaatgtgattggtggtctctaggcgcgatcatgtatgagatgctagttgggtatccaccattttatgccgatgatccaataactacatgccgaaagattgtgcactggagaaaccatttgaagtttcctgaggatgcaaagttgtcaaatgaagcaagagatctcatttgccggttattatgtgatgttgaccacaggattggcagtgcaggggcagatcaaataaaggcacatccttggttccaaggagttgcatgggataaactttatgaaatggaagcagcatttaagcctcaagtaaatgatgagctggatacacagaatttcatgaaatttgaggaactggaaaatcctccagccaaaacaggctctgggccttcaagaaagatgatgctgaactccaaagatctgagctttgtggggtatacatacaaaaactttgatgcagtgaaagcaataaaaatttcagatctgcaaaggaattcatctctaacaaggccttccattggttcgatattcggtccatcaggcatggattctcccatggaaccaaacggaagggacacacacatgcacacagtttcatctggtgacccaatgattccctaaccttcagtgccgtctgtcctcagcaaatttccgaactaaatcagcgtgcaaacgccagggtgatgtggctccagctggacaacatgcttatttttagccaggtctctgctctctttatcgtgggcaagcggtttgtagaaatccaccaaagtttctagttgtaaaatagtatgccacagacttcaacaaaggtcccatgcattattggctcatcagacatgggggcagtttttttttggagaaattgcaccttgcggctggctgcccaggttggcagagcaaattgcggccttctcttgtggcagttcccggtctgcaggaaagggaaatacgacggtgttgttgcagcaggaattctcatggttagtgtcgttgttggtgtttgatatgtatcaggaattttcacatttgaagtagggtttctgttagcagagttgtagctattgacaagcaacatccttttacggagttgctttttttcgttgatgtatggaaaacgagacattgtagaaatcgaagttcgatctagccttgtatgctgcttatctgattcaacgtgtttctcagtatttttgtctaaaaa

SEQ ID NO: 145740 - DNA, 169 bp, Zea Mays
cacttgctttttagtggaagcgtaaaatacaataagaaagaacccaagacaaaatctttttttgccgacctatacatgcgacatgggggtgaattaataactgaacgaacccaagacaagaaagaaaacgatgaagccatttgctgttcctgaatcttgatccgtcacg

SEQ ID NO: 145741 - DNA, 690 bp, Zea Mays
atggcggcctcgctaggactcgcccacgaggcggccccgttctacgccgccgcctacccgccggccggcgctgcttacgcttacctcgcaccaccacccggcgacctcgtcgtcgagttcccgccgcgcgccgccaccatggctgacgactgctgctaccagttcggccaggagatgggcggcgcctactgctcgccgccggtgttcgacaatggcatgacgagcctgctgaactatggcgtcgaaggcgacgggaggaggccggtgggcggaccagctggcggtactgggaacggcggcggccggccccggccggcgtcacggatcgggttccggaccaggtcggaggtggacgtgcttgacgacggcttcaagtggcgcaagtacggcaagaaggcggtcaagagcagccccaacccgaggaactactaccggtgctcggcggagggctgcggcgtgaagaagcgcgtggagcgggacagcgacgacccgcgctacgtcgtcaccacctacgacggcgtccacaaccacgccgcgccgggcgccgcctacctctgcccgccgcctccgccgcgcggcgcagcgcactactcgcctccggtggcagcgcccagctggagcgcagctcttgacgcgtgggaggcgcagctgcaccggcacgccgcggcggcggctcactcgtcggagtag

SEQ ID NO: 145742 - DNA, 1823 bp, Zea Mays
tctgatcactacgaagtgcgaactcaaagctgaagacaacaaaccatggggagcacaagcacgagcgccacctcgtcttcctcctcctctgctgccagcggccccgggggcggcggcggcgcacacgtgctgctcctgccgtaccctggcgcgcagggccacacgaacccgctgctccagtttggccgccgcctcgcctaccacggcttccgccccacgctcgtcacctcccggtacgtactctccaccacgccgcccccaggggagcccttcagggtggcagccatttccgacggcttcgacggcggcggcgcggccgcgtgccccgacatcgctgagtactatcgccagctcgaggccgtgggttcggagacgctggcggagctgatccggacggaggccgccgagggccggcccgtgcgcgtggtggtttacgacccgcacctgccgtgggcgcgctgggtggcgcaggcggccggggtgccggcggtggcgttcctgtcgcagccgtgctccgttgacgtcatctacggggaggtgtgggcggggcggctgccgctgcccgtggtggacgggaaggagctgttcgcgcgcgggctgctgggtgtcgacctcgggcccgacgacgtgccgccgttcgcggccaggccagactggtgccccgtgttccttcgggcgacggtgcggcagttcgaggggctggaggacgccgacgacgtgctcgtcaactcattccgcgacatcgaacccacggaggcagattatatgtccctaacatggcgcgcgaagacaataggcccaacgttgccatcattttaccttgatgatgaccgctttccgttgaacaaggcctacggattcaacctcttcagcagcagcgactcatgtctgccttggcttgacaagcagcgtccgcgttctgtagttctcgtatcctatggaactgtttcagattacgacgaaaatcagctagaagagcttggcaacgggctgtacagttctggcaaaccattcatttgggttgtgaggtcgaatgaagaacacaagctgtcggatgagcttcgcgacaagtgcaaggagcgcggccttgttgtctcttggtgcccacagctcgaagttcttgcacataaagctacaggctgtttcttcacgcactgtggatggaactcgacactagaagcgattgttaatggcgtgccaatggtggcagtaccacactgggctgaccagccgaccatatcgaaatacatggagagcgtgtggggcttgggtgtcaaggtgcgcaaggatgagaaaggcttggtgacgagagacgaggtggcgaggtgcatcaaggatgtcatggatggggatagaaaagatgagtacaggatgaatgccaatgtgtggatgaaaaaggccaaggaagctgcacagtacggagggagctcggacaagaatattgctgaattcgtcgccaagtattcatcaagttagttgtcaaacagattttttgtgtatctacaagagcctattttcacgacccagaatctgcgtcataagttagcagctttaccgctgcgctcccgcctttgaaacgttgtcataagttagtactccaataaaaattacacacacacatatatatatatatatataatactgttatgcaccctttgaaacgttgtaagcatacagaattgcacatttgggactcaacgtagtgcttcacaatattgccatccgaaatatttacttagtaaaaaagagattacaaacatcttctaattgatgatactaccatttactgtataatctttcttttattatttcttttccctgca

SEQ ID NO: 145743 - DNA, 143 bp, Zea Mays
ccgttatataataagtactctgattatattgtgacatttatctctatacactctgttattatatatgtgttattatatatgttgtcttctttggcgcatgtatgagatgcacccagctttgtcccttaaagcccggggtgtta

SEQ ID NO: 145744 - DNA, 2324 bp, Zea Mays
cgctcttcttcttgtgttgcctgtcgcctcggggcggttgaaaattaaccgaagcggacaccgcgacgaggccgcggcggacacacagccggaccggacaccagcgccagcgtagcggcagcggcacgcccgaggaagcaagcaagccactacgcccctgcgtcgtcgcgtcggtgcccaaggggcagccgccgggagggagggaggggcatcgaagcggaggccacggcggtcgggatggtggtggcgagaaaaccgcagcagcagcccgcaggcgtcgcccgccggcgcggtggcggcgtcagggtggggcccgcgaggctcgagggcctccccgcggcgtgggcgggcgccgccgccgccgccgtcaaggtcaagtggcccgcgcccgggggcgcgctgtcgcagatgctgacggggcggtgggcgcgcggggtgaccgccgtcgaggccgtcggcgccggcgggaccgtccgctgggagccgcgcgacggcaaccggttcaggctcgacgacgtcgtcggccccgccggccggccggagcgcggggtcttcttctccgtcctctatggattccaagaacaaggccggggcaacaaggagctggtgaggctggaggagatcgggacagccatgataagcctggaggagtgctgctgggagatgcagctgcagcagcacgaccaccagctggtggctgtccccgtcagggtcaggaaggacggatgggcaagcgatgccatgctttatgtggacgtggagctcgtggacgcgaacacacgcccggacgtcgatagggcagtctcgttcagggagaagccgagaacgtacatggcgcctccgccgacaatgcgaggtagccgcaagagcttggagtcagcgacgtgccatgatgtccttgacctgaagcagctgcttgatctggctgagaaggaaggccgggtggccgtgtatggcaacataaggagctccgacaccagcagcgtgagcagcactagcagcagcagcagcacgattagcgtcagcagtgctagcaccagcggcggcgcgagcccggaaccggcctcgacgtcgaagcgccggttcctgccatggacgaggaggagcagggacttcgacaagaggaccgccgagtcgctctcccaagaactgcccacaaagtgcacggtgagcctcctcctggcacgtgatggaaatgaaatgctacgttcctcgtcatgtgcaccggcgctgatcttgtcacggcgggcgacgaaccctgcgcaggacgacggtccgggtccggccggcggctgggagacgcgcgagttcacgagcagggacgccgagacgaggctgaggacgccggtgttcttcgcgtccatcgaccagcgcgacggcagcgctgggggggagggcgcgtgcgcggcgctcgccgccgtcctcgcggcggcgctccacgccggccacccggcgatgcccacccgcccggagctggacgcgctcatccgggacggctcgtcggagtggaggcggctctgcgacgacgaggcgcgcgcggcgcggttccccaaccggcacctcgacctggacaccgtgctggcgtcccgggcgtggcccatcgcggtgcggcacgacagggccttcgtcggcttcttccagccggagagcttcgcgtcgctgtccggcgccatgtcgttcgacgacatctggcgcgagatcgccggcggcggcggacgtgggcgcgggccgggcggccgcgcggacgtgtacatcgtcagctggaacgaccacttcttcgcgctcaaggtggagagcgactgctactacgtcgtcgacacgctcggcgagaggctgcacgagggctgcgacaaggcctacatgctgaggttcgacggctcgtcggagatgcgggccgaaggcaccgaagaggtggtcgtcgccgggaaggaatgctgcagggagttcatcaagaggttcctggccgccatcccgctgagggaggagctggagatcgagaaaaagggcggcagcggcatcgacggtggcggcgcgccgcaccagcggctgcagatcgagttccacttcacagcctttacaagacgacaatagatgatgagttggcgatccgacagcagttgggggatgttccttcctcctccctgatcacagcatcatactaaccttgtgtaaattcgtctgtatatctgtatacagtttacaagataaaaatttacagggtaggatttggttctcgtttcacaattttagataggaaacaaaacatgaagaggaataccattttgtaagcgagctcagtattacatgattttgcttctgttgaa

SEQ ID NO: 145745 - DNA, 2045 bp, Zea Mays
cgctcttcttcttgtgttgcctgtcgcctcggggcggttgaaaattaaccgaagcggacaccgcgacgaggccgcggcggacacacagccggaccggacaccagcgccagcgtagcggcagcggcacgcccgaggaagcaagcaagccactacgcccctgcgtcgtcgcgtcggtgcccaaggggcagccgccgggagggagggaggggcatcgaagcggaggccacggcggtcgggatggtggtggcgagaaaaccgcagcagcagcccgcaggcgtcgcccgccggcgcggtggcggcgtcagggtggggcccgcgaggctcgagggcctccccgcggcgtgggcgggcgccgccgccgccgccgtcaaggtcaagtggcccgcgcccgggggcgcgctgtcgcagatgctgacggggcggtgggcgcgcggggtgaccgccgtcgaggccgtcggcgccggcgggaccgtccgctgggagccgcgcgacggcaaccggttcaggctcgacgacgtcgtcggccccgccggccggccggagcgcggggtcttcttctccgtcctctatgtggacgtggagctcgtggacgcgaacacacgcccggacgtcgatagggcagtctcgttcagggagaagccgagaacgtacatggcgcctccgccgacaatgcgaggtagccgcaagagcttggagtcagcgacgtgccatgatgtccttgacctgaagcagctgcttgatctggctgagaaggaaggccgggtggccgtgtatggcaacataaggagctccgacaccagcagcgtgagcagcactagcagcagcagcagcacgattagcgtcagcagtgctagcaccagcggcggcgcgagcccggaaccggcctcgacgtcgaagcgccggttcctgccatggacgaggaggagcagggacttcgacaagaggaccgccgagtcgctctcccaagaactgcccacaaagtgcacggacgacggtccgggtccggccggcggctgggagacgcgcgagttcacgagcagggacgccgagacgaggctgaggacgccggtgttcttcgcgtccatcgaccagcgcgacggcagcgctgggggggagggcgcgtgcgcggcgctcgccgccgtcctcgcggcggcgctccacgccggccacccggcgatgcccacccgcccggagctggacgcgctcatccgggacggctcgtcggagtggaggcggctctgcgacgacgaggcgcgcgcggcgcggttccccaaccggcacctcgacctggacaccgtgctggcgtcccgggcgtggcccatcgcggtgcggcacgacagggccttcgtcggcttcttccagccggagagcttcgcgtcgctgtccggcgccatgtcgttcgacgacatctggcgcgagatcgccggcggcggcggacgtgggcgcgggccgggcggccgcgcggacgtgtacatcgtcagctggaacgaccacttcttcgcgctcaaggtggagagcgactgctactacgtcgtcgacacgctcggcgagaggctgcacgagggctgcgacaaggcctacatgctgaggttcgacggctcgtcggagatgcgggccgaaggcaccgaagaggtggtcgtcgccgggaaggaatgctgcagggagttcatcaagaggttcctggccgccatcccgctgagggaggagctggagatcgagaaaaagggcggcagcggcatcgacggtggcggcgcgccgcaccagcggctgcagatcgagttccacttcacagcctttacaagacgacaatagatgatgagttggcgatccgacagcagttgggggatgttccttcctcctccctgatcacagcatcatactaaccttgtgtaaattcgtctgtatatctgtatacagtttacaagataaaaatttacagggtaggatttggttctcgtttcacaattttagataggaaacaaaacatgaagaggaataccattttgtaagcgagctcagtattacatgattttgcttctgttgaa

SEQ ID NO: 145746 - DNA, 1476 bp, Zea Mays
gctgcagcggctgcgcgcagccccggtccctcggtcgtcgcaaggcgccggcagccccgtcccctcctgttcttcaggacgtgttcatggagccccagcccgggtcgccgacgtcgtcgcccttctctccgatgggagcgccggacgagccagaggaggaggccaccgaactcgatccgggcaggaagtcgacctccagctcgtcctcctcctcgtcgtcgtccgcgtcgtcggctgatgatatcccgtgccacatcgacgtcgtcgacgtcgagctcgtcaacccgttggcggcggtgctgcccgagcacggacacggagcggaggccaaaacggtccgatcggcgacgccggaggaggaacgagccggagccgcccacgtgcacggcgagccggctgactgcgcggtgacgaaggacgtacagcaggccggtcccgccgtgcacagcgcggaggccaagccggacgactgggcgacgtggccggagccaccgcctccggccgtcgacgactcgttcgcgtcgtcggacggcggggcctcgctggcggaggcgccggtctggccggccaacctcggagcggcgggggcggggtccggcgggttcgaccccgggaggatcccggcgtccgtgttccagcacaggacgtcggtgtcgcaagccgagtggagcatggcgtccaacgagtcgctcttcagcatccatggcgccggcgacctgtaccccggcagcagcaggtcgcacttcgacttcttctacgacgaggccatggcggaggcggactccaagcttccgtccctggcggagggcgcggagccggtggacgcggccgagcccaaggagttcgcggcgccgggcaacgacgccacgagagccgccgccgccgccgccgcgttccggcggcacgagagcggctccggaagcagctccagcaacttctccttcgcgttcccaatactggcggagacgtcgccgaggaagaaagacctcgtcagcagcgcgctgtaccagccgctggagaaggagggccagcagccgccgccgcaggaagagcagccgcagctggagccccccgtgtcggccttcatggagatgacgacggaggaggagcggcggaggggcgacgccgggtgctgctgctgcggctgctgctggttcgattactcctggtgctgccggtgcccgtggtggcgatgcggctgctgcatctgctcctgccccagcttctgccggtgcggctggtgcacatgagagatccagcagttggcgggagatcacttgttgcccggaacttcatttggtctcacgagaacgagatccgcgtcgcgcgcacctcctgcttgtgttttcggaggattattcggcagacagggtttggcgttggcatgtgcacgtcagctgacaaagagcatactgtacagtgtacaatctcgagaaggaatgcaagttcaaacgcatggttttgctagcttggtat

SEQ ID NO: 145747 - DNA, 831 bp, Zea Mays
acttatcttccttatcctatctccatcgccccatttcctatcctcccagccgatcccctctccctcacggcgccctctcccatggccgtcggccctccccgccatggacgtcgctcttccttcctacagtacgtcagcgacctcgtctccctcccttcccgtggacgcctgctgcaggagttgttcctcccctgcgctcgcctaagatggccggactcgcccatgatggctttcccctgtcgatgctgttctttagccgccatggcagtgcctccctgcagcagtccggtgaccgggccctccccttcccacgtcatgctggtgccatgtcttctccctcaccggccaacctcgccagccaccaggaaggtgtctccctctcggcagctcccatggccaccatcagccctagctgcgcttgccctggttccagcagctcgacgccagcccctctcaatcttccatcgctgccgctcagcttgtcccagatatattgatgttgacaattggaaatccatgtagcaaataaatgattttggaactagggacaggtcagagtctagagcatgttcattccacacattggaggtggattttcctcaattggagatattgacaaattggaaaaaatgtgacttgacctgtgctgcaacaaccttaaactaggaggggcttctaattcttcatctctaccaacagtcctctcctgttactttttaaaccaataactttttcaagtttgtgcagatgcacacatccttgagccaaaatagaaaaaaaatcatagaagagttctttggctgtcacgtgattcaagagtattaatgatat

SEQ ID NO: 145748 - DNA, 1561 bp, Zea Mays
cttatcttccttatcctatctccatcgccccatttcctatcctcccagccgatcccctctccctcacggcgccctctcccatggccgtcggccctccccgccatggacgtcgctcttccttcctacagtacgtcagcgacctcgtctccctcccttcccgtggacgcctgctgcaggagttgttcctcccctgcgctcgcctaagatggccggactcgcccatgatggctttcccctgtcgatgctgttctttagccgccatggcagtgcctccctgcagcagtccggtgaccgggccctccccttcccacgtcatgctggtgccatgtcttctccctcaccggccaacctcgccagccaccaggaaggtgtctccctctcggcagctcccatggccaccatcagccctagctgcgcttgccctggttccagcagctcgacgccagcccctctcaatcttccatcgctgccgctcagcttgtcccagatatattgatgttgacaattggaaatccatgtagcaaataaatgattttggaactagggacaggtcagagtctagagcatgttcattccacgtatgttggttttgtgacttgttttcggtgatttcagatctgaatggctgacattctgtctccatcgatatttaatagtaaagcaaggtttgtgacctggatttattgggtgctgtagacattggaggtggattttcctcaattggagatattgacaaattggaaaaaatgtgacttgacctgtgctgcaacaaccttaaactaggaggggcttctaattcttcatctctaccaacagtcctctcctgttactttttaaaccaataactttttcaagtttgtgcagatgcacacatccttgagccaaaatagaaaaaaaatcatagaagagttctttggtaaatataaattgtgcactcataattttgcaagtgcatctatggataccttcacttattcctaacggatgtctttcaggctgtcacgtgattcaagagtattaatgatatacaaaagtttgctttatggcaagtcaagtaaccaccaattttgggcaatgacagggatgtgcagtggtggtctcttaaaagaattttgtgttccagcgtagctatttccactgcaaactatcaaatcattacaaactggcattccatggcttccactagttgagtccccatgataaccaatccttgttatcatatacttcttcaagtttgacgtcagcaacgtggtcatggtgaccggcgggaggaacaccgggcgtgtaggagtgatcaagaactgggagaagcacaagggcagcttcgaggtcatcgacgtgctgcttggaggcttttgcatgctatttctagttttctcttatttgttgtacaagaaaacatagaatggaattcaaatttggtggtcgcaaaagtgtggagacttgaattcatataaagttaggcttaacattagtgcaaaaagttgtattttagttttgatttagagtacacttatgtatgccttgtttgacaatacttatttatgatatattgaatggt

SEQ ID NO: 145749 - DNA, 1492 bp, Zea Mays
cttatcttccttatcctatctccatcgccccatttcctatcctcccagccgatcccctctccctcacggcgccctctcccatggccgtcggccctccccgccatggacgtcgctcttccttcctacagtacgtcagcgacctcgtctccctcccttcccgtggacgcctgctgcaggagttgttcctcccctgcgctcgcctaagatggccggactcgcccatgatggctttcccctgtcgatgctgttctttagccgccatggcagtgcctccctgcagcagtccggtgaccgggccctccccttcccacgtcatgctggtgccatgtcttctccctcaccggccaacctcgccagccaccaggaaggtgtctccctctcggcagctcccatggccaccatcagccctagctgcgcttgccctggttccagcagctcgacgccagcccctctcaatcttccatcgctgccgctcagcttgtcccagatatattgatgttgacaattggaaatccatgtagcaaataaatgattttggaactagggacaggtcagagtctagagcatgttcattccacgtatgttggttttgtgacttgttttcggtgatttcagatctgaatggctgacattctgtctccatcgatatttaatagtaaagcaaggtttgtgacctggatttattgggtgctgtagacattggaggtggattttcctcaattggagatattgacaaattggaaaaaatgtgacttgacctgtgctgcaacaaccttaaactaggaggggcttctaattcttcatctctaccaacagtcctctcctgttactttttaaaccaataactttttcaagtttgtgcagatgcacacatccttgagccaaaatagaaaaaaaatcatagaagagttctttggctgtcacgtgattcaagagtattaatgatatacaaaagtttgctttatggcaagtcaagtaaccaccaattttgggcaatgacagggatgtgcagtggtggtctcttaaaagaattttgtgttccagcgtagctatttccactgcaaactatcaaatcattacaaactggcattccatggcttccactagttgagtccccatgataaccaatccttgttatcatatacttcttcaagtttgacgtcagcaacgtggtcatggtgaccggcgggaggaacaccgggcgtgtaggagtgatcaagaactgggagaagcacaagggcagcttcgaggtcatcgacgtgctgcttggaggcttttgcatgctatttctagttttctcttatttgttgtacaagaaaacatagaatggaattcaaatttggtggtcgcaaaagtgtggagacttgaattcatataaagttaggcttaacattagtgcaaaaagttgtattttagttttgatttagagtacacttatgtatgccttgtttgacaatacttatttatgatatattgaatggtacctattgta

SEQ ID NO: 145750 - DNA, 964 bp, Zea Mays
gccccatttcctatcctcccagccgatcccctctccctcacggcgccctctcccatggccgtcggccctccccgccatggacgtcgctcttccttcctacagtacgtcagcgacctcgtctccctcccttcccgtggacgcctgctgcaggagttgttcctcccctgcgctcgcctaagatggccggactcgcccatgatggctttcccctgtcgatgctgttctttagccgccatggcagtgcctccctgcagcagtccggtgaccgggccctccccttcccacgtcatgctggtgccatgtcttctccctcaccggccaacctcgccagccaccaggaaggtgtctccctctcggcagctcccatggccaccatcagccctagctgcgcttgccctggttccagcagctcgacgccagcccctctcaatcttccatcgctgccgctcagcttgtcccagatatattggatgtgcagtggtggtctcttaaaagaattttgtgttccagcgtagctatttccactgcaaactatcaaatcattacaaactggcattccatggcttccactagttgagtccccatgataaccaatccttgttatcatatacttcttcaagtttgacgtcagcaacgtggtcatggtgaccggcgggaggaacaccgggcgtgtaggagtgatcaagaactgggagaagcacaagggcagcttcgaggtcatcgacgtgctgcttggaggcttttgcatgctatttctagttttctcttatttgttgtacaagaaaacatagaatggaattcaaatttggtggtcgcaaaagtgtggagacttgaattcatataaagttaggcttaacattagtgcaaaaagttgtattttagttttgatttagagtacacttatgtatgccttgtttgacaatacttatttatgatatattgaatggtacctattgtaatcgtc

SEQ ID NO: 145751 - DNA, 1732 bp, Zea Mays
caattttggtggtctataagtcaggttatggctgtttgaaatgtgatgtttgaagctgtcaaaatctggacaacaatgcttgtttgtattaactgacttcgatacacattgaatcaccttgagatgattataaatgaactgtagacaattctattagctttctaaaaagtctaggatcacctgatttggacttctaaaactccagttatgaattaatgaagtaagtagtcgaattctgtccaaatctggacagaaattgcgtttagtactgtttgacatttctaaatgtcgaatctcatggtgatgataataccaaaattttagaggactttataagcttttcaaaaagtcttagtttactatttttggatgaatattgtgtaagttatgaataaaacaactagctctacaactttcatttaatcaagcgtgtttctgctttatcttgctatgctctgaccgaagctttagtttttgtgcgactggtatttctgtgttctgcagatcatttagctcaagtaattggtagttcaaatgtcataatgtttggtttgagatttctatccgtggatggttcgtctggcttatctatgcttttaggtgcttcatctggcttatctatgtttttgcgctctcgcttttgcatgtgttgcaggatgttgacaattggaaatccatgtagcaaataaatgattttggaactagggacaggtcagagtctagagcatgttcattccacgtatgttggttttgtgacttgttttcggtgatttcagatctgaatggctgacattctgtctccatcgatatttaatagtaaagcaaggtttgtgacctggatttattgggtgctgtagacattggaggtggattttcctcaattggagatattgacaaattggaaaaaatgtgacttgacctgtgctgcaacaaccttaaactaggaggggcttctaattcttcatctctaccaacagtcctctcctgttactttttaaaccaataactttttcaagtttgtgcagatgcacacatccttgagccaaaatagaaaaaaaatcatagaagagttctttggtaaatataaattgtgcactcataattttgcaagtgcatctatggataccttcacttattcctaacggatgtctttcaggctgtcacgtgattcaagagtattaatgatatacaaaagtttgctttatggcaagtcaagtaaccaccaattttgggcaatgacagggatgtgcagtggtggtctcttaaaagaattttgtgttccagcgtagctatttccactgcaaactatcaaatcattacaaactggcattccatggcttccactagttgagtccccatgataaccaatccttgttatcatatacttcttcaagtttgacgtcagcaacgtggtcatggtgaccggcgggaggaacaccgggcgtgtaggagtgatcaagaactgggagaagcacaagggcagcttcgaggtcatcgacgtgctgcttggaggcttttgcatgctatttctagttttctcttatttgttgtacaagaaaacatagaatggaattcaaatttggtggtcgcaaaagtgtggagacttgaattcatataaagttaggcttaacattagtgcaaaaagttgtattttagttttgatttagagtacacttatgtatgccttgtttgacaatacttatttatgatatattgaatggtacctattgta

SEQ ID NO: 145752 - DNA, 1634 bp, Zea Mays
ggcccttgcccctcaggcgcattgtttttttttgtgtctctggcgccgttgggtggggcaccgtgggcggtgagctgaccgccgcgccgtcggtgggcgtgggttgggggtgggggtgcttattctgggcggctccgcctccacgtatatattacacgcgcgcgcatgtacgcgaagaattttagtggggagccaacgaaggcaaggcaagccagaccagcagcgggggagagaggaggcagaaggagattctagggagttaagggaggcgaccgccatgggggactccagcgactccgtgtcggtcgacgtcgagcggatcttctttggcggcaaggggcatcgagtgaggacgaggcacggccctctatcggtttctgtatacggagacgaggacaagcccgcgctcgtaacttatccggatttagccttgaatcacatgtcttgcttccaaggattgttcttctgtccagaggctgcgtcgctgttgcttcacaatttctgtgtgtaccacatcacacctcaagggcacgagttaggagcggctccaatttcagctgatgtgcatgtgccgtctgtcgatgaccttgcagatcaggtcgctgatgtcctcgattttttcagtttgggttcggtcatgtgcttgggtgtcaccgctggtgcctatgtgctcaccctctttgcgacgaagtatcgggagagggttcttggcctaatgttggtttcacctgtatgcaaagccccctcttggagcgagtggttgtacaataaggtattgttaaacttgctttattactatgggacgcgtgggatagtcaaggaaagtttgcttcagcggtatttcagcatggacgtccttggtaacggacaggatccagaatcagagattgtccaagcctgcagaagtttacttgacgataggcaggggactaatgtctggcggttccttcaggcaattaataggcgacatgatctaacagaatcgttggagaagcttcagtgccagacgctgatttttgttggggaaaactcacagttccatgctgacgctgtccacatgaccacaaagctagaccggagatactgcgccctagtcgaggttcaggcatgtggttcacttgtcacagaagagcaaccccatgcgatggtgatcccgatggagtacttccttatgggatacgggctttacaggccatcgcagcaggaaagcagcccccggagcacactgagcccgttctgcatctcgcccgagcttctgtcgccggagagcatgggagtgaagctgaagcccatcaagacgcgcatctcacgtaacgtttagtgtggggtggatctcggttggccatggcatattggcatggcaatcacaactcatcaaagtgaaggactcccttgggctgagctgatcaaccacgaaattttgatgcctttcggcatctagcgtgagaagatttacagggtgaaggcaatttttgtcgatgcagggaggttgtagataatgagggggaatggttgtttgttcatatacatatatgtgtaagttagtacacatgtacacctaaacacggcatcgttccatacagtacagaatacagagaaagaaaatgggaaagctgaatcgtcgtccgatactg

SEQ ID NO: 145753 - DNA, 1521 bp, Zea Mays
aagcagagccgaggcgagcacccccacccaccgagatgcaatgcaatgcaaacatcctccctcttctcctgctcctcacagacatcttatcctagctcccggtcgaaggccgtaggtaggattcccttctattcctcgcccgcttcctcctccggcagccggacctagctagctagctttcttgccgttcgccgcccatatggctaggaagtgctctagctgtgggaacaacggccacaactccaggacctgcggcgggcacagcaggaccgcggcggccttcgagaacaacggcggcggcgtgaggctgttcggggtgcagctgcacgtggggtcctcgtcgcccgtagccgtagccatgaagaggtgcttcagcatggagtgcctgtcgccgccgccgccgctgccgccgccgcccgccgcgccggcgtactacgcggccgctctcgccgccgccaacagcagctcgccgtcggcgtcggcgtcggcgtcctcgtcctcgtcgctcgtctcggtggaggaggcacaggcacccgagaagatggccagcgggtacctctccgacgggctcgtgggcagggcgcaggcggagaggaagaagggcgttccgtggacggaggacgagcaccggcggttcctggcgggcctggagaagctcggcaagggcgactggagaggcatctcccggcacttcgtcacgacgcggacgccgacgcaggtggccagccacgcccagaagtacttcctccggcagagcagcctggcgcacaagaagcgcaggtccagcctcttcgacgtggtggagaacgcagctgagagggcgacgacgacgagctccagggagcgcccgaggctcacggtcacggatgcgataatcgcgaccgcctctgctgcagcacccggaacaacgacggcagcactcccggccctgtcgctcggcatccgacggccagcgaggcctgagtaccacgccgcgctgcctccgaacagcctgtccctgcagctgccgcggtgctcggcggcaatgggtagcgcgtcgccgtcgccgagcctggcgctggcgctggcggggccgaaacacaagcacccttcgccttcgtccctgacggcggcaaaggctagtagtagtggccaggcaccggacctggagctgaagatctcgaccggccggcagagcgagcaccaggtccagacgggctcgccgccgaggacgccctttctgggcaccatcagggtcacgtaaccggaaagacggcggcggcggttagtcgggaatgacctgctggtaaaagaagagcttggccggggtgggaaaactgaaaaggaggagcttttggcagtggtgttggtgtgtgtgtgttgctgcccctgccagtggcagccgagacgacgatgcggtcgtttatcacgtgggtgtggtgttgtacatcatccatcagaaagatggaaactttactttagtggcctaattagaactctataaactttactgtcctaatttagcattcgtttgtttcttgc

SEQ ID NO: 145754 - DNA, 530 bp, Zea Mays
tcctcctccccaaattcctctcctcgtgacctcgtgtcctccctcgctaccacgcttgggtgaaatgccctcgccgcctctccccgtgctcgcccaaatcgccgcctctccctccctgtcgcccctgcgccacggtgcttcacgccgttgaagtcacttcactcatcccaccgatgctgtcgcccacaccgcctcctcccctcctccgctcaagccgcaccgcgacagctacacgccgcgatgtcagctgccagcagcgcccccctcttaacaacgtcgcgacgtcctcgtgggctaaaccccctccatcacttcttcccgtcgagatgcacaacaccgcgagatccatccaccttctccagcaccctcacccccactcaaatggtgtcgcgatgtccgccaccaacagcgccccttcccccctctcaaacaacgtcgcgacgtctacgagttctgtgcatgtggggtcatcttggcacgatgtgcggccatcgatgaagtagccgctaccttcccacaacgtcactatc

SEQ ID NO: 145755 - DNA, 1185 bp, Zea Mays
gagcggtagcggagtactaagggggtggagagagggagcactgtctcatgcatgaaagaaagtctccaaaacaaaagatttggtccagagcgcggccacacgggcccagcaatagcaacgtcacatggtggttgccatcgtcacgtcgagctctccctctccaccaactaatagttcctgacggtggagcagaaattcattaagagcatatagggattcacaagtgattttgagcccaacaatcttgctgccatcgatactcctgaaagacacaattccattttggcagatgcaagtggaggatttggtgacatgttttgctgtgaagtttgcgaaccatggtaaaccaacacctattgctttgatataatcatctcgatcactggttgatgtatttgaacaggacatgaatgatggcaaagttgtatgcgtcgttggatttgcctttctgtttgcagttgatgtaaggaaatgctatgttgaaacttttgccacttttgtgttatcatgattaagcagtgcttcccggctgggaaatgaaagtcttggattgtctttggtggcaggtgacatcaaatccttgtgtttcttgtgagattaatttctttcacatgaaaaaatggcgggctacatagattattagttatgcaccagataggaaatgcacagactttgtaggtgtgacaaagaggcaagataatatattttgtggatgtatcttagattttacaatgctgatgaggtggtgccttgcattttgtgacatggttagtgggtctttctacgtggattgcattatgcagggacgactagttccttacccaaatgtggttaaagttaggaacagtcttctccctgaaattgatttagtgatttcaaacagacttatatgtgtgatgcaggtatggttattctgctcatggaagatctacagggaagaaactgaggtagcatataactgccgcaagggaaaatatggtgtagcagatgaggatataatcttatatggtcaatgtgtttgaattggtccaaccattgatatttcttcgcggttgctagacttgagagtcgcagttttgcatagtcctatattctatctgcactaagagtaatatatacagccaagcggatgtttggtttaacatttacaaggtatgtttggtccttttgtttttggaattaatg

SEQ ID NO: 145756 - DNA, 231 bp, Zea Mays
atggcgacggggagcacgaggctgacgctgagcgccttggccttgatggtggtgcagaggcagagcgcggcgtcgaggtcggccacgccggagagcagcgggcagcaggtgtcgctggccttggtaccgatgacggcgtgcacaaggtcgttgagcgcgtccacgcacgcgagcagcttgagcgtgttcacggggcacttgcccgtcggcgtggacggcgacgacgagtag

SEQ ID NO: 145757 - DNA, 189 bp, Zea Mays
tcaagggacccacttgtcgtaggcaacgtagttggagatatcttggacccatttatcaaatcagcatcactcagagtcctatacaacaatagagaactgactaatggatctgagctcaggccatcgcaagtagcttatgaaccaaggattgagattgctggatatgacatgaggaccctttacactttg

SEQ ID NO: 145758 - DNA, 929 bp, Zea Mays
gccaaggattcgaccgttgcgttctccgcccaaatcttagaaatcccaatcccagatcgtcctccaatttcaaacttctcgactcgcccctccccgtccggccgtcccacccacgcttcctccccctccgcgccgctcctacaggctctaaccatggcggtcgccaccgagtcgcgcggcagcgaggacagggcttcagcccatgcgaaccaggagaagcggtgggtgctgtctgatttcgaggttgggaaacctcttgggaggggcaagtttggccatgtttatcttgccagagaaaaaaggagtagtgagattgtggctttgaaagttcttttcaagagccagctcaagcaatcacaggttgagcatcagctgcgacgtgaagtggagattcagagtcatcttcgtcatcctaatattcttcgcctgtatgggtacttctatgatcagaccagggtttacctaatcctggaatacgctgccaagggtgaactgtataaggaactgacaaggtgtaaacatttttcagagcgacgcacagcgacttatgtcgcttcgttggctagagctttgatctaccttcatggcaagcatgttatccatcgggacattaaaccagagaatcttttagttggagttcagggcgagatcaaaattgccgactttggctggtctgtgcacaccttcaacagaagacggactatgtgcggaactctggattacctgccacctgaaatggtggagaaggcagaacatgattaccatgttgatatatggagccttggtgttctgtgctatgagttcctttacggggtcccacctttcgaagctaaggagcactcagaaacctacagaaggtaactccacaactctgggatcttagtatgtcgtccctaacttgccgatatcttgccctagattatttcctg

SEQ ID NO: 145759 - DNA, 1275 bp, Zea Mays
gccaaggattcgaccgttgcgttctccgcccaaatcttagaaatcccaatcccagatcgtcctccaatttcaaacttctcgactcgcccctccccgtccggccgtcccacccacgcttcctccccctccgcgccgctcctacaggctctaaccatggcggtcgccaccgagtcgcgcggcagcgaggacagggcttcagcccatgcgaaccaggagaagcggtgggtgctgtctgatttcgaggttgggaaacctcttgggaggggcaagtttggccatgtttatcttgccagagaaaaaaggagtagtgagattgtggctttgaaagttcttttcaagagccagctcaagcaatcacaggttgagcatcagctgcgacgtgaagtggagattcagagtcatcttcgtcatcctaatattcttcgcctgtatgggtacttctatgatcagaccagggtttacctaatcctggaatacgctgccaagggtgaactgtataaggaactgacaaggtgtaaacatttttcagagcgacgcacagcgacttatgtcgcttcgttggctagagctttgatctaccttcatggcaagcatgttatccatcgggacattaaaccagagaatcttttagttggagttcagggcgagatcaaaattgccgactttggctggtctgtgcacaccttcaacagaagacggactatgtgcggaactctggattacctgccacctgaaatggtggagaaggcagaacatgattaccatgttgatatatggagccttggtgttctgtgctatgagttcctttacggggtcccacctttcgaagctaaggagcactcagaaacctacagaaggatagtgaaagtcgacttgaagttcccactgaaaccattcgtttcacctgccgcaaaggacttgatttctcagatgctggtcaagagctcggcgcagcggctgcctctccacaaggttcttgagcacccgtggatcgtccagaacgccgacccttccggcgtgtacagagaaggtagatccgtctaagcttctgttgcagtgtcgcccgccccaccccaaactgtatggattagcgaccctgttgaacaatcttcttacttgtctctctctatatatgaatatgaatgtacatgttctaagcctctctggctctctgaagatttttgtaatattcaatatgacagcccatatgagccttaaaagagtctcaccccccaattacgaacagcgaaaagtgagatttaatctcagcgaagc

SEQ ID NO: 145760 - DNA, 1128 bp, Zea Mays
ttttggatcagtggtaaaaaattcagaatatttcgagctcttttgatggtactccttttgaaacgcgcctttgatttctactagtgctgaaaaatctgccctatttacagaactgccattcccactagatacttgtacctcctttcttgtgctttggtccaactgttctattacattttctaggccatcaactaggacgagtacttggaacacttattcagcattgctatctgttactgacttgtgtgccacatatatatatttagtcagccttcccatagctccaattttctctcaagcagaacaggtactcttttgcaatcacacccacgctcgttggacagtcacactgatcaccgtttgccacctgcagtgctggtaagaacgttgtaagagtggggtaagacacttcataatttgtattccaccacctccaccaccaccctgagagatagttgtagggttcacattgtttgttgcctttttgtctctgttttgtgctaacaatgacaagaccaaagaatcaaatggacaaggacaaggggcctaaacttaacgacgatgagtgtctctctcaaatggaattgaaggagatgatgcgcgcgatgactgaagcttttaaaaaataccaggactctgcctcgacatcctatgagcagcttgatcgacgagttgctgaacttgttacacgcatggacgtactggaggctcgtccccccccaccaactccagccccagctcactctcctgtggacgacgacgacgacgatgacgacgatgtttatgcaccgctgcgacaacgcctcgcacgtaaccgacaaggtatgggaggtaatggtagacgtcgtcatcataatcctgaaccagaccatgatccatttgctaagattaagttttctattccaccgttcatgggttcttatgatgttgaagcttacttagactgggagatgacggtagaacaaaaatttaattcccatcttgttcctgagcagcatagggttagacaagccactattgaatttagagattttgctatcatttggtggaatgaacttgttaacacacgtgctgcaccacaaacatggaatgcgttaaaataagagatgcgagctcgctttgttcccc

SEQ ID NO: 145761 - DNA, 2218 bp, Zea Mays
atgtacttctccccctcactgctcgctctctcctttgcacccctagctactactgggctcctcctccgacttgctcttcggtttgcttctcttgcctccgttcacttgcttgttgtttcgatccgatccatctcctgttcttgctgaattttgcttgatgaccgtatatatatgcttgtttggttttgctttgcagcgcagcaagcagacggggaaacaagaatcatcccttccgtatatactactactactactactcaatactcatgcatgcgcactgcctcccggtgcggcgtatgaaccagacatgaacagggagcacagcagcagcagcagctccaagctcatcaacgagaagctcgaggaacaccggatctccaccgcgaagcactgcccccactgcggcgagaaaatcgacagcaaaccagattgggtggggctgccggcaggcgtcaagttcgatccaactgatcaggagctgatcgagcacctcgaggcgaaagtgaaggacgaaggctcgagatctcaccctctcatcgacgagttcatacccacaatagatggggaggacggcatatgctacacccaccccgagaaacttccaggtgtgacgagggatggcctaagcaagcacttcttccaccggccgtccaaggcctacacgacgggcacgaggaagaggaggaagatacagacggattgcgacgtccacaagggggagacgaggtggcacaagaccggcaagacgcggccggtgatggtgagcggccggcagaaggggtgcaagaagatactggtgctgtacaccaacttcggcaagcaccgcaagccggagaagacgaactgggtgatgcaccagtaccatctcggtgacctagaggaggagaaagagggggagctggtggtgtgcaagatcttctaccagacgcagcccaggcagtccagctggtccgccgcctctgaccggggggccgccactgccatggtggcagcaacgacggcggcggcgcaggagcagcataggagggatagcggcagcggcagctgctcgtctagggaccacgaggcggtgtcagcgacatcgttcccggccggatacacagtcaccacggccgtcgagatgcagcagcatatgaagcagccagctgcggaccatttcagcttcgcgcctttcaggaaaaccttcgatcaggaggttggtataggtggtgatcaggtgccatctaatcagctcggacgatcagagacgcatcatgccggccgggggcagcagccgcacggcccggtgctcgcgacgacggccgtgcctgctacagctttcctgatcagtaggccatcgaaccccgtctcgactatagtgccacctgcaatgcagcacgcatcagttgtcctcgataatgatcagttccatgtgccagcaatccttctccaccaccatgacaaattccagccgcatcagcaccaacaggaacagacacaacaaaagcttgatcgcaggtctgccagtgccggcttggaagaattgataatgggctgcacgtcgtccacaaacacaaaaggagaaacttcaattgctcacccccaagagacagagtggccttacccgtactggccatctgataaccaagatcatcatggatagtagtgacaggacagataaataatggcgatgaatgctaaaggaacactaaccacaaccacttctactggaatgggttttgtctgcttgaatatgcagcgttgcttttcttggaggatgtacacctacgttcgatctatagtggagggatcggaagaccagagaaaaaacagatctctgtagatctccctcaaaaagaaaatgagaatcaaattactcgtgtgtgctctccaagacagaagagacaaaatggccaacgaaaagaggagaaaagatcgatgggaggaaaggtatcgtttgtgctgacattgaagggatcatgtgtgggcccctagatgtattagagaccatcttagtcaagtagtacaactataatcagttcacggtttattgtagtttttttattcgtgctacctaatttccaattgtaaaaagtattgtttgcctcccttttaatattttttgctttccaaattgatgctgattttagtttccctcggtcaatttgtgctaatatgcatcacggagaaataaacttagtaagaagctggaaattcctttcttttaggagcacaaaca

SEQ ID NO: 145762 - DNA, 1686 bp, Zea Mays
gtcatgatggtaagatgcttctgaagtttccgaataggtttcgttcctttcttcctcctatcttttcccagaggtgtgacgagggatggcctaagcaagcacttcttccaccggccgtccaaggcctacacgacgggcacgaggaagaggaggaagatacagacggattgcgacgtccacaagggggagacgaggtggcacaagaccggcaagacgcggccggtgatggtgagcggccggcagaaggggtgcaagaagatactggtgctgtacaccaacttcggcaagcaccgcaagccggagaagacgaactgggtgatgcaccagtaccatctcggtgacctagaggaggagaaagagggggagctggtggtgtgcaagatcttctaccagacgcagcccaggcagtccagctggtccgccgcctctgaccggggggccgccactgccatggtggcagcaacgacggcggcggcgcaggagcagcataggagggatagcggcagcggcagctgctcgtctagggaccacgaggcggtgtcagcgacatcgttcccggccggatacacagtcaccacggccgtcgagatgcagcagcatatgaagcagccagctgcggaccatttcagcttcgcgcctttcaggaaaaccttcgatcaggaggttggtataggtggtgatcaggtgccatctaatcagctcggacgatcagagacgcatcatgccggccgggggcagcagccgcacggcccggtgctcgcgacgacggccgtgcctgctacagctttcctgatcagtaggccatcgaaccccgtctcgactatagtgccacctgcaatgcagcacgcatcagttgtcctcgataatgatcagttccatgtgccagcaatccttctccaccaccatgacaaattccagccgcatcagcaccaacaggaacagacacaacaaaagcttgatcgcaggtctgccagtgccggcttggaagaattgataatgggctgcacgtcgtccacaaacacaaaaggagaaacttcaattgctcacccccaagagacagagtggccttacccgtactggccatctgataaccaagatcatcatggatagtagtgacaggacagataaataatggcgatgaatgctaaaggaacactaaccacaaccacttctactggaatgggttttgtctgcttgaatatgcagcgttgcttttcttggaggatgtacacctacgttcgatctatagtggagggatcggaagaccagagaaaaaacagatctctgtagatctccctcaaaaagaaaatgagaatcaaattactcgtgtgtgctctccaagacagaagagacaaaatggccaacgaaaagaggagaaaagatcgatgggaggaaaggtatcgtttgtgctgacattgaagggatcatgtgtgggcccctagatgtattagagaccatcttagtcaagtagtacaactataatcagttcacggtttattgtagtttttttattcgtgctacctaatttccaattgtaaaaagtattgtttgcctcccttttaatattttttgctttccaaattgatgctgattttagtttccctcggtcaatttgtgctaatatgcatcacggagaaataaacttagtaagaagctggaaattcctttcttttaggagcacaaaca

SEQ ID NO: 145763 - DNA, 125 bp, Zea Mays
ttttttttttcttaacagtttgaagtattcggttgtggtgacctttaggtatcgtttcaatgatgtttgttctttaaaaagggggcaactcccaacgatatgcaatcatacagctatacaaatac

SEQ ID NO: 145764 - DNA, 1625 bp, Zea Mays
ccacaacgcttcatgagcggcagtgggccgtggcatcctcggcgaatctcagccgcagctgtatcatatcgatcctcgcctctcgccggcagccggccgggagctcacggcggggcagacgggtccggtctgctatggctccggtcactggtcaggcgcgctgcccagcgcatcctcctcgccctcgccctcggctgccgcaaccggccgtcgctgccggagtcgccgccacttcctccagctgctgcggatatcgccgccgcctacacgcgcccctccgcgcgccgatggccgccgcggacccgccgccgcgcggggaggccgcgcccgcgctgaagcggagcgccagcatcgaccggataccggcggacgcgcgccgcatcctgcaccgcctcgccggggacctctggggcggcgacgtggaccccggcgcgctggccgtgtcccagctcaggggcgccatgaccaacgaggtcttccggatcacctggcccggcggcgaggccgagggcaacggcccgcgcaaggtgctcgtgcgcatctacggccggggcgtcgaggtcttcttcgaccgcgccgacgaggtccgcaccttcgagtgcatgtcgcgccacggccaggggccccgcctcctgggccgcttcgccaacggccgcgtcgaggagttcatcaacgccaggaccctctccgccgcggatctgcgcgacccggagatgtccgcgctgattgccaggaagctgcgcgagtttcacgatctcgacatgcctggacctagggacgtgtcattgtggcagaggctcaagcggtggcttggggaggctcgtgacaggtgttctgaggaagagtctaaccaatttcagctgaataaactaggtgatgagatttcagtgctggagaagacgctctcggggctccaacagtcagtaggattctgccataacgatctgcagtatggaaatattatgatatatgaagagaccagacaagtcaccttgatagactatgaatatgcgagttttaacccagtcgcattcgacattgctaatcacttctgtgagatggctgctgattaccatacatcaacaccacatgtgttggattttacgaaatatcctgacactggggagcagagaagattcgttgaggcataccttagctctgcaggtaaaaagccaacggatggggaagttgaagaactgctagggttgatagcaaagtacactcttgcgagccatctcttctggggcctgtggggaataatctcggcgcacgtgaacgaaaatatcgacttcgcgtacaaggagtatgcaaggcagcgcttggatcagtactggcaaacaaaacctcgaattcttggacccaagtgatgagtcgttgctttttgtagggggtccttggccagctagtcatgtgaattctgtttgtcagtagcggctagtagctgccagtttttgactgcagattgttcagctcgctgtgacctgtgtcgtgaccatattcttgacttacggggtgtaattattttgcctggtcttaggctaaggtaaccagtctttctatcctaatgtaaatagtacagtctataatgaccttatcctcacatggttctgaacacaatttctgct

SEQ ID NO: 145765 - DNA, 1583 bp, Zea Mays
cccgattcggatccgattccgcggcaggcggcattcccagcctcccaaacccatttccctctccgatcaaatcaaatcaaactcaaaccgacacgggacccacgccgcatctccgcctccgcagatcgccgccgcctacacgcgcccctccgcgcgccgatggccgccgcggacccgccgccgcgcggggaggccgcgcccgcgctgaagcggagcgccagcatcgaccggataccggcggacgcgcgccgcatcctgcaccgcctcgccggggacctctggggcggcgacgtggaccccggcgcgctggccgtgtcccagctcaggggcgccatgaccaacgaggtcttccggatcacctggcccggcggcgaggccgagggcaacggcccgcgcaaggtgctcgtgcgcatctacggccggggcgtcgaggtcttcttcgaccgcgccgacgaggtccgcaccttcgagtgcatgtcgcgccacggccaggggccccgcctcctgggccgcttcgccaacggccgcgtcgaggagttcatcaacgccaggaccctctccgccgcggatctgcgcgacccggagatgtccgcgctgattgccaggaagctgcgcgagtttcacgatctcgacatgcctggacctagggacgtgtcattgtggcagaggctcaagcggtggcttggggaggctcgtgacaggtgttctgaggaagagtctaaccaatttcagctgaataaactaggtgatgagatttcagtgctggagaagacgctctcggggctccaacagtcagtaggattctgccataacgatctgcagtatggaaatattatgatatatgaagagaccagacaagtcaccttgatagactatgaatatgcgagttttaacccagtcgcattcgacattgctaatcacttctgtgagatggctgctgattaccatacatcaacaccacatgtgttggattttacgaaatatcctgacactggggagcagagaagattcgttgaggcataccttagctctgcaggtaaaaagccaacggatggggaagttgaagaactgctagggttgatagcaaagtacactcttgcgagccatctcttctggggcctgtggggaataatctcggtgagccaccgacactagagtcaaatgtgcatgtctcgtttttgtgaataaatacaaatctatctttggtttctttgttttctctaccgtgtcatcaggcgcacgtgaacgaaaatatcgacttcgcgtacaaggagtatgcaaggcagcgcttggatcagtactggcaaacaaaacctcgaattcttggacccaagtgatgagtcgttgctttttgtagggggtccttggccagctagtcatgtgaattctgtttgtcagtagcggctagtagctgccagtttttgactgcagattgttcagctcgctgtgacctgtgtcgtgaccatattcttgacttacggggtgtaattattttgcctggtcttaggctaaggtaaccagtctttctatcctaatgtaaatagtacagtctataatgaccttatcctcacatggttctgaac

SEQ ID NO: 145766 - DNA, 1497 bp, Zea Mays
cccgattcggatccgattccgcggcaggcggcattcccagcctcccaaacccatttccctctccgatcaaatcaaatcaaactcaaaccgacacgggacccacgccgcatctccgcctccgcagatcgccgccgcctacacgcgcccctccgcgcgccgatggccgccgcggacccgccgccgcgcggggaggccgcgcccgcgctgaagcggagcgccagcatcgaccggataccggcggacgcgcgccgcatcctgcaccgcctcgccggggacctctggggcggcgacgtggaccccggcgcgctggccgtgtcccagctcaggggcgccatgaccaacgaggtcttccggatcacctggcccggcggcgaggccgagggcaacggcccgcgcaaggtgctcgtgcgcatctacggccggggcgtcgaggtcttcttcgaccgcgccgacgaggtccgcaccttcgagtgcatgtcgcgccacggccaggggccccgcctcctgggccgcttcgccaacggccgcgtcgaggagttcatcaacgccaggaccctctccgccgcggatctgcgcgacccggagatgtccgcgctgattgccaggaagctgcgcgagtttcacgatctcgacatgcctggacctagggacgtgtcattgtggcagaggctcaagcggtggcttggggaggctcgtgacaggtgttctgaggaagagtctaaccaatttcagctgaataaactaggtgatgagatttcagtgctggagaagacgctctcggggctccaacagtcagtaggattctgccataacgatctgcagtatggaaatattatgatatatgaagagaccagacaagtcaccttgatagactatgaatatgcgagttttaacccagtcgcattcgacattgctaatcacttctgtgagatggctgctgattaccatacatcaacaccacatgtgttggattttacgaaatatcctgacactggggagcagagaagattcgttgaggcataccttagctctgcaggtaaaaagccaacggatggggaagttgaagaactgctagggttgatagcaaagtacactcttgcgagccatctcttctggggcctgtggggaataatctcggcgcacgtgaacgaaaatatcgacttcgcgtacaaggagtatgcaaggcagcgcttggatcagtactggcaaacaaaacctcgaattcttggacccaagtgatgagtcgttgctttttgtagggggtccttggccagctagtcatgtgaattctgtttgtcagtagcggctagtagctgccagtttttgactgcagattgttcagctcgctgtgacctgtgtcgtgaccatattcttgacttacggggtgtaattattttgcctggtcttaggctaaggtaaccagtctttctatcctaatgtaaatagtacagtctataatgaccttatcctcacatggttctgaacacaatttctgct

SEQ ID NO: 145767 - DNA, 88 bp, Zea Mays
cagttttgtataatggctgtcagtactgtctataatcatactatcaagtaccagtacaactgctgctggtcattagaaagagtcgagc

SEQ ID NO: 145768 - DNA, 102 bp, Zea Mays
ggtaaataaaaataatagcgatgctttcttatggaaaattgacgacatttttttgcactataattgtcacatgcgggtttcagggtgcaccaagacacaggc

SEQ ID NO: 145769 - DNA, 244 bp, Zea Mays
ccgaagcttgaagaatgcggactttgatggggatcaaatggctgttcacctacctttatccttggaagctcaggcggaatcccgtttacttatgttttctcatatgaatctcctgtctcccgctattggagatcctatttgcgtgccaacccaagacatgcttatcggactttatgtattaacgattggaaaccgtctaggtatttgtgaaaatagatataatagttgcggaaactctccaaat

SEQ ID NO: 145770 - DNA, 82 bp, Zea Mays
aaacatgtttttgtgcttcttagtttttgtgactagaaggctacagtccagtgtacaacactttattttgatggatgtaata

SEQ ID NO: 145771 - DNA, 405 bp, Zea Mays
atggaaaaattacggtcattgagtgagacactatttagacctgacgttggtggtttatcgcacgagggacgagaagattcagattatggcgatgaaatggaattggatgagacaacgacggcgccgcctgtggtccgccgtctgcggcgatccaagtcgggatcgcacggggcgcaaacatcaccaaattccgcaccatttctgccccaacccaatcagtcacaccgacggaccctaaccatcgacggtgaacccactgtggaaatggagcgagtcgaggaggtggaggaggcggccgaggcaatggagcgagtcgaggaggtggaggagggcggcgaccccgccgaggcaatggagaggaggcggaggccgaagagaggatcgttgtatggccttaggatttag

SEQ ID NO: 145772 - DNA, 412 bp, Zea Mays
aggatacaagggatctggggcaagggctgcatggagttcaggccggagcggagcggtgggtgtccaggagtgaccgcctgcggcacgagccgagctacaagttcctgtccttcaactccgggcccaggagctgcatcggcaaggacgtcagcctcagcaacatgaagatcacggccgcgtccaccattcacaacttcaaggtcgagctggtcaggagggggcacgaagtgacgccgcagagctctgtcatatactccacactcagaacggggtgatggttagtctcaagagaagggcggcagccggcaggttgatctctgctatcacttatggtggcgagtgccttttagtctgacgtaggagagcaaaatagtatgttaactgttggtgtcaacgcgtgatggcttcttac

SEQ ID NO: 145773 - DNA, 1768 bp, Zea Mays
cgctagccaaaaatcgattgaaaaaaggtaccccaagaacccaaagtcacaagacactttaggcacttcattcagcttcaagaaagcggagcaatggagatggtgccatggcttctcggcttcctcggcaggtacccggagctcatggtgtccctcgcttgcttcctcctgctgtttcgtaggctgaaccagcgggacgggctgccgacgaactggccggtggttggcgcgctcccggcgatcaccgtcaatgccgggcgcatgcacgagtgggtgacggagttcctgcgcgccgcggggctgtcgtacgtcatgaagggcccgtggggatcgccggtggacgtgatcatgacggccgacccggccaacgtggcgcacgtgttcacgtccaacttcggcaactaccccaagggccaggagttcgccgcgctgttcgacgtgctcggcgacggcatcttcaacgccgacggcgagtcgtgggcgttccagaggcgcaaggcgcacgcgctgctgtcggacgcgcggttccgcgcgggggtcgccgccagcaccgcgcgcaagctccgcgacgctctcgtgccgctcctcgacggcatcgccgcgtcgggcgcggtggtggacctgcaggacgtgttcgtgcgcctcaccttcgatctcaccgccatgttcgtgttcggcatcgaccccggctgcctcgcccctgacttcccctacgtcccgttcgccgccgccatggacaccgtcgaggaggtcctgttctaccggcacgtcgcgcccgtgccgtggctgatgctccagaagtacctcaggactgggcacagcaagaagatgtggaacgctcgacgggtgctcgacgcgtccatcgccgagttcatctcgctccggcgagagcgcgccgccgaggccgaggccgaggccgacctgctcacgtcgtacctggcgtgccacgacgagataggcaagtccggcgccgagctcgagcggttcttgcgcgacaccacgcttaacctcatggtcgccggccgggacacgacgagctcggccttgacgtggttcttctggcttctgaccaagcacccggacgtggaggccaaggtcctcgaggagctccgcgcgcacccgccgttgtccggcgcgggaggccatcgcaccgcggctgagctgaagcagctggtgtacctgcacgcggcgctgtcggagtcgctccggctgtacccgccggtgccgttcgagcacaaggcggcggctcggacggacacgctgccgagcggcgcgcgcgtggggccctcccggcgtgtgatcgtgtcgttctactcgatggggcgcatggaggcggtgtggggcaaggactgctcggagttccggccggagaggtggctgaccgcggcggggcggttccggcacgagccgtcgtacaagttcgtggcgttcaacgtggggccccggacgtgcctcggcagggacctggcgtactcccagatgaaggccgtggtcgccgccgtgctgccgcggttcagggtggaggtggacgccggcgccgtggtgcggcccaagttgtccatcatactccacatgaaggacggcctcaaggtgagggtgcacaagagagaagaagatggcctatgttaagtgcaatactgcactaatctttgttgctaataataatgttggtcgacttgtacgtcgtcgtgtcaactattctcaaaactcaaaagcatgcatgatagtacgtgtagagtgcacatttgcattgcagatgtgttgcatg

SEQ ID NO: 145774 - DNA, 1518 bp, Zea Mays
atcgattgaaaaaaggtaccccaagaacccaaagtcacaagacactttaggcacttcattcagcttcaagaaagcggagcaatggagatggtgccatggcttctcggcttcctcggcaggtacccggagctcatggtgtccctcgcttgcttcctcctgctgtttcgtaggctgaaccagcgggacgggctgccgacgaactggccggtggttggcgcgctcccggcgatcaccgtcaatgccgggcgcatgcacgagtgggtgacggagttcctgcgcgccgcggggctgtcgtacgtcatgaagggcccgtggggatcgccggtggacgtgatcatgacggccgctcctcgacggcatcgccgcgtcgggcgcggtggtggacctgcaggacgtgttcgtgcgcctcaccttcgatctcaccgccatgttcgtgttcggcatcgaccccggctgcctcgcccctgacttcccctacgtcccgttcgccgccgccatggacaccgtcgaggaggtcctgttctaccggcacgtcgcgcccgtgccgtggctgatgctccagaagtacctcaggactgggcacagcaagaagatgtggaacgctcgacgggtgctcgacgcgtccatcgccgagttcatctcgctccggcgagagcgcgccgccgaggccgaggccgaggccgacctgctcacgtcgtacctggcgtgccacgacgagataggcaagtccggcgccgagctcgagcggttcttgcgcgacaccacgcttaacctcatggtcgccggccgggacacgacgagctcggccttgacgtggttcttctggcttctgaccaagcacccggacgtggaggccaaggtcctcgaggagctccgcgcgcacccgccgttgtccggcgcgggaggccatcgcaccgcggctgagctgaagcagctggtgtacctgcacgcggcgctgtcggagtcgctccggctgtacccgccggtgccgttcgagcacaaggcggcggctcggacggacacgctgccgagcggcgcgcgcgtggggccctcccggcgtgtgatcgtgtcgttctactcgatggggcgcatggaggcggtgtggggcaaggactgctcggagttccggccggagaggtggctgaccgcggcggggcggttccggcacgagccgtcgtacaagttcgtggcgttcaacgtggggccccggacgtgcctcggcagggacctggcgtactcccagatgaaggccgtggtcgccgccgtgctgccgcggttcagggtggaggtggacgccggcgccgtggtgcggcccaagttgtccatcatactccacatgaaggacggcctcaaggtgagggtgcacaagagagaagaagatggcctatgttaagtgcaatactgcactaatctttgttgctaataataatgttggtcgacttgtacgtcgtcgtgtcaactattctcaaaactcaaaagcatgcatgatagtacgtgtagagtgcacatttgcattgc

SEQ ID NO: 145775 - DNA, 1738 bp, Zea Mays
tttttttttcgttcttcagaagttcagagcgtccctatctccttccctctgctctgatttttccagcagccggtttcccctgatattcttccacgctgcgccgattagcacctggatatgttctccagcgcacaaccttatcctgcagccaccctcgcctgattctttcccagccgccgctctgggcgattaaaaatcctgctcaccggccggatctccggcgtcgtctgcccctgctttcctcggtgtcctccccacagtcgtctccttcctctgctcgtcgctgaaattcgccggccgcgaacgcccatggcgcacccccagtccctgctttctctttgcctctctctcttatccatggccgccggtcgctcctttctgtcccgcccggtgctctgcactgctccgtcgcttggtctccggctcgccgcgtgcgcaaggtttctctggttcagccgttcttcttcctccccctgcgtccctgctctgctctgtctgccgcgcgctgagtgccgaggctcctgctcgaccgctcctctctggcttctctctctccctccatctctctctgctcaccgcggctcttccccaagtctggtgccatggcgcttgtcagccgcgaccttgccaggctcggtccctgctgctgctcgcccatctccttcatctccctcctctccatcgtggtgttcctctccctggtgcttttctgtgccggccgccctcacctctgctcctcctggttggccgagcagctcgccctctcttgtcgtgcgtcctgctcgccctcagcttttcacggagctcgccccggccttagctccttgctcgtcatggctactgtgcgctccctgctcttgtgccgcatgcaggcttccctgccggagttccgccatccgcggcctctgccctgcttccttggctgcgtgtccttctgccggccaagctcggctctgcgctttccctttctctgtgcttgtgctcgccgtgccgtgagtcactggccagcagtccagctcgcctccacttcctacgttccctgctccagctctactgtcgcgcgcgcagctcgcccctgcgcaggtgaatcgcccttggtgctggtcgcgtgttcctcgcccggctcggtcgcgacctcgccgttgttcctcagctcggcgcctgcttcttgttcctgttgcccgtgtcaagctccctttaaccggtcgtcgtctagctcctctattgcgcgcgtgaggttctctcctcgtcacggtgtgtcgagttttctcgtcgagtctcgccgcgtgtcctgtttcctgctcgccagcgtgccctctcggctcgctcggctttaaaatccctatctcgtcgtcgacctcgccatgacttagttcgtctgtcgtgctggtcactattccatattgtgcctattagctcggatcctgtcccagctcgtcgttgtgtcattcatagtccagtcgtcaaacccgtcatctcctgctcaaccccacctcaccagctcgctcaagactgcaatcgaaggtcgtcgtcaatccgtgcgtcagcacgaaatcccaagaatcgggtgaagacgaagctagcagcgcgatatttctcaagcgctcgacaaattgcctagatcgaaagatcactaccgatctcgcggattcgagtcagctattgaaacggtaagctgatgaattattcagaatagttcgatcgttgaataaattaatgtgctagtgcgatgctcatt

SEQ ID NO: 145776 - DNA, 168 bp, Zea Mays
ctcctctattgcgcgcgtgaggttctctcctcgtcacggtgtgtcgagttttctcgtcgagtctcgccgcgtgtcctgtttcctgctcgccagcgtgccctctcggctcgctcggctttaaaatccctatctcgtcgtcgacctcaccatgacttagttcgtctgtcg

SEQ ID NO: 145777 - DNA, 851 bp, Zea Mays
acaccaagaatcacatcacacagcgaaccgagaaaccaacacaacaagcaaagcagcgatccgacatccgagagatggacgcggtgatgttcgggctggagactcccctgatggccgcgctgcagcacctgctggacgtgcccgacggcgacgccggcgcgggcggcgacaacaagacgggcagcggcggcagcgccacgcgcacctacgtccgcgacgcgcgcgccatggcggccaccccggccgacgtgaaggagctgcccggcgcgtacgcgttcgtggtggacatgccggggctgggcacgggcgacatccgggtgcaggtggaggacgagcgggtgctggtggtcagcggcgagcggcgccgggaggagcgcgaggacgacgccaagtacctgcgcatggagcggcggatgggcaagttcatgcgcaagttcgtgctgccggacaacgccgacgtcgacaaggtcgccgccgtgtgcagggacggcgtgctcacggtgaccgtcgagaagctgcccccgccggagcccaagaagcccaagaccatcgaggtcaaggtcgcctgagggagcaagcagtagctgtgcttctgaaactttgtgtgtttgtgtttgcttccttctttggtatcaccaatcatcctatctgatatatcgactggggtttttgctgtctccatagaataaatctctacatgtctcttgtaaccttttctggtgaagatcgtgtcgcgatgaatctataagttaccgtttgttttcttttattttgatgatttagaatagaataggctatttttttagaaatatgttatcccaccactttctaaacttatcatataagtctat

SEQ ID NO: 145778 - DNA, 795 bp, Zea Mays
atttgcctaaacctaatccactagcagttcggcactgcggctgcggggatgcggcggccggcggcagcggcactacggagccctcagccagcaccaggttgcggcaacggcaacaaccagcaagtggccagcgattcacgggttcaggcgttcagcgccacgccgtcgtcgccccaagccaggtgtagttattagtttagtacactgctcagtgctcagttagacagttacatggaatgctcaatagacctccagtcaggaaccaccgattgtgatttgtgaagaactgtgaattgattaactgaagatgtcaaatagtggaggcaagggatgtcgttcccgtgctagatcaatgccacccgagaagcaactaggtatttcaagtttcttgcctgaacctccaccgccgcctccttctacgaaaggtagtaccaacggtcagccctgcatggatgatgaggaacaagatgctgaaagtgatcccgacgtcatgaatgattatggtgagctttgaccgtgagtcagcgactagtcatggtgcttaatgcttgacaacatgtttggaactttagataaatatgttgctgtgtccatgtgcggatgtgcctgtttctgtgtgttgtgtgtaatgaaccttgaacttttttggaacattggggcaagaaaaggtgccagccgcatggagcacccttctgtgtggctgtgtgtaatgaaccttgagcactattctatgcgacaacaactttgtcattgtgtgttcttaaatatgtgtgcccgtgtgatgtgtgcatatct

SEQ ID NO: 145779 - DNA, 93 bp, Zea Mays
gatccaacatgtcctgctccagcagtcatcagctcgcgactgccggactggggccggaaggggaagggcacctcacctcacaccttggcagca

SEQ ID NO: 145780 - DNA, 633 bp, Zea Mays
accacatcatgatccgacttgatttttcttgcaagaacgacgacagttccttggtctcccatttcgtcgaacacccggcgggcgtcatattggactgtgcttcttctccactaaatcctgggatttcccctcacatctcacacataagcacacacatactcacaatcaaccacaaaccacatatatcgattaaggagataagtagcataagacaaagggacctcaccgatgactatgaattgcacaagtcaacaactaggcatccatggagggaggtgctgctgttcctagcagagaggggctgggcgagctcctgcagaggggagtacgccgagcaggaggagccaccatgggcgagctcaccatgggaggaagtgagggcgcagctagctgccatcaatggagagctggagacgtcatgtgcagctcacatcaggaagggatgagcgccatgctgctagcaagggtataggggatggtggcgagcagaggggctaggagatgagagggcacggtggaggggatgggggataggcggccatgggagaagccagggaagacaacggcagctgctgctccacaactgcaatcagagaaggagacaccgtgtgggggaagcaagggaggacggca

SEQ ID NO: 145781 - DNA, 1115 bp, Zea Mays
gaggcacgggccgcgacggccgatcaggtgagtagccggccggcagcggaaaccgaaggcacggccacagcaccaccgcgcggcctcgagagtcgaaaccatcaggccatgttcggttggtcagggattggccgggattgtggcgcaatccacgtggatcatccccggctggaaactttcccgattcacattttaattgtcttcggttcatccaccaggcgaggggagggcgacgcgtgcggctagcgaggcgatggttgcgcgacacgctgacggcgacgcctgcgaccatcgatcatccattgttcatctccatccccttcggtggccaattttctctccgggagaaagctggcgcgggttggaggtgggaagaaagagaaagaagatgttgttgcgccttcgattggattgggttggccttggagcgcgtactgccgccgcatgtattcgctgttccggccctgattctatggtgcaccactgtgctgtgcgccgccccagccctcgaggatttagcaaactgctcagatctgttctcgctttgcttcatcagtgaacactgaacacggtccttagcgatccgaagaaacatgcaatctgaatgtatattggacctacagacttgcttgcttctttaccattgcaatctgaatgtatatcagacctgcaaacttactgtatatatttattttggtgaccatttgaaatctaaatttatatttatatttttcatatcatatctaataggagtgtatgtcttacatttggttgcaaggtctaatatgcattttgggcttcttttgagtcatgttgttggtgtggaaccgtggaagtaggatgtggactgcaaggatggctagtttactctttactggcattgacagtttacttgtcgttcttcagtcatttggtggcatgtatcatcaagcttctgtcctttctatacattgttatgaacgttgctatgccttttatttcgaatgctgatgcaatctacgagtttctatccttgtatgtgtgcatagacattgttatgaatgctgctaatgtcttttattttgaatgcttatgcaatctattgagttgtatgtgtgtaaagacattgttatgtg

SEQ ID NO: 145782 - DNA, 702 bp, Zea Mays
attattccccggacttttctcatccattttccccgagtctagccagggaactcacccacgtccgcatcgcgtggaacatttccacgcgaaggcgaggggagggcgacgcgtgcggctagcgaggcgatggttgcgcgacacgctgacggcgacgcctgcgaccatcgatcatccattgttcatctccatccccttcggtggccaattttctctccgggagaaagctggcgcgggttggaggtgggaagaaagagaaagaagatgttgttgcgccttcgattggattgggttggccttggagcgcgtactgccgccgcatgtattcgctgttccggccctgattctatggtgcaccactgtgctgtgcgccgccccagccctcgaggatttagcaaactgctcagatctgttctcgctttgcttcatcagtgaacactgaacacggtgcgtgtgtggccgttcggttctgctttgacagatttctatattgattactcccaccttcgggctttcgatcagcttggtctagtaattctagacacaagttgcttgctccgtttggttcagagggtgtgtcagctcgttcttagcaagcttatcatggttctgattccatgtagtgtcagtaccaaacaaccaccaactgtggtaggaaaagagtagtcatatcaacatgagacatggttggtggtgcgtggtctg

SEQ ID NO: 145783 - DNA, 587 bp, Zea Mays
attattccccggacttttctcatccattttccccgagtctagccagggaactcacccacgtccgcatcgcgtggaacatttccacgcgaaggcgaggggagggcgacgcgtgcggctagcgaggcgatggttgcgcgacacgctgacggcgacgcctgcgaccatcgatcatccattgttcatctccatccccttcggtggccaattttctctccggtctaatatgcattttgggcttcttttgagtcatgttgttggtgtggaaccgtggaagtaggatgtggactgcaaggatggctagtttactctttactggcattgacagtttacttgtcgttcttcagtcatttggtggcatgtatcatcaagcttctgtcctttctatacattgttatgaacgttgctatgccttttatttcgaatgctgatgcaatctacgagtttctatccttgtatgtgtgcatagacattgttatgaatgctgctaatgtcttttattttgaatgcttatgcaatctattgagttgtatgtgtgtaaagacattgttatgtgtacggttttctatgtcatattcttttgcataaaa

SEQ ID NO: 145784 - DNA, 818 bp, Zea Mays
tttttttcaatttaaggttttgattatctgcatagctgtattatacatttcactcctacatgttcagttttaatagtagtgtctgctattagttcttgcatctgttgtgttaaccaatcctgctgctagttcaattctagtgatctactaccattcactttcctcctgctgttattcgctttcctactgctactagttcagttcttgcatctgttgtgttgaccaatcatgtgtgttgcctctcaggtccttagcgatccgaagaaacatgcaatctgaatgtatattggacctacagacttgcttgcttctttaccattgcaatctgaatgtatatcagacctgcaaacttactgtatatatttattttggtgaccatttgaaatctaaatttatatttatatttttcatatcatatctaataggagtgtatgtcttacatttggttgcaaggtctaatatgcattttgggcttcttttgagtcatgttgttggtgtggaaccgtggaagtaggatgtggactgcaaggatggctagtttactctttactggcattgacagtttacttgtcgttcttcagtcatttggtggcatgtatcatcaagcttctgtcctttctatacattgttatgaacgttgctatgccttttatttcgaatgctgatgcaatctacgagtttctatccttgtatgtgtgcatagacattgttatgaatgctgctaatgtcttttattttgaatgcttatgcaatctattgagttgtatgtgtgtaaagacattgttatgtgtacggttttctatgtcatattcttttgc

SEQ ID NO: 145785 - DNA, 775 bp, Zea Mays
aacattgaagcatgcgagcaggttacgacataaatgtaaggacatttgtaaaattgataattgacacatgatgtttcataacctcagttttgctagcttaggctgtcagggaagtgatgcatcaatggatcaatactgtttattgattataatgaaaagactcgagtaaggaattgataaataactgttaaaatcaagtcagcgcaatgtatggatctatgcatcttgttatggcacataatatttaatgtataaggaataatgttaaaaataaatggcctaatttgtctcagacatttttttggtgcatcactgattgagttatgctatatgcatggaattgaattgtatatacaatgtttatttgaattttctatcaaactatatcttgtaccaatatcagtgctactactcaaggatgttgttgcaaatgagttgtggagaaccgtagatgcaaatggttggagagcatcttctgcaccacacatctattggcctcacataccagctgaatctgagagcaatgggtacttgtgtgtccggtgcaacggcggcttgaccttacaaatcagtgttgtatgactaatataaaactctctctctctaaagtagcatagttcaccatgcaagttttgtgtattcatggcaacatatctgaaagatttaagattacttctaccttgattttgtagatatgaaatgttgttgtcattgcacgaatcattaatgacttgattttgctctctatatgctatcttagaagtttcagagttca

SEQ ID NO: 145786 - DNA, 3194 bp, Zea Mays
aatccaacaatccaaaccacccacaccacaccaccctgctcttcacgagctcctccactctgttcttccccgccgctccactgcgcccttcctcccgccgggatcctaaaccctagcccctagggagcgggagaggctgctgctgctgctgctaccgcggcggcgccggaggggatgggcaccgggggagacgggagcaaggcgggcccggcgctgccgctcgaggcgctgctggcgctcggcctcgaccagcgcaccgccgagaacgcgctcgtcaacgccaaggtcaccgccaacctcgcctccgtcatagccgaggctggtataaaggaatgcgacaagtcagtcggcaatcttctgtatgcagtcgccaccaagtacccaactaatgcacttgttcaccgtcctgtccttattagctatgtcttgtcaacaaagataaagaaccccgcacagctagatgctgctctgtcatttcttactaatactggtcctgattctctagatgtggtcaaatttgaagaagcatgtggtgtaggtgtggttgtttctattgaggaaattaaatctactgttactgatgtgcttgaggagaatatggaagctataaaggagcagcgatatcacataaatgttggtacactatgcggacaggtcaggaagagacacccctggggtgatgctaaggcgataaaggaggaaattgacaagaggcttgcagaaatcctaggtcccaagacagaagctgacaatataaaaccagtgaaaaagaagaaggaaaaaccagcaaaagttgaggagaaaaaagttgcagttgccactgctgccccaccatctgaggaggaattgaacccgtacactatatttccccaaccagaggaaaacttcaaggttcatacagaaatatttttcagtgatgggaacatatggagagcgcataacacaaaggaaattttagaaaaacatcttaaagcaactggaggaaaagtgatgacccgttttccaccagaacctaatggatatcttcatattggtcatgccaaggctatgtttattgattttggtctggctaaggagcgaaatggccattgctaccttagatttgatgacacaaatccagaagctgaaaagaaagaatacatagatcacattcaggaaatcgtccattggatgggatgggagccctacaaagtaacatacacgagtgactatttccaagctttgtatgaacatgccgttgagttaatacagaaagggctagcatatgtggatcaccagactgcagaagaaatcaaggaatacagggaaaagaagatggatagtccatggaggggtaggccaattgaagagtctctgaaattatttgaagacatgaggcgtgggttgattgcagagggtgcagcaactctccgtatgaagcaggatatgcaaaatgagaacaaaaatatgtctgacttaatagcatatagaataaaattcaccccccatccacatgctggcgacaagtggtgtgtctatccgagctatgactacgctcattgcatggtggattctcttgaaaacatcacacattcgctgtgcacacttgagtttgacatacgtcgcccttcatactactggctacttgttgccttgggcctttatcaaccatatgtgtgggaatattcgaggctaaacatatcaaatactgtgatgtctaaaagaaagttgaatcgacttgtgacagagaagtgggtagatgggtgggatgatccccgcttgttgacactggctggtctccggcgacggggagtatcatcaactgcaataaattcctttattcgtggaatcgggataacgagaagtgacaatagcttaattcgtgttgatcgtctagaatatcacatcagggaggagcttaacaaaacagcccctcgaaccatggttgttttgcgacctctaaaggtggtaataactaacttggaagaaggaaaagtactagaccttgatggcaaaatgtggcctgatgcttctgatactgatgcttcctcccactataaggttccgttctcaagaactgtctacattgagaaaactgattttcgcctaaaggactcaaaagactactatgggctagcccctggtaaatctgtcatgctaaggtatgcgttccccataaaatgcacagatgttatctctggtgatagtcctgatgatattgttgaaattcgagctgaatatgatcctttgaagacttctaaactgaagggtgttcttcactggattgctgagccagcacctggtgtagagccattgaaggtggaagtaagattattcgagaaattgttcatgtcagagaatcctgctgaattggaagattggcttggcgatcttaacccacactcgaaagaggtgataaaggatgcttatgctgtaccatcacttgccactgcggttctgggtgacaagttccagtttgagcggcttggttacttcgccgtggatactgactccacacctgagaaactcgtgttcaacagaactgttaccctccgtgattcgttcgggaaagctggacccaagtgactgttcagtgtaatttagggagggcgctggttttgatcggttgcagaggcgcacctgaactatacagtttgtgaagaaaatggtcgtctaatacagaacagtttaaaggccttactctttataaaatttagggttttttaatctggtgccctcagttttggtgatgtgttcatttgtaccccttgtttacttcgaatcagattttgtatgatagtgttagtgtcccgattctaccgtctgtaaccgaaaggtcccgggttcgagccccagcctctgcatattatgcgggtaaggcttggcgcttaaagatacaattcccaagaccccgcacagtgcgggaagcctacagcactgggtacgcctagtgttagtgtcccgattcccattctgtttgatgtcatactattgtgatgggagttctgttttcccctgcgtcctcttttttttgcaaatccttactgtgatactactccctttaattttcaaattataagccattttgatttccttggagagtcacatcacaagtctattaaaattataaagaaaacgaagatttatcaaaattataaagaacaaatatttataacataaaatagatatagtataaaaatattataaaaacataa

SEQ ID NO: 145787 - DNA, 675 bp, Zea Mays
tgcaacatgagccaatacctctgcattggccggttctcagcgacctcgtttcaggtcctgggccacatgaagaccgtgtgtgtgctgatcctcggctggatcctgtttgactcgaccctcaccgtgaagaacatcctcgggatgctgctcgccgtgatgggcatggtggtctacagctgggccatggaagcagagaagaaggcggtagcccctgtcccccggatcaagagcaaaatgctcgacggcgaggacgtacccctcaaggccagggtgagcggcatgcccgcggtcgacctcgaggacgacgagatgaagagctagttgctgccgccgccgctgattcgttcattcttcttgttcttttgtaactgtgcgcgcgctatcgctcaatccaaagttgtctgtctgtcagccctcagctatcgacactacactgttaattttggcccccttgttggggagagtccagttcctaggtgacgacgaccacccccaattcggcgtagatcaaacacacactagcagaatgcaggttgttaggatttttttcaggcggcagggtggatccattcattgtcatgttgacaagactcataatagaaatacaggtaacatgtgtatctccgctccgtggtaggattgataaggaattatggatccagccggcgatgtatt

SEQ ID NO: 145788 - DNA, 120 bp, Zea Mays
tcaagtgcttttattgtcattatcgaccaaaactacacactatataactacttaaattcaaacaaaatagcaatgaaactacaccatgcgaagataatccaaataaaaaaatagtaggaa

SEQ ID NO: 145789 - DNA, 2458 bp, Zea Mays
cccgagagaagtcttcgttccgtttgctcagtccgcggaagaacagacaaaagagcgttcagatccaaagaagcaacaagccttttccgctgagagctcagaatcttcgtaagctagacaacagatcccagttaagcgaagcagttcgcgggtcgtcggtagcttcagcgcccggcgcccggcgagcagctacggcagctagcaggctccctcctccattaattggtggttggtgctacctttttcttcgtttagttttcagcctgagaatgatgggtggagggctaataaacacctggaagaaatgggagatccaagtactggtgctccttagcttcacgctgcagctcatcctcctggcgttcgcaaggatccgccgccgcaaaggctccgctccgctgagggtcctcctctggttggcctacctcatggccgactccacagccatctacaccctcggccacctctccctccgcgccagttcaggcgagaagcaggtcgtcgcgctctgggcgcccttgctgctcctgcacctcggcggcccggacaccatcacggcctacgccttcgaggacaaccagctctggctgcgccatctgctgaacctcgcggtgcaggccatgggggcagcctatgtcctgtaccagtctgtggctacccaaacccaccagagggccttggtcaccgcctccatgctgatgttcgtcaccggccttgtcaagtacggggagaggacatgggcgctgaagcgtgctaacatcgacagcatccgaggcggtctcgatctgcaggacgacagagaccgtcgccagccgtacgatgggagggctggaacggcggagctggagctggactcggaggaggttctgctgggcgctcactacgtgttcaacgcctgcaagagcttcttcaccgacgacctgatcacgtcgggagcagagcgcgaagctatcagcaggggcatacagttcaatggcggcaggtacacgcacgagctgatcgagatgcagctgtccctgatgtacgacatcatgtacaccaaggcggcggtcatctacacgtggtatggcatatgcatccgtctaatgtcaccggcggccacctgggcgtcgttcttcttgttccgactgagcagcagccgcggccatggtggacctggtggttacagcagagtcgatgtcgtcgtcacttacgttctcctggccggggccttcgtcctggaaatcgcgtcgttggtcagggtgctagggtcttcctgggcatgcgccttcttgcacgctcgcagatgggaccggatccatggcgcagtccggtgccttcgtctgctcgtccgggccgcgaggagccgaaggtggctggactcggttgggcagtacaacctcctggacttctgcactcgtgacaggacggagataaggagctgggtcgccaagaaagtggggctggagaagtggtgggacaagctccattactcgggcaccgtcagcatttcagacagcttcagggacctcctgctggaagagataccgaggaggcagctaggcgacatgagggacgcgcggggccggtggacgctccagcaaataacttacccaccggggagcagcggcagattatacgatgagatcagctggagcgtcaacgaaacggacttcgaccagagcatcctcatctggcatgtcgccatcgacgtctacctctgctgccgccgcaaaccagggctggccgcggccgcggccgcggaggaccgcctagccaaagccgtcaaggagctctccgactacatgttcttcctcttcgtcgtccagccccacatgcttccgggcccggttcggagcacccggtacgacaacaactgcgatggcctggtcgcgctctggcaacggctctcagccgaccacgacagcatggaccctacgctgacaccaagggaaaacctagctagactgctttaccgcgagtatagagacaaggacgacgacgaccccgaccccgactctgacggtcgccgtgctagtccagccgcagcagacttttccgttcagatgacgatggaggaggaagataacaacccccatggcctggcttacatcgacgcggccgggctcaccggactgctcctcagcgagcgctcgggtatacccgacgtgctggaaatgatcgccggagtgtgggtcgagatgctgtgctacgccgcgcgccactgcaccgaggtttcccacgccaagcagctgagcagcggtggcgaactggtgactgcgatggggatgctggtggaatacaccgccaggtatgacctccatcctcatggtcgtcttggatcagaggatgattcgtctatggagaatggagaacctagcggagcgccggctgaggtatctgtcgtcgatatcgacagtatcagtgaaggtaccggaggtgaaatatgcgaggagtatatataaatgtgacatttgat

SEQ ID NO: 145790 - DNA, 1618 bp, Zea Mays
cttcatccgcagatgcaaattgaataaaattagcacacagcacaaaaaacggagagagtacagtactacacttcatgtcactaccaattatacattccagacacttttggattacatggttaaaagtaagagaccaccaaatcgtacttgcgctaccaacaagaagatgcgtgaaaaaatttaaaaaaatggcactacacaaagcgataaagagaaagagagagagagaaaacaaatcgttcaagcctcacactgcagaacagaatgcacacggcacgtcacttcctgccttgccgctcctccgacctctccttctccttccctccccgccgaatttggtaaaattcaattaaacacggaaaaaaatttacagcggccggcatttgattcgaattctgtttcccttgctttccctcctactggactgactggagaaacttcacccggtgttgcaaagcaaagcaaagcaaagcaacctttttccctttcacccgaaaaattttgcaatgcggcccctcggaggctggcgacgacgacgtggctagaaggtccacttccagatcttgacgcggaccctgacctggcacgcgcgagcgacggtggccgtggccgacgcggcgggcggcgccggcgcgtcgtcgacggccgcggcggcgggggctggggtgtcggccgcggccttcgccagcttcttcgtcttcttggccggcgcgggcgcgggcgcggccaccttgacgccgtcgcagtgcaccaggatgccgatcttcttggtcctgagcgcgccaacccggacgccggccctggtctccaggtccaggacgatggggaactcgccggacctcttgacgtcggagccggccgcggcggggtcgaccgcgagcgcggacgcggagacggtggcccggatgacggtgacgttgccggcctcgtgcgcgaacccgggcgcggtggccgcgcccagcggcacggcgttggcggccgtggcggccgtcacggcgaagtcgtcgtagacgtacaccagcttcttgttggggttcctggcggtcagcgtcacgtcgatggcgtcgctcagcgcgggcgcggtggcggacgacgacaggctcagcctcgtcacgcgcgccgcggtcagcgtgaaggccggccggtgcggccggtacagcaggtagaaggcgcccccggccacggcggccaggacggcgaggaggacgacgacgaggagcgtccagcagaagcagcagcagcagctgaacgggcacgaccgccccccgcgccggcgcttcgcgggcgcctgctgcggcccggtagatgggtcgttggtacatcttcggcgggccaccggcgccggcgctggccgccgcgggctgtggggtgggcttgccgttggaggacattgtcgccgccgctcccgctcccgctccgcagcgcaggggacggccgagctccgcaggcaggcgggggtggttcttggaagcctcggtggcactgcgactccgtgagcttggctgtgaggtgtaacggaggagagagatctataggcgcgagggggagggaaggccggaagggaagacgaggagggaggtcaggtggagaaggtgagggaaaagggacagccggacag

SEQ ID NO: 145791 - DNA, 1236 bp, Zea Mays
atgtcactaccaattatacattccagacacttttggattacatggttaaaagtaagagaccaccaaatcgtacttgcgctaccaacaagaagatgcgtgaaaaaatttaaaaaaatggcactacacaaagcgataaagagaaagagagagagagaaaacaaatcgttcaagcctcacactgcagaacagaatgcacacggcacgtcacttcctgccttgccgctcctccgacctctccttctccttccctccccgccgaatttggtaaaattcaattaaacacggaaaaaaatttacagcggccggcatttgattcgaattctgtttcccttgctttccctcctactggactgactggagaaacttcacccggtgttgcaaagcaaagcaaagcaaagcaacctttttccctttcacccgaaaaattttgcaatgcggcccctcggaggctggcgacgacgacgtggctagaaggtccacttccagatcttgacgcggaccctgacctggcacgcgcgagcgacggtggccgtggccgacgcggcgggcggcgccggcgcgtcgtcgacggccgcggcggcgggggctggggtgtcggccgcggccttcgccagcttcttcgtcttcttggccggcgcgggcgcgggcgcggccaccttgacgccgtcgcagtgcaccaggatgccgatcttcttggtcctgagcgcgccaacccggacgccggccctggtctccaggtccaggacgatggggaactcgccggacctcttgacgtcggagccggccgcggcggggtcgaccgcgagcgcggacgcggagacggtggcccggatgacggtgacgttgccggcctcgtgcgcgaacccgggcgcggtggccgcgcccagcggcacggcgttggcggccgtggcggccgtcacggcgaagtcgtcgtagacgtacaccagcttcttgttggggttcctggcggtcagcgtcacgtcgatggcgtcgctcagcgcgggcgcggtggcggacgacgacaggctcagcctcgtcacgcgcgccgcggtcagcgtgaaggccggccggtgcggccggtacagcaggtagaaggcgcccccggccacggggtgggcttgccgttggaggacattgtcgccgccgctcccgctcccgctccgcagcgcaggggacggccgagctccgcaggcaggcgggggtggttcttggaagcctcggtggcactgcgactcc

SEQ ID NO: 145792 - DNA, 1078 bp, Zea Mays
aaaagttaggcaaagtgtgccaagtgaggctgcaatccaaacatgcccacgtcttcgaagaaagcgacgggtgccggatccagacttcattccccaaaaccaaaataatcgccaccgctctccgcaccgaaccgaagcagcggcgatgtcggcggagaagccggctcccgtgcgcgtgctctactgcggcgtctgcggcctcccggccgagtactgcgagttcggccccgacttcgagcgctgcaagccctggctgcgcgcgcacgcgcccggcgtctaccccgacgaccttgtcgccgcctcctcctcacccggcggcggcgacaaggacgtcgacaaggtcggggatcgcctccagggcgtcgggatctccgacggctccaccagcgccgcaggggatgcttccgcgtctaagccccaagaggcgaaacgcctgcctggtggtaagctcaagaaaaaggagaagcaagaagtggtcattgagaagattgtccgtaacaagcgcaaatgtgttactgtggtgaaagggcttgaattgtttggtgtaaagcttagtgatgcttcgaagaagcttgggaagaagtttgcaaccggagcttctgttgttaagggccctacggagaaggagcaaatcgacgtacaaggggacatctcatatgatattgtggagttcattacagatacatggcctgatgtacctgagtcggccattttcttcattgaagatggaaggaaggttcctgctgcttgatgccatatggtttataaggcacgagaccaatggatttacaaatataatacagaggtaaggtaagggcatggctgttaaggcatatatagggccataccagctcatctcttgtctgaagtcatgaactgttgttccggtttttaggcttacttcacaagtggcattctgtttaccatcgtcacctgcttccatgtatgaaatcaaatctatacagttaccaatttactatgactgtgtctgttgtatcacttccaaaagtctggacactgagagaaagaggatcatcggttagactcccattgtgtggcaccaaaaaaaaaaaaaaaa

SEQ ID NO: 145793 - DNA, 628 bp, Zea Mays
cctctgcccacacaagcacacggcgcgcgcactcccgcgacaaaaaaaaaggaagtggcggaagagaagcaagaaataaaaaaaaagaagcgagtggagaccgcagcacgcccggccggcgtctggggatgacgcgcgcctgccgccaatggccgcaccgacgcagacgctagtgctggcggggatcatcctcctcaacttcgtcctcgccgcggcagcgctctaccgccgcatccgcggccgccgcaggccccggcagcacgtcccgccgccgccgccgctcgagccggccgccgcggaggaggcggaggcggaggaggaggaggaggaaggaggcggtggggagaggcggcagagccagcggaggaggaggagagcgcggaggaagcggcagcagcaggaggagggggcggcgtcggagggtggtggtggcgacggcgcggacggggccgccgcgaaggcgacggggaaggaggagctgctgccccgccggccgcagttcccgctagcctccgtggcgggcgtgctgcagcggcggatccacgcgcggtacgacgacctcgcgcgggccagcgaggcgcagtgcctcaccatcgagcagtgtgtctgtctgcgagttaaacgtagg

SEQ ID NO: 145794 - DNA, 1299 bp, Zea Mays
cctctgcccacacaagcacacggcgcgcgcactcccgcgacaaaaaaaaaggaagtggcggaagagaagcaagaaataaaaaaaaagaagcgagtggagaccgcagcacgcccggccggcgtctggggatgacgcgcgcctgccgccaatggccgcaccgacgcagacgctagtgctggcggggatcatcctcctcaacttcgtcctcgccgcggcagcgctctaccgccgcatccgcggccgccgcaggccccggcagcacgtcccgccgccgccgccgctcgagccggccgccgcggaggaggcggaggcggaggaggaggaggaggaaggaggcggtggggagaggcggcagagccagcggaggaggaggagagcgcggaggaagcggcagcagcaggaggagggggcggcgtcggagggtggtggtggcgacggcgcggacggggccgccgcgaaggcgacggggaaggaggagctgctgccccgccggccgcagttcccgctagcctccgtggcgggcgtgctgcagcggcggatccacgcgcggtacgacgacctcgcgcgggccagcgaggcgcagtgcctcaccatcgagcaggttaacgagtttcttaactgtctcgtagatgctagaaacgagctgctgcagaggtacgagaatgtacaaagaagcttcaaaataaagaaggcgatgctatcgaaccatcgaaactataggacttcatacgaccgcctctttgaacaggtacgtagattggaaaccgaaagcgatagcctaaagaaagacgccgccatctacaactttgtgcaagagcgtcttcagaagtcagcgccatacaaaatgatcatggagctgagtgcaatggagctggaggctcaagaaatatcgttcgaggagctcctggctcgggagaaggaggacaccgccttctggcagcgcaacgggaagatgagatcagtctcgtccaagtaggacacaatgcccctgctacttgggctcactgacgatagcagacctcaacatcggtagtgtctaggcatgaaacccttgagagcagctgctgtatgcctgcatcgaaccgtttggtgtaacgccgcggccttctgtcaagatcctggcctgattctgggcagattgagttgtgtcgtgatacatgccggccctgagggttctgtaccagcgagtgcgggcatagggctgttttgatcgtgtggccatggacctcctgacccagccgcagcgccagcaattctgtgcaagctgaaagaactgtcgctaatatcaccacgttcggc

SEQ ID NO: 145795 - DNA, 1782 bp, Zea Mays
ggttaaccctatttccctttcacatagtttttctgcttggagcaaagagccatggtgcttgcaagcacaagcctcatgtgaattttctaaagcctgaaacttgtgaagtaagcattcgactcctattggcaggtcacatcatccctcaattcctttcccttgagttccatcttcagaccaagaatgtactccctcactatctcaattaattcattcacttcatcaacttctctccatgagtctacaacaataataggaatggtatgtgagatgctaaagaacaaccttagtgcttctaggaacctgcccttagttgtggctttataggtagccttgagtatgtattctatctgcgagaagctgaaaataagtgtaggagggcctcttacattaggacttgcagactcatttcaacctttctcgacaacaactgatatgaccggagcagtagcaagtgcactcagaaatgaatgaatgtccatatacagaccaacaaataagggcttcagcggaacaaagttcttgatgcccaactgccggataagcaacctcactgttgtgtcaaagttccctatggtcgcatgctccctagccagagaagatttttgagtccaggtttggctgacagggatgtctgttgttggagtgacagatacaatagagcgagcattgccgacaaattctagagtctctgtatcaggtggaagttcagatcttctaggtcccaaccaccttcctcaccctcgtcttcatttggttcaccttcctccacatcaaaataattgccaccacctcacttgcatcaacaatgtccaagtcttcatcaccccagtcaccacgagaagcttcatcttccttaagctctgcccttgcaatagcatccaatccaccttcaaaaataccacacataaccattagtaatggccaatcaccacatgttgtgagaggtgcagggggaatcagtaatgagttgatttttcttcaggcagcaaaggaacatgctcgcctaattcagcagcaatcctctcagcaatttcagtgagcccataggtgacaacaagaacataagcaagaggtagttgcccaacattttccaagatctcaactctcttctaagcgttcccaagatacaataaattgtggaattgtcccatcaaattattattctgtccaacaattttgcacatgaaggccaccttgtccaagtaactagtaatgcgatacataaaaacaagcctctcaaaaaaatttgtttgttggtatgcatattccacaataccaacatttccttgcctcgaggcctcaattcccaacctgtaccagtgatccttgtcgttaatctcctttgcagaagttaaagcaactacaatttgaatgttaccactctctaagggctaagttaaagatggtcttctcatccttcacaaagtgaagagcaacttctaggaaacctttctattgtaaataagaaatcacaacctgcccacacaactaggagttcttgatcatactcataacatgatcatagcgttttatgagaagagagaccttgaaaatgtactctgatgcatcaattgtaatcagcttgttctttccatcatggtataggtagaaaatgttgttcccaataaaccttgttatgtaaataggaacatcaagggtttttatgatcccattgtctccattgggaaggcaacacttcatatggttcattatagtgtagatgaacataccattctcatcccaggcaccactttttcccatgggtggtttcatgcaatg

SEQ ID NO: 145796 - DNA, 2523 bp, Zea Mays
atgccaaccacagcgccaccggtggatgcagaacctcccgagtgcccggtgtgcctctccccattcgacgcggcctccgttgtgccgcgcgtcctcccgtgcggccactccctctgcgggtcttgcatcgcggccctcccgcccgcctccgcggccgcaggcgcctcctccctccgctgccctctctgctcccagtgcgtcccctacgcccgcgcgctcggcccctcctccctccccaaaaacctcgccctcctcactcttctcccctccccatcgcatgctctcagcgccgccaccctcgtcacagcgccgcttccccacccccatccgctccacgccgcccactcgcgcctcctttcgcgcttccgccatgccgtcctccccgagtccgcctccccgctcggttccgagccaagccccgtccacctcgcgttcggatccctcggctccgacctcggcgcgccctggttctgcgcgcggggccgccccgtgagcctcctcccgatcgagacccaaccagtccccccgacgaagcaggaagccgaattctaccggcccagccacgcgacgcgggtcctcgccgcggtcgacgcgctcagcgacgcgaccaaggaggagctggccggtctgatcgcctcttccgcgaggctagcacggatggtgagcaggctctacggtgtctggatgtcccctcacgcgccgccactatggatggtctctgaacggcacccacgtacggtttcccaattgttggaggaggagattatcaatagagaggagacggtggtgcgggccggattccttgtaatggaggcatgtgaagtgatcatggggttgcacagcgaggggctggtgctggggtgcctcgggctggactgcttctgcctcgatcgttttgggcactgcatgcttgatttgaatcaggcgttggccttgtgccggggagtccaagctggggctagctcgaacagtgttcgagctttcatcgctccagaggtggcggcagtgctaggtgacacgttgcggacggagggtcgtgattttgatggtttggttggctgtacctcggatatctggtcgttgggttgtgtgttcgtggcacttcttactagggatgaacagcttgtgcctgtggcaggttggaactctgaaggactgtatgatgattgggagaaggaagtggttacaaggcttgatgccacattgcttggtactatacttgaaccattggctgcagttatagcatcgtgcttgagatatgatccaaaatcccgtccagagattgctgatgtttggaaatgtattagaggcttgttgacaaaatttggtgatgttactttagctcctgatgatgatgttgcagctcagaagagttttagatgtttactccttggggagttatcctccatgtttgttgattctggtgctgttgagtcagatgataaaacacaactgtctcgaggagctgatggcaacagttcgaatcaggatcatggaagtaatgatggtttcttaaacaatagcggaaatgatttgtcaggaatcgatggtccacagtctgtcggagtgtttaaatcatcaacactgcttgcccaccgtgattgtgtaacaggattagctgttggagagggttttgtaatgctggctcaagaactgcctattttcattctttctttcactgcaggtgggttcttgtttagctcttcttatgataaaactatcaatgtgtggtcactgcaggacttctctcatgtgcattgtttgaagggtcatgaacacaaaatcacagcaatagttgttgttgacaatgatagccattctctttgtataagtggagacagtggcagcggaatttttgtctggcgtgtggattctactctgaaggaagaacctttgaataaatggtatgaacataacgattggctctatcgaggggttaactgcttggctgtctctggaactggttatctttacactggtagcagagacaaaactatcaaggcttggtcactagaggattattcacttcgctgcactatgacaggtcataaatcaactgtgtcttgccttgcagtggccagtggtattctttacagtggaagttgggatggtaccattcgtttatggtggctcactgatcatacaccattgtctgtcctggaagatgatgcagcaggaagcatagcccctgtattgtcgatttcagcaggaaccaattttgttgcctcgtcatatgagaatggctattttaaggtctggaagaacgatgtgcttgtcaaatcagaaaagcttcaaaatggtgctgtttatgcagttaaattgagtggcaaatggctctatactggtggatgggataaagtcataaacatccaggagttgttggatgatgagtcagaggtagaactccgagacgtcgcttccattacttgcgactcaattataacttcgatactgccctgggatgaaaggctgatagttggactatccaacagggaaataaaggtttactacaaggcatcatga

SEQ ID NO: 145797 - DNA, 457 bp, Zea Mays
cccatggccgctaaaatcccctgccctctcatggccgctgacccatggcaagctctgccgtcgatctgcgcagctgtcccggcatcgtcgcgcagcgagctccgccctggatttgcgcagccccaatacacgccgtcgatctgcgcagccgcggccacgacagctccctcgcatcgtgtattccgcctcatcgcactcgtcgtgctcgacaaaatgtcgcagcatgctgcaccttgaactgtgcagtcccgattgcgttgtcgtcaccccggtgagatcccgatgttccttctctgttcaattctgcatcagcgtcggttccctgctattaattgtgtatgattatatttttattaaggaataaaatccctggaaatttggtggagaagaaggttcagttcaacactccctacgtgttcgatgatatgctcaaaccgctggtcgtcgtcgttcttgc

SEQ ID NO: 145798 - DNA, 398 bp, Zea Mays
atggccgctaaaatcccctgccctctcatggccgctgacccatggcaagctctgccgtcgatctgcgcagctgtcccggcatcgtcgcgcagcgagctccgccctggatttgcgcagccccaatacacgccgtcgatctgcgcagccgcggccacgacagctccctcgcatcgtgtattccgcctcatcgcactcgtcgtgctcgacaaaatgtcgcagcatgctgcaccttgaactgtgcagtcccgattgcgttgtcgtcaccccggaataaaatccctggaaatttggtggagaagaaggttcagttcaacactccctacgtgttcgatgatatgctcaaaccgctggtcgtcgtcgttcttgcaaaaaaaaatcaagtcggatcaggatgtggt

SEQ ID NO: 145799 - DNA, 1425 bp, Zea Mays
tcttcacattcacacacgtgaggcttccaaaaacccaaggcgcactcggcagtggaactccgctttctcttgctagggtttcagctctccgccaccgtcatgagtgcctccaggccggatcaccgtcgccgccacccgccgttcctgcgggacctctcgtccccgatctcctcgtcgtttcgcctcccaccggcctcgatgcggcgagaggcgcaggcctccaccccgccgccgcctccgccgctgctctccctcgacgacctctcccacctctccccctccaggcagccggccacgcctccgcaggcgacgacgaccccctcgcctcagcccccgcgtggagccgttctcttctcctcgccgctgcggtccaacggctcgccggggccctcggcatggtggaccccctcgagggaggagaatcccagggagggatcaccgatggatggcgtcgtgcagtaccagcagcagtccccgacgacgccgtcgggtcagcagtcacagcagcagaaggtagcgctgatcacgctgccgccccccagggaggtggcgcggccggagatgcccagagattcggctccggctgctggacgggtcgacgaggaggagtgggtcaccgttttcggattttttcctggtgatactaacatggtgctgcgagaatttgagaagtgtgggatagtcttgagacatgttcttggtccaagggatgcgaactgggtgcatatcttgtatcagagccggcatgatgcgcagaaagcgctcgccaagcatgggcagcagctaaacagtgttcttatcattggtgtgaagccagtggatccgtggcagctgcagtacctgaacgagaacaccaacgagaactaccaggggagcgctacagccacgttcacatcgcaacctgtagcgccaagtggatttgcaaccaggaatgcactagcacctctacctagcaacactctgacgaatggcagctgcaacgacagcaaccttggcgcgtctggggccgttgcgtcgcctacaaaatctgtcctgtccaaagtcatggacttgatgttcggcctttaagttgcgttgctcacccaaatggtgccgggtttttttttgaggggttccttctgggaaaactctaggccagaatgaggttcacttatcgatgttacggtaaaaacgttacgtgatcaccgtggttgaaccactgggtgtcaatgcgaccgttatatgatgctgcgagctagcatcgcgaaattcaaacggttgtattgatgcgttgcaaatcatgtctgaaacgacgtcatgaacctgacttgtattttgttggacatgtcacatgcccacgacatttatgaaggatgtgagcttgggggcgccagctatgctgtcttcaaaagtcaaattggaaatggaatatgaattgttcccctc

SEQ ID NO: 145800 - DNA, 2738 bp, Zea Mays
ccaaatttacaaatatgtccctcatctctcgaagccgccgcctcctgccatcctgcgactgcgactgcgagtggccgttgctgctcccactcccacagttcgaccgcgccaccgtttcacccccttcctcctcctccgccaccacagtgccacgccactcctaaccctaattctcgggagcctaaccctagcctcaagatccgttcgcctcatgcctctcccttcccgccggcgccgcaggctgagctgagccggaccggcaattccagtcgacgggcgccgttgctgtcgcagttacaacccgcgccatgggctgcgtctgcggccgcccctcctccttcgaggatggccagtgccgcgcgacgcctccgccggccgcgaagctctcggcggcggtgaggagggaggaggaggcgcggaagcagcagttgcagcttcagcagcatgcgagggcagggagtgggagggaggaggcgctcgagaggaggcgggcgatgatggcgatggcagcggcgtgccaggtgaggagccccgtgccgagggcggttgaggcggagcaggtggccgtggggtggccgccttggctcgtcgccgtcgctccggaggccgtgcgcggatgggtgccacgccgcgccgagtctttcgagaagctcgacaagattggtcagggtacatatagtaatgtttacagagcccgtgatcttgaaaaggagaagattgttgctttgaagaaagtgcggtttgataatttggaaccagagagcgtgaaatttatggcaagggaaattctcattttgcgtcgccttgatcatccaaatgttatcaagctagaggggctagtaacatcaaggatgtcctgcagcttatatctggtttttgagtacatggaacatgatctagctggactagcatctttccgtggagtaaagtttaccgagtctcaggtaaagtgttacatgcaacagctcctccgtggtcttgagcattgccacagtcgtcacattctgcaccgtgacattaagggttcaaatctcttgattgataaccgaggcatattgaagatagcagattttggattggcaagcttctttgatcctgaacaacgacagcctttgactagccgtgttgtcacactatggtacaggccaccagagctcttgctcggtgccaccaattatggtgttgccgtagacctctggagtgctggctgcattcttgccgagctatatgctggcaagcctatcatgcccggcagaacagaggttgagcagttgcataaaatatttaaactttgtggttcaccgtcagaggattattggaggaaatctaagcttccccatgccaccattttcaaaccgcaacacccgtatgcaaggcgtgtagcagaaacattcaaagagttccctgctcctactctggcattagtagatgttcttctttcagtagacccagcagaccgtggaaccgcatcttatgcattgcaaagtgagttttttacaacaaaaccatatgcttgcaatccttcaagcttgcctaggtaccctccaagcaaagagtttgatgcaaaacgtcgggaggaggaagctcgaaggcaaggtgttactggaggaaagcagcataaacatgatcctgaaaggagaactagagaatcaagagcagtccctgcccctgatgcaaatgcagaattagtgtcatcattgcagaaaaggcgagcccaagctaataccaggagcaggagtgagatgttcaatccctgcaaagaagactccgcgtccggattccgaattgaaccaccccgtccgactcctggtaccgagtcttccgaagacccgcaacatgcctacccgaccaggatctttcattctgggcctttagttaatcagagtcagccatcaaaggctggaggtggcaaaaatgatgaacttcaggtccctggtgttgcgaaccaccctgtggttgtgtcatctagaacaggtccccgagcagatgatagtagttggacaatggttgctcaagctggagcattttctcatgggcggaggctgtcggaatccatcaatgagcatctcagtaacagtgggaagtacgatcaagtgttcccgaagaaggatgacaggaacactattagggctgatggagctattggctacggatccaagggcaacaagatccaccattctgggcccctgacctgcccttcgggcagcgtcgtcgacgagatgctaaaagagaacgaccggcaaatccaagaagtcttccggcgaacccgggtggagaagtcgagagcgaggagggaccatggacatcaccagggcggcatgaggcccgccgattttggcgccatcccggtcttcccttccagccgctccagttatcaggccgtgcaacagtgaggcgctctccaacaagatcggttggagttggaaccttttgttcggtcctgtgctggtttcgggtggtgggacgctatgctatgctatgccatgctatgtacagggtgggagaagcagagggtgtgaaggtgagggggaggtgatttgtttattggcggagtgtctcggtgaccagagtgagtcatgtatcatcaggtgggctttggttgaagtgtttgctcgccgagcctgaaactgaaacccttcttcactgtgatttcaccaaatctcagacctgggagctttgttgaagcagctgttcttgtaaccttgttggggtgcatatagaacaagtcttagtctggt

SEQ ID NO: 145801 - DNA, 816 bp, Zea Mays
caagaggacttggtggaggaaggaaaggaggaagagaagaaggagaaaccgagtaacatgtttgtcctgatcaccataaaaaaacaggcatgttctgcacaaaaacgctaatgaagacgtaccaatgggattttggttcatcggattggacgtcgatgatcgccgtctttgctgcagcaagccaccgggttgtgaatggaaagacgcaggtaggaacatgtgtgttgcatccttccactggagttgcagtggcatctgcaaatctgctgattggatcgggaaagtccatcaacgctgcggtgggagtgagaatgcacttttgggctgtgattctattgcaatgacatctgtaactgataagaaagctaagatggagagtttaatatcttctgcgacctttgtggagggtggcatttaggaggcatgtggtgatgcatggaacatttgccttgaggttttctatgagagtgacccttctgcagtttggtgtatccttctcagtgacaaagtaccttttaaaatgcactgccctttacactctgacatgcaagacaatgatatatgcattggcttattatgtatagtgagtcatattttgataggtttttggtacagacttatttagttaaaaacctgtagtgacgtctgtttgattttttacaatatgtacaagattggaagatcctctttatttttttgttcttctttatgagttgattgtcacaacataaactttaaattagtgtcatatgttacctgcattctattttggtttgccatcattatgcttcatgccattacaagaaaaaataatta

SEQ ID NO: 145802 - DNA, 232 bp, Zea Mays
tcttcactaggcgaacaagcatcagcaaggtcacgacaccaaacggtagtgccagctctcaccaggcagagaagataagccaccagtggacgactcgagcttctgaagatggcaaaacaaaaagacctaggaaatttatgcacaatccaaagaaacacacatgctgtcaacaaaaaattgttgttttattccaagatgtacgagttcagacacttttcaaaggtgtaaggta

SEQ ID NO: 145803 - DNA, 106 bp, Zea Mays
cgataggggtaagattaaaacatttctattatgtcaacatatgatcaatatttctgcttcggtgtgtgttgtagacaaggctattggttgtacataactaaacaag

SEQ ID NO: 145804 - DNA, 448 bp, Zea Mays
agatgtaggggcgtgatttcttcgtaaaaagggatggcccgtgcattacttatctaattaagttaacgtctcgtagctagtatggaggagaatcgtcgatggatgtatgaaggttggaagaaaagaggtgctctatcaagtgagtgggtgtccaagactgatgcttttctcgaccatgcttttgctcggtcagagactggaaccgatgttaggtgcccttgtagcaagtgtcggaacattaatttccttgacaggaggactatgtcgatacatatttgcaagaacggttatatgccaggctatgaggtgtgggtgcaccacggtgaggacccacctcctcgtattgtatcggaagttcagtcacatgaagaggaggactacgataggatggaagagatgcttgacgatgtacgccatgagtttctaaccgtcgattcggagaaccccg

SEQ ID NO: 145805 - DNA, 1704 bp, Zea Mays
ggcgttcatgtcctgcgtggtccatttcctctccacgcatgtccgtttcctttccctttcaggctttcagcttccgatcgatgcaacacggcaaaaatcagacggcgaacacgctgctccgctcggctctgctctgctctactctgctctgctctgcggtctttggtgggacaagacaagatccagatgcacaagccgaccgctccttgccacgcccgcgcaatcctctcaacagtcgacaccgccgatggcatcagccgcgcccgcgcccaagccaggggtcctcctcctgcgccgcacggacgcggacttcgccgccgcgctgcgggcgcgcttccgcgtccacgacctgcacgcctcgggcgcgccgctcggggccttcctcgccaccgccgcggcggaaccggagcccccgcgcgccgcgctcgtgatggccggcggcgacgtcctggtcgacgccgcgttcctggacgccgtcccctccctcggctgcgtcgtcaccacgagcgccggggtggaccacgtcgacctcgcccagtgcgcgcggcgcggcgtcgccgtcgcgggcgcgggcgaggccttctccgtcgacgtcgctgatcacgccgtcgggctcctcgtcgccgtgctccgccgcgtcgctgccgccgaccgctacgtccgcgctgggctctggccggcgcagggggattatccgcttaccaccaagctcagcggcaagcgcgtaggcatcctcgggctgggcagcgtcggctcgctggtcgccaagcgcctccaggcattcggctgcgccgtgtcctaccactcgagggcgcgcaaggcctccgtcgcctaccgctacttccccgacgcccgcgcgctcgccgcgggctccgacgccctggtcgtcgcgtgcgcgctaaacgacgccacgcggcgcgtcgtcgggcgccacgtgctggacgcgctgggccccggcggcgtcctggtgaacgtcgcgcgcgggggggtcgtggacgagcaggagctggtcgcggcgctgcgggacgggaggatcgccggcgcgggtctcgacgtcttccaggacgagccgcacctgcctccagggctgggaggcatggacaatgtcgtcctgacggcgcaccaggcggcgttcaccgaggagtctagcgccgacctccgcgagctcatgattgggaacctcgaagccttcttctctgggaagccgttgctgacgccagtgatgacacggccacagtgaatggggtagatagctgattgattgatgagagtagatagattctacagtacgtatctttctgcaattggagcgcatatgcattgctgtcagtagtggtttaagtggagagcaacgcaagcgccggagtgcagtgcaggaattagctaaaattcaatcgcctcttttgggatccagaagactcaactgagttcatgttggactaagcaacacagatcattcaatccatcgcgcatcttgcgctagcttcttttcctcctgttcaacatcctgtcttaacttcactttttttccttttgtccgaccttttgatccagaactctgaacaagtttatacttccggagactgagagagtgacattttactctttatcctaaacaggctgtaaattatcctagtagatattgaaatttggtatacctgcgtgtacatacagatggaagatggaactgctttagtataaaat

SEQ ID NO: 145806 - DNA, 279 bp, Zea Mays
gtgaagcaagagctgtgggatttcttcaggtgcgatgctggatacgaggccagggcggatgtggtgtctacgacatgctgtaagaagctcgtcgtggacatgcactacgaggcgcgcatccaggccatcgtcacttaccacggctccgtccttggggagaaggtgaacaagaaggacgcccgaaccatgtcgttgactccggaccagtacttgcaggtaaatacaaaactttattattggtactaaatatgcttatttttttcttctgatatgttgtgt

SEQ ID NO: 145807 - DNA, 904 bp, Zea Mays
cttcccagatgcaagaggggaaaaagtaaacatactatcagtggcatagcagtgaggagccccaaatccactccaacgatggaggaaagcctgtgcgccgtggagaagcgcgggcgggtgcacgtcatcaccctcaccggcgcggaggagcaccgcctcagcccggccctgctctccgccctccgctccgcggtcgcagccgcccgccgcgccctcccccggtgcgctcgtcctggccggcgagggcaagttcttcagcaacggctacgacctcgcgtgggcgcgcgcggggccggccccggcgccggggcaccgcctctccgagatgcgcgccgcgttccgcggcctcgtcgccgacctgctcgcgctccccgtgccaacggtcgcggccgtcacgggccacgccgcgggcgccggctgcgcgctcgcgctggcgcacgacgccgtcgccatgcgcgcctcccgcgggttcctctacatgagcgaggtcgacgccgggatcaagatcgtcgattttgtcggcgagctggttcggcagaaggtccccgacgcggccgctaggagggacctggtgatgaagggggagaagatgacggccgcgcaggccgcgcgccgaggcatcgtggatgcggccgtggacggcggcgtggaggacgtcgtggccgcggcggtcgccatggctgaggagctcgcagccagagactgggatggagagaacctagccgccatcaggaaggacgcatggccggttttgtggagcaaggtcaaggactacggcggcgatgtgctggcgcggccgcgtctgtaattgcctgcttgcgaatttcggtcgtttctgttacttgccatttggtcgttatcaacaatctgaaagtaatgatctgtggccttgggaatgtgcaga

SEQ ID NO: 145808 - DNA, 1431 bp, Zea Mays
tttctagttccaactttgtttgtgtatataattggaaagaatccacctcattctcactccatttgctgactcctttttttatggatttgctctcatctttagaccccaaaaagtgtatatggacagtaacctaataaaatcaaaaccaagcaaatgctctttttcctaaatttaaatatgggatcctttttatttaagatcctcttttctccatctcatttctacttctactgcttattgggatgtctatgtgacccatagaaagttggtcatataatacatacatacataattgtatgtataactataagaaaaaggaaatgaaattggatatgataagaaagattttgggttatacatatagaaaagcaaaagtagaaaataatgaaaaaagaatagaggaggtttcgaatccaatcaaaaaacctattttggtcttagtatggataagagatcttcctatgttatattattccactatccaccatgaattgatttgatagatgcaatattcataatattgaattgattcagtattatcagaatgcaagtcctccccttgaatttacaggattcccctttttcctctccatgggattacatcccgagttattgtgaaaaaataaataaataaagaggttatggaagtaaatattctcgcatttattgctatagcattgttcattctagttcctactgcctttttacttattatttttgtaaaaacagccagtcaaaatgattaattagaattccaattaatcattgaagaaatgaaaaagggattaaagaaaataaaaaatccaagtcttaaatgaaagggtctggttggaatcataaagtgtggtagaaagaactacatatagttttttctaccacactttagattctttctattatattatcttgaatctacatagaatcaattagtagattgaaatagtagtctaattcaacttcttttttcactgcatccacttaatttcaatcaagtcaaaatcaaaaaaatcgaagataattcttcattgaaagaatccgagggggagaaaaataatacgagaatagactagaatagattatagtaaaagaaaaaacctacgaatctttcatgcttaaaaaggtgcgagatgcttcaatcgagatccttcaaaaaaaagaacatcaaaaaatttctaagaataagaaaatagtataaatggaaaatgtgtgatatattgtgaatagcttcgtgtaagaaagtctaattttcttatgttctaattttcttatgtatagaactttctttttactcagaatttctagtagaatagaagttatgaattactataatcgccctttctattctattatactggaatagaacgactctttcttactttcttaaaagagtttcttacaagagtgaaacaaaattaaagaaagagagaaaaa

SEQ ID NO: 145809 - DNA, 1065 bp, Zea Mays
gcccaccatatataccgccccgtccccgtgcgagtgagcgcttcatttaacgctgtcgctttcgcttccactcgcactccatgggtgcgcgggcgacgatgggatgttcgcccttgctgcccttccaagcgctctggctcacagcggccgttgtcgcggcgctcgcgctcgcggccggcgcgcagccgtcgccgtcgctgtcgccggggttctacgacgcgacgtgcccggggctgcagcccatcgtgcgccgcggcgtggcgcgcgccgtccgggcggagccgcgcatgggggcgtccctcctccgcctcttcttccacgactgcttcgtcaatggctgcgacgcctccgtcttgctggacgacgtgcccggtaacttcaccggggagaagaacgcggggcccaacgccaactcgctgcgcgggtacgaggtcatcgacgccatcaaggcccaggtggaggcgtcctgcaaggccaccgtctcctgcgccgacatcctcgccctcgcagcgcgcgacgccgtcaacctgctgggcgggccgcggtgggcggtgccgctggggcggcgggacgcgcgggacgcgagcgcgggcgcggcgaacgccaacctgccgcctccggacgcgtcgctgccggcgctgctgtccgcgttcggcgccaagggcctggacgcgcgggacctgacggcgctgtcgggcgcgcacacggtgggggcgcgcccgctgcgcggtgttccgcgcccacatctacaacgacaccgccaccaccgacgccagcttcgcggcgggcctccggggcgccgtctgcccctacacgggcggcgacgccaacctggcgccgctggagccgcaggcgcccgacgccttcgacaacggctacttccgggacctggtcgcgcgccgcgtgctgcttcgctcggaccaggcgctgtacggcagcggcggagacgggggcaacaccacggacgcgctcgtgcgcgcgtacgccgccaacgggacggccttcgcggccgacttcgccgccgccatggtgaggatggggaacctgggcccgcccgcggcgagc

SEQ ID NO: 145810 - DNA, 1472 bp, Zea Mays
gcccaccatatataccgccccgtccccgtgcgagtgagcgcttcatttaacgctgtcgctttcgcttccactcgcactccatgggtgcgcgggcgacgatgggatgttcgcccttgctgcccttccaagcgctctggctcacagcggccgttgtcgcggcgctcgcgctcgcggccggcgcgcagccgtcgccgtcgctgtcgccggggttctacgacgcgacgtgcccggggctgcagcccatcgtgcgccgcggcgtggcgcgcgccgtccgggcggagccgcgcatgggggcgtccctcctccgcctcttcttccacgactgcttcgtcaatgtaagacgacgggcgcgagggagtggagcggtcactcacttcgcttcacgcctgtcggtcggtcggtcggtttgtgctggtcctctcctgacgtgtgtccgtgcgtgtggatggatatggatcgcagggctgcgacgcctccgtcttgctggacgacgtgcccggtaacttcaccggggagaagaacgcggggcccaacgccaactcgctgcgcgggtacgaggtcatcgacgccatcaaggcccaggtggaggcgtcctgcaaggccaccgtctcctgcgccgacatcctcgccctcgcagcgcgcgacgccgtcaacctggtcagcgttcctgctcgtcctctctccggctccgtttccaaacaaacaaacaaacaaacaaacagctgcatgcgccgcctgaccgaccgtgtgccgaggtgcagctgggcgggccgcggtgggcggtgccgctggggcggcgggacgcgcgggacgcgagcgcgggcgcggcgaacgccaacctgccgcctccggacgcgtcgctgccggcgctgctgtccgcgttcggcgccaagggcctggacgcgcgggacctgacggcgctgtcgggcgcgcacacggtgggggcgcgcccgctgcgcggtgttccgcgcccacatctacaacgacaccgccaccaccgacgccagcttcgcggcgggcctccggggcgccgtctgcccctacacgggcggcgacgccaacctggcgccgctggagccgcaggcgcccgacgccttcgacaacggctacttccgggacctggtcgcgcgccgcgtgctgcttcgctcggaccaggcgctgtacggcagcggcggagacgggggcaacaccacggacgcgctcgtgcgcgcgtacgccgccaacgggacggccttcgcggccgacttcgccgccgccatggtgaggatggggaacctgggcccgcccgcggcgagcgcggccgccgccgaggtccggctcaactgccgccgagtgaactgatcgtgcagcctgcccgcgcgcgccgcgccatttgcatagatcagtggattgggttactttcctggtgtacacttgcttcgattcgattcgcaggagtacgtagtatgattgataagcatggatttgaggtt

SEQ ID NO: 145811 - DNA, 667 bp, Zea Mays
gccacggccaatcaggagtccaaaggccacatgtatcagagcacgtccgtcgccccctggaccacgcagccggcagcccagagccggagagcccagtgaaacagagccggtgaacgcagcccagtcagtgagccccccgatcccgactccggcgatctccccaaccccatggcctccgccggcgaggcccccagcacgctcctccgcttcctctacttcgtcggcgccggagtaatctgcaccaaggccatcaacacctatcgcgactacgagcacaagaaggagtccaccgccgccctcgccgccgccgaatcggcgttggctgctgccgcggcggccgagcccgctcctgcaaccgccgccgcgaagccctgattgtggacgagggcctgtcttcggcggttagggttctcggaatgttgctctccataggggagatagatattttcttttgtttctgatgtttcagctacgtgtatgtgctcttttggcttgaatcaatcagtaataatacttctcttcctgtctcgtgatcatggtactgctggcttgaaatttgttactacatagtttccctatgatgattaatgttattgcacttctgttagctaattatccatgaccgcggtgctttgccttttattaattctgcgaggaaagaaccaca

SEQ ID NO: 145812 - DNA, 1533 bp, Zea Mays
gatgtcgctgagtgaaggtcttaggcccttgctgcagaacatctcatactccagcgtgtcgcctgccgacttcttcacctcgacgacgtgaaaggccggtgtcacctcgaagatctcggcgtcgatcgcgagctgccccttcctcccttgcttggacccctgcagcttcaccagcccgtcctgttttttcaccatgaagcgctctgtctcagcgatctgctccagctttgacactatcgccgacgccggcttctgggtcatgaaccgcgagttgctggccttctgctcttggtccacctcgaacaggcttgacaggtcgaaccctctggagtgggagatgatgtcgaacgcgttcaggctcgccggcttcaaggagctgtccgccggctgttccaccttgctgctgctgtccttgtggtcggccatgacggccggcctgtaccccttcttgaaccaggggtgctcgaccagcttctcgatcgtgatcctgttgtttgggttcggttcgaggagcttgggcatcaaccgccggagctcaggggagaaccactgcgggtacttgacgtcggctctgctgatcttgcggtacatctccaccaggttggcgtcgtggaacgggaggtagccggcgaggagcacgaagaggatgacgccgcaggaccagatgtcggccttggccccgtcgtagcccttcttgttgatgatctccggcgcgacgtacgcgggggtgccgcaggtggtgtgcagcaggccgtcctgcttctggcactccctgagcgcgctgaggccgaagtcggagaccttgaggttgccgtgctcgtcgacgaggaggttctcgggcttgaggtcgcggtggtagacgccgcggctgtggcagaagtcgacggcgccgacgagctggtggaagtaccttctcgcggcgtcctccttgagccggccgcgggcgacgcgggcgaagagctcgccgccccggacgtactccatggcgaagtatatcttgctcttgctggccatcacctcgtgcagctgcacgacgttggggtggcggacgaggcgcatgacggagatctcgcgcttgatctggtcgatcatgccgacgcgcatcaccttctccttgtcgatgaccttgatggccacgctctcgccggacgcgaggttccggccgtggtacaccttggcgaaggtgccctgcccgagcgtgcgcccgagctcgtacctgttcatgaggatggtcggcttcttctccatcctttccttgtgtgggttcgttgacgacgacgacgacagggacagctacaatggttcacgggcgtctgctctgcgccactccgtgcctctgacttcccctctccctggcaggcagggacgagaggaaggagaggtgaacgaagggcgacagagcgggcgctatggtgagagaggaaacctagacacgcgactgatcgatgtgctcaggatcctcctccgacgggcaacttaacggggggaggagagaaggagcccaggaaccagtcgatctcatgtgaggccagg

SEQ ID NO: 145813 - DNA, 318 bp, Zea Mays
tgtcagaatcttgattagtactagtattgctgccagtataaaatggtcatccctcgttctgtcgtgcatcatcctgtgcagctatagacatgatggtgatgcaattgatagtcactgataacaataccttgccactagatccgaattggcgtgtttataaagggacattcaagtttcttacctactttctgaagcacgagctgccaagcagcctttattcaagaagcaaagtaaaaaactgaaacgtggacgaactattccctttccgtactttacaatttgtttgccagcaactttcttcttgctggctgatcattc

SEQ ID NO: 145814 - DNA, 2324 bp, Zea Mays
catgctccattacatacactttgtttatgccgcctcccctccctagtatagataatgatggatattattgatccgccttcatttattttatttgttttatttataatttcgtcggccgggtttaaatcctcggccttccacgcggacactggcatgcaacgccttccacacttgaagcagccaagctaagtgaggtgagcttagccatgccgacggcttcctctgcccaccgctcactcctcctctgcctctgcctggctctgctctccaacccggtcgccgcctcgccctcgccccgcggcctccgcttctccgccaaggacatcgcggcggtggaggccgcgctgccgcgacacggcagcagggcgtcgtcgtcgtccaagaccaccttcttcgaggtcgaccgcccgctccgcccgcccaggggcagctcggggccctgctccacgctgctgctctcgcactccttcgcgttcacgctcaccaagccgcccgtcaccgcggcctactcgccgccgccgtgcctgtccggctccgacgcgccgccggtctcgctcgccgtgctcgagtggcgcgccgagtgccgcggcgcgcagtacgaccgcaccttcggcgtgtggctcggcggcgccgagctcctgcgcggcagcaccgcggagccgcgccccggcggggtggtctggtcggtctccaaggacgtcacccgctacgcggccctcctcgcggccggcaacgccacgctcgctgtctacctcggcaacctcatcgacgacacctacgacggcgtctaccacgccaacctcacgctccacctctacttccgccgcggcgtgcggccgtccgccgccgccgccgccgccgatgccgtcgtcccggtctccaggagcctgccgctcaacgacgggctgtggttcgtcgtccagaacgacaccgacgtgcagtccgcgcgcgtgtcggtgccgcgcaacgcgtaccgcgccgtcctcgaggtctacgtctcgtcccacgacgccgacgagttctggtacatgaacacgcccgagcagaacgggccgttccgcgaggtcaccgtcctgctcgacggcgccgtggtgggcgccgtgtggccgttcccggtgatctacaccggcggcatcaacccgctcatctggcgccccatcaccagcatcggctccttcaacatgcccacctacgacatcgagctcacgcccttcctcggcagcctcctggacggcgaggagcacgagctcgggttcgcggtgaccaacgcgcagcggtcgtggtacgtggacgccaatctccacctgtggctggaccccaagagctccaggaccagcggcgggctcgtcgcgtaccacgcgccgaagctggcgggcagcatcgtgtcgcgctccgcggacggcgtcgacggggagtacgcggcgacggcgagccgcaatatcacggccacggggtgggtgagctcgtcgcgcggcaacgtcaccaccacgttcgcgcagcggctcagcttctccaacaccaacgtggtgagcgggcagggcagcgcgcaggcgatcaaccagacgaccgacgcgctgacggccgtcagcggcgggcccgcgcccgcgcaggtgcaccagagcttcccgctctacatcttcctgggcggcgacggcagcggcacgtcgtcgcagcggctgatgcggcgcgtggagatcgggttcgacgagacgcggtcccggggaggaggaggagcaggaggagagggcgccgcgtccacgaccacgagcacgctgcggaactcgcaggtggcggcggcggaggtgacgctccgggacgacgccgtggtgggcgcgtcgtggcggatgcaccagacgtacgagtacggcgccagcgacggcggctgctacctgaggaacgtcagcagcgtcggttacgacgtgcttttcgaccatcgcgacgcgtcctgcgccggtacgctgggccgctgacgcttgtcgccgacagcgagcgccttgtcggcgcctccgccgcgcgggccgctggataacggccggggaagcgacagggtgtaatttgtaaatggaacgctgcaccggtggacaaaactgtactggcttggctcggcctggcccacgtccggtcttcaattattaaatataccacggtgacgggccattttcgtgggccaattagcttttcattaagaaaagatgtgacgtgacgtgacgtgatgcagctagtacacaggcagcactaaaatgtaaagaaaaccgctggctatgtttatttaacagtacctgttttatgaaatttgtagaagtgttcatgaattctatacgtct

SEQ ID NO: 145815 - DNA, 4916 bp, Zea Mays
accttgtcggagaccgacgcaccccccctctccgctctccgctcctcctccccacaccccaccccacccgctctccagtccacctcacgctcacactcccgcagcccgcccgccagccgccatcctgctgccacctctttcttccttgcgggggcggcaaccaggcgcacggcacctgctccctcccactcccactcccacaccgcgccagccaccagaataaagcagccgttgcggcgtcgcgtcggcgagcacagcgcagcgcagcgcgcagcggcccgggtgcatgaggagggggcggcggctgccgaggccgaggctgtgacgaaggagcgcggagggcgatgccgctggtcaggttcgaggtgcggaatgaggtggggctgggggaccccggcctctacggcggcggagctgccgctgccgccgccgccaccgccgccgcgggggaggaggagcccaaggcgctgctcgagggcgtcgccgtcgcgggcctcgtcgggatcctgcgccagctcggagatctcgcggaattcgcggctgatgttttccatgacctacacgagcaagttatagctacatctgctaggggtcgcaaggtgctgactcgagtacagaacatcgaagcagcacttccatctctcgaaaaggctgtgaagaatcagaagagtcacatacattttgcctatgttccgggctctgattggcacactcagcttcaaaatgagcaaaatcacctgctagcgactgatctgcctcgttttatgatggattcgtatgaagaatgccgagatccgccacggctttaccttcttgataaatttgacaatgctggtgcgggggcttgtgtaaagagatattctgatccatcttatttcaagaaagcatgggatacgatgagagcagataagaatgctaatgtacaaagagaaaagagatcacagaaaattaagagaaaaggatcacgactaagggaaccatatcatggacaagccatgcctaggcataggggcactgaatttcagcgatcacttactgctggccaacttgttaacaggtgttgcacatcccatactttaagatacaataattttgtatccgtgatcatcttctatggctgttcccttcttatatttgaatggcacatccagaacagcatttttaatagtgtattttccagcaggcagtttgcatctcccagcaacgatggtcagggtatctcagagcataagtctacacctgatgcaagatctaatcctgacaatatgagcagatcttcttctcttagttcgaagacacaactgagttcagtagaacaagctatcgatacaaaaccttctgcagtttctcatgagaatggccatgggaagtcattggatactaagttgcacaagcctggtggtctgccttcgcccgtactgcttaacagcaccactgtggatgatcatagtgaccatttgaagcaaggttccccgccagatggtatggttgctagatcaccttatgttaaatgggatgaaaagactgcaattatcatgtctacaagttctatctactgtgacgatgttgttatggatgaggttgaagatgcagaacctacttgtattagctctgtgcagaaagaaactgaccataaggtaatggatacattgcaccagcaagatgccttacttaaaaagacaaaatcactgttagtgccatcagtcttgaaccaccatgatgacattccaggagaagccgacaactacatggatgcacttaatacacttgaatctgagacagaaacagaatctgaatttcaaactaaaaatcgggtgccagcaccttccttcaaagctgaagcccctcaagtgggggcaattgacaatattgttccacagtgtcttgattcctctgctgctgactttattgacacatgtcaagaatctgatattatttgtacttctgaaagagcaattgattttcccagtttgtcaaatgcagattctcttgaggtttcacaactagaactttcagattatacgtctgtaagcccctataaagagtcatctgtcatcactaatatccacgagagtggtgcagagggtgctcgtggagatccttgtgagattatagagcctctgcaggtccattcagccatacttgccaatgatggttcccctgtttgcaatgaaataccaaagagtaagccagatgatgatcttgggtattttcaagagattcctcaaccaggtttctccacctgtatggttattccatcaaacaaagagtctgctgttgccaacaaaaaccttgaaggtgacgcaaaaagtgatgatgatcttattgatggtaccgctgataatgttgtatcgggacctaagattgccaacatggtagttgatgaggtgggtttcaagatggcacctgctaatagaagttcacctggtgacccctctgatgactcatgtgtcattcctgaaagtaggcctcaggattatgctgtaaagagctatgagggagttggtgattgtggtgtgactgaagtgtctaagttatgtagtgagcctcttaacaaaccatcagataatatatgtgcaactcaagatgttcctacaaatacctctactatgtctgctggtgccagtgaagtgtctagttcgtggagtgagcctgttaccgaactaatcgatgacagatgtgcaactcaaggtgttccagcaaatgcctctaccacgtctactgttgtaccatctgttaaactctggacaaatgctgggctctttggacttgaaccatccaaacctccagtatttggtaatggtccaagggaggatactccacctggttttaaagaagctcaaccagtccattcaactgaattcacagaagtgcactgttcaaagccaactgaatcagcagctgtagatgtcccaaatggaaacacatccattaccagcagctttgtggaaaagcttgttggtattcgtcctggttctgcaaacctcaatagctcaggggcaaatcaatcagcagccagaatacctgatccaattcatagtcatacagatgggcactcagatttttcgtcatcctttgagcacaataacatgactggcaaacatacttcaataagcgaacttctagaatttgaggggagtgctgatactggcaccaaaatatactcaactgacatgagaaataacgctgtgtctgcatcaagcttttcaagcattgcacaaaggtttcttgctaatacacttcagagaagaacttccaaatatactgatcttcctatgtcttctgagagggcaaatgctgatacaagtgcaaaatctgaatctactctaaatcctgttgtagaaccaagtgaagcggtatttgcagaggaaactaagtttgagaacaaaacagaaaatggaatggatggattgtccaaaacatcaatattttctagccgccattactctgagaaatcgtctccgccacttgagtacatgaaaatatcttttcaccctatgagcgcatttgagatgtcaaagctgaacctagatttctgtgatggaaatattcatgaaatttctgatgatatgatgttaccgacatttcagttactttcagagtcttccattccacagccaggcagtggttctgagtctgaagatgacacctttggtaggtcatatagttattcttcatatgatgatctgagtccccggctatattcaaactctgaggcatgggatcaagatgatggaactggactggaggaacatgagttatatgatgattcaaatcagataggatcctcaacagcacctttatctagctacatgggattcgagcagatgaacttatctgacatgaagtcagatatttcacttgcaaacattggggatcagaatgtaataggcactttacaatcctgtactgttgaagaacttccaaactttgatacattgatgtccagaagtgatgatcaaaatggtgaaacccccattccacataatctggggaatatgacaccagatgaagatcagttgccaccaccacctcctctccccccaatgcagtggaggatgacaagacaaacaacttcactagaagaggaaacttgcattacaactaaagatatgcttagaaaaacttctagcctaccacatatacacacctctgcccaggaagaacactgtcctccaactgcaccattggatctacaagggcatgctggggaagtgggtgtccagaaaactggtggggtacgagaaattactaatcctcctagtatcatcgatataaaatcaagtttgcttcagcagatcagggataagtcagagcagctgaagcttaatggacatgaaaggtcaaaaaaagcagtaggcggtgacattaaaagcttagacgaaagggaggagttgcttcagcaaatcaggagcaagaccttcaatttaagacgcacaaacgcatctaaggcagatggctcatcacaatctacagccagttccaacgttgcagcaattttggagaaagccaacgctatccggcaggctgtggccagtgatgagggtggcgatgatgatacatggagtgatatatgaccacctaattgcagacgttcatggtagtcttttcctgtatattaagctattacaagatgaagtgattaaatgtgaataccatccttttcttcattgtaattagattttgcaggtcttgttttgtaccttccttagttcatattagtgaatcctaccgtaggtcgctgtggtcgtggaaatgtcagagcatttccacattatgtaaatgcatctttattatttatttatgatagtgagaacagctgaatagctgataaaaataagcatactaatctatctttttatcattgtattgattttttttgcaatgataataagatggagcatgatgttgcaaaa

SEQ ID NO: 145816 - DNA, 654 bp, Zea Mays
catcgaccagcgcgcggcggcgcgggagcagcctaggcgcggccatggcggtcggactagcgcctgcgcggcggtcccggcccaacggcgcgaggcacggctcgcgtgggcggcggcgcggtcggcccaacctcggcacgacggccctagcagcgcggcgtggccctaagggcgggcagcccccccccggacgcggcgcgcggcctcccggcttccctgtgcgggcgcggcccccatgcgcaggtgcggaaccgctgcttggcggcgcggcgcgggtgcccggccctggcgcagacgcggcgacctggcacggcgcgggcggggcgcgagtgcgggctccagcggcggtgcgcggggcggttgcccggccacgggacgggcgctcaggcggccatggtggcacgcaggcacgacatccccggcggatcgggtgtgctgccctcggccagcgcgggtgcgcggcccccagcgcgcgactggatctccgggcggcgcgggcgcgggcgagtccccatcggcggcgtgggtgtgcgtcccccggcgcgcacgttcagcctcggtggcgtggccccgtcaggccatctctgcgtggtccagtagtcggcaacgcgaagtagcgctgtcacgcggcctctagcgcaggcgtgcatccag

SEQ ID NO: 145817 - DNA, 2031 bp, Zea Mays
ggggccccctctctttgttcccgatgaccggtcagtcgccatgcaagtggtactagtgggagtaccgagtaccactcggtacggttgaaccgttggggacggcctcgtggtcgcttatccggatcacacgcagcacagaccgcgacctgatctgacgtgtcctggggccgacgcgtccgcgcagcgttggccatctgccaccatgtcggcgacgaccgggcgggctcaagcggccggccgggccggtgttgctgtcgcggctcggttttgctgattggtccatttggcttaccaacccatctctttcagagttcaaaaaaaacccatctctttcacgctctcgcctccccatgtccatcgccacgatacctaaaaaaagatctacgcagcgaaaagggccgcggaaaaaacgagttgtacgcgtcggctccgcttcttgatcccaacaccgccacgataatataatactaaatctatcgtccgcaccagcagcgagtgaaggaggagcctgcccgcgcctgcgcctggttgtaattgtagctcacgctcacccttcagttgaccaccgctgcggcagcaatggcggcgagtcgccggcagcaccgccgcggcttcccgctggtcccgctgctgctgtcgctcctggcggccgccgcgtacggccgcctcatctccgacggcggcccgcccgcgccgctcctcccggtcatccgcctcgcggcgccgccggccgaggccgagtgcgagcagacctacggcttcctcccctgcaccaccaccgtgctcggcaacctcttcctggtgctggcctacggcttcctcatgttcaaggcggccacgttcctgtcggcgggcagcgagctgctgctagagatcatggggcccggcctcgtcggcggcctcctcctccccatcctcggcgccctccccgacgcgctcctcgtcctagtgtccggcctctccgggagcaaagaggaggcgcagagccaggtgctgatcgggatggggctgctcgccggttccaccgtcttcctcctcaccctgctctggggaacctgtgtggtcgttggcaagtgtgacctcgggccaggccgtgaggcagtagatgtgacagacaccaagggcttcagcttgactggcactggtgttacgaccgacgtgcagaccagctacgcggcacggatcatggggctatctgtcatccccttcatcatcgctcagttccccaagatgttgaagacgcaccacgggcagcgcctcgctatgctgctggcccttgtcgtgtcgttcgcgctcgtgcttgcctactgcctgtaccaggttttccagccctggattcagaggaggaagctcgcgtacgcgaagcacaagcacgtgatctccgggatactgaggcacgcccagatgcagtcgctcggccgcctgctgaacgacgacggcacgcccaatgaacaagtcatcagaaagtgtgattccttccctctctctcaactgctgtctgttgtgtggcccgtagttaggagcttagcacactgttttcgatcgtgcaggctgttccgcaagatcgacatggacgagagccggtccctgtcccgcgccgagctccacgccctcatcgtcggcatcaacttcgaggaggtcgacttcgacaggacggacgcggtggacaaggtcatggacgacttcgacacgtcccgcaacgacgtcgtcgaggaggaggagttcgtgcaggggatgaggaagtggctggacgaggccaggcgcagcgtgcccgtgggcggcgccttctccagcaagttcatccacgagtaccacgaggtacaggagaggacagtctccagtgggttattaggaactgtgcactgactgactgaatggaatggaatgtaatgggactgtgcagaggacgaggcaggagcacgacgagctggtcgacaggtccgacgaggcggtggagagcgtggagaaccccgggtggtgcatagccaaggccgtggcgctgctgctgctgggctccgccgccgccgccgc

SEQ ID NO: 145818 - DNA, 2343 bp, Zea Mays
ggggccccctctctttgttcccgatgaccggtcagtcgccatgcaagtggtactagtgggagtaccgagtaccactcggtacggttgaaccgttggggacggcctcgtggtcgcttatccggatcacacgcagcacagaccgcgacctgatctgacgtgtcctggggccgacgcgtccgcgcagcgttggccatctgccaccatgtcggcgacgaccgggcgggctcaagcggccggccgggccggtgttgctgtcgcggctcggttttgctgattggtccatttggcttaccaacccatctctttcagagttcaaaaaaaacccatctctttcacgctctcgcctccccatgtccatcgccacgatacctaaaaaaagatctacgcagcgaaaagggccgcggaaaaaacgagttgtacgcgtcggctccgcttcttgatcccaacaccgccacgataatataatactaaatctatcgtccgcaccagcagcgagtgaaggaggagcctgcccgcgcctgcgcctggttgtaattgtagctcacgctcacccttcagttgaccaccgctgcggcagcaatggcggcgagtcgccggcagcaccgccgcggcttcccgctggtcccgctgctgctgtcgctcctggcggccgccgcgtacggccgcctcatctccgacggcggcccgcccgcgccgctcctcccggtcatccgcctcgcggcgccgccggccgaggccgagtgcgagcagacctacggcttcctcccctgcaccaccaccgtgctcggcaacctcttcctggtgctggcctacggcttcctcatgttcaaggcggccacgttcctgtcggcgggcagcgagctgctgctagagatcatggggcccggcctcgtcggcggcctcctcctccccatcctcggcgccctccccgacgcgctcctcgtcctagtgtccggcctctccgggagcaaagaggaggcgcagagccaggtgctgatcgggatggggctgctcgccggttccaccgtcttcctcctcaccctgctctggggaacctgtgtggtcgttggcaagtgtgacctcgggccaggccgtgaggcagtagatgtgacagacaccaagggcttcagcttgactggcactggtgttacgaccgacgtgcagaccagctacgcggcacggatcatggggctatctgtcatccccttcatcatcgctcagttccccaagatgttgaagacgcaccacgggcagcgcctcgctatgctgctggcccttgtcgtgtcgttcgcgctcgtgcttgcctactgcctgtaccaggtaaacgagatagatacgtttctgacagggagcgacggctctactagattgttaagggttttccagccctggattcagaggaggaagctcgcgtacgcgaagcacaagcacgtgatctccgggatactgaggcacgcccagatgcagtcgctcggccgcctgctgaacgacgacggcacgcccaatgaacaagtcatcagaaagctgttccgcaagatcgacatggacgagagccggtccctgtcccgcgccgagctccacgccctcatcgtcggcatcaacttcgaggaggtcgacttcgacaggacggacgcggtggacaaggtcatggacgacttcgacacgtcccgcaacgacgtcgtcgaggaggaggagttcgtgcaggggatgaggaagtggctggacgaggccaggcgcagcgtgcccgtgggcggcgccttctccagcaagttcatccacgagtaccacgagaggacgaggcaggagcacgacgagctggtcgacaggtccgacgaggcggtggagagcgtggagaaccccgggtggtgcatagccaaggccgtggcgctgctgctgctgggctccgccgccgccgccgcgttcgccgacccgctcgtggacgccgtccacggcttctccaacgccacgcgcatcccgtccttcttcatctccttcatcgccctcccgctcgccaccaactccagcgaggccgtctccgccatcatcttcgccagcaggaagaagcagaggacctgctccctcaccttctccgaggtgtacggcggcgtgacgatgaacaacacgctgtgcctcggcgtgttcctggcgctcatctacttcaggaacctgacgtgggacttctcgtcggaggtgctcatcatcctgctggtctgcgtcgtcatggccctcttcaccagcttccggaccacgttcccgctctggacctgcctcgtcgcctacatgctctacccgctctcgctgatcatcgtctacatcctcgactatgtcttcggctggtcatag

SEQ ID NO: 145819 - DNA, 4796 bp, Zea Mays
ggggccccctctctttgttcccgatgaccggtcagtcgccatgcaagtggtactagtgggagtaccgagtaccactcggtacggttgaaccgttggggacggcctcgtggtcgcttatccggatcacacgcagcacagaccgcgacctgatctgacgtgtcctggggccgacgcgtccgcgcagcgttggccatctgccaccatgtcggcgacgaccgggcgggctcaagcggccggccgggccggtgttgctgtcgcggctcggttttgctgattggtccatttggcttaccaacccatctctttcagagttcaaaaaaaacccatctctttcacgctctcgcctccccatgtccatcgccacgatacctaaaaaaagatctacgcagcgaaaagggccgcggaaaaaacgagttgtacgcgtcggctccgcttcttgatcccaacaccgccacgataatataatactaaatctatcgtccgcaccagcagcgagtgaaggaggagcctgcccgcgcctgcgcctggttgtaattgtagctcacgctcacccttcagttgaccaccgctgcggcagcaatggcggcgagtcgccggcagcaccgccgcggcttcccgctggtcccgctgctgctgtcgctcctggcggccgccgcgtacggccgcctcatctccgacggcggcccgcccgcgccgctcctcccggtcatccgcctcgcggcgccgccggccgaggccgagtgcgagcagacctacggcttcctcccctgcaccaccaccgtgctcggcaacctcttcctggtgctggcctacggcttcctcatgttcaaggcggccacgttcctgtcggcgggcagcgagctgctgctagagatcatggggcccggcctcgtcggcggcctcctcctccccatcctcggcgccctccccgacgcgctcctcgtcctagtgtccggcctctccgggagcaaagaggaggcgcagagccaggtgctgatcgggatggggctgctcgccggttccaccgtcttcctcctcaccctgctctggggaacctgtgtggtcgttggcaagtgtgacctcgggccaggccgtgaggcagtagatgtgacagacaccaagggcttcagcttgactggcactggtgttacgaccgacgtgcagaccagctacgcggcacggatcatggggctatctgtcatccccttcatcatcgctcagttccccaagatgttgaagacgcaccacgggcagcgcctcgctatgctgctggcccttgtcgtgtcgttcgcgctcgtgcttgcctactgcctgtaccaggttttccagccctggattcagaggaggaagctcgcgtacgcgaagcacaagcacgtgatctccgggatactgaggcacgcccagatgcagtcgctcggccgcctgctgaacgacgacggcacgcccaatgaacaagtcatcagaaagctgttccgcaagatcgacatggacgagagccggtccctgtcccgcgccgagctccacgccctcatcgtcggcatcaacttcgaggaggtcgacttcgacaggacggacgcggtggacaaggtcatggacgacttcgacacgtcccgcaacgacgtcgtcgaggaggaggagttcgtgcaggggatgaggaagtggctggacgaggccaggcgcagcgtgcccgtgggcggcgccttctccagcaagttcatccacgagtaccacgagaggacgaggcaggagcacgacgagctggtcgacaggtccgacgaggcggtggagagcgtggagaaccccgggtggtgcatagccaaggccgtggcgctgctgctgctgggctccgccgccgccgccgcgttcgccgacccgctcgtggacgccgtccacggcttctccaacgccacgcgcatcccgtccttcttcatctccttcatcgccctcccgctcgccaccaactccagcgaggccgtctccgccatcatcttcgccagcaggaagaagcagaggacctgctccctcaccttctccgaggtgtacggcggcgtgacgatgaacaacacgctgtgcctcggcgtgttcctggcgctcatctacttcaggaacctgacgtgggacttctcgtcggaggtgctcatcatcctgctggtctgcgtcgtcatggccctcttcaccagcttccggaccacgttcccgctctggacctgcctcgtcgcctacatgctctacccgctctcgctgatcatcgtctacatcctcgactatgtcttcggctggtcatagacctgattggctcaagtgaacacctggttttcagacagccgccggtgtttctgtttgacctccttgtaattttaactatatgtccagactttttctcatgtgatgctgtgatcatgttctactttctctaatccctcgtgtatccgaagcacacaacagtgcattcttcagctccacactcccgtgccagactcatttggcacgcctagcggctccggctgcggctctacccgaagccctgccctaccaaaccggcatcctttttaagtcacaaatggcccttaaatcaaagccacaaaaaaataatattatgaattgtaaattggaacagggatccctagatcgtaaatagaagtatagaaccataataaccgcaaaaatcataaaaaacagtggcagattatcattgctctgaaacggcgtagaagacacttttgagtgctatggacagacggtgcccaaagtcgacacgcttccccagaagcagagagctacacagaactaccgaagtacttgtacagaaggactacctgcacctgacgcgaaaaaaagcatgagatccctaagctgtcaataaaacagagttcatgtacaccaacggacgtgtcagcttcgcaaagagcacttcttttgagaatgcccaagaagatggcatcggccacactggacgatccgcttcggccgcttcatgctctcgatctttagaatcttcatcttgggtcggccaggaggcctccggatattgggcgggccaagcaccacatcggccttgctgaccgcaccttgtgaccagggagacgaatcgttccagtggctcctgtccgggataggatatattggctgggagtaggtttctcggtacttcatcacactgaagcagtcatcagcatagaggcgggggtcttcaccgcatgagagcagtgcggcggcggcatgtgcgcatgggatgccgtaaatttgccatcggcggcacgagcagaacctagcttgggtgtccacaatgttggttcgctccgatgacacaatctcaaactccaccttgtttgctcgaaggacttgatagcattgtgagtcatggatggcttcgaggataactttctcagctgacggaacaagaaccgagttgtatgactgtgccaggttctggcgttcagcaaaccagcaagccagttggtgcctgatgtgctcgatggtttgcacgatgggaagttcatggcagtcaagggacaagttatacaatatctcggttatcccaagactaaaatggccatatctgataccctggaagtaagaaaatgcccacaggtttggcggaaaacgctgtaaccatggcataacatcctgaacctgcatcatttcatttacctttgcatcaaattctgatgctgtgagagcatacacagcactccagaaaatgttaagcagtttagtattcttgaactcatcacggaaattctcactcacgtgtctcaagcaaaacccatgaaaagcagtggggaaattagatccgaccgctgcaaccacttgccgttttctctcagaaactatagtcaacaccggcatcttatctgtgttaactccgagcatcttcctcaattccgatataaaccaattccagttatcatcgctctcgcaatcaacaacaccgaatgctagagggaacatcatgtgatcagcatcaatagctgaagcacacagcaatgtcccaagatactttcccttcaagtcagccttgtcaatttctagaaggggcctgcacccatttaagaaaccataaatggatgcacgaaacgagacaaacagccgctggaaggcattccctggtccaatacctctataggttgcaacactaccaggattcgtcttaacaatctgctcacaatatgcaggaagaagtcggtatccatcctcaagagtaccattaactgcagccatgcttctctcctttccacgccatgcctgcatataagaaacagcgaccccatgctgctctcgaatatcctgcagtatctcctttggcttaatctgcgggttatccctgagtcttgcctcgacagacctagcaacccaaccaacagtagcctgctgatgatgcaggttaagaacaccctcacatttgtgctctccgtgcaaagtccggacagtgaaagttggaacgccggggcacttggcgatgtgcacacgccaagggcaaccttcttttgagcattttgcaatgaaacggctacgatcagatttcactacacggagttcatagtgcaaagcaatggccatgtccttgacagccctccgacatgtgtcaacatctgcaaactcttgaccaatgacaagggtccgcgaacctggtataaggttatgctctgactgaaccaaaatctggttgtcttccatcaatgagcagacccactaggtgaagaatatctgtttctctcaaccataaaaaaactttcaaataacttgatagcaacaaatgtgaattatctgtttagctgcagaaatactgacctgca

SEQ ID NO: 145820 - DNA, 5753 bp, Zea Mays
ggggccccctctctttgttcccgatgaccggtcagtcgccatgcaagtggtactagtgggagtaccgagtaccactcggtacggttgaaccgttggggacggcctcgtggtcgcttatccggatcacacgcagcacagaccgcgacctgatctgacgtgtcctggggccgacgcgtccgcgcagcgttggccatctgccaccatgtcggcgacgaccgggcgggctcaagcggccggccgggccggtgttgctgtcgcggctcggttttgctgattggtccatttggcttaccaacccatctctttcagagttcaaaaaaaacccatctctttcacgctctcgcctccccatgtccatcgccacgatacctaaaaaaagatctacgcagcgaaaagggccgcggaaaaaacgagttgtacgcgtcggctccgcttcttgatcccaacaccgccacgataatataatactaaatctatcgtccgcaccagcagcgagtgaaggaggagcctgcccgcgcctgcgcctggttgtaattgtagctcacgctcacccttcagttgaccaccgctgcggcagcaatggcggcgagtcgccggcagcaccgccgcggcttcccgctggtcccgctgctgctgtcgctcctggcggccgccgcgtacggccgcctcatctccgacggcggcccgcccgcgccgctcctcccggtcatccgcctcgcggcgccgccggccgaggccgagtgcgagcagacctacggcttcctcccctgcaccaccaccgtgctcggcaacctcttcctggtgctggcctacggcttcctcatgttcaaggcggccacgttcctgtcggcgggcagcgagctgctgctagagatcatggggcccggcctcgtcggcggcctcctcctccccatcctcggcgccctccccgacgcgctcctcgtcctagtgtccggcctctccgggagcaaagaggaggcgcagagccaggtgctgatcgggatggggctgctcgccggttccaccgtcttcctcctcaccctgctctggggaacctgtgtggtcgttggcaagtgtgacctcgggccaggccgtgaggcagtagatgtgacagacaccaagggcttcagcttgactggcactggtgttacgaccgacgtgcagaccagctacgcggcacggatcatggggctatctgtcatccccttcatcatcgctcagttccccaagatgttgaagacgcaccacgggcagcgcctcgctatgctgctggcccttgtcgtgtcgttcgcgctcgtgcttgcctactgcctgtaccaggttttccagccctggattcagaggaggaagctcgcgtacgcgaagcacaagcacgtgatctccgggatactgaggcacgcccagatgcagtcgctcggccgcctgctgaacgacgacggcacgcccaatgaacaagtcatcagaaagctgttccgcaagatcgacatggacgagagccggtccctgtcccgcgccgagctccacgccctcatcgtcggcatcaacttcgaggaggtcgacttcgacaggacggacgcggtggacaaggtcatggacgacttcgacacgtcccgcaacgacgtcgtcgaggaggaggagttcgtgcaggggatgaggaagtggctggacgaggccaggcgcagcgtgcccgtgggcggcgccttctccagcaagttcatccacgagtaccacgagaggacgaggcaggagcacgacgagctggtcgacaggtccgacgaggcggtggagagcgtggagaaccccgggtggtgcatagccaaggccgtggcgctgctgctgctgggctccgccgccgccgccgcgttcgccgacccgctcgtggacgccgtccacggcttctccaacgccacgcgcatcccgtccttcttcatctccttcatcgccctcccgctcgccaccaactccagcgaggccgtctccgccatcatcttcgccagcaggaagaagcagaggacctgctccctcaccttctccgaggtgtacggcggcgtgacgatgaacaacacgctgtgcctcggcgtgttcctggcgctcatctacttcaggaacctgacgtgggacttctcgtcggaggtgctcatcatcctgctggtctgcgtcgtcatggccctcttcaccagcttccggaccacgttcccgctctggacctgcctcgtcgcctacatgctctacccgctctcgctgatcatcgtctacatcctcgactatgtcttcggctggtcatagacctgattggctcaagtgaacacctggttttcagacagccgccggtgtttctgtttgacctccttgtaattttaactatatgtccagactttttctcatgtgatgctgtgatcatgttctactttctctaatccctcgtgtatccgaagcacacaacagtgcattcttcagctccacactcccgtgccagactcatttggcacgcctagcggctccggctgcggctctacccgaagccctgccctaccaaaccggcatcctttttaagtcacaaatggcccttaaatcaaagccacaaaaaaataatattatgaattgtaaattggaacagggatccctagatcgtaaatagaagtatagaaccataataaccgcaaaaatcataaaaaacagtggcagattatcattgctctgaaacggcgtagaagacacttttgagtgctatggacagacggtgcccaaagtcgacacgcttccccagaagcagagagctacacagaactaccgaagtacttgtacagaaggactacctgcacctgacgcgaaaaaaagcatgagatccctaagctgtcaataaaacagagttcatgtacaccaacggacgtgtcagcttcgcaaagagcacttcttttgagaatgcccaagaagatggcatcggccacactggacgatccgcttcggccgcttcatgctctcgatctttagaatcttcatcttgggtcggccaggaggcctccggatattgggcgggccaagcaccacatcggccttgctgaccgcaccttgtgaccagggagacgaatcgttccagtggctcctgtccgggataggatatattggctgggagtaggtttctcggtacttcatcacactgaagcagtcatcagcatagaggcgggggtcttcaccgcatgagagcagtgcggcggcggcatgtgcgcatgggatgccgtaaatttgccatcggcggcacgagcagaacctagcttgggtgtccacaatgttggttcgctccgatgacacaatctcaaactccaccttgtttgctcgaaggacttgatagcattgtgagtcatggatggcttcgaggataactttctcagctgacggaacaagaaccgagttgtatgactgtgccaggttctggcgttcagcaaaccagcaagccagttggtgcctgatgtgctcgatggtttgcacgatgggaagttcatggcagtcaagggacaagttatacaatatctcggttatcccaagactaaaatggccatatctgataccctggaagtaagaaaatgcccacaggtttggcggaaaacgctgtaaccatggcataacatcctgaacctgcatcatttcatttacctttgcatcaaattctgatgctgtgagagcatacacagcactccagaaaatgttaagcagtttagtattcttgaactcatcacggaaattctcactcacgtgtctcaagcaaaacccatgaaaagcagtggggaaattagatccgaccgctgcaaccacttgccgttttctctcagaaactatagtcaacaccggcatcttatctgtgttaactccgagcatcttcctcaattccgatataaaccaattccagttatcatcgctctcgcaatcaacaacaccgaatgctagagggaacatcatgtgatcagcatcaatagctgaagcacacagcaatgtcccaagatactttcccttcaagtcagccttgtcaatttctagaaggggcctgcacccatttaagaaaccataaatggatgcacgaaacgagacaaacagccgctggaaggcattccctggtccaatacctctataggttgcaacactaccaggattcgtcttaacaatctgctcacaatatgcaggaagaagtcggtatccatcctcaagagtaccattaactgcagccatgcttctctcctttccacgccatgcctgcatataagaaacagcgaccccatgctgctctcgaatatcctgcagtatctcctttggcttaatctgcgggttatccctgagtcttgcctcgacagacctagcaacccaaccaacagtagcctgctgatgatgcaggttaagaacaccctcacatttgtgctctccgtgcaaagtccggacagtgaaagttggaacgccggggcacttggcgatgtgcacacgccaagggcaaccttcttttgagcattttgcaatgaaacggctacgatcagatttcactacacggagttcatagtgcaaagcaatggccatgtccttgacagccctccgacatgtgtcaacatctgcaaactcttgaccaatgacaagggtccgcgaacctggtataaggttatgctctgactgaaccaaaatctggttgtcttccatcaatgagcagacccactaggtgaagaatatctgtttctctcaaccataaaaaaactttcaaataacttgatagcaacaaatgtgaattatctgtttagctgcagaaatactgacctgcacagcattaacaagagtaaattgtccattaaagcaacaacaaaaatagtttcattccaaacagggaaatggtcttgtggctaccgatcattcgtgcagggtacaaacgttagattagtgtcctgcctattggttactagtttaggccatctgctttgtgttggagtgtagaaactggatctatatactatatagcaatccaatgtcctgtttccagtagtaacatcgtcagtttgctaatcgatttgagggcaaagtttcctgaaatcaaaagttgagacaaaaggcctccctctaggctttgacagaaccacatctccaggagacctaacatgcctagaataagtgtgacttaaaaaattcgtgaaaaggtgacttcaatgtagtttgaagtcctttagtaacctgcattgtatgctggtgaaatctttagctacacctgcagaatggactactcagataccccccagatacatatttacaaaaaaaaaaaaacatcactgactaagtacggttagatttgcaatggtgggcagtggacacaatcagcttcctagtgattgaagccagcacatcgttgctgaaaacacaatggtctccagtaacaatggcttgctcctctcgaaaaacaaaacaaaacaaaaaccaatggtttccttttatctttgctgctgcctcccctttctcaacaataaattacgaaatgtaattatgtgttcagaagctacttcacttattcagcaaccaagtttgttttttaaaataataaacaactatcgaagtgaaaatccataattttggtgcgtgggggtttcagttgaactcgtgttttttggaggatacagagataacagtacccccgaccgcaaacagccaaacccttaacaaaaaattaggaatacaagccgactcccagggaaaaaaatccggtgccctcttagaccgatgcagtcaggcaa

SEQ ID NO: 145821 - DNA, 2230 bp, Zea Mays
actctataaggagctagcgagggcgtccacagcttcaccacgccctcgcccggacgtcgcgcaagccccgctgtccgcctgcccccggaaatttcgcccacacgatgcccccaatctcgcgatgcccccgaccgcctcccccgccgtgacagccgcctcgacgtcctcaccacggctcacgatgcccccatcgacccatcgtctgtgtcccccttcctccctgcgtctccctctcaccctctatcgcccaaaagctccaacctgtcgccagagacttggcgcagacccgtcgactaacacgtcgtcgtcctcacgccgtgggggatgactggacacgatgctccccacccgcacccaacaccacgccagcctcgccctcgatccaggctgccgcaggtgtcctcgacgccacccttccggctcgccggtggttgattcctcttctccttcctctggtcgcaggggatggcgtcgtagctcgggtacgccacccttccgcatgcgccatccacgccaggaacaacatgggcggcggcggccacgatgccagcagcaacacacagccagcgccacgggtcagcggccagaagcccccgccagccctagaggcgacgccgacgccgacgcgcggacgagctggatctggtgcacgtgtccaatctcccccgcccgctcagcctcagcgacctgtccccggcgcccatgcacgggtcgcagctccgcgtggcgtaccagggcgtcccgggctgcgacgccattccctgcggccaccctgtttggggtgccttccaggccgtcgagctctggatcgctgaccgcatcgtgctccccgtggagaactccctcggcggcagcatccaccgcaactacgacctcctcctccggcaccgcctccacatcgtcggggaggtccagctccccatccaccactgcctcctcgcgtctgcggggaatgtggcggccatggtgtggcggcctgaggcccctgcccagggctgcaggctgttgcaacggggtatggactaaaaatcactccatgcattagttcacttgtttggatggcctaggactaaattttaggtgactaaacattttagtcctggtatccaaacaggctcttgttgtgtgtatgttatgtatctacagtctgtattctgctgatttatttctccattgttctggtccgtgtaacattttttgatctggtccatgtaacattttttgatctggttcatgtaacatttttcattacgtcttatggttatttacaactgagtttatcttgtgctgctttgcatgttcttgattttgattttgagaagttctgttcaatctccttgtcaaatttgaatgtgtatgcgtgcttggtctatggaaaatatttccaaggaagagggttgaaatctcatgcatatacgcatagccttgaagcaggccatccaaacaggtgaaccaattttgacttgtttatcttaacgcaccacttattgtccagtgctgataatgtatgttgttgcagcaccatggatcgatgtatggtcctagatcctacaagggacgccagcaaggtagcaaatttggtggcagtactacaagttggagttctgctggccgcagatttggtactatcgacttgagtggcaatcaacaaaggggcagcatgccatttggtagtcacaatggctctctggagttcatgaatgagcaaaaccatgggccacgtgctacaaaaccgaagatacaaggcacagagaacacctcaggagatgagagaagcgagaaaattgttcctctgattgatagcgaactgtacaatcgctctgattttataactgagtacaaagatgtcaaattctttgtaataaagtcctacactgaggaccatgtacataggagcattaagtataaagtttgggccagcacagccaacgggaacaggaagctggattctgcttaccatgcagccaaagagaaagaagagcattaccctattttcttgtttttctcggttaatggaagtggccaattctgtggcgtggctgagatgattggacctgtcgattttgatagaagtgttgattactggcagcaggataagtggagtggccagttccctttgaagtggcacataattaaggatgtatcgaacaatcttctgcggcacatcattcttgagaacaatgacaataaacctgtcacaaatagcaaggacacacaggaggtaaaccat

SEQ ID NO: 145822 - DNA, 211 bp, Zea Mays
attcaggttcaattaggttggcatgatgctggtacctatgacaagaacattatcgagtggcccaagtgcagtggcgctaatggtagcttgagattcaaatttgagttgaagcatggggccaatgctgatcttgtgaatgctctaaagctgatcccgccttcaacgacgtctgaaccccatccacgatccatgcctgtcgcgccatcctcgc

SEQ ID NO: 145823 - DNA, 417 bp, Zea Mays
atgccaacccacccagtgctaagacacaacctattgagccggaaagcagcattactcacatcagcagcaacaaaaacagagaaaactatggagtttatatgtgaagaattagacaaactacaagaaaaggtttgccaaatgctatcatcagaagaagatgtaatagcaggacctaagacaggacaagagaaggaagacaatgctgcaaaacatacaggaccagtagttgaaaatctgcataaccctgaagcagttaaacagaaaggaaggccaaaaaaacctacaaggttaaagccactagtggaggaaatccgcatcaagatgaagaaggcagagcaaaagaaaaacaagaaaacaagcaatgcagcagcaagcccacaaggaaaggagaagaagatgaaaagaacagcaccttga

SEQ ID NO: 145824 - DNA, 2151 bp, Zea Mays
gccttgccctccctacccagtacccacccccccaccgacccaccccctccgtgttccgccgcctccgccgaaatcaccaaatccccgcctccgatccgccgccgacctcgatccgccgcagccgttgacccgcccagaatggcctctgggactccctcgccgtccggcaaaccctactcccgcaaatctcacgccagctccaaggctcccagcgtcccctccttcgacgcccacaacggccggctcctccccaccgtcaccttcccgctgccctccactaccgcctcccgccgggagctgcggcgccgcctctcctccgagctctcccaggtgcgcgccgcggccaagcgcctgagctccctcccggctcccgcaccttcctcggcgctctccgccaccgacccctccacgccgctcccgccgcacccgccggggtccaagcacaagtccaggaagcccgggggagccccgtacccgcagccgcacctctcggcggaggcgcggcgcaagctctacgcgcccgtgttcaagacctgctccgcgctgctccagaggctgatgaagcacaagcacagctgggtgttcaacactccggtagacgcgagcgcgcttggactgcacgactaccatacgatcatcaccaagcccatggacctcggcacggtcaagtcaaagctagcggctggacagtacaggtcgccacgggagtttgcaggcgatgtgcgtctcacgttccggaacgccatgacgtacaaccccaaggggcaggacgtgcacttcatggccgagcagctgctgaacatgttcgaggagaagtggttggagattgaggctgagctagctcagctatcgccacagcctccgacaccatcctcagcagcacccaggaagcccaaggagatagataattctagggcattagagaggtcggattcgacagttcatgctgccgggatggaggctaccccaaagacgcacaatggcagacccccggtttcaaagaagcccaaggcaagggagcccaataagagggatatgacattctgggagaagcagcggcttagcaataacctccaggatttgccaccggagaagctagacaatgttgtccagatcataaagaagaggaactcgtcgctcaaccagcatgacgatgagattgaggttgatatcgatagctttgatgttgagacgttatgggagcttgatagattcgtgacaaactataggaagagtataactaagaataagcggaaggctgagctttctgcggtaaggccagatgaagctgatcctgatcaggagccagagaaggtagaacgtgtgaggcaggacgaggcagatcaggatcgaatccctgcagtacaagagccgattccagaaccagaatcagttgatgtcgagccacctaaggaaattgcagcagatgacaatgggagatatgtgggtgaatcatcacctggtcatttggaagatcaggagggagagaatcctggtagatcaagtagttctggaagctctagcagtgactcagggtcgtcctctagtgatacagacacagatagttcatcagcagatggttctgatgctgcacaatcgcccagaacgtagcatctataggccagaaggcttcgtctgacttacagagaggatgctaatgtttctggttgttaagtttacatgagcaggccaaattcatcttcttgctcaaatattgatgggggcactggaaaggacatagcaacttagttcaactaaggaaggattctagcgtgaaattgtcgggcggcgactgttgtaaattttggtcatataggaactctaacccagtgccatgctgtttgtcgttttgtccacacaagtggttgtccgatatagcacatgctccgatttcatttgtacaactacccgcagttgtgtagggtgccgtgtttgcctagtcgtcgagctgcaagttacctcacattggaattggataggaggagacctgaaacctggggcagtgaaacaagtggcgaggtgaagaccaggaacctggcgagcctcgccctgttgtaagatggtacgattgctatagccgtgtaatttttttttgttgaatcagttttcatttttagtaaaaggtttgcattgccattgatcgtcctctct

SEQ ID NO: 145825 - DNA, 2304 bp, Zea Mays
gccttgccctccctacccagtacccacccccccaccgacccaccccctccgtgttccgccgcctccgccgaaatcaccaaatccccgcctccgatccgccgccgacctcgatccgccgcagccgttgacccgcccagaatggcctctgggactccctcgccgtccggcaaaccctactcccgcaaatctcacgccagctccaaggctcccagcgtcccctccttcgacgcccacaacggccggctcctccccaccgtcaccttcccgctgccctccactaccgcctcccgccgggagctgcggcgccgcctctcctccgagctctcccaggtgcgcgccgcggccaagcgcctgagctccctcccggctcccgcaccttcctcggcgctctccgccaccgacccctccacgccgctcccgccgcacccgccggggtccaagcacaagtccaggaagcccgggggagccccgtacccgcagccgcacctctcggcggaggcgcggcgcaagctctacgcgcccgtgttcaagacctgctccgcgctgctccagaggctgatgaagcacaagcacagctgggtgttcaacactccggtagacgcgagcgcgcttggactgcacgactaccatacgatcatcaccaagcccatggacctcggcacggtcaagtcaaagctagcggctggacagtacaggtcgccacgggagtttgcaggcgatgtgcgtctcacgttccggaacgccatgacgtacaaccccaaggggcaggacgtgcacttcatggccgagcagctgctgaacatgttcgaggagaagtggttggagattgaggctgagctagctcagctatcgccacagcctccgacaccatcctcagcagcacccaggaagcccaaggagatagataattctagggcattagagaggtcggattcgacagttcatgctgccgggatggaggctaccccaaagacgcacaatggcagacccccggtttcaaagaagcccaaggcaagggagcccaataagagggatatgacattctgggagaagcagcggcttagcaataacctccaggatttgccaccggagaagctagacaatgttgtccagatcataaagaagaggaactcgtcgctcaaccagcatgacgatgagattgaggttgatatcgatagctttgatgttgagacgttatgggagcttgatagattcgtgacaaactataggaagagtataactaagaataagcggaaggctgagctttctgcggtaaggccagatgaagctgatcctgatcaggagccagagaaggtagaacgtgtgaggcaggacgaggcagatcaggatcgaatccctgcagtacaagagccgattccagaaccagaatcagttgatgtcgagccacctaaggaaattgcagcagatgacaatgggagatatgtgggtgaatcatcacctggtcatttggaagatcaggagggagagaatcctggtagatcaagtagttctggaagctctagcagtgactcagggtcgtcctctagtgatacagacacagatagttcatcagcagatggttctgatgctgcacaatcgcccagaacgtagcatctataggccagatattgatgggggcactggaaaggacatagcaacttagttcaactaaggaaggattctagcgtgaaattgtcgggcggcgactgttgtaaattttggtcatataggaactctaacccagtgccatgctgtttgtcgttttgtccacacaagtggttgtccgatatagcacatgctccgatttcatttgtacaactacccgcagttgtgtagggtgccgtgtttgcctagtcgtcgagctgcaagttacctcacattggaattggataggaggagacctgaaacctggggcagtgaaacaagtggcgaggtgaagaccaggaacctggcgagcctcgccctgttgtaagatggtacgattgctatagccgtgtaatttttttttgttgaatcagttttcatttttagtaaaaggtttgcattgccattgatcgtcctctcttgttgccccgcctctcctagttgagctgctcatgtgttctaactttgcaactgctagtccatctgatccctttactttgcgatcgccctgagctgctgagagtgcagcagtacaccttgcagttgcaacggtgaaggagaagcatctgacagtttgaatggtggagaagcgtctgacggtttgaatgatgatccttatatacatttgtgccacctattctcctatgtttcagttttacg

SEQ ID NO: 145826 - DNA, 706 bp, Zea Mays
ctgccagactgcccacccggccccgtctatcccttggaaagtcagacgagaaagcgtgctgggcaccgcaaggaaagcgaccacgaaaccgcgcgcctcctgcctctccatcttctccatatatactacctatcgaccgtgtccggcgggccggacctcttgtcgtcttggtgcgcgcgctcggtttcccttcctttttccctcgcgcgcggccaacctagaaagcgacggcggagccggagagggaaggggaggcgggccggctggtcaagggcggacgatgtgctgcggcggcgacggggagtgccggccgctcgggtggctcctgggcctgcccttcgcgctgctcgccgtcctcgtctccttcgtcggcgccgtcatctggatcatcgggctgcccatctcgtttatgcccctgctgcctctgcgtgacggtgctgctggaggtggccgtggagctcgtcaaggcgccgctccatgtcatgacctggtttacctccaagatcccctgctagctgtcccctgctttctgctgtgcggatcatacatacatcttgctttagccggagaggttgctgtactgtactgtactgttgtttcgtttcgtcgtcgcttggtccgttcgtcctagtgctactttgggtttctgcgattgatttttcagactagcttgttcttgaattgaatgcatggacttgtgctgcca

SEQ ID NO: 145827 - DNA, 1324 bp, Zea Mays
ctccatcgaaaggacccgatcaaactttagtctaggccagttgcactcgtcctcctcttctcgcagcagccagcagaccaatcgggacaagcaaactcccccgattagtttaagcagcccgggcccggcgacgaccagctccgttccgcgcggggatttaaacgcgcgaagcgagaaggcacgcagcaggcggcagcggcaagcaacgaacgcgatcgcgcgccgacgacgacgcgcggtgccggcgcctggtggtgccgtgttgcggactccgctgcatcgcctcggtcggtcgtcgtcatatcatgggtgtccggctgccggtggcgtggtccgccgtcctcgtcctcctcgtgcgggcggccgtggcgcgggagtacgcggccatcttcaacttcggggactccctggtggacgccggcaacctggtggtggacggcatcccggactacctggccacggcgcgcctgccctacggcatgacccacttcggctaccccaccggccgctgctccgacggccgcctcgtcgttgacttcatcgcgcaggagctgggcgtgccgctgctgccgccgtccaaggcgaagaacgcgacgttccaccgcggcgccaacttcgcgatcacgggcgccacgtcgctggacacgcccttcttcgtggagcgcgggctggggaagacggtctggaactcggggtccctgcacacgcagatccagtggttccaggacatgaagcccaagctgtgcgggcaggagcaggagtgccgggacctgttccggcggtcgctgttcatcgtgggcgagttcggcgggaacgactacaactcgccgctgttcgcgttccggccgctggcggaggcgcacgacatggtgccgcacgtggtggagtccatcgggcggggcgtggagcggctcatcgcggagggcgccgcggagctggtggtgcccggggtgctccccatcggctgcttccccgtctacctctccatcttccgcaggcagccggccggcggctacggcgcccgcagcggctgcgtcaaggagctcaacacgctgtcgtgggtgcacaacgccgcgctgcgccgcaaggtcgaggagctccgcgccaggcaccccggcgtgcgcatcgtgtacgccgactactacacgccggccatccagttcgtcctccacgccgagaaatacggtatcttgtttataagatcacggaaattcgtccgttcacgcattcaaaaaagtatgggggacgacgacgtgcgggagcgagtaataattgaagcagaagcggccgcggcacgtcgctgggcgaatctgccttccattcc

SEQ ID NO: 145828 - DNA, 1972 bp, Zea Mays
gaaaggacccgatcaaactttagtctaggccagttgcactcgtcctcctcttctcgcagcagccagcagaccaatcgggacaagcaaactcccccgattagtttaagcagcccgggcccggcgacgaccagctccgttccgcgcggggatttaaacgcgcgaagcgagaaggcacgcagcaggcggcagcggcaagcaacgaacgcgatcgcgcgccgacgacgacgcgcggtgccggcgcctggtggtgccgtgttgcggactccgctgcatcgcctcggtcggtcgtcgtcatatcatgggtgtccggctgccggtggcgtggtccgccgtcctcgtcctcctcgtgcgggcggccgtggcgcgggagtacgcggccatcttcaacttcggggactccctggtggacgccggcaacctggtggtggacggcatcccggactacctggccacggcgcgcctgccctacggcatgacccacttcggctaccccaccggccgctgctccgacggccgcctcgtcgttgacttcatcgcgcaggagctgggcgtgccgctgctgccgccgtccaaggcgaagaacgcgacgttccaccgcggcgccaacttcgcgatcacgggcgccacgtcgctggacacgcccttcttcgtggagcgcgggctggggaagacggtctggaactcggggtccctgcacacgcagatccagtggttccaggacatgaagcccaagctgtgcgggcaggagcaggagtgccgggacctgttccggcggtcgctgttcatcgtgggcgagttcggcgggaacgactacaactcgccgctgttcgcgttccggccgctggcggaggcgcacgacatggtgccgcacgtggtggagtccatcgggcggggcgtggagcggctcatcgcggagggcgccgcggagctggtggtgcccggggtgctccccatcggctgcttccccgtctacctctccatcttccgcaggcagccggccggcggctacggcgcccgcagcggctgcgtcaaggagctcaacacgctgtcgtgggtgcacaacgccgcgctgcgccgcaaggtcgaggagctccgcgccaggcaccccggcgtgcgcatcgtgtacgccgactactacacgccggccatccagttcgtcctccacgccgagaaatacgggatgctgaagcagacgccgcgggcgtgctgcggcgcgccgggcgtgggcgagtacaacttcaacctgacgtccaagtgcggcgagccgggggcgtacgcgtgcccggacccctccaaccactggagctgggacggcatccacctcacggaggccgcctacggccacatcgccaggggctggctctacgggcccttcgccgacccgcccatcctcgacgccaagcacctcggctaacgtcgtccatccaccgtcttctccaacgccggccccgcccgcccagtacagactactcctccggctctgggcgccgtcgtatgtgcgtccttattaccgacctgcaaattggattggttgcttgtagtagaagtgtagagagagcgagacagagatagatgacaaacacgaaacgaaccggaaggaggacgataaggcgcgcgtgccggccggtcttctactcctctctgttcatagctgtcccatatctatcgtagtcaagaaaactgagcagggaaagaaaccgggcgatatttctgttgcatcttgctttgtttgagagtgtgcgtgcgtgtgcggccagctcgatctgaagtcgataggcaggtgcgtcgcgtcgtggatgaactggtccgtggacgtgatcttgtttatttttttaaggagcaggtgttgtcaaaagtccatcgctaagatgtgcttaaggatctcagcccaggagactgattttaaagaccaccgtaacaataacacggcactcgagtctttgagtcctgttaaggacgaagggaatagcct

SEQ ID NO: 145829 - DNA, 1197 bp, Zea Mays
cagccttatccctaacccccctcctctctgttgatttcgtggagcaccagccgagctcctccctgcggctcgcctccctcacggcgccgcctgctccccattaccgacctccactccagcacctgagcaagcgctcctaaggtcatcttccccatcccctccccatcttcctctagtgctggctgccatgtcgtcttccccatccctcccatggtaccctcacctctgctcctcccagcgccctggctctgctcgaccttcatagtgagctcaccctcagccatggagggtgccgcctccacctcccccttggtgctcgccgagctcgccctcagccttgccgcgcccctgcttcctgttcccagtgccgacgcccctgcctttttccccatctccttcccttgacgtgctcgcccaggtcgcgcgcgtccagctcgccggccgaactccctcagcttcgtcttcaaccaccgccgaccccatggtgagctcgcacaaactccatctccctgtgcgccctttgttctgctccaaccgttctccacgccgtgttccccccccatggctccccttgcctctccggtcagcactagcccgaacggtatagcagcataccggtgccaaacccgtgttcgcgacgctcgccaagtgctcgatgaaataccgcagtgagctccacctcgagttgtgcagccccaacccgcgacgttgcaacacccttgccctccgtcgatgttgcgcttcgtgcattgctcctcgacgaagagccagaaccgtggtagacatgcatgcgcgatccaaactgatttcaccaggttgttcgctttatgtgattgtagttttctctaattacgtgtggtcgatggcgtgaatatgtgtgtgaaaatgtacgtctatgaatggtgggctaaatagttatgtggtcgatgattttttgtgattagcataggtgcactgtggtagctgtctccggatgtgtttgtgtgcttcttatggcaatgtactgggaaacatattcttcctcaatttcattcgtgatgagtatagttatattaggtgtcatattagatactgtgaaatgtctacccgcagatagtgataaggttgtttgtataattataaagttgtcgcatcgtgtgttgagatctagaattttgatgtaaatctaaatgaaggatactagtaagcaagtgtgat

SEQ ID NO: 145830 - DNA, 730 bp, Zea Mays
aggctttccaaaaagtcttggatcaccccttttggttgtctagaagtcaagttatggctgtttgaaatgtgatgtttgaatctgccaaaagtctggacagtaatgtttgattgtaataactgacttcgataaacattgaatcaccttgagatgattataaatgagttgtagacaattttattagctttctaaaaattctaggatcacatgttttggatgtctaaatctctagttatggaattttaaaatgagtagtcgaattatgtccaaatctggacagaatttacgtttagtaccgtttgaccattctaaaggtcgaatcttgttatgatgataatacaaaagttatagagaactttataagctttccaaaaagtcttagtttactatttttggatgaatatcgtgtaatttatgaataaaacaactgactgttgtactgctgtccaaaatcagcaatgattaagatgattacttggagtttcttttctgtgagtacgatgaccttagtaatacgaaggagttttagtagacatgtttacctagcattaaaaagttgattcagtaatattgtgtttataaaggtaatgtaaatgtcttatgattaagagcagtgtgatgttctatttgatggcatgctatgcataataacctggcgtacaaatgttgaagcatgttgaaatgcttctattcattgttctaagtttgggtccttagattttaaatcatg

SEQ ID NO: 145831 - DNA, 109 bp, Zea Mays
taaagatcaccacacatagatcgttcttcttacagactgcaccctgtctgttggggacttgttctcaaatgctaagagttaagaacaaggcaacataaaaaatgttaaa

SEQ ID NO: 145832 - DNA, 955 bp, Zea Mays
cgaaacagcctcagccaaccagtcaaccaaacaggccctcagatttgcactcggccggcatggcatttatcccccacctacaatctcaggcaatccgccattactgagagccccatcgcacatcgggtcgtggcaagctcgcgacgcggaagcgccaccgctcccctgtccgtctccgtccacctcctgtgccggctgcctgcctaccacatcaatcagtgtgaccatccagcacattcccatgacgggccacgccagcctgctgctgccggcgctcgccgccgtcctgctctgctgccccctcgcgcaatgcgggcagcagaactacacctccatgttcagcttcggcgactcgctcaccgacaccggcaacctgctcgtgtccagcccgctctccaaccacatcgtcggccgctacccctacggcatcacctacttccaccgctccaccggccgctgctccgacggccgcctcgtcgtcgacttcctagcgcaagcgttcggcctgccgctgctgcagccgtacctgcagtcccgcggcaaggacctgcgccggggcgtcaacttcgccgtcggcggcgccaccgccatggatccgcccttcttccaggagatcggcgcgtccgacaagctctggaccaacctgtccctcagcgtccagctcggctggttcgagcagctcaagccgtcgctctgcagctcaccgaaagagtgcaaggagtacttcagcaagtccctcttcctggtcggagagatcggggggaacgactacaactacgccttcttcaagggcaagaccctggacgacgccaagacctacgtccccacggtcgccgccgcggtcaccgatgccaccgaggtcaccaccgaacctatcctctccatttgtttactgcatctctccctcgctctcgcactaaacaattcgggaatctctcttctctctgcccgttaa

SEQ ID NO: 145833 - DNA, 1552 bp, Zea Mays
ccctcagatttgcactcggccggcatggcatttatcccccacctacaatctcaggcaatccgccattactgagagccccatcgcacatcgggtcgtggcaagctcgcgacgcggaagcgccaccgctcccctgtccgtctccgtccacctcctgtgccggctgcctgcctaccacatcaatcagtgtgaccatccagcacattcccatgacgggccacgccagcctgctgctgccggcgctcgccgccgtcctgctctgctgccccctcgcgcaatgcgggcagcagaactacacctccatgttcagcttcggcgactcgctcaccgacaccggcaacctgctcgtgtccagcccgctctccaaccacatcgtcggccgctacccctacggcatcacctacttccaccgctccaccggccgctgctccgacggccgcctcgtcgtcgacttcctagcgcaagcgttcggcctgccgctgctgcagccgtacctgcagtcccgcggcaaggacctgcgccggggcgtcaacttcgccgtcggcggcgccaccgccatggatccgcccttcttccaggagatcggcgcgtccgacaagctctggaccaacctgtccctcagcgtccagctcggctggttcgagcagctcaagccgtcgctctgcagctcaccgaaagagtgcaaggagtacttcagcaagtccctcttcctggtcggagagatcggggggaacgactacaactacgccttcttcaagggcaagaccctggacgacgccaagacctacgtccccacggtcgccgccgcggtcaccgatgccaccgagaggctgatcaaggccggcgccacgcacctggtggtgccggggaacctgcccatgggctgctcgtcggcgtacctgaccctgcacccgggccgcaacggcagcgactacgacgccgccggttgcctcaggacgtacaacgacttcgcgcagcaccacaacgctgtgctccagcggaaactgcgggcgctccgggcgaagtacccgcaggcgaggatcatgtacgccgactactacggcgccgccatgtccttcgccaagaaccccaagcagttcgggttcacgcaggggccgctgcggacgtgctgcggcggcggcgggccgtacaacttcaacccgaaggcgagctgcggcgtgcgggggtccagcgtgtgcgcggacccgtcggcgtacgccaactgggacggcgtgcacctgacggaggccgcctaccacgccatcgccgacagcatcctcaacgggccctacaccagccccaggctcctctgatccgaacgccggtggttgaagctcgtcgtccgtccatcggcagccgcagctcatacaactgtagtggcgccaacaatgtggctggcctgtgagcttgctagctgtggtaattaaacgaatgctgtacgtagtactccctactactagtgtgagagtgtgacggtgttgggactggaactggaactggaagggtaactcgtaactaaaaatggtggagttttgcgtccgttcgtttcttggca

SEQ ID NO: 145834 - DNA, 1453 bp, Zea Mays
aggcccagcacgcgtcctgagggccgcgccgtccagtcctcgccaattcccattccggttccggcttccgccgccagcggcagcaatcccctcctcctcctccctgtccctggacgccggcgccggcgtcggctcctcatcgtccgcgggagactgaagtggtgaacgcggaagaaggttgtcattttgctaagttaaagttagatcattggagcaatgccgccccataagatcgagacggggcaccaagatgtggtgcatgatgtcgccatggattactatggcaagcgcctagctacatcctcctctgataatacaataaagatcattggcgtaagtggaacctcacaccagcagcttgcaactttgagtggacaccagggcccagtatggcaagtcgcatgggctcatcccaagtttggttccatgcttgcatcctgcagctacgacggccgagtgatcatctggaaggaaggaagcaagcctgatgaatgggcactggtacacacctttgctgagcacaagtcctccgtgaattccatcgcgtgggcgcctcatgagctgggtctatgcttggcttgtggttcatcagatgggaacatttcagtcttcactgctcgttctgatggaggttgggataccacgcgtattgatcaggcgcatccggttggtgtgacctcagtttcttgggctcctgcaatggcaccgggagctctaatcagcgcggggtcttctggtcagtttgagtatgttcagaaactcgcttccggtggctgtgacaacacggtgaaggtgtggaagctcaacaacggcagttggcggatggactgtttccccgccctacagatgcacaaggactgggtgagagacgtcgcgtgggcgccaaacctgggccttccaaagtccaccatcgccagcgcctctcaggatggaacagttgttatctggacagcagcaaaagaaggcgagcagtgggaaggccggttgctgtatgatttcaggacccctgtgtggaggctgtcgtggtcactgactgggaatatactggcggtgtctgacggcaacaacaatgtgaccctgtggaaggaagctgtggacggcgaatggcagcaagtgacgactgttgagccataggtctctagagttgtccctcgtctatattgccttaatacttgtagtttttgtgtacctatggccctgtgtgggtagcaagcaggccacggtgcatgactacttgagacgtgatttcaggctcgggcagaagtgaaaaatgaacttgttgtatatgtggagcattctgtttctcgattcagtgccttttctttcccatggttaattcgttgctcactcaggtgttcatatatcagttattctgttcaggataatggttaattggatatatttggtgctctaatgcaagctttgcacttgtagcgcaaagttttttccggtg

SEQ ID NO: 145835 - DNA, 1458 bp, Zea Mays
aggcccagcacgcgtcctgagggccgcgccgtccagtcctcgccaattcccattccggttccggcttccgccgccagcggcagcaatcccctcctcctcctccctgtccctggacgccggcgccggcgtcggctcctcatcgtccgcgggtaaggagactgaagtggtgaacgcggaagaaggttgtcattttgctaagttaaagttagatcattggagcaatgccgccccataagatcgagacggggcaccaagatgtggtgcatgatgtcgccatggattactatggcaagcgcctagctacatcctcctctgataatacaataaagatcattggcgtaagtggaacctcacaccagcagcttgcaactttgagtggacaccagggcccagtatggcaagtcgcatgggctcatcccaagtttggttccatgcttgcatcctgcagctacgacggccgagtgatcatctggaaggaaggaagcaagcctgatgaatgggcactggtacacacctttgctgagcacaagtcctccgtgaattccatcgcgtgggcgcctcatgagctgggtctatgcttggcttgtggttcatcagatgggaacatttcagtcttcactgctcgttctgatggaggttgggataccacgcgtattgatcaggcgcatccggttggtgtgacctcagtttcttgggctcctgcaatggcaccgggagctctaatcagcgcggggtcttctggtcagtttgagtatgttcagaaactcgcttccggtggctgtgacaacacggtgaaggtgtggaagctcaacaacggcagttggcggatggactgtttccccgccctacagatgcacaaggactgggtgagagacgtcgcgtgggcgccaaacctgggccttccaaagtccaccatcgccagcgcctctcaggatggaacagttgttatctggacagcagcaaaagaaggcgagcagtgggaaggccggttgctgtatgatttcaggacccctgtgtggaggctgtcgtggtcactgactgggaatatactggcggtgtctgacggcaacaacaatgtgaccctgtggaaggaagctgtggacggcgaatggcagcaagtgacgactgttgagccataggtctctagagttgtccctcgtctatattgccttaatacttgtagtttttgtgtacctatggccctgtgtgggtagcaagcaggccacggtgcatgactacttgagacgtgatttcaggctcgggcagaagtgaaaaatgaacttgttgtatatgtggagcattctgtttctcgattcagtgccttttctttcccatggttaattcgttgctcactcaggtgttcatatatcagttattctgttcaggataatggttaattggatatatttggtgctctaatgcaagctttgcacttgtagcgcaaagttttttccggtg

SEQ ID NO: 145836 - DNA, 1230 bp, Zea Mays
atggcgagaaacataaattcagattatatagacttttcacatttgggtggattcgacatgggcatcaattttgacgaatttgaagaaaatgtgaaaaagctcatggaggattttcttgacaatgctttgttactaactttccccattcatggacggatcccgatcaagtatcttgattcagctcatgataaagctgtcgaattcattgaagatgtccatgcaaaattttatggtccctttactgatgatgaggtgccaaataacgatcaatctagtcgctatgttatcaccgagtcttcaccaacatctattgagaaggagctagttggaccaaacactgaactttcaactcctcctgcatgcttcattaccatggagaacagttctactggctgtgatactgatgctcataaaacccaatcagaatcattttcaacaaaaagtacagatatcctaatacacactacagatttttgtaatgcactgctgctagaagattctagcacaaattatgagatgacagtttgcttgcaaccctaccaggcaactttgcctgggacacaagcaaaccggcctgaagtgcacatggtatcaaccatatcatacagtgcaaatagccctgtggaatcaactatacatggaacttgcacttcacatgactctagcacaagtgcgtccagctgtgctgacgatccaagtatgtcgactgacagcatggttaaatctgtggacatggatggtcagaagcacatgaaaaacgacaaaattaaggtgcacctagcccctcaaccagaaaacgcgtcatttaagaaaatgcttttgaggaacctgtcgaggaaactcaggtggtcaaaggcgcaggcagacacgcatcagaccatggcgcctggatcccagggcgcagaagaccctggatatccactggtttctccatcggatgatgatctggaggatagttgggagatcctgtaatatataataaaccgccaagaacctccgtgacttttcttttttgagctaagtttatccatgtcaggttaactggttttgagggaaggcacgtggcgtattttttacagatctccttggttacagacacgtgagatgttgcacgtacgtgcggcacatccatcggcataataactgtaattctagttgaggatacgtaaagctgtttggattctgtttcggaccttaactgcatgcagacaagacaatgagacaagcgtg

SEQ ID NO: 145837 - DNA, 307 bp, Zea Mays
ctggcacaagaagaagaagagggggaggaaggcagaggaggaggccaaggccgaggtgctcaacttcagcgaccacgtccacgtccacgtccacaagcagaccgtcccagggccggctgggggcgcgaccgccgtcaggcggacggtggacgaggatgtcaggttccaggaggcggtcaggaagcaggacaccatcagcgagtcctcgagcactgccccttgggccttgcacaagaaacacgagagcggagaggagaggaagacggaggtcatcaacgtcaccaagcacaagcacgtcgacgagaaa

SEQ ID NO: 145838 - DNA, 910 bp, Zea Mays
tcgcagccaacttccattggaggcgattttggaggtccagattatataaaatacaagggtcgaggttttgatcttcattttttggaggaaggttgctaagaaaggatttgtgaaggattacacagtttggacaaagcatggagagggtagtagtgcgccttatacgactgaagccgctgaggacgaaagatttcagtttgttcacgggacacacccacttcttccacagagcgaacatgtaatgctaaatgtcactgatcatggttactgtggaggaagcgaacatgatagaactcatgttttgtcgaatgttattgacgaggaagatgcagaattgttggaggcaatgttgcgtcgtcatacggatccatcgatgttcttcaagaaaggtatggagtccctgaagaaagcaatagaagagcctttgtatgatgagtctaagggttgtaccaaagagttcatgacgctccggtctgtgttaaagttgttgatgttaaaaactagatatggtttgtctgatgctggctttgactcgttcttgaatatcatcgcagacatgcttccaaaggagaacaaagtgtctgctaacatgtactatgcaaagaaactaatcagtccgctcgctatggatgtggagaagatccacgtgtgtagaaatcattgtatcctttatcgaggcgatgattataaagacttggagagctgcccaaagtgtaatgcaagtaggtacaagacgaataaagactatcgagaggatgagtgtgttgcatctgtgtctaagggcaagaagcgaaagaaagcccaaaagaagacttcaaaatccacgagcaaagaaaaggaagtagactattatgcgctcaaaaagactcctgctttggtgatatggtacctccccgtcgtcgatcgattg

SEQ ID NO: 145839 - DNA, 678 bp, Zea Mays
gatactagctactccttactaatcctgggcagggcaggaggaggggagctctgcccggccatgcagcgtggggatccgctggtggtgggccgcatcatcggcgacgtggtggaccccttcgtgcgccgggtgccgctccgcgtcgcctacgccgcgcgcgaggtctccaacggctgcgagctcaggccctccgccatcgccgaccagccgcgcgtcgaggtcggcggacccgacatgcgcaccttctacaccctcgtgatggtagatcctgatgcgccgagccccagcgatcccaacctcagggagtacctgcactggctggtcactgatattccggcgacgactggagtatcttttgggaccgaggtcgtgtgctacgagagcccacggccggtgctggggatccaccgggtcgtgtttctgctcttccagcagctcggccggcagacggtgtacgccccggggtggcggcagaacttcagcacccgcgacttcgccgagctctacaacctcggcttgccggtcgccgccgtctacttcaactgccagagggagtccggaaccggtgggagaagaatgtgatctcgacccggccgggtggaaattaataagatgacgggtaatcgggtatatgtatatatttatatatatatgtatatgtacgtgtatttgatctgg

SEQ ID NO: 145840 - DNA, 954 bp, Zea Mays
ggacgaccacggccccccgtctgccgcacgcgcgcccgctctgccagctgctgctactactgctaaacctcgcccaccagtcgcgtgaggaaatagcaacctgctgagctcgctcgttcgctcgctcgcctgccttcttccctgggcaagctagctagctaggatcgaggaggagctctgcccggccatgcagcgtggggatccgctggtggtgggccgcatcatcggcgacgtggtggaccccttcgtgcgccgggtgccgctccgcgtcgcctacgccgcgcgcgaggtctccaacggctgcgagctcaggccctccgccatcgccgaccagccgcgcgtcgaggtcggcggacccgacatgcgcaccttctacaccctcgtgatggtagatcctgatgcgccgagccccagcgatcccaacctcagggagtacctgcactggctggtcactgatattccggcgacgactggagtatcttttgggaccgaggtcgtgtgctacgagagcccacggccggtgctggggatccaccgggtcgtgtttctgctcttccagcagctcggccggcagacggtgtacgccccggggtggcggcagaacttcagcacccgcgacttcgccgagctctacaacctcggcttgccggtcgccgccgtctacttcaactgccagagggagtccggaaccggtgggagaagaatgtgatctcgacccggccgggtggaaattaataagatgacgggtaatcgggtatatgtatatatttatatatatatgtatatgtacgtgtatttgatctggtggcctttggttatatttgggtggggtgtatttgatatattatctgtggcagattggcgcattctctggcgcatatttgatagctacatgtatctatttatacagatataaagcgagcaataatatgcatatgagagggttcagccaca

SEQ ID NO: 145841 - DNA, 830 bp, Zea Mays
gtagatccaatgcccagccctattccaactcaattcgccgcgtcacctcctcgtctgctttgacgacccgaccacgccagccatggacgccctgacgcgcctccaccgctccctcgtcggcggcgacgacgaggatcagccggaggactccatccttgctgataccgaagacctctgctccctctcccctctccagaggatctacgccttcgcggcatgtttggtggccggactcaccctcatgatcttgtcttttattgtcttcgcaagacctatcaaattcgcagtaatgtttacatttggaaacatattggcagttgggagcacagcctttgttatgggccctcaaaaacagctaaggatgatgtttgatccagttcgtctgtatgcaacggctgtttatgttggatgtgttgttttggctctaatctttgctctttggattcatgacaagctgctaacactgatcgctgtcatatgtgagatctgcgccctattttggtatagtttgagctacattcctttggcacgaaggatggtttccgacctgatggtgaagttctgtgacactgaactttgagctgctgcacgcaataacaacaacaacaaaattcttctgtgtctgaagcctgataaacctatgggttcttctcatttgtccatttcctttgggtttaactttattttgtaaacaaaacgagttaatatgtactttttttttgtaaatgtatgtcagtgtatttatctgtaaatgtacactgcatctttgaatcagatattctgatcttgtagtgctgcaaaacgatgagttcacagattggggaactaat

SEQ ID NO: 145842 - DNA, 1134 bp, Zea Mays
ctactagtactcctctccctttctctcccaccccaccccacccccctagctagctccggcaagcctgaaggctgaagcagccgccataggagcacaaggctaaggtagtatagctgtggatcgacggaaataaatgggcaacatgctgccatcatgcctggtggtgcaacaaggcacagcagcaggtgctctgccggccatgaaccccaagcggaggctcatctccctcaatctccttgtgaaaggaatccacagggtgaagaagatgcccgccggtcccggcaaggcgcccgagatagatagcaagaagtcgtcgtcgtcagaagcgcttgagaccgccagaagcaacaaggccgcccggagcaccaacaaccccaagggcgccgtgctgaggtcgaggctccacggccggcggagcggcgccggcctcggtaagaaggccgggaagcagggcgtcgtgcgcgtgaaggtggtcctgaccaaggaggaggccgcgcggctgctgtcgctgaccgtcggcggcggccagaagcacactactaccgccgcgcagatcgtggccgagatgaggaagatggaggcccgccgccgcgtggccgccggtgcctcgtggcggccggcgctggccagcatccccgaggagtcatcgtagggtctaggcctctaggagaccggtgtgggtcgatgagctctcgtcgttttgtttatataaacgtggctagctagctccggccatgtgcttttcccccactagacaggtgccgtgctccccatgtggaattgaagctcagaacagaagcggcctgcttgatatctatctggtggtgctaggagactggagatcgagcaagggaaggagaaggagctagctgcagagacttggggttgagaggcgagcgaggcgacgacggcgcacgctcccccctcccatgcctgcacccgaccggccggcgtagatcccggccgtgcatgccggtgtacaacaagctttctttctttctttcttttttaaagcctttgtgttgttctcccctgttgtagtagtcgtctgtctctccatcagtcttcagtgctgctgtagtgcacggcaacagcttgcaagaagaatggaatggaatgcaacaaaacttgagc

SEQ ID NO: 145843 - DNA, 317 bp, Zea Mays
caccaaagatgtcgcagatgacatgtggtcgcccgacgtctatccaccagagagcacaacactgacctttagcggcccgatcaccccgggctcggtctacgacaccattgacaccgagggctggcccaacaggttggggaagagcttggtctcatcagggttacccgcggcggagctggcaaggccgtcgacgacagagaagttggattggaggatagaggggaggggcagcgtgtgcatgagatggctcgtctgcacctatgggcaacatcatcgacggcgcaccatgacgacgggccaccgaacgcgaggcgggg

SEQ ID NO: 145844 - DNA, 986 bp, Zea Mays
agccaactgccaacccgaccgcgtcgcctctctcctcctttcgcgtcgtctccctcctccactctcctctcctctcgcgtccgcagcttcccttgccggctagggtttgcagatgacgacggcggcgcgccccacctgggcgccggccaagggcggcaacgagcaagggggcacccgcatcttcggcccctcccagaagtactcgtcccgcgacctcgccgcgcatacctcgctcaagctcagaaaagacggtcaacagacccaagaggagttacagaagaggaatctcagggaggaacttgaggaacgtgagcgcaagcactactcttccaaggataagtcctatgctgaagaaagagaccggcggaaaagctcaagccagctactcctagaaggttcaaagagagaggcagaggataagatagttccacgagaaatcgatgcagatgactccgatgtggagcctaaaagtgatgatgagagcgatgaagatggcgacgacgacgacaccgaagctctaatggcagagcttgagaggattaagaaagagagagcagaggagaagcttagaaaggagcggcaacaagcagaggaggaggccaagatgaaggaggctgaactgatgcggggaaaccctttgattaatatcaacaatcctggctccttcagtgtcaagagaaggtgggacgacgacgtggtgttcaagaatcaagcacgtggagagaccaagacgccgaaacggttcatcaacgacaccatcaggagtgacttccaccgtaaatttcttcatagatacatgaagtaatggtattgtcgtgtacaattcagatgtctccgtgctgtttatgtcagtgcattggttctctctcatcgttgttatgtttcgtgtatgagtgaacggccattgttgtgttgtatatgaaacaaaacatctgtcagcatcttaacaatgcctacctcatggtgtccaagttgatctgatttca

SEQ ID NO: 145845 - DNA, 995 bp, Zea Mays
agccaactgccaacccgaccgcgtcgcctctctcctcctttcgcgtcgtctccctcctccactctcctctcctctcgcgtccgcagcttcccttgccggctagggtttgcagatgacgacggcggcgcgccccacctgggcgccggccaagggcggcaacgagcaagggggcacccgcatcttcggcccctcccagaagtactcgtcccgcgacctcgccgcgcatacctcgctcaagctcagaaaagacggtcaacagacccaagaggagttacagaagaggaatctcagggaggaacttgaggaacgtgagcgcaagcactactcttccaaggataagtcctatgctgaaagagaccggcggaaaagctcaagccagctactcctagaaggttcaaagagagaggcagaggataagatagttccacgagaaatcgatgcagatgactccgatgtggagcctaaaagtgatgatgagagcgatgaagatggcgacgacgacgacaccgaagctctaatggcagagcttgagaggattaagaaagagagagcagaggagaagcttagaaaggagcggcaacaagcagaggaggaggccaagatgaaggaggctgaactgatgcggggaaaccctttgattaatatcaacaatcctggctccttcagtgtcaagagaaggtgggacgacgacgtggtgttcaagaatcaagcacgtggagagaccaagacgccgaaacggttcatcaacgacaccatcaggagtgacttccaccgtaaatttcttcatagatacatgaagtaatggtattgtcgtgtacaattcagatgtctccgtgctgtttatgtcagtgcattggttctctctcatcgttgttatgtttcgtgtatgagtgaacggccattgttgtgttgtatatgaaacaaaacatctgtcagcatcttaacaatgcctacctcatggtgtccaagttgatctgatttcactcacttttgtc

SEQ ID NO: 145846 - DNA, 408 bp, Zea Mays
ctcctgtatacacagtttattcctgcattttttgggctattcaacatatgcaattgttctgtaaatagaggcacattgagtagttctattcaacatatgcaattttttcagacaaatgatagctattcaaggagcaagaggctgctcaacataaagcatcaacagcaacctctggaacagctgaaaatgctctactggaagctaagtcagtgactgatcttaaatctaaagatttggagaagaaaagggagctttgttcactgatacaagaagttggagtgcttttgtgaaggcttttgcgaatcacttgaagtgttagtacttttgtgaatgattttgtaaagtgttcgcaaatatgtgcaaaacataataacatgtgtaggttttgtgaatgattttgttgtggtg

SEQ ID NO: 145847 - DNA, 118 bp, Zea Mays
ataaagccaaaaaggttaacggcgaagatgaaatgcgatgaggaataaacgggtaagacaaaaggcgacgcaatcaatgagagaacggaaaaagacgccactgtttagtggagctatt

SEQ ID NO: 145848 - DNA, 234 bp, Zea Mays
atggcggtccagcttaattatgcagatgaccatgatggttccaccttcgttcccgcaagaacactctctgaacaaggccggagcacaggctgcttcgctggttggctggttctggttgtgaagcacagagacgcggtatacggaccggagttcgtcaaggatgacgggaggaacgagctcagcggtttcagccttgctcatatgaaggatgtcgacgatactgaacttgactga

SEQ ID NO: 145849 - DNA, 868 bp, Zea Mays
atggcggtccagcttaattatgcagatgaccatgatggttccaccttcgttcccgcaagaacactctctgaacaaggccggagcacaggctgcttcgctggttggctggttctggttgtgaagcacagagacgcggtatacggaccggagttcgtcaaggatgacgggaggaacgagctcagcggtttcagccttgctcatatgaaggatgtcgacgatactgaacttgactgaaacgatgaagattcggatggtgattcagacgaccgacgagtatgcggtcaaggaggaaggagaggaggagaagtagaactgcttggccaggtttctgcagtttcatttgtgttggcagatgcattttctggggtctcatcgagtatgtggattttttttattattataatatagtagtagcataggatgagagtctcatagcctatcatcaacttgattctaacacacttttgcagtgtcgagcatatgcttgtcattagatgtttcaggcgtgctctgcttctttcaatcatggtatataacgttcatggtagtgtgtttatgggttaccaaggttaggtcacaatttctaaggggctgatttggtgaacagagaattggagaagatccatgagaaggaatcctcttggtattcaattttaaataacaagaggatccctttccataaatctcatctaattctctggtcaccaaatcagtcccaagaacttatttggatcagccgagtctcgacgagtccacagacccactttgttatatttttctcgttgagctgtagatgggtaggtactgccaggttctacagcaatttgaatgtttgatctattcacgtaacaacacaggtgtatcattt

SEQ ID NO: 145850 - DNA, 2207 bp, Zea Mays
ctgacctggtccgtccgccacaacgcagtaccgcaccaccaccaagcaccgcaaccggagccggagccagaggagggcgagaggccgaggggagaggagcgaaggaggccgccgaccgaccgtgcgtccggccccgcggcggcgtcggcaggtcgtagacggcagacgaggagcagcagcagcacgaggcggccgggcccgggccacgccatgccggagaaggaggcgcaggccgccgcgttctgcggcgaggcggtgatcgccgagttcgagtccctcacgcgggacgccgccgccgtgcagcgcgacacgctgcgccggatcctggcagacaacgcctgcgccgagtacctccgctgccggggcctcgcgggccgcaccgacgccgccagcttccgcgcctgcgtgccgctcgccacgcacgccgacatcgagccctacattgcgcgtatcgccgacggcgacacgtcccccgtgctcaccgccaagcccatcacctccatctccctcagctccggcacgacgcaggggaagcgcaagtacctgcccttcaaccaggagctcgtcaagtccacgatgcagatataccggacttcctacgccttcaggaacagggcgttccccgtggaggacggcaaggcgctgcagttcatctacggcagccggcagttcaccaccaagggcgggctgacggcgacgacggccaccaccaacgtgtaccgcagcgaggagttcatgcccacgatgcgcgccatccagtcgcaggtgtgcagcccggaggcggtgatcttcggcgccgacttcgcgcagtcgctctactgccacctgctgtgcggcctgctgtacgccgacgaggtgcgcatcgtgtccgccaccttcgcgcacagcatcgtgctggccttccagaccttcgagcgcgtgtgggaggagctgtgcgccgacatccgcgcgggcgcgctgtcgcccgcgcgcgtcgccgcgccggccgtgcgcggggccgtggaggcgctgctggcgggcccggacccggcgcgcgcagacgaggtggcgcgccggtgcgccgggctcagcaactggtacggcgtcatcccggcgctgttccccaacgccaggtacgtgcacggcatcatgacggggaccatggagcactacgtgaagaagctccgccactacgcgggcggcctgcccctcgtcgccgccgagtacggcgcgtccgagggctgggtcggcgccaacgtggagcccgagacgccgccggagtccgccaccttcaccgtgctccccaacatcgcctacttcgagttcatcccgctcaaggcggccaccggccacggcggcggcactgccggcgacacgtgctacgccgaggctgagcccgagcccgtcgggctaaccgaggtcaccgtcggcgagcactacgaggttgtcgtcaccactttcgcagggctgtaccggtaccgtctaggggacgtggtgcaggtggccgggttctacaactcgacgccgaagctcaagttcgtgtgccggcggaacctgttgctgagcatcaacatcgacaagagcagcgagcaggacctgcagctggccgtggacagcgcggccaaggtcctggcggcggagaagctggaggtggtggactacagcagccacgcggaggtgtcgcgcgacccgggccactacgtggtgttctgggagctgaacgccgacgccggcgacgacgtgctgcagagctgctgcgacgagctggaccgcgccttcgcggacccgggctacgtcgggtcgcggagggcgcgcggcatcggcccgctcgagctgcgggtgctgcagcgcggcaccttccagaaggtgctccgccactacctctccctcggcgcccccgtcagccagttcaagtcgccgcgctgcgtcggccgggccaacaactccggcgtcctccagatcctctccgccaacgtcgtcaaggccttcttcagcgccgcctacgactgaacccgctgcgttcggtggcgacagatcctcaggtagttgtagactctgcatgcagctgtgctgctgtgtattcacaggattccaggtgctcgatctgcgcgtagatgacgcatcgcatttgtgcctgtttgcaaagttagtagtgtcgtctttggatcgagtgaaataaaacccctattaattagtaatcaaaacacttttacagtgtagttcataga

SEQ ID NO: 145851 - DNA, 2200 bp, Zea Mays
ctgacctggtccgtccgccacaacgcagtaccgcaccaccaccaagcaccgcaaccggagccggagccagaggagggcgagaggccgaggggagaggagcgaaggaggccgccgaccgaccgtgcgtccggccccgcggcggcgtcggcagacggcagacgaggagcagcagcagcacgaggcggccgggcccgggccacgccatgccggagaaggaggcgcaggccgccgcgttctgcggcgaggcggtgatcgccgagttcgagtccctcacgcgggacgccgccgccgtgcagcgcgacacgctgcgccggatcctggcagacaacgcctgcgccgagtacctccgctgccggggcctcgcgggccgcaccgacgccgccagcttccgcgcctgcgtgccgctcgccacgcacgccgacatcgagccctacattgcgcgtatcgccgacggcgacacgtcccccgtgctcaccgccaagcccatcacctccatctccctcagctccggcacgacgcaggggaagcgcaagtacctgcccttcaaccaggagctcgtcaagtccacgatgcagatataccggacttcctacgccttcaggaacagggcgttccccgtggaggacggcaaggcgctgcagttcatctacggcagccggcagttcaccaccaagggcgggctgacggcgacgacggccaccaccaacgtgtaccgcagcgaggagttcatgcccacgatgcgcgccatccagtcgcaggtgtgcagcccggaggcggtgatcttcggcgccgacttcgcgcagtcgctctactgccacctgctgtgcggcctgctgtacgccgacgaggtgcgcatcgtgtccgccaccttcgcgcacagcatcgtgctggccttccagaccttcgagcgcgtgtgggaggagctgtgcgccgacatccgcgcgggcgcgctgtcgcccgcgcgcgtcgccgcgccggccgtgcgcggggccgtggaggcgctgctggcgggcccggacccggcgcgcgcagacgaggtggcgcgccggtgcgccgggctcagcaactggtacggcgtcatcccggcgctgttccccaacgccaggtacgtgcacggcatcatgacggggaccatggagcactacgtgaagaagctccgccactacgcgggcggcctgcccctcgtcgccgccgagtacggcgcgtccgagggctgggtcggcgccaacgtggagcccgagacgccgccggagtccgccaccttcaccgtgctccccaacatcgcctacttcgagttcatcccgctcaaggcggccaccggccacggcggcggcactgccggcgacacgtgctacgccgaggctgagcccgagcccgtcgggctaaccgaggtcaccgtcggcgagcactacgaggttgtcgtcaccactttcgcagggctgtaccggtaccgtctaggggacgtggtgcaggtggccgggttctacaactcgacgccgaagctcaagttcgtgtgccggcggaacctgttgctgagcatcaacatcgacaagagcagcgagcaggacctgcagctggccgtggacagcgcggccaaggtcctggcggcggagaagctggaggtggtggactacagcagccacgcggaggtgtcgcgcgacccgggccactacgtggtgttctgggagctgaacgccgacgccggcgacgacgtgctgcagagctgctgcgacgagctggaccgcgccttcgcggacccgggctacgtcgggtcgcggagggcgcgcggcatcggcccgctcgagctgcgggtgctgcagcgcggcaccttccagaaggtgctccgccactacctctccctcggcgcccccgtcagccagttcaagtcgccgcgctgcgtcggccgggccaacaactccggcgtcctccagatcctctccgccaacgtcgtcaaggccttcttcagcgccgcctacgactgaacccgctgcgttcggtggcgacagatcctcaggtagttgtagactctgcatgcagctgtgctgctgtgtattcacaggattccaggtgctcgatctgcgcgtagatgacgcatcgcatttgtgcctgtttgcaaagttagtagtgtcgtctttggatcgagtgaaataaaacccctattaattagtaatcaaaacacttttacagtgtagttcataga

SEQ ID NO: 145852 - DNA, 2228 bp, Zea Mays
aagtggggcgtgcactcaaacccctcatccccatgagaccgcacgagttggagcaaggctcagtgcccgcctgcccccgcatgccgtgcgatgccatggaggcgcgcgtccctgggcgtcgtcacgtcctcactccttgtccgtctgcctgtcgccttgtctcgccttgcaggtcgtagacggcagacgaggagcagcagcagcacgaggcggccgggcccgggccacgccatgccggagaaggaggcgcaggccgccgcgttctgcggcgaggcggtgatcgccgagttcgagtccctcacgcgggacgccgccgccgtgcagcgcgacacgctgcgccggatcctggcagacaacgcctgcgccgagtacctccgctgccggggcctcgcgggccgcaccgacgccgccagcttccgcgcctgcgtgccgctcgccacgcacgccgacatcgagccctacattgcgcgtatcgccgacggcgacacgtcccccgtgctcaccgccaagcccatcacctccatctccctcagctccggcacgacgcaggggaagcgcaagtacctgcccttcaaccaggagctcgtcaagtccacgatgcagatataccggacttcctacgccttcaggaacagggcgttccccgtggaggacggcaaggcgctgcagttcatctacggcagccggcagttcaccaccaagggcgggctgacggcgacgacggccaccaccaacgtgtaccgcagcgaggagttcatgcccacgatgcgcgccatccagtcgcaggtgtgcagcccggaggcggtgatcttcggcgccgacttcgcgcagtcgctctactgccacctgctgtgcggcctgctgtacgccgacgaggtgcgcatcgtgtccgccaccttcgcgcacagcatcgtgctggccttccagaccttcgagcgcgtgtgggaggagctgtgcgccgacatccgcgcgggcgcgctgtcgcccgcgcgcgtcgccgcgccggccgtgcgcggggccgtggaggcgctgctggcgggcccggacccggcgcgcgcagacgaggtggcgcgccggtgcgccgggctcagcaactggtacggcgtcatcccggcgctgttccccaacgccaggtacgtgcacggcatcatgacggggaccatggagcactacgtgaagaagctccgccactacgcgggcggcctgcccctcgtcgccgccgagtacggcgcgtccgagggctgggtcggcgccaacgtggagcccgagacgccgccggagtccgccaccttcaccgtgctccccaacatcgcctacttcgagttcatcccgctcaaggcggccaccggccacggcggcggcactgccggcgacacgtgctacgccgaggctgagcccgagcccgtcgggctaaccgaggtcaccgtcggcgagcactacgaggttgtcgtcaccactttcgcagggctgtaccggtaccgtctaggggacgtggtgcaggtggccgggttctacaactcgacgccgaagctcaagttcgtgtgccggcggaacctgttgctgagcatcaacatcgacaagagcagcgagcaggacctgcagctggccgtggacagcgcggccaaggtcctggcggcggagaagctggaggtggtggactacagcagccacgcggaggtgtcgcgcgacccgggccactacgtggtgttctgggagctgaacgccgacgccggcgacgacgtgctgcagagctgctgcgacgagctggaccgcgccttcgcggacccgggctacgtcgggtcgcggagggcgcgcggcatcggcccgctcgagctgcgggtgctgcagcgcggcaccttccagaaggtgctccgccactacctctccctcggcgcccccgtcagccagttcaagtcgccgcgctgcgtcggccgggccaacaactccggcgtcctccagatcctctccgccaacgtcgtcaaggccttcttcagcgccgcctacgactgaacccgctgcgttcggtggcgacagatcctcaggtagttgtagactctgcatgcagctgtgctgctgtgtattcacaggattccaggtgctcgatctgcgcgtagatgacgcatcgcatttgtgcctgtttgcaaagttagtagtgtcgtctttggatcgagtgaaataaaacccctattaattagtaatcaaaacacttttacagtgtagttcataga

SEQ ID NO: 145853 - DNA, 415 bp, Zea Mays
agagcctccactccagcagtcagtcggccggcgatacatatatatactagagtcatggagacgatggcggcgaggtacggcggcggggagatcagggacctgcagagcaagcaggaggcgccgggcgggtgcgggagctacttccagatgccgctgcactacccgaggcacagccgggaggactacgaggccatgcccgagtggcagctcgaccgcctcctctccgagtatggcctgcccgtcgccggcacagtccaccagaagcgcaccttcgccataggcaccttcctctggggcgccggcggcattatccactgagctcaaggtcttgtttactgtgcatgtgcttgacataacgagcttgtatcccaattcccaacagaacacggcaccgtccatgtgctctttctatttt

SEQ ID NO: 145854 - DNA, 488 bp, Zea Mays
ggtaattgtatcgactccaccttatctgctgagatcgtgttcgctgttgaagttggagaagctcaaagcacatcaattcaagcctacctagcaggtgacgttggatccctacgagcatgaccatgcatgtgttgtgggcggttataagatgcccaagaagcagaaggctatctgatcacctcatagatcataatcggcgctcatcttgtctaataaggatgcttctttgtattgtggttttattaagatgtttgcatgatagtgatggttacaatatagtggtggttagttgcaatatagtggtaaaatagctagattaaaataacaaaatttatatatggctagaagcctaggatcacaaatagattatgatttttttataataatataacacatatttatatataaattattatgttttgcaacgcacgggcatttacatagtattttttaaaaacgaaagaaattcgaaataaaaaacaaaaaat

SEQ ID NO: 145855 - DNA, 510 bp, Zea Mays
gtcgtttctcacggtgaacaagtattccccagtgtgaaaaaatgtgcaagcaagaactgtttcgcaaccggagacatagcagtcgttgaaggtctgataggtcacctccgaaggctcaaagaaaacctagggttcattacaaatagagttaccacactttaggctaccatggacagctggcaatcagagcagataaacaagagcttgtactacctttcatttctctccatgacattccttcctaaggtaagctcattgacccttgtttttgggatgaatgttggtggcgtgccatggacagagcaaaacaagaatcctagaaaccgggatggcttcatgaatgtcatgctgatatgaactgtgatcttgctacttctattaaaatgcttcttgtttccttcgttatattctcatgggacgacatggagaacacgacgtgaactggcctagagcagttctcagaacaagaagcatctaaaactcttcaaaggccagtggcggctgtctcgc

SEQ ID NO: 145856 - DNA, 1231 bp, Zea Mays
cccctcgtgcagttcacacactctcctctgacctctcctctcctctcctctcgacctctcccttctatctagccaccgaagccaagaccaaggaacggcatggctcagctgctgcacctgccggacctcgcggcggcgcggccgccggcgcggaggaggaggggtgtggcggtggcggtggcgggggggcgcgtcaagcagggggaggcggggcgggtgatcagggtcgccgaccccgtgcgggagggccggatgccgcctcctcttcttgccgcgccggccacgccgtcggagtctccgccggtcgcggggaggcgcggggacgaggacgacgaggtgaggcagaggtactacctcaacatggggtacgcgatccggacgctcagggaggagctccccgatgtgctctacaaggagcccagctttgacatctacagagatgacattgtcttcacagaccctttgaatacattcaagggcctggaaaattacaagacgatattctgggcgcttcgttttactggccggatcttcttcaaggcattgtgggttgatatagttagtatatggcagcctgctgagaacattatcatgattcgctggatcgcccacggcattcctcgagtaccttgggatgggcatggccgcttcgatggtgcttctgtgtataaactcgacaaggatggtaagatctacgagcataaggtccacaatgttgctatgaatccaccaacgaagttcaaggtcctaccagtccatgagctaatcagatcacttggttgcccctctactgcaaaaccaacttattttgaagcttcatcacaatatctgtgcgctgggccatcttatttgagattagcttggataagatgctacatctcattgtgccgcatgctttcgctcgcaaatctgggagaaggatagcctgggtttagtgatacctccaaattttgtattttcagtatgacagcacacatgttactaagtactattgagtcatgacagttgtatatatgaacactgatagtttatagaataagacctcttagttaaggtgtacaacacttgttattgattgttataagcatcagtcagcaaactagtctgacatgtttctgttcccagtatcgagagtggtgttcttgtggccgagtttagtgagcatatttgtgtcaaccctgcacattatatttatgatgtcatatatatgctaagaaaaacagaaaaaaga

SEQ ID NO: 145857 - DNA, 937 bp, Zea Mays
gctcctccctctatccacttgcaacggtcgagaggaagcggaggtccatatcgctcattcccgcccgtcccgcaaccaccaccgcggccgcggtgccatggcatccgccgccggcgccgccttgtgcccatgctctttctccaccgtactctcctcctccccctcaactcccttccgtcccgcaaggacgacgcctcgcccttctctccgcccgctgccgcgccgcgccaggctaccgctgcggccgggccactcgcgagtcggatcgtgtctgcaggtactgaggtgcctcccgaaatgcgactcggggaagccggacggaggaggagatgctgggttatcgggtcggaaggcggcccggccagcgggtcagggaggacccaggcggcccgcacagttcggcgcgtcgtcgtgcggactcgcattcacgacggtggcgggggtgataatgctccaggcatcgcagcaggcgcttgccgccacgcagttcgctggcctgcagcctgcggacgtgctgggggatctcggggacgtcagtacaggttttgcttcagctttcctgttgatcttcttttctgagctaggggacagaacgttcttcattgcggcactgttagcagctagaagttctggagctgtcatttttctaggcacatttggagctcttgcggtaatgaccattatatctgtagttcttggtcgagcattccactatgttgatggcatcattccgttcagctttggtggtactgatttcccagttgatgacattgctgcggcatgtctcttggtttattatggggttactacattacttgatgcagcctcaggtgatgatgaaaagatcaatgaggagcaagaggagggagatcatggtcatgtgaaactagtgctgaacttaagctacgtgatggcacggttggttagaaaaaactcg

SEQ ID NO: 145858 - DNA, 359 bp, Zea Mays
gccggagaagggagggggcggcggccgaccggccatggagaggcggcggcggcggctggaggggtagggtggcggcggcggttggaggggtagggtggcggcggcggctggacctagagctctggtaccatattggagagcgaatgaacagtagtcactacagtaaaccctaaccctaacagatatatacccctagtgggctgtgggctaggcccatgtacacaggtagctaacacattcttcttggcctattttttgcttataatgaaaccctcttggcctatttcttaaaaggaaaactaaaaactatgcaaaaactatatgtatgtaagttggactatgagaaacaggacattttc

SEQ ID NO: 145859 - DNA, 521 bp, Zea Mays
atttggtttccgggcaaaattgagattaacacatttcttcccacagattgcagttcttggtggctctttgctgggaacattcctgtctgaaaagattatagcatacattggagggagcctattcttggcctttgctgcgattaccatagttgagatagtgacttgaaaagggagttccagcttccacaattcataaaaagtactgatcttttgtcagggcaatgaaaaatcagcttgatcgtaatggtagtacattgatgtgttaccgaacatgattgtccacaggaacttcattgttcgtatgggacgtcctaggcttgcgtagagtgttttgtttctggtgatgagaatttctgcttctttatccaagaacaatgtttttgtcatcatcatgatttgtagtggaaacactgatagtcaggttggtcggaagatgggactgggagcaaaactatgaattccatgtagcttttgaacttcctcttacattatttacaagtatatgaatcagccttttcgta

SEQ ID NO: 145860 - DNA, 325 bp, Zea Mays
cgaggaggaagaagaagatgccgatcgatcgaagagctcccttcgatccaatccaggagggaaagtggtcggctgcagctgccggttcatggatacctctctggtgcagcaatggccgagatgctcacctgcacttgcatgggtgtgcatgacccgggagacgaaccgaccatcatctttccctcgtgcttggattgaagggagctcctctctctctctctctcttatttccataatttatatattgtttgtagatagtttatctttctttctatctcttgtttgcagagatatacatggagatgccaagcgcatggaagtttga

SEQ ID NO: 145861 - DNA, 91 bp, Zea Mays
gctcaagatattcaggcgggccgacatttttgaaagtcggactttgtttgctcgtggattacctttccatcgagctgctactctagaaaac

SEQ ID NO: 145862 - DNA, 2625 bp, Zea Mays
cgtgtacggcagcacgagcactcagcttcaggtcacctcattcattcttgctcacctcgctggtgacttcttcttccctgccgtgttcgtgctcgtccccccctgcaagtgatgcccggtaccgcaatggaggcaccaaagcgtagctgctccccgtcggggcctcgtgggtgcgcgacgcccaccttcctcttctccatcgtcctgctgctggcactggcagtcgctgcttcggtgacggacaccatcctcccgggcgcgggcatctccgggaaccagacgctggtgtccaagaacggcgacttcgagctgggcttcttcttgccgggcgccggcatccaccgcttcctcggcgtccgcttcaagaagatgccgggcaccagccccacgttctgggtcggggacagggtggtcatctccgacatctcagccgcggcgctggaggtcttcggcggcagtctgtgcatcacggaggccgggtctaccctctggtgctcgtccgtcgcgggagccgggccggggcccccgccgccgtccgccgccgcagccgcggtgctcctcggcaacggcaacctggtggtgagggaccaggccgacgacgcatcgtcgcgggtgctgtggcagagcttcgactaccccggcgactcgctgctccccggcgcccggctggggctcgccgcgggaacgggggccaacgtctcgctgacgtacagggacttctcgcacaacggcagcctcagcgtggacccgagcaggaggaacggcttcgtgctcagcaccgacgggcatcccagcagcctggggaccttcccggactggatggtgacgtcacaggacaacggcacctcgctggtgctgaaccctcctccggacagctctaacctgaccgagttcttgcagttcagcctggggcaagtgagcctgatgcggtggtctgcagcggcgaacacgaacagcagtggctgggtggctcgctggaccttcccgtcggattgcaaatccagtggcttcttctgcggtagctttggtgcttgcaggagcaatggagaatgcagctgtgtccgcggatttgagccttcctatccagcggagtggagcctcggatacttcgcaaccggttgctcgagaccgagatctcttccgctgagctgccagacgaacggccagactgaacaagacgactcctttatcctgctagacaagctgcaggggctcccgtataatccccaggatggtttagcagcaactgatgaagactgcaaacaagcctgtctcagcagatgctactgcgtcgcgtatgcgtatcactccggatgcaagctgtggtactacaacctgtacaacctgagcttcgcttccagaggacctcctccatacagcaaggtttatgttcgttggggctccaagctcaggcccaagagtggtctgcgcacagggctgattgtatccatggtggtcgggtcagtagcgttggctgccgtgatagtgatactggcgctcctatggcgatcccggacctggagaggtgtatttacttgcagtcgcagagagtttgaagcaggaggttctctcgcgttctactcttacgcgcagatgaagaaggctacaaggaacttctccgacaaactcggcgagggagggtttggaagcgttttcaggggaacaatggcaggaccaaccgccgtcgccgtgaagaggctcaaacgcagcgggcaggcggacaagcagttcagagccgaggtgcagacgctcggggtgatcaagcacgccaacctcgtccgcctcctgggcttctgcgttagaggagacacgaggctgctggtctacgagtacatgccgaacgggtctctggacgcgcacctcttctcggagagatccgctcgtctgagctggagcctccgctaccagatcgcgctcggcatcgcgaagggcatcgcctacctccacgaggagtgcgaggaccgcatcatacactgcgacatcaagcccgagaacatcctgctggactcggagctccgcgccaagatcgccgacttcggcatggcgaagctcctcgggcgcgagttcgactcggcgctgaccaccgtccggggcaccatggggtacctcgcgccggagtggatctccgggcggccggtcacgaggaaggcggacgtctacagcttcggcatcgtgctcctcgagatcgtctcggggaggaggagcacggcgaggctgaggtccgggtccgggagccaccggtacttccctctccacgcggcggcgcgggtgagcgagggagacgtgctgtgcctgctggacagtaggctgggaggagacgcggatgtggaggagctggacgtcgcctgcagagtcgcctgctggtgcgtacaggacgatgagggcgaccggccgtcgatggggcaggtcgttcgcatgctggaaggcgtcgtgagcgttgcagtccctccgatcccgtcttcctttcagaacctcgtggagggcgagggcagcgtcatatactctgacgaagaatgagggctctgtttagggatgaataaattcaaggcaaacagacagaaccgtagcgctagttctaaatagtttttgctgcaaatatacacgatccatgggcgggcatttcgt

SEQ ID NO: 145863 - DNA, 3519 bp, Zea Mays
ggtcccggcatccatcagtgcaagggcaaggcagttggccgccgcgcccccgccccgcgggtctcccctcctgctccggtccagggcgccccggccccccctcgtccgaatcccgtcggtggtgagccgccgccgggtgtggcccgcgagctgcgacgcgccgacgatgctgccaaacggagaagctccctccggatccatgccgccggtgcctgccgccgacgcgaacacctctaattcagatgacactagatttgatgcgtcacagtatgccttttttggcaacaatgtgctggaggagattgaactaggcggattcgaagatgataacagcagtaatgctgctttcgctggactcgatgatttagagcgcccactttcttctcaggggattgcactagaggctgaagatagttcattttcagatcttgatgatcttgcaaatacattctcaaagctaagaagagatgttaacctaccaaagcatattggggtaaataaccttgggacttctttttcaagagaaagttctgctgctgctgactgggcgccggaatttgaatccccactctggtccgatcagcatgtgctagttgctaaccaaggaccgaatggcaatggctggtggtctccacagcatcattcttctctccttgctgattccagattgcacagaacatcctcatcccctcagcaacaggaacaacacaatcatgatgcacctattcttggaccaaggccatctcctttgcaccggacatcttcatacccgcaaaaggagcctcagtacaacccagctgaagtcattccaaatgcaccatacatgtcaaactatctacctggtgggccacccaattcagtgcctcgacaaccacatcagatgaacatgccatctttcaatgaatttcagatgcatatgtctgcgcaaagtgagaccccattctcccagtttcctcgtggagggacacctccagagccattatttggtggaaaccggggtcatatgatttcaacaggcttctcaactaacagcagtggacaacgagaccatctgctgaataatgggcagtttcatggggaaactgccagcatcatgccaaatttgctgccaaaccatctacaacgtccgaatacattcatgccccctcaattgttgacagtacgccaacagcatggcatgctcccaattcagcaatcttcaaagcagtcatcaagaacacagacacacatgtttggcccccagcatccaccacaaatgatgaataggtttgataattttgggatgcctgagttcagtgatccaagagcaagatcatcaatgcaccatggcaggcaaggtcaacattttcctctccatggctctgagtttggtattatgaagatgggtaatgggaggtcaaggtttagatccaagtatatgtccactgaagaacttgaaaacattttaagaatacagcatgccgccactcatataaatgatccatacatcgatgattattaccatcaagcttgtctggccagcagatatgtggatgcaaggtcgaagcaccgcttctgcccaaccttgattcgtgatccatcatcctgtacacggagtaaggatgagccacatgcataccttaaggttgatgcccttgggagactgccattttcttctgtacggagaccgcgtccactccttgacgttgagccagcttctgcaactgatgatgacaccgttatttcaaagcctcttgatcaggaacctctgctagctgctaggatcacgattgaggatggactctccctattacttgacatagacgatattgaccgcttgcttcagtttagccagcagcaagatggtggtttcgaacttaaaaatagaaggcaatctctacttggtcagctggcagaatcgctgcagttggttgatccactaggtgcaaataaaaacacacatctgtccgcaaatgatgatttggtatttcttcgcattgtttctctacccaagggccggaaactactttcacgctatatcaacctcatggtacctggtagcgatcttgcaaggatagtttgcatggcagtattcaggcacctgaggtttgtgtttggaaatctgccctctgatgacggcgcagctgagacagtaactaaactggctagcgctgtagcatcatgcattcgcgggatggacttaagtggcctcagtgcttgtctcgcagcaattgtgtgctcgtctgagcacccaccccttcggccccttggccatgctgctggcgatggtgccactgtcgtcataaaggctgtcctggatagagcaacagagctcctcaccgagcagcctgccgcgccagactatggcgctccaaaccgagccttgtggcaagcgtcgttcaatgccttctttgggctgctcactaagtactgcatgagtaagtttgatagcatggttcacacgatgcacaagctcggtgctgctgctgcaacagcgatacgcaaggaacttccggttgagcttctgcgcgccagccttcctcacacggatgagcagcagcgcagactactgctcgagttcgcccagcggaccgtgcccgtctctggccatggctccgacgggtgacggacgggcgggtggcggctggtggaaccatggcatctgaaacaataccagcttaaggtggtcagcgaatattggtgcgctagatgcggtattttattctatcatacgcagacctgcccaatgaatcgagcgttccttgagctgcagttcagatgggcatgccggcgttaagtggatgtatgtcccaggtttggatccgtctgtttaggctaatagtattctctctgcacggttgcatcgcatcaccactggatagattagcatgattagcttccgtctgcagggctgtgtttcgttggctctgggtgggaacggaacccccctgcacgttccttgaaggcaattgcaagaaaatactgcgagctgttggtgtttcggtttgcagtgtttgtttgtagtggcgtcaaggcttccaaggttctcatctcatcactccggacgggtgccaggaagatgtggtttaacacatgtataaactagcaaatgcttggaaggttgatatttggttctgtagccagccattcgaagattgttgggtggggggttttgtttcctgttatattcgcaactgaatacattatcttgcgaagctgttcagtctgtaacgagttcattgggaattccactatatatccttgttatggatggtcaggagctttgtatttttgtgattctgggtattacccttgtgttccataaaggacgctttcttcctcgctcctgaatccattgcatcgtgtcctgtccgaatgggtgatctacacttttagctttgcctttgccctctaaagataatagtcaaattaaaggactggattcaagaatcatcattttctaaaagtcgatttggaaaacaactctagacctgtttttagtggctttcgaatggaactgtaaaaacatatatcgaaaaa

SEQ ID NO: 145864 - DNA, 519 bp, Zea Mays
atgccgagcggaggcaccggggtgacggaggtgccagggcggctctcgccgccagagcgagccaacggtctaggctcaggcgctgtccagtggacaggatacaggggaggggcggcacgaccaccagagggcgaccatggccaaggggaggagtgctcccctgcgctagcagaggaagaggggtgtccagcagagctggaagaagtcgtggagggggaagatgccatggatccaagggagcttggattcgagggaggctgggcgctagaggcactgagtggacttgaggcatgccacacaatggaagcgtggagtcgggcgggaggcggagcacccgttccggcgaagaatcccggtggccaggagcgcgattccacccaggcgaagccgcgacgagcatccgtgtgcgcttggcttcctcccgagtcaatccccgagggctggacgtgggtggtggagcacgacctcggagagaagtggcccgacgatggaagatctatatcggcgaggaatccctag

SEQ ID NO: 145865 - DNA, 991 bp, Zea Mays
cggccagtgccccggctccctcccctccggttctcacccctcttcctcctcgcctctgggtcccgacgccttccgccgtcggtcggagcagcacctccgccacgccaccgctgggtcccgctgtctccagccatcgccgcttcacctccgccacctcaccaccgggtcccgtcgccatctggctgctgctaccggttgtcctgcaccgcccagacgcgtccttctccgttctccatccacctccatctgctgactatcaactccattcgtctccaggtgcaatggcgtggcgaggaagcgcgggaggagccggtacggctgggcgcggtcgcctggtctgcaacaatctgcatcctgggaggccatgagagaaaataaggtgagggagagttgatgattcgtgtagattcgagacaaccatcagtcgaccctacaagattgctgccatgaagaggaagatagaaaacagctcgaacatgacatccatagggaatgcagtcacgttgcaaagcaccacaccaacaattacgttgagcaatatatggaataaattcatgattgttcttcgtgcttcctctggaatgtactactggaacctcttcttcacgattgatggcccgaatatgccaacgcaagcctcaaaggttcaaaaaccaagaagctgaagacaacctccaattaatatgtgcttcctttcaccaaagacgtccatactaggatgttggagacaccacggaggataatggtgacaatcgatattgagaacacaatctgcatgtaaccttgaaccttgagcttgcgggctaatagacgagatgtaatggagctagccaacatggatgacaacatgagtgttgcaaaaataaaaccatgaggaatgttttcttcatttaaactcaatgcaggagtccccaggacgacaattgtgtacatcaagccctcaaacaacgactgtatggctccccataatgaatcttttgatcctaagcaa

SEQ ID NO: 145866 - DNA, 780 bp, Zea Mays
catcgccgcttcacctccgccacctcaccaccgggtcccgtcgccatctggctgctgctaccggtgcaatggcgtggcgaggaagcgcgggaggagccggtacggctgggcgcggtcgcctggtctgcaacaatctgcatcctgggaggccatgagagaaaataaggtgagggagagttgatgattcgtgtagattcgagacaaccatcagtcgaccctacaagattgctgccatgaagaggaagatagaaaacagctcgaacatgacatccatagggaatgcagtcacgttgcaaagcaccacaccaacaattacgttgagcaatatatggaataaattcatgattgttcttcgtgcttcctctggaatgtactactggaacctcttcttcacgattgatggcccgaatatgccaacgcaagcctcaaaggttcaaaaaccaagaagctgaagacaacctccaattaatatgtgcttcctttcaccaaagacgtccatactaggatgttggagacaccacggaggataatggtgacaatcgatattgagaacacaatctgcatgtaaccttgaaccttgagcttgcgggctaatagacgagatgtaatggagctagccaacatggatgacaacatgagtgttgcaaaaataaaaccatgaggaatgttttcttcatttaaactcaatgcaggagtccccaggacgacaattgtgtacatcaagccctcaaacaacgactgtatggctccccataatgaatcttttgatcctaagcaaga

SEQ ID NO: 145867 - DNA, 384 bp, Zea Mays
caagttcgtcaaaggcaagccggcgcggatcgaggccaagtacgtcatgagcacgccccgggagtgggaccgcttcatgcgcttcatggagcggtactcccaggccaacggcctccagttcaagaactgaagcaactcacgagcctgctttgagatcgattgcctgcctgctacgctacgttctgcttgcttgctagtgttctttttttttctttcctttctcccctgtgctgcgcccctggtgttgtgacctgctatgtgcttgtgagtgaatttttttttttgtaggggaaagaaagaaatatgggaggtttgttttgctctgaacgttcatattttgattatggcccacggctagcaggactgttaattctcgatcggact

SEQ ID NO: 145868 - DNA, 1338 bp, Zea Mays
tcgcagcgcgaccagacctctcctccgcctttcccgtgtcgtgtcccccgcagcaatcaccgcgagggtttcttccaatcccgttcgttccgttccagttccagcatggcggagcagccgcaggaaggcggcgcgagccccaagcacgagtccctgatggagaagctcgccgacaagctccacgtcggcggcggcaagggcgactcctcgtcctcggactccgacagagacgagccgccccacccctcggcgccgcccaccgacgaggtcaagcagccctcattctccgactccaccgccacggcggccgccgaggccaaggccaaggtgttccgcctcttcggccgcgagcagcccatccacaaggcgcttggtggaggcaagcctgctgatgtgttcctgtggaggaacaggaacatctccgccggagtacttggtggagccacagcaatctggatcctatttgaattgcttggctaccatcttcttacttttgtttgccatggtctcatattctctctgggtgttctctttctctggtctaatgcttcatcgtttatccacaagtctcccccaaagatcccagaggtggtcattcctgaagatttagttgtcaacattgcggtatccactcgttatgagatcaacagggcctttgctaatctccgccgaattgctcttggccgggacattaagaagttcctaatggttattgctgggctttggttgctttctgtccttggaagttgctgcaacttattgaccttagtctacattgtgtttgtggtgctgcacacagtacctgtcctgtatgagaagtatgaggatcagattgacacctatggcgagaaggggtgggttgagattaagaagcagtacgccgtgttcgatgagaaggttctgagcaaagtaccaaggggtcccgcgaaagacaagaagcactagaagaagtgattcgaggtttggctctcagtagggaatggtagcaatcggtttgagtctcatcaggagacagcgcttgtgggtatgaagcgccaatttgccacctatgcatcgtgttgtgtatggctgctttttgtttgatatttgatgggagtagccgaattgctagctttacccttcatcagcgatgcatacacagcatacggtttttcggtagtgctgtttgattttgatctgtgttgtaagatgtcatgccaagactgtacctgagacactgtttttgataccgatgcagtttggaatttgatggtttttgtgctcttttggtgagcttaggtaacagcatgcttcttgagagtggcaacacgaaaacggcagaaacatggttcttgggtt

SEQ ID NO: 145869 - DNA, 1255 bp, Zea Mays
tcgcagcgcgaccagacctctcctccgcctttcccgtgtcgtgtcccccgcagcaatcaccgcgagggtttcttccaatcccgttcgttccgttccagttccagcatggcggagcagccgcaggaaggcggcgcgagccccaagcacgagtccctgatggagaagctcgccgacaagctccacgtcggcggcggcaagggcgactcctcgtcctcggactccgacagagacgagccgccccacccctcggcgccgcccaccgacgaggtcaagcagccctcattctccgactccaccgccacggcggccgccgaggccaaggccaaggtgttccgcctcttcggccgcgagcagcccatccacagcaatctggatcctatttgaattgcttggctaccatcttcttacttttgtttgccatggtctcatattctctctgggtgttctctttctctggtctaatgcttcatcgtttatccacaagtctcccccaaagatcccagaggtggtcattcctgaagatttagttgtcaacattgcggtatccactcgttatgagatcaacagggcctttgctaatctccgccgaattgctcttggccgggacattaagaagttcctaatggttattgctgggctttggttgctttctgtccttggaagttgctgcaacttattgaccttagtctacattgtgtttgtggtgctgcacacagtacctgtcctgtatgagaagtatgaggatcagattgacacctatggcgagaaggggtgggttgagattaagaagcagtacgccgtgttcgatgagaaggttctgagcaaagtaccaaggggtcccgcgaaagacaagaagcactagaagaagtgattcgaggtttggctctcagtagggaatggtagcaatcggtttgagtctcatcaggagacagcgcttgtgggtatgaagcgccaatttgccacctatgcatcgtgttgtgtatggctgctttttgtttgatatttgatgggagtagccgaattgctagctttacccttcatcagcgatgcatacacagcatacggtttttcggtagtgctgtttgattttgatctgtgttgtaagatgtcatgccaagactgtacctgagacactgtttttgataccgatgcagtttggaatttgatggtttttgtgctcttttggtgagcttaggtaacagcatgcttcttgagagtggcaacacgaaaacggcagaaacatggttcttgggtt

SEQ ID NO: 145870 - DNA, 95 bp, Zea Mays
ggtgtcggcgccgtcgacgaggaggcggcggaggtcctgctccacccggtcgacggtgacccccgcggccctggaggaggccgaggcgccggcgg

SEQ ID NO: 145871 - DNA, 2017 bp, Zea Mays
tcgtttgggccaggagccccgcacgagcacccagccccagccccagccccgttctcggcttctcgcgtcttcttccccctttccgttccaattccaactgcaactggccgcgcccgccgccgccgcggttcccgtagctggggttcagacgctccgtcctactcccgcgccacgtctcctctgggccacttaacaatctcggtaacgcacgacttccccgccagtttcagtcccgcccccgacatcttccaccaccgggtccggggggccatctgccgtgcttgccaccccgcggtcgcgatcgatgattcctcgagagcagccgccaggtatgttccggccgccgaatgcctttggggcgccgcccccctttcttcctcagcctccaccgttgcagtggcagtggcagcaaccgcccccgcccccgccctcgccctcgccctcgcctgcggttaccttctggcagcgagacaatgtgcgggatcatgtgaggaagctgcaacagaccatcgagttatcaactgcgctaataaaagagctcgaggaaattgcggcggccggaaatcctggtgatggtgccacagaaacacgaaaatctgcttcgtcctcggcggaattgccgtgggggtccggcgattcttcagaggacaagcgcctcggtttcgttgagctggctaggtccatggggattagtcaggacactcatgagtcgatggcaacagatgcagccaattacctttgccaccagcttcagcatcttcttgggcctatctcttctgcgacgagccaaagtggcccctgggaggagaggtcggcgatggttaggttgactcagaagctgcagaaatctaagagaaataagcggtggcggcagaggagaaggaagcatgttgcggagctttttcagaaggagcgtgcggattatgatagagttgaccgggaagctgatgaatggagggctaagcaaatagccaaggacattgcaaagcggagggtggaaagcatgcagcagattgctagaaagaaaacaaatgaggaaagaaagcgcctagaatctgagctggagcttgccctaatggtcgagaaacttcaggagcttcggtctataagagttcaaaaaatgaagaaacaaggccattttcttcctgaagaggatgataaatacctcgagcgtgttaaggctgcagttgaggaagaggagcgccaagctgcatctgctgctcggactgatgctgttaaggatgctattctgactgctgaggagtcaaggaagcctctacagtatacaaattctcaggaaggtggttctgaacagcctaaaagtggaccatctgaagacgaggaccagggagatggtgggatgagtgagagaaatgaccaggcaagccaaaaaacagaacatgaagatgaaggtcatagatttgaggggaaagggcatggacatcatgaccctgtcagcaatctgccttttgagttctaccattattatcatggaagtgactatgacatggggacactcattgaggtccgcagaatgtgggattctttcatcagacctggaggaagccgtatacctgggcactgggttccaccaccccctccagctgatgaggtttgggcatcttatttggtgcagcacaagtaaatcaccatgggtatgagaaatggtcttttctgcttcaaaaccaccggaatctttaatggttcctgcaaggtaatctagatacttaagttagaacttcgagttttgttagaatcctcggaattccgagatgtattggttattcctgccattaattgtcgttagttaacttcataaattatagaataggatgtattctacctcttggtacgtcatgtcaactaatgatatagagaagttgtataaagggtgcaagtgattgcagttacctgggttaaatttactacttcacccatttgtttgttgtataaacattttatcaattcttgattttcttccagactatgcatggattatctcgaagcttttagctgc

SEQ ID NO: 145872 - DNA, 3022 bp, Zea Mays
tcgtttgggccaggagccccgcacgagcacccagccccagccccagccccgttctcggcttctcgcgtcttcttccccctttccgttccaattccaactgcaactggccgcgcccgccgccgccgcggttcccgtagctggggttcagacgctccgtcctactcccgcgccacgtctcctctgggccacttaacaatctcggtaacgcacgacttccccgccagtttcagtcccgcccccgacatcttccaccaccgggtccggggggccatctgccgtgcttgccaccccgcggtcgcgatcgatgattcctcgagagcagccgccaggtatgttccggccgccgaatgcctttggggcgccgcccccctttcttcctcagcctccaccgttgcagtggcagtggcagcaaccgcccccgcccccgccctcgccctcgccctcgcctgcggttaccttctggcagcgagacaatgtgcgggatcatgtgaggaagctgcaacagaccatcgagttatcaactgcgctaataaaagagctcgaggaaattgcggcggccggaaatcctggtgatggtgccacagaaacacgaaaatctgcttcgtcctcggcggaattgccgtgggggtccggcgattcttcagaggacaagcgcctcggtttcgttgagctggctaggtccatggggattagtcaggacactcatgagtcgatggcaacagatgcagccaattacctttgccaccagcttcagcatcttcttgggcctatctcttctgcgacgagccaaagtggcccctgggaggagaggtcggcgatggttaggttgactcagaagctgcagaaatctaagagaaataagcggtggcggcagaggagaaggaagcatgttgcggagctttttcagaaggagcgtgcggattatgatagagttgaccgggaagctgatgaatggagggctaagcaaatagccaaggacattgcaaagcggagggtggaaagcatgcagcagattgctagaaagaaaacaaatgaggaaagaaagcgcctagaatctgagctggagcttgccctaatggtcgagaaacttcaggagcttcggtctataagagttcaaaaaatgaagaaacaaggccattttcttcctgaagaggatgataaatacctcgagcgtgttaaggctgcagttgaggaagaggagcgccaagctgcatctgctgctcggactgatgctgttaaggatgctattctgactgctgaggagtcaaggaagcctctacagtatacaaattctcaggaaggtggttctgaacagcctaaaagtggaccatctgaagacgaggaccagggagatggtgggatgagtgagagaaatgaccaggcaagccaaaaaacagaacatgaagatgaaggtcatagatttgaggggaaagggcatggacatcatgaccctgtcagcaatctgccttttgagttctaccattattatcatggaagtgactatgacatggggacactcattgaggtccgcagaatgtgggattctttcatcagacctggaggaagccgtatacctgggcactgggttccaccaccccctccagctgatgaggtttgggcatcttatttggtgcagcacaagtaaatcaccatgggtatgagaaatggtcttttctgcttcaaaaccaccggaatctttaatggttcctgcaaggcacacggatacaggctgtctctggtggtgcgcacctatgtgttgagctgagctggttggttggcggtttgcatgaacaacgcacaggcagaggcaggaaacaagccaacgcccaacggcaacaagagaaaaaaccccaagacctttccaagccagcaggcaacagcgcaccaatcccgacgcgaatcgcccagaacgcgaggcggaatttcccatcctcttggacccccccccccccccctctgttcttcctccttcccccgctcctcgtccacacgctccgctccgattccgcccgcgtccgcggacccagatccggcgcccgcgcccatggcgacgcgcaggcgaatgctcctcaaggtcatcatcctcggcgacagcggggtcggcaagacctcgctgatgaaccagtacgtcaacaacaggttcagcaaccagtacaaggccaccatcggcgcggatttcctcaccaaggaggtccagatcgacgaccgcctcttcacactgcagatatgggatacggcaggacaggagcggtttcaaagtcttggtgtggcattttataggggagctgactgctgtgttcttgtatatgatgtcaacgtatccaagtcatttgaaaagctcaacaactggcgtgaggaattcctaattcaagccagcccatcagacccagagaatttcccatttgttgtgcttggtaacaagatcgatgttgatggtggtaacagccggactgtttctgagaagaaggctaaagcatggtgtgcttcaaagggaaacatcccctactttgagacgtcggctaaagagggcttcaatgtagaggctgcatttgagtgtatagcgaggaatgctgtaaaaaatgagccagaagaagatatgtatcttcctgatacgattgatgttgggggcgctggaaggcaacagcgttcgtcaggttgtgaatgctagaagatatggagcactgcgaattgctcggttggttggtctgattctctagggcttgttgtttgggtggcctgtgtcatcatttcatatatgtatttagtttgcaaaactgctatttgtggacactggatagtttggaagtctgcatgcgggtgcttattgtcgactcccgtgtagatgcagagaactcatttgtaactgccgtttcggtgttgtatcgtatctgcgctagatgctagtgttgtaacgcttttgattgttgatggattgcatatatgtactgtatttgtacatgaacagaacgtagtgcccattttcatagtgttcaattgttggttggtttggtattgttctttt

SEQ ID NO: 145873 - DNA, 1098 bp, Zea Mays
atggacgtgtcaccgttccttgcactgctgctcgttaccctcctttccctgctcttcttcctctccacttggaggaagaaacagccttctccgcccagcggcgtcggcgatggccggccgcttccgccgtcgcctcggggccttcctatcctgggacacctgcctcttctgggccccctgccgcaccggaagctgtgggcgatggcgcaggcgcacggccccgtgatgctcctccgcttcggccgcgtgccgacggtggtggcctcgtcggcggccgcggcgcaggaggtgatgaagacccgcgacctggcgttcgcgagccgccccaggatgcgcatggccgagcgcctcgtgtacggccgcgacgtggccttcgtcccctacggcgagcactggcgtcagagccgacgcgtctgcgtgctccaccttctcagccagcgccgcgtcagctccttccgccacgcccgggagcaggaggtcgccgcgatgctcgcccgcgtccgcgccgccgccggtggacgcgacggcgccgtcgtcaacctcaccgcccacatcatctcctacaccaacggcatcatctcccgcgccacgtacggcgacaaaggagggaggtactacgacgggcccgacggcggcgagaagctcgcgaagctgttcgccgacttcgaggagctcctggggaccgtcaccgtgggggagttcgtgccctggctggcgtgggtcgacgcgctcatgggcctggacgccaaggccacgcgcacgtccgcggagttggacgccttcctggagcgggtcatcacggaccaccgtcgtcagaggcgccgtggcggccagtgtgacggcgacgaccatcgggattttgtcgacgtgctgttggacgtgaacgaggacgaggcggacgccggtggtggagtcaagtttgacgacactacagtaaacgaagaaagttccgacggtccctctatcgccgacggcttcctacgaggccgtcggatattaccttatgtccgacggccaacaggggctctcggaaataagacgttatgtccgacggctactgacaaagccgtcggagataaccttatgtccgacggctag

SEQ ID NO: 145874 - DNA, 90 bp, Zea Mays
atgcgcagggtccaggacgagatccgcgccgccgtcggcatcgacgacgaccacgtcaccgaggaccacctcgaggagctgcgctacgtc

SEQ ID NO: 145875 - DNA, 153 bp, Zea Mays
atggatctggcgctggcgagcttgctctatcacttcgactgggagctgccggctcgagggccgtcgaggctggagatggacgagctgaacgggctgtccgtgcgcctcaaggccaacctgttcttggttgctaagccatggtgtcgtcagtga

SEQ ID NO: 145876 - DNA, 1819 bp, Zea Mays
tgcgagcgatgcgaccctagcgcacttgcagacatggacgtctcactctcaccgcttgttgcactgctgctggtcgctctcctctcccggctcatcctcgtcctcgccacaaggacgacaaagggtggttctccgtccagtggggacgacgatggccggcgccgactgccaccgtcgccgccggggcttcccctcctcggccacctgcccctcctcctcggctccctgccgcaccgtcgcctccaggcgatggcggcctcgcacggctcggtcgtgctcctgcgcatgggccgcgtgcccacggtggtggcctcctcggcggccgcggcgcaggaggtcatgaaggtccgcgacctggcctacgcgagccgccccaggctacgcatggcggagcgcctcctgtacggccgcgacatggccttcgccccctacggagagcgctggcgccaggcgcgccgcgtctccgtgctccacctcctcagccaccgccgcgtcctcttcttccgccgcgcgcgggagcaggaggccgccgcgatggtcgcccgcgtcagccgcacccgcgccgccgccgccgccgtcaacctcaacgccgccctcatatcctacagcagcggcatcatctcccgcgccgcgctcggcgtcgccgacgtccggacctacgggctcgacggaggcggcggcgccgccggcgagaatctcacgaagctgttcgacgacttcgaggcgctgcttgggacggtgaccgtgggggagctgctgccgtggctggcgtgggtcgacacgctgacgggcctacacgccaaagcggcgcgcacgtccgcggagatggacgccttcctcgagcgggtcattgcggaccaccgccagaggcgccgtgccggacgacaccgtgaaggtggtgatggcgatgatcaccgggacttcgtcgacgtgctcttggacgtgaacgaggcggagcacgatggcgacgacgctcgtggagtcctgtttgacgacgactccatcaagggcattatcttgaacatgttttccgccgccacggacacgacgtacacgacgctggtatgggccatggcggagctcatcaaccacccggacgagattcgcaggctccaggacgagatccgagcggccgtcgccggcggcggcggcgtcaccgaggaccacctcgagcagctgcgctaccacaggcgcgtcatcaaggagacgctccggctgcacgcgccggtgccgctcctgctgccccgcgagacgacggaggacacggagctccttggctaccgcgtcccggcgcgcacccgcgtccttgtcaacgcctgggccatcgcgcgggaccctgcggcgtgggagcgcgcggacgagttcttgccggagcgcttcgcggacgacgacatgaaggcgacggactacctgctcggccatcacttcaggttcgtgccgttcggcgcggggaggagagggtgccctggtgtcgggttcgccgcgccggccatggagctggcgctggcgagcctactgtaccactttgactgggagctgccggccggcgggccgtccaaggtagagatggacgagctcaagggtctttcggtgcggctcaagacgaccttgcacttgactgcgaagccatggtctccttagtaataagatcaccatgtcttcaaacggaacatcatgtgcacatgtgaagttgatgtaacatcctcttatatatataatatgtacttcgtgtgcataaagcagtgcgaaaatcattgagagtagtagttatctgttaagctatcatattgggactatctttatattaagacttcttaaa

SEQ ID NO: 145877 - DNA, 1989 bp, Zea Mays
caaacgttagccttttccaatcagggagagagctcaaacatggcactcgaacccgtcgccctcctgctcacggtcctcgtcgccgcgccgctcacggtcctcctcctcctcttcctcgtcgccggcaacaagaggcccgctcgtgctgcttctcccacgccgcgccaccgcttgaggctgccgctgccgccgtcgccgcggggcctcccgctgctgggccacctgcacctgctgggctcgctgccgcaccgcgcgctggcgtctctggcgcgcgcgcacggccccgtgctgctgctccgcctgggccgcgtgcccaccgtggtcgtgtcctccgcggccgccgccgaggaggtgatgcgggcgcgggatctggcgttcgcgaaccggcccgcgagcgccatggccgagcgcctcctctacggccgcgacgtcgcgttcgcgccctacggcgagtactggcgcatggtgcgccgcgtctgcgtcgtccacctcctcagcgcgcgtcgcgtcggatccttccgccgcgtccgagagcaggaggccgccgcgctggtcgcacgcgtcgcccgggacagcgccggtggcgcggccgtcggcctcagcgatctcctcaccgagtacgccaacgccgtcgtgtcgcgcgccgcgttcggcgacgagagcgcgcgcgggctgttggacgaattcgactccggccgtcggcacaggaaagtgctcaccgacttccagaagctcctggggacgacgcccgttggggaggtgctgccgtggctgggctgggtggacgccgtcacggggctggaggggaagatcaggcggacgttcgaggggctcgacgggttgctcgagaaggtgatcgatgaccaccggcggcggcctcgcagcggggaggacggcggtgaccgggacttcgtggacgtgttgctggacgtccacaacaaggaccaagagcacggcatccaactagagaccaacgaaatcaaggccatcatcttggacatgttctcggcaggcacggacacgacaacctcggtgatggaatgggccatggcggagctcgtcacccacccgcgcgccatgcggagagcccaggacgaggtccgcgcggcggcggccggctcaaccggcgtcaacgaggaccacgtcgcgcagctggactacctcaaggccgtgctgaaggagacgcttcggctgcacgcgccggtgccactgctggtgccccgggagccgccggcggacaccgagatcctggggtaccacatcccggcgcgcacgcgcgtgctggtcaacgcctgggcaattggccgggacccagcgacgtgggagcgcgccgaggaattcgtgccggagaggttcttgggcggcggcgccgcagccaacgtcggcttcaaggggcagcacttcgagctcctgccgttcggcgccggcaggaggatgtgccctgggatcgcgttcgcggagggaagcgccgagatggcgctggcgagcttgctgtatcattttgactgggaggtgagccggggccagaaccgggaagggacgtcgtcgctggacatgaccgagatgagcgggataaccgtgcatatcaagtcaggtctgccgcttgtagccaagccgtggagtggatccccttgaactagtaggagaaaaatattgtcagggcgcatgcttttttgcacgtaaattcgcgtctatatatatatatatatatatatatatatatatatatatatgatggtttatatttgaacttctatatatttgtgttattgcatttttattgttcatttatcaattattattattattattattattattattattattattattattgttattgtcgtcatttttcccttatttttctttggctcttcttctcatgattagccttgtgagctaagtatttcttattgtttgatgaggagccatcttgagtgagcattgatcttacccaatttttttgtttgtgtggtagtggaaaga

SEQ ID NO: 145878 - DNA, 641 bp, Zea Mays
tcctgatcacaagcaagcagcttattgaagcatgtaactggcaccgcaagtttgcaaggctatgcggatagcttgttggatgcgacagtcagacattttggtttagcaccgtctgctcagcctgaagaaaatgggttcaagggccacggcatgatggcgccttttacagcttgctggcagagcaatgatttgcaccctctgatcattgagagatctgagggtttctatgtctatgacattaatgggaacaagtatctggactctcttgcaggattatggtgcacagctttaggtggtagcgagcctcgattggtcaaagcagcaactaagggtgcatggttatgttgtccgattagatccatctatgaattgtttgtgcttctacatttaggaacaatgggcaattaggattttttatgtatgttttgaatgattcttaattgttgcagtaacagtgacaagataggttgtttaattatgtcctcattgcaatatcattggtaaagtaggcagtagtcataggatattctgtaccaaggttgctttttataggaattacttgaactaaataacaacaatgtatgatctgtctaggaataagattgtttatatcatattgtatacatgctgaaagtagcagc

SEQ ID NO: 145879 - DNA, 476 bp, Zea Mays
cgccccccatgtctggcagtgccaagcaaagtaggatttctgtagagttatgcgtccttcttgcttgcacatttgggggtgttctgttataatttacgttgattaattttcccctgcaatttggcagacatacaaacatttgctctctatttttctatccaacataattcatgatttaaataaaggaactatttcttaaaaattcttctatttagtttcttcctttggaaaacaactctgatactaatatgctgccccagttttacttctattttacctgccagtgaaagcatttggagattttcttttaatccatcgtgcaatagattcatggttgaatgctgatctttttgacctttagagcttataatttatttttttgctatatcttcctttctatttattaaccagaaaaagttaaaagtcgataaatatgtatcctaatcaatctaaatttaaacctcacttgtcagcat

SEQ ID NO: 145880 - DNA, 1843 bp, Zea Mays
aaacgttagccttttccaatcagggagagagctcaaacatggcactcgaacccgtcgctctcctgctcacggtcctcgtcgccgcgccgctcacggtcctcctcctcctcctcttcctcgtcgccggcaacaagaggcccgctcgtgctgcttctcccacgccgcgccaccgcttgaggctgccgctgccgccgtcgccgcggggcctcccgctgctgggccacctgcacctgctgggctcgctgccgcaccgcgcgctggcgtctctggcgcgcgcgcacggccccgtgctgctgctccgcctgggccgcgtgcccaccgtggtcgtgtcctccgctgccgccgccgaggaggtgatgcgggcgcgggacctggcgttcgcgaaccggcccgcgagcgccatggccgtgcgcctcctctacggccgcgacgtcgcgttcgcgccctacggcgagtactggcgccaggcgcgccgcgtctgcgtcgtccacctcctcagcgcgcgtcacgtcgggtccttccgccgtgtccgagagcaggaggccgccgcgctggtcgcacgcgtcgcccgggacagcgccggtggcgcggccgtcggcctcagcgatctcctcaccgagtacgccaacgccgtcgtgtcgcgcgccgcgttcggcgacgagagcgcgcgcgggctgttgggcgaattcgactccggccgtcggcagaggaaagtgctcaccgacttccagaagctcgtggggacgacgcccgtcggggagctgctgccgtggctgggctgggtggacgccgtcacggggctggaggggaagatcaggcggacgttcgaggcgctcgacgggttgctcgagaaggtgatcgatgaccaccggcggcggcctcgcagcggggaggagggcggtgaccgggacttcgtggacgtgttgctggacgtccacaacaaggaccaagagcacggcatccaactagagaccaacgaaatcaaggccatcatcttggacatgttcgcggcaggcacggacacgatagccacggcgatggaatgggccatggcggagctcgtcacccacccgcgtgccatgcggagagcccaggacgaggtccgcgcggcggcggccggctcaaccggcgtgaacgaggaccacgtcgcgcagctggactacctcaaggccgtgctgaaggagacgctccggttgcacgcgccgttgccactgctggtgccccgggagccggcggcggacaccgagatcctggggtaccacgtcccggcgcgcacgcgcgtgctggtcaacgcctgggctattggccgggaccccgcgacgtgggagcgcgccgaggaattcgtgccagagaggttcttgggcggcgccgccgcagctgacgtcggcttcaaggggcagcacttcgagctcctgccgttcggcgccggcaggaggatgtgccccggaatcgcgtttgcggagggaagcgccgagatggccctggcgagcctgctgtatcattttgactgggaggcggcgagccggggccagaacgggaaagggacgctgtcgctggacatgaccgagatgaacggattagccgtgcatatcaactccggtcttccgcttgtagccaagccgtggatccccttcaagaactaggagaagatattggagatatttggttttttactgcaaacaatgtgcttgattttaatgttattttagacatttttgctcttcttcgtccttctccctttttccctttttgtgtgtgtacgcttgtaaaaaaagacaaaatatcaaaataatctctactaccctatataatagaacgtgggcgccacatctccctggtgaag

SEQ ID NO: 145881 - DNA, 1475 bp, Zea Mays
cttttccaatcagggagagagctcaaacatggcactcgaacccgtcgctctcctgctcacggtcctcgtcgccgcgccgctcacggtcctcctcctcctcctcttcctcgtcgccggcaacaagaggcccgctcgtgctgcttctcccacgccgcgccaccgcttgaggctgccgctgccgcgctggtcgcacgcgtcgcccgggacagcgccggtggcgcggccgtcggcctcagcgatctcctcaccgagtacgccaacgccgtcgtgtcgcgcgccgcgttcggcgacgagagcgcgcgcgggctgttgggcgaattcgactccggccgtcggcagaggaaagtgctcaccgacttccagaagctcgtggggacgacgcccgtcggggagctgctgccgtggctgggctgggtggacgccgtcacggggctggaggggaagatcaggcggacgttcgaggcgctcgacgggttgctcgagaaggtgatcgatgaccaccggcggcggcctcgcagcggggaggagggcggtgaccgggacttcgtggacgtgttgctggacgtccacaacaaggaccaagagcacggcatccaactagagaccaacgaaatcaaggccatcatcttggacatgttcgcggcaggcacggacacgatagccacggcgatggaatgggccatggcggagctcgtcacccacccgcgtgccatgcggagagcccaggacgaggtccgcgcggcggcggccggctcaaccggcgtgaacgaggaccacgtcgcgcagctggactacctcaaggccgtgctgaaggagacgctccggttgcacgcgccgttgccactgctggtgccccgggagccggcggcggacaccgagatcctggggtaccacgtcccggcgcgcacgcgcgtgctggtcaacgcctgggctattggccgggaccccgcgacgtgggagcgcgccgaggaattcgtgccagagaggttcttgggcggcgccgccgcagctgacgtcggcttcaaggggcagcacttcgagctcctgccgttcggcgccggcaggaggatgtgccccggaatcgcgtttgcggagggaagcgccgagatggccctggcgagcctgctgtatcattttgactgggaggcggcgagccggggccagaacgggaaagggacgctgtcgctggacatgaccgagatgaacggattagccgtgcatatcaactccggtcttccgcttgtagccaagccgtggatccccttcaagaactaggagaagatattggagatatttggttttttactgcaaacaatgtgcttgattttaatgttattttagacatttttgctcttcttcgtccttctccctttttccctttttgtgtgtgtacgcttgtaaaaaaagacaaaatatcaaaataatctctactaccctatataatagaacgtgggcgccacatctccctggtgaag

SEQ ID NO: 145882 - DNA, 2267 bp, Zea Mays
aaagagaaggctccatgtaccaaaaaaaaaagtcatttctgtttatgtagtgcaaacatggctctcgaacccatcgccctcctgctcacggtgctcatcgccgcgccgctcacggtcctcctcctcttcctcgtcgccggcaacaagaaggccgctcgcgctgcttctcccacgccgcctcgccgccgtgatcgcttaaggctcccgctgccgccgtcgccgcggggcctcccgctggtgggccacctgcacctgctgggcgcgttgccgcaccgcgcgctgatgtccctggcgcgcgcgcacggcccggtgctgctgctccgcctgggccgcgtgcccacggtgatcgtgtcctccgcagccgccgccgaggaggtgatgcgggcgcgggacctgacgttcgctaaccggcccgcgagcgccatggccgagcgcctcctctacggccgcgacgtcgcgttcgcgccctacggcgagtactggcgccaggtgcgccgcgtctgcgtcgtccacctcctcagcgcgcgtcacgtcgggtccttccgccgcgtccgagagcaggaggccgccgcgctggccgcacgcgtcgcccgggacagcgccggtggcgcggccgtcggcctcagcgatctcctcaccgagtacgccaacgccgttgtgtcgcgcgccgcgttcggcgacgagagcgcgcgcggactgttggacgaattcgactccggccgccggcagaggaaggtgctcagcgacttacagaagctcatagggacgacgcccctcggggagttgctgccgtggctaggctgggtggacgccgtcaccgggctggaggggaagatcaggcggacgttcgaggcgcttgacgggttgctcgagaaggtgatcgatgaccaccgccggagacctcgcaacggggaggacggcagccaccgagacttcgtggacgtgttgctggacgtccacgagaaggatcaagagcatggcatccaactagagagcaacgaaatcaaggccatcatcttggacatgttcgcggcaggcacggacacgacaaccacggtgatggaatgggccatggcggagctcgtcacccacccgcgcgccatgcggagagcccaggacgaggtccgcgcggcggcggccggttcaactggcgtcaacgaggaccacgtcgcgcagctggactacctcaaggccgtgctgaaggagacgctccggctgcacgcgccggtgccactgctggtgccccgggagccggcggcggacaccgagatcctggggtaccacgtcccggcgcgcacgcgcgtgctggtcaacgcctgggcaattggccgggaccccgcgacgtgggagcgcgccgaggaattcgtaccggagaggttcttgggcggcggcgccgcagccaacgtcggcttcaaggggcagcacttcgagctcctgccgttcggcgccggcaggaggatgtgccccgggatcgcgttcgcggagggaagcgccgagatggcgctggcgagcttgctgtatcattttgactgggaggcgagccggggccagaaccgggaagggacgccgtcgctggacatgaccgagatgagcgggataaccgtgcatatcaagtcccggtctgccgcttgtatccaagccgtggagtggatcccccttgaactagtagcagaaaaacattgatagggcgcattaaagatggcaatggatacctaaaatccaaatacccgacggacccgatataaaggtgggtatgggatgatttctctacccgcgggtatactaatgaataaaaacctctacctattggatagacggatacgcgtacgagttggtactatccatatctgtctacccataagtaaaatatacccacatcaatatcattataaccatttaatagagccaatcttagctaaaataaacccttctctagctatcatttgtctagataccaagttatgtgataatatgatttgttatatgtgaagttgaaatttttttatgtttatttaatattttgagtgattggtatattggaatttaagattttttagcgggtacgggttatccgacgggtaaaaatacccgcgcgggtactgatacgggtaagattttataaccgcaagcatatatgggtaacccgacgggtagaattttttaatgggtacaggtatggaatggtactacccgacgggtatgtacccgttgccatccctgggcgcatgctttttgcacgtaaattcgcgtcacggtgtattggtgtg

SEQ ID NO: 145883 - DNA, 497 bp, Zea Mays
acacaagccaaaccttgccagcccatgtcccaaacactactgatcaacgcatctgcggaggagcagctcctccagcgacaggtacgccgatgacgatgacctccatctccggcccagcggcctagcgtaaggccacaggatgttctgctggcggtgtttcagctccagttgctctcctgccgcgtccagatagagccgacggtttctcgttctagccttggagatcctgtcacactggttactcagatccccatacacatcaacgcctatgagctcagctgctctgctaaggaacggtttgtcactgaggagaagcaagccgatctcgtcttttatttcagcttcccttgtcggggctctgtgcgtcggtgagtgaatagcatctgcatccgcaccagctgagctgattctacagtcacggacagcagactgcgatgtttcgctggcctcgccaggatctttcaggatgtctgtaacacagagtggttgttcagtgc

SEQ ID NO: 145884 - DNA, 2619 bp, Zea Mays
cgccgtcgaggcgtcctccctcccgagtcccacgagcacggagcaccggcctccggttcagattcggtgacacgcacggcacggacgaacccaacggggcactgctcacgggaaagagagaggattcctccgccgcgtccgcgttggactggacagctcacgccgctgcgaaagcaaccagccagagccagatccgtcggttccaacgaaacatccattcacgcccgccaccggcatccccatctccgatccgccgcagccgcagtcgcaggcacgtcctcctctccggccacccggagcgcggcagccagcgagcgagccactgtggtcgccgtgcaggcaatcaaaagatgtcgtcaaggcactaaagaaacggattggccacaagaatccaaaagttcaacttcttgcactaactctgttggaaactgttataaaaaattgtggggatatacttcacatgcatgttgcagagagagatatattgcatgatatggtgaagatagtgaagaaaaagtctgatcctcgtgttaaagagaaggtattggtgctgatagatacatggcaagacgtgtttgggggatcacatgcaagatatccacaatactatgcagcataccatgagttggtgcgtgctggagctgaattcccgaagagacccgagaaacctgcacctttgtttaatggccagtctcaggcagcaaggaatatgcgtagtcctgaccaacaggaagcggaatcttctgctgccaatgattttcctgctttgagcatgtcggagattcataacgcttgtggtattatggatgtacttgctgagatgctgaatgctttagacccaggaaacagagaggggctaaggcaggaggtaattgtggaacttgtggatcaatgccgcacttacaagcagagagtagtgcagctagttaattctaccacggacgaggaacttatgtcgcaggggctcacactgaatgatgatttgcagcgtgttctagcaaaacatgatgcaatagcagcaggcattgcagtccgagtggagaaaaaatcgaagtctttgcaagcacttgtagagaccaaggattcgacaaaccaggattccaaaaaggagcaaggactcatagatattgaggatcccacaagtcaagatgctgcaaaagatccaaatcaaagtacaagtgaccaatctccttttgagcaattagctcttccagcaccaccagtgtcaaatggcgcagcaacttcagcaccacaatctgatcttggcattgatcttctgagctgggatgatacccctgctacaacacaaaatccacttgctcttgttcctgtcacagatcctcttgctgactctacttcatcaaatcaaaatgcgctagcaattgttgacacattttcagaaaacagcaccacgaaccacaacgctcaaccagctgacccctttggtctcaatccgagttctgctattccaggatctcagctatacaacacgccaactcagcagcctttccagtcacaacagcctccgcagcaggcggcgctctatgcgaatgggggtgctgtggaccctggaacgtcttacgatcaggcatcccagtttaaaaatgttagttctgggtggaatggtcaagctgccaaccctgttgtgcccctgccagagcaagcactgaattacgatgatcaaagtggaaaccttccaccgcctccttgggaggctcagccagcgtcaaacaatgaattgccaaatggccaattgggaagcttgcaacctctcccaggttcagctggccagatcggtggcatgcagcagccactgcaaccacaagttaaccacatgggagttccacaaagccagccaatgtatagtaaccaaccaatgcaacccggtcaggttgccgccacaacacagatgcagcctggcttcggaaaccagcagttcggttcgctaccaccaacatccatgctgggcatgcaattcggtggcatgcagcctccgcagatgtatggcggatcgcagccagtcatgatgtacccgcaacaaatggcagtggcccagtatggagcaatgccgcggcagcagccgacgtatggtggtcgattggcgggttacatgcagcatcctgctgtggctgccgcacactactacaacaaccaggggatgtatggctaccccggtgcgaacgggctgtcacagagcatgtatggcctctcggtgcaggacaactcgtccatggggatgaggtcgtcttaccagactacgacggcgccaccctccacggggcaacctatgaagccgacgaagcccgaagacaagcttttcggtgacctcctgagcattgccaagacgaagaaagcttcatgagacgagctggagcgggagcggccttctgatatatcgtctccccttttttttgtggtttttcgtgctgtttgatcttacacttgtaacattatctgaatgtgtaaacttttttggggtccttttcttttattcccacgtcgtgtgtgatcctattgatcccattggattcgttataccgtgtgcgtgtactgatcacgagcgatgggaaactttggccgtaaatgatgattcaataaagggtgtgcagtacgtgatta

SEQ ID NO: 145885 - DNA, 2522 bp, Zea Mays
acagagaggtgcgcggccaacttgcctggtgcgggtggtttcgggcacgggcgagcgccatccgctcgctgccgatcccaatccggccagcagcggccgccccgccaccgggcctccctccgaccgttccccccgcccgccatggctggttccatggtggaccgcgccaccagagacatgctcatcggcccggactgggctaagaacatggagatctgcgacatctgcaaccgcgaccccgggcaatcaaaagatgtcgtcaaggcactaaagaaacggattggccacaagaatccaaaagttcaacttcttgcactaactctgttggaaactgttataaaaaattgtggggatatacttcacatgcatgttgcagagagagatatattgcatgatatggtgaagatagtgaagaaaaagtctgatcctcgtgttaaagagaaggtattggtgctgatagatacatggcaagacgtgtttgggggatcacatgcaagatatccacaatactatgcagcataccatgagttggtgcgtgctggagctgaattcccgaagagacccgagaaacctgcacctttgtttaatggccagtctcaggcagcaaggaatatgcgtagtcctgaccaacaggaagcggaatcttctgctgccaatgattttcctgctttgagcatgtcggagattcataacgcttgtggtattatggatgtacttgctgagatgctgaatgctttagacccaggaaacagagaggggctaaggcaggaggtaattgtggaacttgtggatcaatgccgcacttacaagcagagagtagtgcagctagttaattctaccacggacgaggaacttatgtcgcaggggctcacactgaatgatgatttgcagcgtgttctagcaaaacatgatgcaatagcagcaggcattgcagtccgagtggagaaaaaatcgaagtctttgcaagcacttgtagagaccaaggattcgacaaaccaggattccaaaaaggagcaaggactcatagatattgaggatcccacaagtcaagatgctgcaaaagatccaaatcaaagtacaagtgaccaatctccttttgagcaattagctcttccagcaccaccagtgtcaaatggcgcagcaacttcagcaccacaatctgatcttggcattgatcttctgagctgggatgatacccctgctacaacacaaaatccacttgctcttgttcctgtcacagatcctcttgctgactctacttcatcaaatcaaaatgcgctagcaattgttgacacattttcagaaaacagcaccacgaaccacaacgctcaaccagctgacccctttggtctcaatccgagttctgctattccaggatctcagctatacaacacgccaactcagcagcctttccagtcacaacagcctccgcagcaggcggcgctctatgcgaatgggggtgctgtggaccctggaacgtcttacgatcaggcatcccagtttaaaaatgttagttctgggtggaatggtcaagctgccaaccctgttgtgcccctgccagagcaagcactgaattacgatgatcaaagtggaaaccttccaccgcctccttgggaggctcagccagcgtcaaacaatgaattgccaaatggccaattgggaagcttgcaacctctcccaggttcagctggccagatcggtggcatgcagcagccactgcaaccacaagttaaccacatgggagttccacaaagccagccaatgtatagtaaccaaccaatgcaacccggtcaggttgccgccacaacacagatgcagcctggcttcggaaaccagcagttcggttcgctaccaccaacatccatgctgggcatgcaattcggtggcatgcagcctccgcagatgtatggcggatcgcagccagtcatgatgtacccgcaacaaatggcagtggcccagtatggagcaatgccgcggcagcagccgacgtatggtggtcgattggcgggttacatgcagcatcctgctgtggctgccgcacactactacaacaaccaggggatgtatggctaccccggtgcgaacgggctgtcacagagcatgtatggcctctcggtgcaggacaactcgtccatggggatgaggtcgtcttaccagactacgacggcgccaccctccacggggcaacctatgaagccgacgaagcccgaagacaagcttttcggtgacctcctgagcattgccaagacgaagaaagcttcatgagacgagctggagcgggagcggccttctgatatatcgtctccccttttttttgtggtttttcgtgctgtttgatcttacacttgtaacattatctgaatgtgtaaacttttttggggtccttttcttttattcccacgtcgtgtgtgatcctattgatcccattggattcgttataccgtgtgcgtgtactgatcacgagcgatgggaaactttggccgtaaatgatgattcaataaagggtgtgcagtacgtgatta

SEQ ID NO: 145886 - DNA, 621 bp, Zea Mays
cttccttgcttggcttttattcacctacacccctagccgccactttctttctccctgttctcctctcggcgcgcgcccctgcgaacctccccagcaggccgacctctccttgctccatgccgacgccccctgttgctagctctgcacccatggcgagcagcccccctgcagcgagctcctcccttgcattgccgtcggacgtcgctgctactacctttctccctcgtcgcgcagcgagctccaccaccgacctgcgcagcaagccgcgcgctgcagcagcaccgttcttcgccttgcgtcgtcgtcgagcttcgccactctcctccccatgaccagcagccctcgcacactctaccctcccccaaaacagcaagcccccagcagccccggattccctcggtgtcgcttgcatgccacccgctcgatgtattgcgcagccacattgtcgctgctcgctgcccatcaacgcgcagcccctctgttttctccgttggcgcagcagccccgtcgtctccgcgcgctgccggctcgctgttttgtggagccaatggacagcacgccgtgacgctcgtcgggcgtttgctgtttttggcacagacccgctcgcgacgtcatcgaccc

SEQ ID NO: 145887 - DNA, 417 bp, Zea Mays
atgctgaatagtcttcacagcgacgagagcgagtgggacgatggcgaggtccgagcgcgatggaaagatctgcatggccggcgcgatgctgaggaaaactcgaccaggccacggcgagccgatgttgtagcagggaccaatggcgaaccccgtgttgagtacaaggaacgacagcgtcgaggcgaaggttggagacgacagccgggtgaggcgagcccgcggcagctggcatgctcgacgaccacagacacagctggggagggagcaagggcgacgtgtctgctgatgacaaaaagggacgcgaggttgacaacggcacaggaccctaaaacgtccgagcttgaagactgggcgcctactgctgccgatgctacagcgggaaggtgtgagtgcgtggcagagcaggacatgcactag

SEQ ID NO: 145888 - DNA, 646 bp, Zea Mays
ttcggcagcatgggcgcggttgagccgccggcgtggatgtccgccgcggcgcgcaggtggctggagaacgccggcgccacggcggaggacaccccgggccgggccttcaacgcgctgccgctctccggcgtgcgcgtgtccctcgcggagcgcggccgcgcgctctgctcgctccgcgtgccgccccacctcacggacgcggaggggaactggcacgcgggcgccatcgcggcggcggcggacgacgtgtgcgccgcggccatcatgtccgtggagggcatcatcaaggtctccgtccactacgacatctcctacttcacaccggccaagctccatgatgaagtggagatggatgggcgggtggtggagcacaaagggaggatgacggcggtggtggtggagatccggaagaagaaatccggcgagctggtggctatcgggaggcagtggatgacggcctccaggcccaaaggcgctgctgctcacagcaagatctgaactgaagcttcttccttccttccttccttgggtttcctttcctacctcgaaaactactgctctcgagtgaattgaactggctgtaattactaattactggggaaaaacacggtttaggttgctgtgatttgttactggcgtccccttt

SEQ ID NO: 145889 - DNA, 3048 bp, Zea Mays
cacgcgcgagccatgccgcaggtggccgcccctctccgcctcctcctccccctctcccaaaccctagcagcccccgcgcctctcctccaccactcgcgccgcctcctctcctcctgccctgcttcattaagccgcgccgctggcctccgcgccctcgcctaccgccgccgccggcacaccgaacctcgccgcgggaccagcacgctcgggaaggctcccgccaaggaggagatggacaaggaggtggctttcaacaggaagcgggccgaggggaaggacggagggaagcgcggcagcatggagctcaagacccgcaggctcaaccccgtcaacaccacatgctacgtgcagatacttggtacaggaatggacacacaggacacttcaccttctattctactattctttgacaaacaaaggtttatttttaatgcgggcgagggtcttcaacgtttctgtactgaacacaagataaaactatcaaagatcgaccatatcttcttgacccgcgtctgctcagaaactgcaggggggctcccaggcctggtgctaactctagcaggaattggagatgagggcatgtcggtgaacatatgggggccttctgatcttgactttttagctggggcaatgagatcttttatcccaaatagagcaatgcttcacacacatagctttggtgctgatcgaaatgcatcttcaccacaatctacagactccgttattgttcttgatgatgaagtagttcgggtatctgcaatgtttgtcaaaccaaaatacaataatggaactggtagttcaaacgatagtgacatgaagcctggtgatactgctatagtatatgcctgtgagttgccagaaattaagggaaagtttgacccatctaaggctgctgcccttggccttaggcctggtcccaagtaccgtgaacttcaacttgggaattctgtgcagtctgatcaatttgatgaaatggttcatccaagtgacgttcttggtccatcaattcctggaccaactgttcttctggtggattgccccacacagtatcatatgccagaacttttttcactgcacccccttagctgcttttatgaagattctccagaacaaagtggcaagaaagtaaattgcataatccacttaggtccatcacctgtgactagatctgttgactaccagaactggatgaaaaaatttggtgcaacgcaacatatcatggcaggacatgaaattaaaaacatggaaattcctatcttgaaaggtagtgcaaggatatcatcacacctcaattttgtatgccctcagcttttcccatcctctgggttttggtcggaacaaccttcaaatgatgtcatggaaaatgataagagtgtttcatcggaagcctgtggaagtgtgtctgcgcaaaacctcctaaagtttcatctgcgtccttatgctcaattgggtttggatagaacttctattccaaacttgttcacctacaaggattttgtagaagagcttgtatctgagatcccagcgattagagaagttcctgaacaggtttgcaaattctggcaaaataatgtgaatgataataatatactaacaccaactggcaatcatatgggtgaagaacaatggatcaataaaaaatcagataaggtagatgatggcactctttttcaagaaattgtcttgagaaagcatccaagggacaatcaggaaatcccttgttgtgtggaggatgcaacaagggaagatatggagatcacttttttgggcacaggttcatctcagccttcaaaataccggaacgtaagttccatatatattaacttatttgaacgaggaggtatacttctggattgcggcgaaggaactttaggacaactgaaaaggagatttggtgtaaatgatgctgatgaagctgtaaaaggtttgaggtgtatttggatttcccatattcatgctgatcaccacactgggttggccagaattcttgctctaaggtcgaaattgttaaagggggtgcctcataaacccttgcttgtgattggaccaagaccacttgagagattcctaaatgcatattctacactcgaacatcttgacatgcagttcttagactgcaggcatactttgaagtctagtgttgaggcctttctcagtgaaaatgatactgacccagccacacctcaactggagaccaccatgtttgcccctggaactagaatggagaactacaacaggaagcctgcaagtccaagggataccacagctcttgctaatttcaaagaagtcctacaggaatcaggtttagagattttgtacagcgtccctgtactacactgtccacaagcatttggagttgttttgaaggccatggaaaaagcgaacagcactggaaaggtaattccaggctggaaggttgtatattctggcgacacacgaccctgtccaggtcttatagacgcttccagagatgctacagtgctaatacatgaggcaacattcgaggacagtatgaaggacgaagcgattgcgaggaaccatagtacaaccaaggaagccatagaagtcggcacatcagctggagcgtaccggataattctgacccacttcagccagcgatacccaaaaatcccagttatcgatgaggttgatatggagaagacctgcatcgcctttgacctgatgagcgtaaacctcgcggatctgccggttgtgcccaaggttctaccgcacctgaaggtcctgttcaaggacgagctggtagttgatgaagccgaagaggtccaagaggctgctgtgtactgacatattgcatggataaaaatgatgtaaattaacttggatcgccttgtagcttagcgacattgtttttgacctgaactccagtccaattgaaggtctggatcatctgtctctgtgtctccctttaatggttgcatcgatttttacagttggttttgttgggtgagtgttgtgagttgagttgtgaaaataacaaagataattgtaattgttttgattgtgttggcgccgatctggacgctggtc

SEQ ID NO: 145890 - DNA, 2815 bp, Zea Mays
ggcaggattgcaggaaggcacaagaagggcaaaaggcaggcagacccgcgcgccattctctagaaccttccacggtccacctccctcgttcctccggcggcacgtgcccgtgccgctcggctcacccgcaaccctccctccacgcctctcctcgtcgacgagcggacccggtccacgcccccacccccttcccatcccaatcccagatcccggccagccctccgattcggccgcgaccgtggtgggttcggtccccctccgatcggggcagcagccatggatcagagccggcgggcggtggagtcgtactggcgctcgcggatggtggacggcgtcacggcggacgacgacaaggtcgcgcccgtctacaagctcgaggagatctgcgagctcctgcgtgcctccgacgccagcatcgtcaaggaggtcgccgacttcgtcctcaagcgcctcgacaacaagagctcccttgttaagcaaaaggctttacggttgatcaaatacgcaattggaaaatctggtactgatttcaagagggagatgcaaaggcactcagcggctatacgccaactagttcattacaaaggccaccctgaccccttaagaggggatgcccttaataaggctgttcgggaaactgcgaatgaggctattgctgcaattttctccacagaggaccctaaacctgctgtcgcaaccgaaagtcttggcaagcgcatacaaggctttggaaatactaattacgagccatctagagatgaaaagaagtctttccttagtgaacttagcgaagtagtgggtattggaagtgcatccatcaagcagggtttgagcaacttcgctgcagcgcatgcaataatgataaatgacaacggcagcacatacaagagccctaatctacgtaggtctttaaccacagaatctgaaaaatatggccggtatgatccaagtgaaattcaaagtgagagccgtgcctcatctgatgcttcaaagaacgtagcttctggttcttggggtccgacttccagttctgcaccatccgatgatactagctcaagtcaaccaggggttaaaactcgtgaagaaagacttctggagacaattgttactgcaagtggtgtgcgattgcaaccaacgcgagatgctctgcgggtttttttaacagaagcttccaaattggatgcagttgccttgagccgcgcacttgaaaacaaactgaattccccattatggcaggttcgcatgaaggctatttgtgtgttggaagccattgtaaggaaacaggatactgatccttattctatcattgcttcatatttcattgagaacacagcttctgttgttaaatgctctgagctgccacaggtttctctcagagagaaggcctcaaaggtcttgaatatgctgattggggaagagcctactggaaccacagcaacaaaatctgcaatggccacacctgttcagatgcctgatttgatcgatacaggtgatcaagatggtctggcaacaagttctggacaggaaagcaatggacaaaaaaatactgggaaagcatatgtttcttcagttgatgatttgcttggtggtgaacctattgctgatacaagtgtcactgctgatagcaatggaagcgatccatttgcagatgtatcgttccatgaggtagaggctaaggagactaatgatctcttctcaggattgatagtagaagaaaaatcatcagctaccatgcacggcagttcttcatcaaacaaaaatgaattaccagatatctttggcagcccccctgattctttcatccaaggtagtgttactgaccaaggaactgtcaatgatttgatgtctggtttgaaccttaatggaacaggtcaggctcatcctccagttaaagcagaacccaatagcaccttcagtggttcacagttctttgatacaaacaatgagatcggccatgtggcaagtgctgcagcattgaatggcattgttggtcaaaactcgttttaccaacagcagcagactcccttgcagtacagcttccctcaacatatgatgctcaatcaatcatttcctgggcaacaattaaattatggtgctatggggattcttcttgctcagcagcagcagttactgcaaaattttggaaatttcaatgctgaacttgggaattcttctttcaattcgatgaacagtggaaatgcatcagtgcttccagatattttcaattcaagtaatcaacctcaaaatcatgttgcagcgatgagcagttcgaagaaagatgacactagagcttttgattttgtttcggatcaccttgcagcggcacgtgcttcaagaaagtgaaccaggaagcgatgagcatgtccatatgctggcaagagctcaagtgcttgatggacacaaaagctgggactccaaaagctgcatctcgtcacagcctcgcagattggctgcatgatcacacacggctggtttggcatgggatcgggcgcatgtttgaacagttgagaaagaagggttgttccatacggttgaaagacgggatgttgtgtcgtactatgtacttagacaaagactgtttttttactctgaaaaataaattgcatcttccgactttccttatgttctgcccttttctctcttcctttttttattaaaaaaatgagtcagacaccatatacgtatttattacctcaggttttatttcttttctgtacaagtacatggaggatgtttttttttttgcggcaattgtaaagctttgggacacgaataagagggtgcaatatgatatgagctgctacatgatctttgc

SEQ ID NO: 145891 - DNA, 1845 bp, Zea Mays
tttttttctccacgaacaacatgtcagcctcccaaatggccataggaaattctctcaagagaggtcttttcacacagggaaacgaactgacgtggaaatcacctggcgaggttaatttccatgggttaattagcaagtagctactaaactagcccttacatgttggtcaggtacttgagacgagatcttctgcggagcccacttctgatcggttagtttgtaacacgtaaccaagcgtgacgcgctctcactcactcactatggcgtggcgcgagcttgcataaatagtcaccgaatcgaccgcgcaattcttttcttcggatcgaatcgaacgccgacccgagtaaggcgatcgcgcggcggctgaccttccccgccgcccaccgtcgaagacatggacaccgagtaccgcgccttgcagcaggggagcccctcgccgtggcgcacggcggacggcgtgtcgtcgtggggacccgcgcagcaccagaagcgacagcgatgccagggttcttcaagcgatcaagctggttccagctcaagtagttctctgcaaatttcagaacctgaaccacaacaaaaccaagaagaagattactatgtggaggatgattgtgatgcctatgatgaagatgattatgactttgatgaagctgaatttaacctgcaccttgctgataaatttgatgatttggatcttcctccaggcgtggaggctaatgtaccatggctgcaaaaaattccacccaaggaagtagtcaagcagccacctatatcaattactgcagacgagaatgctaataaatatgacaagttcaaacagtttgatactgttcagacattctctgaccatcactatgctaagaattctcatgaagagccaaccagagcctggtcaaagagagttcaacatgactggaaacttttggagaatgatctaccagcatatatttacgtccgggttgctgaagatagaatggatcttcttagggctgccattattgggcccaagggaacaccctaccatgatgggcttttcttctttgatgttcacattccctctgcttatccttctggccctccgttggtatattaccactctggaggacttcggattaatccaaatctatatgagaatggaagagtgtgtcttagcctgttgggtacctgggatggtagaggttgtgagaagtggaacccagcacaatcaacaatgctgcaagttcttgtctccattcaagctctcattttgaatgagaagccatattacaacgagccaggatatgagtccttcgccaccactccgaatggacagctgttggctttgaaatataatgacgatacctttctgtactcatgcaggactatgttatactcgcttcggaggcccccagagcactttgcagaccttgttgctggccactttcgggtgcatgggcacactattctcgcagcatgcaaacactacatggcgggtaatgatattggctcagtagtgccagaggaggaggaagagtcagcatcccgcagtgcaccaaaggcaaagccaggagtgatcaggacaatccctctgaacagacgctacgcaggctcatttgatactagcttgaaggtgctgtacgaagatcttctgatggaattcaatgtgaagggtgctgacacgaggaagttcatgattgagaagttgaagaaggaccaacctgcaggcacctgagaaaagcttggacagcttaagatagtgtttggttgaagagtcaagtagaacgaagccgttctgttccagttttgttgttgtttggttacaaagtaagtagaacgaaatatctccaattagagaatattctcctc

SEQ ID NO: 145892 - DNA, 3780 bp, Zea Mays
ccggaagctctctccccggcggtaggggacggagacggagacggagacggagacggagacggagatggtgccgggcccaccccagttgtcgacggaggcagacatggcattatcttattccggtccaccacgaccttcccgacgggccgcggcggcacacatttgatccccccctcccccacatggcaccgcacctcacccctccaccactccctcctcccgtcctcctcccgtctcgccgtcgcctcctgctcctcctcttccgccgccgacgtcgccgctagctgccgcttttcgccgtccggtcacactagcacagccagcagcagcaaggtttcatcccatggacttcgacccctcccccgcctccgcccacggggacggcagcggcggcgcctggcccttcgactcgctcaccacgtccatgctcttctcctccgtctccgcctccccgcagctgccggccagctcctcgtcctggctcaccccgccctcgccgctctggctcttcgaggaccgccacctgctcccgctcgacgccccctccgccgcgccggaggcagccgtcgcagccgccgtcgtcgaggaggtccagcgggcacgctccgggaattctcacactacaggcaagagagttgatcaaatcaatcacaagtggcagtttcatctatctctggacgaagatggcacagataactctagcttcttcaaggagaagcttacacaagcccttcggtacttcaaggagtccacagatcaacatctgttggtccaagtctgggcaccagtcaagaacggagaccgctatgtgcttactacttcaggacagccttttgtgcttgaccaccagagcattggcctacttcagtacagggctgtatccatgatgtacatgttttcagttgatggggaaaatgctggagacctgggcctacctgggcgtgtctacaagcaaaaggtgcctgagtggacaccaaatgtgcagtactatagcagtggtgagtatcaacgacttaaccatgcgatcagttacaatgtccatggtacggttgccctgcctgtttttgatccttctgctcagtcgtgtattgctgtcgtcgaacttataatgacatcaaagaagataaactatgcctgtgaggtcgataaagtctgcaaagcacttgaggcggtaaatcttaaaagcactgaaatactggaccatccaaatgtccagatatgtaatgaaggccgtcaagcggctctggtcgaaatactagagatcttgactgtagtatgtgaagagcacaagcttcctttggcacaaacctgggttccttgcaagtatagaagtgtattggcacatggtggtggtttaaagaagagttgcttaagtttcgatggaagttgcatgggggaagtctgcatgtcaactagtgatgtggcgtttcatgtgattgatgctcatatgtggggatttagagatgcatgcgtggagcatcacctacagaggggacaaggagtttctggaaaggcatttatctcacacaaaccttgcttttcaaaagatatccgcaagttctgtaagttggcatatcctcttgtacactatgctcgcatgtttgggttgtctggctgctttgcaatatgcttgcaaagttcttataccgggaatgacgactacatattagagttctttttgccactcgattgtattgacgaagatgaccaaaatgccttactggagtctatattaactctgatgaagcggtgtcttcgtagcctaaagctagttgatgacaatgatttgagtggggtttctcttcaccttagtaatgtgctaaaacttgagaatgaagaatccaaaacagatgcacagtttgatggttcccttcgcgaatcacctgaggatgatagacatggaggatcccacaagtttgataatgagaaccagaaagttttggatatcacagagggacaattgttgactgatgactactctcaagacaatggtacttctgttggcagaccaaatggtagtggtgcttctgattcttcattgcttcacaaaaccaacaaaccccctgaaagaagacgtgggaaagctgaaaagactatcagtttagaggttcttcagcaatatttttctggaagcttgaaaaacgcagctaaaagccttggcgtttgtcctacaaccatgaaacgcatctgccggcagcatggaatttctcgttggccatctcggaaaattaataaggtcaacaggtctctctcgaaattaaagcaggtgatcgagtctgttcaaggctccgatgcggcatttaatctcacatctatcacaggtcctcttcctatacctgttggcccttcaccagagtctctcaatgtagagaaattaactcaaagtaaagtggcagaactttcgaatcttgctgttggtgttgacagagattctttgcagaagtcgcttgaaaatgatgaccattttgatatagtcatggcccagcaaggatttatagacaataacaatgacgtgcagcttgaagctgacaaagcttctcactcgagaagttcatctggagagggcagcataaattcacgcacttcagaaggctcatgccagggaagtccagcaaaccaaacatttgtttgtaagccaatcgcttcaatgttcgcagaacctcaacttaatcaagaggagttcaacaaagaaccttttcaagaaccacaactaccactttcaaggatgctgattgaagattctggtagctccaaagatttgaagaatctcttcacttcaacatcggaccaaccatttttggcccctcccaacaacttggtgtcaatgaagcattcagggactgtaacgataaaggcgagttttaaggaagatattgtgaggttccgtttcccatgctcaggtggtgttattgtattgaaagaggaggtagcgaagaggctaaggatggatgttggcacgttcgatatcaagtatctcgatgatgaccatgagtgggtaaagttggcgtgcaatgcagacttggaagaatgcatggagatctcgcggctttctggcagccatgtcattaggctactggttagcgatattgcagcacactttggcagttcttgtggaagctctggttgatatgcgtgtcagccttttgctttgatcaatgtagactcgaaagttcagttccacttggtagttttgttgctagttagctttagctgtttcattgtgtttgataaatgtatcattgtattttacccccaaaaaaatacatgtaattgtgcagaacgcacttgtagtcaactttgtatatatcatgtgctggaaattctatttcaagttataaaaactgaatttgttattgtctagaatttgcacagaacagtgttgggttaaaatgattacattgtattggaattgcagcagattttcgtaggtcataattccatgctgtaaacacgtttatacattttatttatatctttgtgatccatgaagttgagacgcatgctggttttaacttattgcggtgatagaattggcaacttcataaagtagtatcacttgcactttactccctccatttctttctattggatgtaatatattaaaaaaaattgaacttcaaagttttgacaaaatggttaaatgtgttaaattagcttcatgcttagtgtctaaaaatcatatcaataaaattcacatatctcacgtcttttaccatggcgttgattttatagaaactgtatatatatatatatattaatgtgttttataaaaaaaagaaa

SEQ ID NO: 145893 - DNA, 2745 bp, Zea Mays
gggccggggcccgaatcaagtttagtcctcgggagccctcgcgtgcgctctcttttcctgtgtctgctgccgacgaaagggcggccgccgccagacctccatcttcgtgaccttcgtaggcggcgagcacccaccaggagaaggcatggcttcacgcatgacaccttccaagaggccttttcagagaagatcttcagactacgatggccggggcaagtggcagaagacgaagcacccttctccacataaatctcagttcaaaatcgagcctggtgttcccattttccgtattctctgcccggcttcaaaatctggtaatgtgattggcaaaggaggtgccattattgcaaagatacgtcaagaaaccaggatgagaatcagggttgatagggcagcccccggctgtgacgagagagtcatcttcataactgctgccaacaaggatgaagaagctggcagcgagcaaggcggagagaatgacggaggtgctgctgcttctactggtggtgaccatgagaaggataaagataacaacagcaaggagcaaaacgttgatccagaggagaacaactgcaacgagcagaatgatgattcagagaaaggaagtggtaaggaagaaatagatggtttcgagaaagaccatggtacggaagaaaagaatgattcagagaaagaacacaataagggagaaaaggatgatcccttggttgcgaaagttacaaagttagaaccagagagggtaataccgttggcactgaaggccgtttcacttgtattcgataggatttttgcaactgaaggtaataatgaaactgggaacgcatctgctgcaagcgctcctgtttcgttgcgaatgttggtgctatacagccaagcaggttggctcctggggaagggcggtagtgtggttaagcaaatggcagcagataacggctgtgaaatccgtgttttgaaagacaaccttccgtcatgtgctctgttgaatgacaaactttgccagatcactggagagattgactcagtaaggaaaggtctcaatgctgtatctgaagtgctcttagctcatccacccaaggaaactgatgcagttgctgatgttcattcttctggatcatcgtcacgttctttgttcagccagcctgatggtcttccctctggaatgcaatctaacttccatatacctttgcaaggcccgccatcccaagccaatggaccttttgatatagttgatcttcaacctccaatacatggtcatgcctcagtggctatagaatccctctcctttaggatgctgtgtccacaagacaaggttggcagtataataggcaagggtggaaatattgttaaaaccattcaaaatgatacaggctgtgaaattaaagttcttgacactgttccaaaaacagatgatcgcatcataagtatatctggacctgcgcatccgagtgatggaatctcccctgcacagaatgccattctgcatgtgcagcgtaaaattatgttacctagctctgataagaaggaaggtcctgcaacgtgtaggctgatcgtttctggaaaccaagttggttgtgttctcggcaagggtggtagtatcatagctgaaatgaggaagctgtcaggagcatttatagtagtgttgagcaaagacaagattccaaggggtgtcccagagcatgatgaagttatccagataaacggaagttgtgaagctattcaagaagctctaatgcaggttacagctaggcttcgtaaccatcttttccgggacagaatgcctgcagtggggcctaatatgcggccaccttttggtttgttagatccccagtttggtccattttcgggaaaccatgaatcatcatccctgtttcataaagatttcatgggacgaccattggatgggattgctgctccttggacagtgaagggcatgcgggatctcagcgatccagtgtcaatatccgatatccctggagcagggcatagagaagctggtggatttccaggtcctggtcagccatctatgatgccaaacttgactgcagaggtcttggttccaagattagttatccctgttctctgcggtgaggatggaggttgtttggacaggatccgtgagttttctgaagctaagataactgtcgctgagcctacagccgatgcgatggacactgctgttttgatatctggcacaccagagcagatgcatgcagcccgaagtctcgttgaagcattcgttatgagcgaatcttttggcccatgacatgtccagaggcagtgaagctagcgatcatatgtgggttcatgtttgtgaatatgcgtcccagtctgtctgcagagtgacatatgctccaagtggctaattaggctgaatattcgactggagtcctctttctgtctgcagagtggcaaatgctccaggttgctagttatatataatcttccaaagtcgtcactttgactctgagatacggagcacattttgagtagccgcagaactatgttgcttatgcaaggaagtattgtttggacccggaaaggctctaactttatttttgttgtactgatgttgtgagatgtaccaccattgtctgtatttcagtccggctttatatctgtattttatggtattgctaccatagttaatatgacggtaaggcagcgaaaaggcgtaagccggggaatattaaatagtagaaatctttatctttatatatactaatataatgaagcagatgcaaactc

SEQ ID NO: 145894 - DNA, 732 bp, Zea Mays
atatttgatggacaaggccatgatgattctattgacacaagtgacttagaaaaatatttgacagatccaatattaaagattggtaaaaataatcagcatacttttgacatactagcctggtggaaagcacacaaagaataatatcctatcttgggccagcttgctcgtgacgtcttagctatgcaagtgtcaacagtagcttcagaatctgcttttagtgcgggtggtcgtgtacttgatccattttgtactcgccttgaccctaccatggtagaagcgcttgtctgcaccaaagaaaaggttgtataacagtaacatttctaggttccaaggctaagagtgttgctattcctaatatggtttgtaaaatggaggaacttgaggctcttgctagaaatctttcacttgaggatgaagacctagatgatgatcatgatgatggaccagaggcatcgttgtaagcttgttgatgaagacctagatgatgataatgcaatatgaatgctccaaatgttttttattgtacttgttgcgtaatgctttgtgatcttgcgaacttgggacttgtggacttgtggctttgtgtactttgtgatctgtgtgatgaacttgttatattgtaaacttgtcatctgtgtgattgacttattatattgtgaacttgtgatcaacttgttaaattgtgaacttgtgatattgtgaccttgtgatattgaaaattgtgaacttgtg

SEQ ID NO: 145895 - DNA, 1017 bp, Zea Mays
aacaaaattggcccggcccacgacattgggggcaatccaggctcagcccaactactctctcgtcctcttgttccactgtttcccaccccaaaatactccaccaccgcacccactagggtttccgcaccgcattgcagaacctcgccgcctccacccgcaccacaccaccggcgatgtccacagcggcggcgcagggcggcagcgacaagccggcgctccggaggcccgtcttcaccaaggtcgaccagctcaggccgggcaccaacgggcacaccctcaccgtcaaggtcgtcagcgccacccccgtgcctgggcgcgcgcgcccaggcgcacccgccgccgccccatcccgcgcgccgcgcatcgccgagtgcctcgtcggggacgagaccggcgccatcgtcttcaccgcccgcaacgaccaagttgacttgctgaagcccaatgcgacagtgatcttgcgcaatgccaaaatagacatgttcaaaggatcaatgaggcttgcagtggacaagtgggggcggattgaggctgtagagccagccagtttcacggtgaaggaagacaacaacctgtctctaatagagtatgaattggttaatgtggctgagtaactgtccaatccaagcgtttctgccccctttatttcgtgccataagaaggaagtaccatgaatgaacattataaagcctcttgaagcgaagcgagtttatttgctacggtggggtagataaaggtcaaggctgtatggcctgtgttagaactttggataaattaagatgaattgcccttgcatctatgagattgttatccatctttgtactgctcgtgttgctttgatgcaagaaatctgaagcaggaaatgcgtacccagtgctctggacactggcgtctgttgtaattgtgtggctaccccaaaagtgtgcaattaatatctttcgacggggtgtgatttagtactgatttaaactggttttttggtatcaacaatcacaaacggaatgtcgtttggccaag

SEQ ID NO: 145896 - DNA, 1556 bp, Zea Mays
ggcatgatctgccctcccatggtcaacttctcgctgctcttgggcgccgtcgtgtcctccgcgatcctctggcccatcctgcagggcaagcgaggggaatggtacgacgccgacgcctcgccatccagcctcagagggctgaacgggtacaaggtgcccatgggcatctccttggtgctcggggactgcctcttccagctggctgccgtcagcatcagggcagcgcggggcttccatcaccgccgtcagcatcagcaggatgaagatgacggtggtcagcagtccctgtcgtacgacgaccggcgcaggatccacaacttccagagcgaggggatgcccacccacgtgtcgctcgcgggctacgcgatcctggcaggcatcgccaccgtgttcctccccggcatcttcccgcagatcaggttctaccacgtggccgtgtgctacgccatggcgcccctcctggcgttctgcagctcctacgcttcgggcctcacggactggtccctcggcaccatctacggcaagctcgccatcttcatcttcggcgcgtgggtcggcgaggcgtctggcggcgcgatcgccggcctcgtggccggcggcgtggtggtggtcgtcatcggcaactcctccgagctcatgcacgacttcaagtcggcgtacctgacgctgacctcgccgctgtccatgttcgccagccaggtgatcggcaccacgctgggctgcatcctcaacccgctcctcttcctgggcttccaggagatggccggcggcgcggaccacctgggggaggccgggtcgctctacgccgcgcccatggccatggcctaccgcggcatcgcggacctgagcgtggaaggcatcaagacgctgcccaggcactccgtcatgctctgcgtaccttgcttcctcgtggcgctgtgcgtggatgccctggcggccgtcgccgcggccaacggctggaggatcaagggctacgtcccaaacatcatggccatggccatccccttctttgtggggccgaccttcgccatagacatgtgcctggggagcctcctagtcatcctgtggaggagaaggaacaagcaggcagcgaacctgctgtcggtcgtggtggcgtctggtttgatctgtggcgatgggctctgggcgctgccgtcttcgctgctggccatcttcaaggtggagccgcctatgtgcatgaagttcctgtccaactaccagactgagcagatgcggaagcacctcatcctagcagcagctgcacgccgaagaacaagttaattgttgtacccttacttgtttgagaacgaggaatgagaatggattgtttagtagctagccacacccacacactcctccttgttttccaagataaaataggcttgatagctcgatctagaatctagatagataaaacagcacacacgtctcttgcttcttgcaagcgtctaaatcaccagattatgctttatgattctacttgtacaaacatttagctcctgctatagtaaaactacacaatagtttatagtcaatgaaaaacatataaaaaggtc

SEQ ID NO: 145897 - DNA, 1597 bp, Zea Mays
atgggacgatgccgatgtgatgtcggagctatgggccgacgccgaccctattctatggttgcaaaatgggctggcccgttttctcagcccggtagggaagaccaagacctggtcacggaggaactccagcttctggaaccttccttccgctcacgacctcagtcccctcccaggcccaggcagccgccgcccgtctctctctcctccgagtcccttctcccaccgctgcaagcgctcgcccgagccacctccctctctccctgtgtcctgaccgtgatttgggcgtggcatcctaaggcggtcaagattcgagaggctggaagaaccaagcgtagggcctccgccaccacgtcgtcgtccgcgcgcgccgcccgccggcgcaaggaggcgccacagcctccgacgcctagggagatgggggccgattactacaaggtcctcggcgtcgaccgcggcgccggcgacgacgacctcaagaaggcctaccggaagctcgccatgcgatggcaccccgacaagaacactaccaacaagaaggaggcagaaaccaagttcaaggatatctctgttgcatatgaggtccttagcgatcccaagaaacgtgcaatctatgatcagctaggagaagaagggctcaaggggcagccgcccccaggagcaggaggttctggcgcattccccttcttccctggcggggctcattccaccgctccccattttaatcacaggagtgcggatgatatatttaaggagttctttggatcccctggcatgggtggcatgagagcggaaccaggattccagaggtcaatgtttggcaacgatatcttctcttcacgctttggcgctgagggttccaccagtatgcagcagccaccacgcaaggcagctgcaattgagaacccacttccagtcagccttgcagatctgtacaagggtgtcacgaaaaagatgaaaatctcaagagaggctatagatgccagcgggagaatctcaaacgcagaggatattctgacaatagaagtaaggcctggttggaagaagggaacaaagattacatttcccgacaaggggaatgaagctccaaacatgaaagctgctgatattgttttcatcctcgatgagaagccccatgatgttttcactcgggatgggaatgatcttgtggtgactgagaaaatctcgctggtggaagcgctgattggatatactgcacgtgtcactacgcttgatgggcggagcctatcattgcccatcaactcgataatccatccgagctacgaagaggtagttcctagagagggcatgccaatacccaaggacccctctaagaagggaaatctgcggattaagttcaacataatgttcccttctaggctgacgtctgatcagaaggctggtctcaaaaggatattgggttcttaggccgcctcaaatgacattttatagtgaaaggtattgtgaatatcgccagtaattggctaggtagattatttatttatttatgtaacatatctgtaacggatggttataatgtgtcagatttttatctcattattatttactgaaggctttcctacaggcgaagccatttttg

SEQ ID NO: 145898 - DNA, 1729 bp, Zea Mays
atgggacgatgccgatgtgatgtcggagctatgggccgacgccgaccctattctatggttgcaaaatgggctggcccgttttctcagcccggtagggaagaccaagacctggtcacggaggaactccagcttctggaaccttccttccgctcacgacctcagtcccctcccaggcccaggcagccgccgcccgtctctctctcctccgagtcccttctcccaccgctgcaagcgctcgcccgagccacctccctctctccctgtgtcctgaccgtgatttgggcgtggcatcctaaggcggtcaagattcgagaggctggaagaaccaagcgtagggcctccgccaccacgtcgtcgtccgcgcgcgccgcccgccggcgcaaggaggcgccacagcctccgacgcctagggagatgggggccgattactacaaggtcctcggcgtcgaccgcggcgccggcgacgacgacctcaagaaggcctaccggaagctcgccatgcgatggcaccccgacaagaacactaccaacaagaaggaggcagaaaccaagttcaaggatatctctgttgcatatgaggtccttagcgatcccaagaaacgtgcaatctatgatcagctaggagaagaagggctcaaggggcagccgcccccaggagcaggaggttctggcgcattccccttcttccctggcggggctcattccaccgctccccattttaatcacaggagtgcggatgatatatttaaggagttctttggatcccctggcatgggtggcatgagagcggaaccaggattccagaggtcaatgtttggcaacgatatcttctcttcacgctttggcgctgagggttccaccagtatgcagcagccaccacgcaaggcagctgcaattgagaacccacttccagtcagccttgcagatctgtacaagggtgtcacgaaaaagatgaaaatctcaagagaggctatagatgccagcgggagaatctcaaacgcagaggatattctgacaatagaagtaaggcctggttggaagaagggaacaaagattacatttcccgacaaggggaatgaagctccaaacatgaaagctgctgatattgttttcatcctcgatgagaagccccatgatgttttcactcgggatgggaatgatcttgtggtgactgagaaaatctcgctggtggaagcgctgattggatatactgcacgtgtcactacgcttgatgggcggagcctatcattgcccatcaactcgataatccatccgagctacgaagaggtagttcctagagagggcatgccaatacccaaggacccctctaagaagggaaatctgcggattaagttcaacataatgttcccttctaggctgacgtctgatcagaaggctggtctcaaaaggatattgggttcttaggccgcctcaaatgacattttatagtgaaaggcgaagccatttttgcgggctccggctcctcctgtgaaaatgtgaaaagggcttcggctcctcctggaggattatgcacgacaggagctcaggattatgctgtaggcaaacttcggtgtttactggcacaaatcaagtgggattaaaacttatgatagaatgcttatttcttctttggccatgctataaagatatagggcatggatgtgcagtttaaaagtctaatgatgagtgataatgtacacttataaaatctagtaatttattgaagcac

SEQ ID NO: 145899 - DNA, 3188 bp, Zea Mays
ctagccatctccatcaccaccaccattccattcccattctcctccccatgctcgcccgtgccgacgccgacgccggctctgcccccacaaagcgtacacaaaccttcctctgagccacaaccacccacggctccatagatctgccatggctgccagtgcctccttcctccccatcctgctcctcctcctgctccttgccaatgccgtccgcgcgctcaaccaggacggcgtccacctgctcgaagccaagcgcgcgctcaccgtcccgccgggcgcgctcgccgactggaacccgcgcgacgccacgccctgcgcctggacgggcgtcacctgcgacgacgccggcgccgtcaccgccgtctccctccccaacctcaacctcacgggctccttccctgccgccgcgctctgccgcctcccgcgcctgcgctccgtcgatctcaacaccaactacatcggcccggacctcgatcccgcccccgccgcgctcgcacgctgcgcctccctccagcgcctcgacctctccatgaacgcgctcgtcggcccgctccccgacgcgctcgccgacctcccggatctcctctacctcaacctcgacagcaacaacttctccggacccatcccggactccttcgcccgcttcaggaagctccagtcgctctccctcgtctacaacctgctcggcggcggggtcccgcccttcctcggagcagtcgccacgctcctggagctcaacctctcctacaaccccttcgcgccgggacccgtgccggccacgctcggcggcctctccgacctgcgcgtgctctggctcgccggctgcaacctcatcggccccatcccgccgtccctcggccgtctcgccaacctcacaaacctggacctgtccaccaacggcctcaccggcccgataccgccggagatcacgggcctcgccagcgcgctccagatcgagctctacaacaactcgctcacgggacccatccccaggggattcggcaacctcaaggagctgagggccatcgatctagccatgaaccgcctcgacggagccatcccggaggacctcttccacgcgcccaggctggagaccgtgcacctctactccaacaagctcacgggccccgtgccggactcggtggccagggcgccctcgctcgtcgagctccgcctcttcgcaaacagcctcaacggcgcgctgcccgccgacctcggcaagaacgcgccgctcgtgtgcctcgacgtttccgacaactccatctccggcgagatcccccggggtgtatgcgaccgcggcgagcttgaggagctgctcatgctcgacaaccacctgtcgggacacatccccgaggggctcgcccgctgccggaggctgcgccgggtgcgcctctccagcaacaggatcgccggggacgtgcccgacgccgtctggggcctgccgcacatgtcgcttctcgagctcaacgacaaccagctcacgggagagatctccccggcaatcgccggcgccgccaacctgaccaaactagtgctgtccaacaaccggctgaccgggagcatcccgtcggagatcgggtcggtgtccaacctttacgagctgtcggccgacggcaacatgctgtctggcccgctgccgggctctcttggcggcttagctgagctgggccgccttgtgttgcggaacaattcgctgtctgggcagttgctccaggggatccaaatccagtcgtggaagaagctgagcgagctcagcctcgcggacaatggcttcaccggatccataccgccggagctcggtgacctgccggtgctcaactaccttgacctctccggcaacgagcttagcggcgaggtgccgatgcagctggagaacctgaagctgaaccagttcaatgtgtccaacaaccagctgcgtggcccgctgccgccgcagtatgccacggagacgtaccgcagcagcttcttgggcaaccctgggctttgtggagagatcgccggtctatgtgccgactcggaggggggaaggctgtcaagaaggtaccgtggctcaggctttgcctggatgatgcgctccatcttcatgtttgcagctgccatcctggtcgccggagtggcgtggttctactggcggtaccggagcttcagcaaatcgaagctgcgcgtggaccgctcgaaatggacattgacgtctttccacaagctctcattcagcgagtacgagatccttgattgcctggacgaggacaacgtgattggcagcggcgcgtccgggaaggtgtacaaggccgtgctgagcaacggcgaggtggtggcggtgaagaagctgtggagcacggcggtgaagaaggaggagggctctgcatctgcatctgctgccgacaacagctttgaggcggaggtgaggacgctgggcaagattcggcacaagaacatcgtgaagctgtggtgctgctgcagctgccgggactgcaagctgctggtgtatgagtacatggcgaacggcagcctgggggacgtgctgcacagcagcaaggcggggttgctggactgggcgacgcggtacaaggttgcgctggatgcggcggaggggctgtcctacctccaccacgacagcgtgccggcgatcgtccaccgggacgtgaagtcgaacaacatcctcctggatgcggagttcagtgcccgtgtggcggacttcggggtggccaaggtggtggagggggggaccaccgccatgtcggtgatcgccggctcgtgcggttacattgcgcctgtatgcatacacgcttcgtgtgaccgagaagagcgacacctacagctttggcgtggtgctgctggagctggtgacggggaagccgccggtggatgtggagctgttcggggagaaggacctggtgaagtgggtgtgcagcacgatggagcacgagggcgtggagcacgtcctggacagcaggctggacatgggtttcaaggaggagatggtccgggtgctccacatcgggctcctgtgcgcgagctcgctgccgatcaaccggccggcgatgcggagggtggtgaagatgctgcaggaggtgcgcgctccgccggcgcgggtggtggtggacagggacgggaagctgtcgccgtactactactacgaggacgcgtcgtcggagcaagggagcagctagcgtgtaattgtcttgcatggc

SEQ ID NO: 145900 - DNA, 3592 bp, Zea Mays
ccatctccatcaccaccaccattccattcccattctcctccccatgctcgcccgtgccgacgccgacgccggctctgcccccacaaagcgtacacaaaccttcctctgagccacaaccacccacggctccatagatctgccatggctgccagtgcctccttcctccccatcctgctcctcctcctgctccttgccaatgccgtccgcgcgctcaaccaggacggcgtccacctgctcgaagccaagcgcgcgctcaccgtcccgccgggcgcgctcgccgactggaacccgcgcgacgccacgccctgcgcctggacgggcgtcacctgcgacgacgccggcgccgtcaccgccgtctccctccccaacctcaacctcacgggctccttccctgccgccgcgctctgccgcctcccgcgcctgcgctccgtcgatctcaacaccaactacatcggcccggacctcgatcccgcccccgccgcgctcgcacgctgcgcctccctccagcgcctcgacctctccatgaacgcgctcgtcggcccgctccccgacgcgctcgccgacctcccggatctcctctacctcaacctcgacagcaacaacttctccggacccatcccggactccttcgcccgcttcaggaagctccagtcgctctccctcgtctacaacctgctcggcggcggggtcccgcccttcctcggagcagtcgccacgctcctggagctcaacctctcctacaaccccttcgcgccgggacccgtgccggccacgctcggcggcctctccgacctgcgcgtgctctggctcgccggctgcaacctcatcggccccatcccgccgtccctcggccgtctcgccaacctcacaaacctggacctgtccaccaacggcctcaccggcccgataccgccggagatcacgggcctcgccagcgcgctccagatcgagctctacaacaactcgctcacgggacccatccccaggggattcggcaacctcaaggagctgagggccatcgatctagccatgaaccgcctcgacggagccatcccggaggacctcttccacgcgcccaggctggagaccgtgcacctctactccaacaagctcacgggccccgtgccggactcggtggccagggcgccctcgctcgtcgagctccgcctcttcgcaaacagcctcaacggcgcgctgcccgccgacctcggcaagaacgcgccgctcgtgtgcctcgacgtttccgacaactccatctccggcgagatcccccggggtgtatgcgaccgcggcgagcttgaggagctgctcatgctcgacaaccacctgtcgggacacatccccgaggggctcgcccgctgccggaggctgcgccgggtgcgcctctccagcaacaggatcgccggggacgtgcccgacgccgtctggggcctgccgcacatgtcgcttctcgagctcaacgacaaccagctcacgggagagatctccccggcaatcgccggcgccgccaacctgaccaaactagtgctgtccaacaaccggctgaccgggagcatcccgtcggagatcgggtcggtgtccaacctttacgagctgtcggccgacggcaacatgctgtctggcccgctgccgggctctcttggcggcttagctgagctgggccgccttgtgttgcggaacaattcgctgtctgggcagttgctccaggggatccaaatccagtcgtggaagaagctgagcgagctcagcctcgcggacaatggcttcaccggatccataccgccggagctcggtgacctgccggtgctcaactaccttgacctctccggcaacgagcttagcggcgaggtgccgatgcagctggagaacctgaagctgaaccagttcaatgtgtccaacaaccagctgcgtggcccgctgccgccgcagtatgccacggagacgtaccgcagcagcttcttgggcaaccctgggctttgtggagagatcgccggtctatgtgccgactcggaggggggaaggctgtcaagaaggtaccgtggctcaggctttgcctggatgatgcgctccatcttcatgtttgcagctgccatcctggtcgccggagtggcgtggttctactggcggtaccggagcttcagcaaatcgaagctgcgcgtggaccgctcgaaatggacattgacgtctttccacaagctctcattcagcgagtacgagatccttgattgcctggacgaggacaacgtgattggcagcggcgcgtccgggaaggtgtacaaggccgtgctgagcaacggcgaggtggtggcggtgaagaagctgtggagcacggcggtgaagaaggaggagggctctgcatctgcatctgctgccgacaacagctttgaggcggaggtgaggacgctgggcaagattcggcacaagaacatcgtgaagctgtggtgctgctgcagctgccgggactgcaagctgctggtgtatgagtacatggcgaacggcagcctgggggacgtgctgcacagcagcaaggcggggttgctggactgggcgacgcggtacaaggttgcgctggatgcggcggaggggctgtcctacctccaccacgacagcgtgccggcgatcgtccaccgggacgtgaagtcgaacaacatcctcctggatgcggagttcagtgcccgtgtggcggacttcggggtggccaaggtggtggagggggggaccaccgccatgtcggtgatcgccggctcgtgcggttacattgcgcctgagtatgcatacacgcttcgtgtgaccgagaagagcgacacctacagctttggcgtggtgctgctggagctggtgacggggaagccgccggtggatgtggagctgttcggggagaaggacctggtgaagtgggtgtgcagcacgatggagcacgagggcgtggagcacgtcctggacagcaggctggacatgggtttcaaggaggagatggtccgggtgctccacatcgggctcctgtgcgcgagctcgctgccgatcaaccggccggcgatgcggagggtggtgaagatgctgcaggaggtgcgcgctccgccggcgcgggtggtggtggacagggacgggaagctgtcgccgtactactactacgaggacgcgtcgtcggagcaagggagcagctagcgtgtaattgtcttgcatggcattgattccgggcggtagggtggacgaaacaacagctaattgatgacttgcatggcccttggttggttgcattgcattgcatttgctttgctagctaccaattcacagcatcagagatgaactgatgcaagcattctacgagcctgttcttctaatgcttctatgttattttgtcattataaattagtccgaaaagctagcttgactttaatctgaatccaacagtctaacagtctgtctggctctgaaacatctgctgcagcagtacaagagggaccaggcgctcttcttctgatgggtccctcgctcggtcgttcaagttggactttcctctgacaaattggaatttgtgtcgctcggcagcattttgccgcactcgatgttgaacaatagatttatgaataga

SEQ ID NO: 145901 - DNA, 2274 bp, Zea Mays
aagtcctaagtaacaatggcaagtgaagcggcggcggcatccgtcatctccagaaacccctgcctattcgctcctcctcttatcaccaaccagcagcagccgtctcatcaagaaccgcagcaggagatgcctctccctcctcccgccaagaagaagcgcaacctcccgggcacaccagaccctgccgcggaggtgatcgcgctttcgccgcggacgctgttggcgacgaatcggttcgtgtgcgagatctgcggcaaggggttccagcgcgaccagaacctgcagctgcaccggcgcggccacaatctcccctggaagctccgacagcgcagcgcggggaaggagccccggaagcgcgtctacgtgtgccccgagaagacgtgcgtccaccacaacccgtgccgcgcgctgggcgacctcacaggcatcaagaagcacttctgccgcaagcacggcgagaagaagtggaagtgcgacaagtgcaacaagcgctacgccgtgcagtccgactggaaggcgcacgccaagacctgcggcaccagggagtaccgatgcgactgcggcacgctcttctccaggagggacagcttcatcacgcaccgcgccttctgcgacgccctggccgaggagacggctaggcagctcaacgccgccgccgccgccacgtcgcacctaaacaataatgcgcatgtcgtcgtcggcctctcgctgccgtccatggtgggccacattaatggcgctactggtagtatcctgctgcccggtgcgcccccgcagctgtacgcggatctcttcgcacccgcaccgccgcagctgagctggccgtgcgagctgacgagcgccgctgccgccgcctcatcgtcagccgctgcgtcggggaagcagaagacggacagcgtgccgtccgtgttcagcgggtatccgcacgccaatctcgcggtgccaggcgccggcgccgccgacatgtccgcgacggcgctgctgcagaaggccgcgcagatgggtgccgtcacgtccgggtccggcagcgtgattatgacgacgacggccggtggtcatcatcagccatccgactgtggtgcaggtctgctgtttagcgcattaacccagcagaacgctactaatctcatcagcggttctggaacaagtacgctaacgacgagccagctcacggcgaccggcgggaacatgccgtacgacgtgctgtcggccgtgcgccatgccggcctcaaggatgccgccgttgccgtggggagggaggagaccagggatttcttgggcgttggcgtgcaagcgctgtgctcatcgtcgttgaatggctggatttagctagttgacgaacgatgaacctttctcttatttattggctggatttcttgcatgccttttttttgttgttgtacgtgttatgttttcttataattaatttgctttgcggccgcggagttaaatcttaagacttgagaataaggatggatgtcatgacatgcatgttggaggagtaaacaagtacagaaagatgcaatgtgagagagctgtgcacgtagtgccgccgaccctcttccatttctcatcaactaacaggagcatagatccttatggagtttgttcattactagctagagttgtaaggatgctagtaaagagcagcaggcaggaatggatccttatttgccacgctgctggtgctttcggcacactgccgcccaggcccagccgcacgcccggtggtgtccatggcatgcacgtcgtcacaacccttattgcccaacggcagcctgtccagcgccgccgccacaaacgtggccaccatcactaccaccggccctgcggccaccagccctcccagcgcgacgccaccgcccagcacgctgccccgcggccccgccaggaacaccgccgtccccgtggctggagccgggaacgggaagaagcagccggccaggctcagtatctccatggtgccgcggagcaccagcgctgctggctcccggagcaccacgtccgtgacttgcccggccgcgcccagcaccagcgcgccgcgccgcccacgccgcgcgaacgccgagacgcacgacagcacgtcgcgccccgcgggcacctccaccacgtgggcacgcatcgcgctggggcactcgtgcgcgatcaccaccggcggcttgctattgctggtggtccggttctgcttggagcacggcgcgggacggcgagggagttggtgccccgtcctccaactcgcagcggccattgcaatgcaaacaacggtccacgtct

SEQ ID NO: 145902 - DNA, 537 bp, Zea Mays
atggcgaggaaatggaagcgccatgggggatggaatccgacgattcgacgacatgcgcaggctaggatggtcgagttaggacaggaggggcatcgatggggagtccacaacagcgtgcccagatcccaagtcgcacgaccatgcccgcgaccaaaactcaccatgcttccgctacacacagcgatgcgaggaccagggccatggcgagcagggagaggactcgacgaccagcgcataggggagcttggcatgggtacggcgagcagagcaggcaggacgctaggcatcgcgggtgagcatggtcgcagcaaggagcaggacggccgcagtaggcaagcaccgacagcgagggcgcggtccgagcgcaggcgagatggggcctcggcagaggacgagcgtgcgtcagggagaaacagaggggcgcaactatggagatggagaggagggagagagaagcagggggctcggcggaggggttcaggcggggtcgacggcgcgacttccatggctgagcagggaggagcgtggcgtgcttga

SEQ ID NO: 145903 - DNA, 2343 bp, Zea Mays
ttcttgaggctcatataaccaggactcactttttattaatataatatcgtggggccgggcggtcgttccagtgccgaccaagtttttttatataaccaggatttaatatactaatcttggaaaggtgtttttttagttttggattaatgatagtctttttttttactacagccaaataatgacacgattattgacgcgccaacagtaggcaaagcaattcttatatccaaaggcttgtttactggagaatggggattttggctttccattggagcccttgtaggattcattattttgttcaacatgctctacctttgggcccttacatatttaagtcctagtagtggctccaatgccctagtttcagaaggtgaagatgatgtaatggtattgaaaggaagaagcaaagatgaaatgtcccaagttgtatacagtgatccaggcactaatggagcgacaaacacagtagctcagtcgtcacgagtcactttgcctttccagcctcttgcactttgcttcaaccatgtaaactattacgtcgacatgcctgcagaaatgaaggaacaaggattcacagaaagccgtttacaactgctctctgatatcagtggcacttttaggccaggggttctaacagcactagttggttttagtggagctggaaagaccactttaatggatgtcctggcaggaaggaaaactagtggagctattgaaggagatattaccctgtcgggataccccaaaaaacaagaaacttttgcccggatcagtggttattgtgaacaaactgatatccattctccaaatgttactgtatttgaatccatcacctactctgcctggctgcgtctttcctcagatattgatgatgatacaaaaaagatgtttgtggaggaagtgatgacccttgtagagcttgatgtgttgcgcgacgctcttgtgggtctccctggagttaatgggttatcaactgagcaaagaaaaaggctgacaattgccgtggagctggtagcaaacccttcaatcatcttcatggatgagccaacttctggtcttgatgctcgagctgctgccattgtcatgcgtacagtaagaaatacggttaacactggccgtactgtggtctgcacaatccatcagcccagcatcgacatatttgagtcttttgatgagcttctgcttttgaaacgtggaggtcaggttatttatgctggtgaacttggtcgccactctcacaaactagttgaatattttgagtcgatttctggtgttccaaagatcacagaaggatataatcctgcaacatgggtgctggaagtcagctctcctctatcggaggctcgattgaacatgaattttgctgaaatttatgcgaactctgtgctttataggaaaaatcaagagcttatcaaggagttgagtatccccccaccagactaccaggacctgtcatttcctacaaaatattcgcagaatttctacggtcaatgcgtcgcaaacttttggaagcaatgccgttcctattggaagaatccgccctacaatgctatgcgctatctgatgacatctctctttggccttgtatttggtacagtattttggcaaaaaggaaagaacatagattcacaacaagatttatataatctacttggagccacttatgctgctatcttctttcttggggcttcaaattgcatcactgttcagcctgttgtatcgattgagcgagcagttttctatcgtgaaaaggcagcggggatgtactctccattatcctatgcatttgctcagacatgtgtggaggtcatctacaccaccttacaagggatactgtacactgtcatcatatatgggatgatcggatatgactggaaatcagataaattcttctatttcctgtttttcatcactgcaagcttcaactacttcacattgttcggcatgatgttggtagcatgcactccctctgcattgcttgccaacattctcatcacctttgctctacccttttggaacctctttgctgggttcctcatcgttagaccggcaataccaatttggtggaggtggtactactgggcgaaccctgtgtcgtggaccatctacggtgttgttgcgtctcagtttggcgagaaccaaggtgagctttcagttcccggcgggaagcccatgctggtgaatcaattcttgaaggataatctcggcatccagcatgacttactcggctatgttgtgctcgtccatttcgcctacgtcattgtcttcttcttcgtattcggctattccatcaagttcttcaacttccagaaacgttaattagctagctagttagctcacgga

SEQ ID NO: 145904 - DNA, 310 bp, Zea Mays
aggtcggtcttcaacctcacggactctgccccaaatctcaactaggcgccgacctacacgccggggatcaggggggtgttgttggctaaatctccgcatgggtggttgtaatctggtgccgtcccatgtctatttaactcaggctcctctggtcctatcgtcgcccaagcaaaaccaaggggggcgtcatggtccgccgcggagggaaattgggcgctgttgtcaacctgcattttcatcaaccggtgaaccttggactcctccttcgccatagctcttcggtaggatctcccccaaacctctgtgtgcc

SEQ ID NO: 145905 - DNA, 404 bp, Zea Mays
tgtgcagcgagctctatttcccagcgctctcgcttgctcgacgggatgccgcaacgtgaagcaaccatgggatcccatctgtgtcgcttgcgccgacccggaactgcgcagtgcccagtcggtgcttgctatgtgctcaacaaaatgtacagcaagccacgcgtcgtcgatttcctgcagcagccccggcatctccgcgcgctgccggctcgctgttttataaagcgcagtgaacagcacgccgtcgacactcgccgggtgtttgctgtttttgcgcaaccccattcgcgacgccgtcggaacccgtgctagctgtcaataccattcgtcgcgcacgcgtgttcgatacaagaccggtcgggtgaaccacgtgcttgcacaactcaaatccgatcccgttcagg

SEQ ID NO: 145906 - DNA, 1280 bp, Zea Mays
ccccccctgcccatctcctctctcaattcttgcagccaccaaaccctagccccccccccctcaatcccctcctcccaaggtgccaatccttgccgctcggatcatcgtcacgtggtgcgagtcttcaatcgttttggtggagggaagaagggaggaaggaaagggggagaatccaaggtggtggactcccagatcgttcttagggattttcccaaacttccggtgaaggcaagtaaaactgtgatggttattccatctgtcagatgaggagtcttatacttgtttatgttgtgctattatgttcaaattcatattttcttttgagtaccatcatttgaaaatgttcatgtttcatggatttcatatgttgagtttgaggtttgattaagttactcaagtggttattatgtggaatgggtggaagtaaatgcctagcacatttttatttgggaagaactcatgatgttgtcatgcataatgcactcatcatccattgcattgaagtttcgtcgcgatcttatggtccgaccataccggtacattgagcatcatatgtttcccgagaaggggtatggtgcagcttcatatccttagagatatggagacagaagtcattattgcatttgtagccatgtgcattcatgggagaggtgttcaatctattatgtggatgtggataatttggacttgtgcatggtgattctacttggcgttgagtttttagttacttgtttacttgctgcaatttactgttcaaaagaaaagaaagaagtcctgaacacgtggttgtgtaagcacagttgatttacaatgtcctatttgttgttgttatgtttacttgctgagatgtgttatctcacatcttgcattgtttgatgcaggcacctaatttctgctttgggaatagagggatgtagcagcacggccactacacctttaataaaggaaccaccatttaataatgttgttaattagagttggacaagtctagtgaattgctttgttcttggttgagcgtttattttggggtgggctgagtttcttatcccatttgttttgcttcagttgggtcataattaagttttaccacttttgcatttcagtttctactatgtgaattatatgtctttatatcttgtatgagcttcatgtttcccctccttgttatgctagttttcaaaggaggtgctgccggatttttgttatatattctttctttattacttctcttgtgttgagtaagtttggtgggtggggtttgtggtattatccattgtgtg

SEQ ID NO: 145907 - DNA, 339 bp, Zea Mays
ctccaacgcttcatgagcctaaactgtaagcaacaagaaaaaacatatatgctccaccactcatgagcttaaactgttagcgagaaataaataataaaaaaaataaaaccatcatatgctccaacgcttcatgagcctaaactgtaagcaacaagaaaaaaacatatatgctccatcactcatgagcttaaactgttagcgagaaataaacaataaaaaaataaaaccatcatatgctccgacgcctcatgaggctaaattataagtaacaaaaaacatacatgctccaatgctcacgagcttaaactgttagcaagaagtaaaaataataatattgtc

SEQ ID NO: 145908 - DNA, 192 bp, Zea Mays
gaataatcgtttctctccacccttcataagatcaacgtgtgtgctacctgttagggtattcataccattttttaagccataaccgctcatgctaattagacggctacatcatcataaaaaacagccgaaatgccacaaacaaaaaaaaaagaaaagagttgtgtcggctcaaactaaactaaactaaataat

SEQ ID NO: 145909 - DNA, 234 bp, Zea Mays
attcataccaaatttttaagccataaccgctcatgctaattaggctgctacatcatcataaaaaaacagccgaaatgccacaaacaaaaaaaaagaaaagagttgcgtcggctcaaactaaactaaactaaataatatgcaataaaataaaataaataatgaatcatgtaggctacgatctaggctgatcttagacttgtctaattaaaaaaagagtaaataaagataaaaaaa

SEQ ID NO: 145910 - DNA, 2138 bp, Zea Mays
gacacaatggatgtatatgtggaggaacgtagagtccttcctatattggaagaagaagaagacatatcatccatctttgcaacaaatatagaaacttgtgagattgagatgggggattggcgaacaccattcctcgaatatttactccatgaatacttgcccctcaattcaaatgagaggtctaggattaggaaaagatcaattaactacacctgcataaatgatatgctttatcgacattcaagtgatggcattctactatgttgccttgtcggagatgaagtgatagaggccttaaaagaagtccatgctggattgtgcggagcgcaccaatccggacctaaactatattaccaacttaaacatttaggctattattgacctaccatgttcgatgattgcatgaaattcacgaaaaggtgccatgagtgtcaaatacatggcaactttatacaccaaccacatgaaccattacatcccactagcatgtcctggacatttgaaatgtgggggatggatgtagttggaccaattcacccaccatcatccaaaggacatagatttattttagccaccacagactatttctccaaatgggcagaagttgtggcattaaaagaggtaaaagctgaaaatttagaaaacttcataagaactaatctcatatatcgatttggtctgtcgagtagaatgatatctgataatgggtcaaattttaggaccaaacaaatcgagaggatgtgtgccaaatttaaaatcaagcacaacttctctactggatataacccgtccgctaatggtcaagcggaagcatttaataaagtgttatgaaaattgcttaaaaatatggtctcacataataagaggcactggcatgaaaagctactagagtccttgtgggcgtatagagttacgacgcgaacagcaacagtgaggacccctcactaccttgtatatgggggagaagcagtcttgccattagaaatacaaattgcctctttacgagttgtcattcaagaaaatctcacagaagacgaagcgacaaaattgcgcttaaaagaattagataacttagaggaaaagcgacttcatacattgcaaaacatggaggcataccaagctaggatgtctagagctttcgataagcgattaaaaagaagatcgtttaaacagggggacctggtgctagcagttatccgccccatgaatatcactcatcgaataaaaggaaaatttgagcctaaatgggaaggcccatatgtagtaaaagatgtttattcaagtggcgcatattgaattatttctgctgacggcgaatattgccctccaccaataaatggaaaattcttaaaacgctactatgcttaaaaaatcaccatttgctacaacgctttaagagcctaaactacaagcgccaaaaacaaaaaaaattaaatccatcgtatgcttcaacgcttcatgagcctaaactttaagcaacaagaaaaacatatatgctccatcgctcacgagcttaaactgttagcgagaaataaataataaaaaaataaaaccatcatatgctccaacgcttcatgagccgaaactgtaagcaacaagaaaaaaacatatatgctcaatcgctcacgagcttaaactattagcgagaaataaataataaaaaaataaaaccatcatatgctccaacgcttcatgagcctaaactgtaagcaacaagaaaaaaacatatatgctccatcactcatgagcttaaactgttagcgagaaataaataataaaaaaataaaaccatcatatgctccaacgcttcatgagcctaaactgtaagcaacaagaaaaaaacatatatgctccatcactcatgagcttaaactgttagcgagaaataaataataaaaaaataaaaccatcatatgctccaacgcttcatgagcctaaactgtaagcaacaagaaaaaaacatatatgctccatcactcatgagcttaaactgttagcgagaaataaataataaaaaaaataaaaccatcatatgctctaacgcctcatgaggctaaactgtaagtaacaaaaaacatacatgctccattgctcacgagcttaaactgttagcaagaagtaaaaataataatattgtc

SEQ ID NO: 145911 - DNA, 76 bp, Zea Mays
ctattttatttatggttccatttcaaattataaaattcgaattccattcaaattccacacttattttcaattgaat

SEQ ID NO: 145912 - DNA, 152 bp, Zea Mays
caatttatttcaaaacaaaagatttttgtctaaaaatatttttttccataaattaggtattttaagtgtaaaatattattttttggttttatttttattcttggaagtatttgaatatataaatatacaatacataaaaaagaaagaaaaaa

SEQ ID NO: 145913 - DNA, 133 bp, Zea Mays
attaacgtcactaaaacaatcaggcttgattggttgctgcagcagctccaaggcattctagactggaggtctcaagttcaattcctcttaaatgcatttttttgtgcaattactaggggcaacaacgtccaaa

SEQ ID NO: 145914 - DNA, 276 bp, Zea Mays
cagatcatgcgaaaggaggacgaaaaacgctcagcacctgtttgttgttttgtccaaataaatttttgatgctgcatacaatagatgattgactacatgatggcaccgaatgggttggtgatcccacaaactctccaacccaacgatttactcgtaatgctactattcacctacattttttggagggagtagggaaggcattgtcgatctcttcttgaagtcagctgagtatttggactgtgcagttcatcatgtactcatacatataccacctca

SEQ ID NO: 145915 - DNA, 101 bp, Zea Mays
gtcttttgggcttcctctcattcaagaggacgagatgtgttatttggagctattgctagttgtgttgagtcatttgcctcttcgtggaggaactagctttg

SEQ ID NO: 145916 - DNA, 1844 bp, Zea Mays
caacccaaccactgcatctccggcaccagcagtctagctagctagctagctcgtttgctatagcttgccagatccccgtgaccagccgtagcacactcgctgccctgttaatataatggagttcaccgtcgtcaggaccgccattgttctgcttctttcgctcgccgtctcctcgaccttcctctgcggaggcgtccagggcggccgccactaccactaccaccacaccacgcacacaaagcacaacaccgcgcacccaccgtccgcccacgctccgggcccagcgagcgggaggcggctaccccccgtctccccgccgccgtcggactcgagcggctacccgacgcctggcgccgcgccggagccagcgccggcccccgcggcagccggcaccatgtacgacgtcgtcaaggacttcggcgccgtcggggacggcgtgacggacgacaccgacgccctcaagaccgcgtgggacaccgcgtgccaggacgacggggacagcgtcgtgctcgccgccgccgggtactcgtttctcgtgcacaccaccgtcttcaccggcccgtgccaggggagcgtcacgattcagctcgacggggcgatcgtggcgccgagcgaccccgacacgtggccggccaacagcaagcgcaactggctgctgttctaccaggcccacggcatgtcgctgcagggcgccggcctcatcgacggcaggggccagaagtggtgggagctcccctgcaagtctcacaagggccagggtggatcaagcggccacggtgcatcctgcgacagcccagtggcgctgaggtttttcatgaccaacaacgtgacggtacaaggcctcaaggtgcagaacagccccgagttccacatccggttcgacagctgctgcggcgtggtcgccagcggcctgtccatcagctccccggcgctgagccccaacacggacggcatccacgtcgagaacaccgaggacgtcctcatcaccaacaccgccgtctccaacggcgacgactgcgtctccatcggcgccggcacccgcaacatgcacgtcgagaacgtcacctgcgggcccggcggccacggcatcagcatcgggagcctgggcaagcagggctcgcgggcgtgcgtggcaaacgtcacggtgcgcaacgcggtcatccgccactcggacaacggcgtccggatcaagacgtggcagggcggctccggcgccgtctcctccgtctccttcgagaacgtgcgcatggacgccgtgcgcaaccccatcatcatcgaccagtactactgcctctccaagagctgcgacaacgccacctccgcggtcttcgtctccggcgtctcctacgccggcatccggggcacctacgacccgcgcaccacgcccatccacttcggatgcagcgacgccgtgccgtgcaccaacatcacgctctccgacgtcgagcttctccccgcgtccggcgacagtaccatcgacaaccccttctgctggaacgtgtacggcagcaccgccacgcccacggtgccgccggtgccatgcctcatagaaggcgtgcccaggagagtcgacgataacagcaccctcaaatgctactagatagcagctagtgatcgatgaacgtcctatacatatgcatccggcctgctactacttgtttattagaaggagatgaggcagacgaacagacaaaagtaattaagattagtgcagataaaaggagttcaacgcgtaattgcttatgtatgtagagaaaaagatggaaatgtaatagtagtactaacaagtcatttgtgtaagaactatacatatagtgttaccggaatatatacaatgttttcaa

SEQ ID NO: 145917 - DNA, 763 bp, Zea Mays
atggagcagattttgttaggaagatctgatgttgcaggttggggtgcattcattaagaatcctgtaaataaaaatgattatcttggagaatatactggtgaattgatctctcacaaggaagcagacaaacgcgggaaaatttatgaccgggcagactcatcgtttctgttcgatttaaatgaccaggtgcttcttgtcccgccggccgttctggcactccgcgagaccagtaccttcaggatctcgtgacccagttccagaacgccacaaatgaagaatctaaggagaagattgttgctaacctggcaaattttgcttatgacccttttaattatgccttcatgcgccaggttgttcttgagttattcttggactgcattacagagccaaatgaaaagcttgtcgagtttggcattggtggaatatgtaactcctgtgaagatcctgcaaattctttaatcattactcagagtggtggaatcccgttggttgtacaatgcttatggagcctagtgcggaatactataagcatttctgaagctatagtgatcagctcttgagcagctagagttatgtagttgtgggcttttgaacaatagctagagtgatatgaaacattagtgatgtagttgtggtgcttttgtgactgttcatctctggagcttttgtgaatgatctagctagctatccgtaaatgatctagttgtgaatgatattataattgtgatggttttgtgaatatataattgtggtgcttttgtgt

SEQ ID NO: 145918 - DNA, 2823 bp, Zea Mays
acacgcttcgtccacagcccaactacccaagagcagagggcagaggatgcctcttgccgcaatggcgtcggcatcctcctcgccctgctcgcggcatcctctgatcttggtcgttctcttgtgcgccattgccgccatctctttctcttcctctgtggctgctggaaccgttggcggcggcacaggcggactgggccccatcagcaccaacgggaagaactacaccaaggtgtgcgaccccgcacggttcgtggcgctggggctcgacatgtcacgcttccggtactgcgacgcgtcgttgccgtacgccgaccgggtgcgcgacctcgtgggccgcctcgcgctggaggagaaggtgcgcaacctcggggaccaggcggagggcgcgccccgcgtcggcctgccgccgtacaagtggtggggggaggccctccacggcgtgtccgacgtcggccccggcggcacgtggttcggcgacgtggtgcccggcgccaccagcttcccgctcgtcatcaacagcgccgcggcgttcaacgagtcgctgtggcgcgccatcggcggcgtggtgtccacggagatcagggccatgtacaacctgggccacgcagagctcacctactggagccccaacatcaacgtggtgcgcgacccgcggtggggacgcgccagcgagacccccggcgaggaccccttcgtcgtcggccgctacgccgtcaacttcgtccgcggaatgcaggacgtcgacgaccgcccctacgccgccgccgcagacccgttctcgcggcccatcaaggtgtccagctgctgcaagcacttcgccgcctacgacgtggacgcgtggttcaaggccgaccgcctcacgttcgacgcgcaggtggaggagcgcgacatggtcgagaccttcgagcgccccttcgagatgtgcatccgggacggcgacgccagctgcgtcatgtgctcctacaaccgcatcaacgggatacccgcctgcgccgacgcgcgcctgctgtcggagaccgtccggagccagtggcagctccacgggtacatcgtctctgactgcgactccgtacgcgtcatggtccgggacgccaagtggctcaactacaccggcgtcgaggccaccgccgcggccatgaaggccgggctcgacctcgactgcggcatgttctgggagggcgcccgggacttcttcaccacctacggcgtcgacgccgtccggcaggggaagatcaaggagggcgacgtcgacaacgcgctcagcaacgtctacaccaccctgatgcggctcggcttcttcgacggcatgccggaattcgagtccctcggcgctagcaacgtttgcaccgacggccacaaggagctggctgccgacgccgcaaggcaggggatggtcctcctcaagaacgatgcccgccgcctaccattggaccccaacaagattaattcagtgtcgttggttggcctgttggagcacatcaatgccacggatgtcatgctgggagactaccgaggtaagccatgcagaattgtgacaccatacaacgctatcaggaacatggtgaatgccacgtacgtgcacgcctgcgacagtggggcgtgtaacacggcggaagggatgggaagagcatccagcacagcaaagatcgccgacgcgaccatcgtcatcgctggtctgaacatgagcgtggagagggagagcaacgacagggaggatctcctgctgccgtggaaccagagcagctggatcaatgccgtcgccatggcctcgcccacaccgatcgtcctggtgatcatgtcggccggcggcgtggacgtctcgtttgcgcacaacaacaccaagatcggcgccatcgtttgggccgggtaccccggcgaggaaggcggcacggccatcgccgacgtcctcttcggaaaatacaatccaggaggacggctgccgctgacatggttcaagaacgagtacgtcaaccagatccccatgacgtccatggcgctgcgtcccgacgccgcgctgggctaccccggccggacgtacaagttctacggcggcccggctgtgctctacccgttcggccacggcctcagctacaccaacttcagctatgcttccggcaccaccggcgccactgtcaccatccacatcggcgcctgggagcactgcaagatgctcacctacaagatgggtgcgccgtcgccgtcgccagcctgcccggccctaaacgtcgctagccacatgtgcagcgaggtggtgagcttcagcctcagggtggcgaacaccggcggtgtcggcggcgaccacgtggtgccagtgtacaccgcgccgcctcccgaggtgggcgacgcgccgctgaagcagctggtggcgttccggagggtgttcgtgcccgccggcgccgccgtcgacgtgcccttcgccctcaacgtgtgcaagacgttcgcgatcgtcgaggagacggcgtacaccgtcgtgccgtcgggcgtcagcacggtcgtcgtcggagatgacgcgctggtgttgtcgttccccgtcacgatcaacctggcagtgtagactacttgtctgcaggactaggcgttaattgattctttttttttactcaaggtaataactttaaaccattaaatgtagcgggcgagaaagtggaagcaagtgtaattactttacacagtgctatacaaaagcagaagcagatcgatccattaattgtcacatgatttgtatccctgaaagcagaacgggtgaaaaaatttactattgctgttttgcgcctttgcggcacagtttgatctcatcttaaatacaattctaccacggtactg

SEQ ID NO: 145919 - DNA, 1820 bp, Zea Mays
ctccgatccagctggtcagtagtgatcagtactagctagctactaccaccgcccccaaaaccattccacctctcaagaacagcgctctggcagcgctggtagtgtagcatcgcgcgttcatcactacgctactaggaatcatatatcatcatcggtcgagagagagagagagcaagcaagtttcctccggcggccggagggtacgtaatcgatcgccggccgccacagcaggatgagcaggatgggcggcaaggactgcgtgccccccgtcgccatggtgctcgtgcagctgggcttcgccgtcatgaacatcgtgtcgaagctggcgctggacgcgggcatgagcccctacgtgctcatcgcctaccgcaacctcatcgccgccgccgtcatctcccccatcgcctacttgcttgagaggtgtttcagttcatcgggtgcgtgcacgtcagttcattccagtgcgagcccacacacacgcacacacttgatcaggcaggcctactacaagaagcggggcgacgatcacaaagaaggtgctcctgcagatcttctgctcctccatcttcggggcaacgctgaaccaggtgctgttcgtcgtggggctcaagtccaccagcgcgaccgtggcgtgcgcgctcaccaacacgctgccggcgctgaccttcgtgatggcggcggcgctcaagatggagccggtgcggccgggcacggcggcggggcaggccaagctggtgggcacggcggtgtgcgtgggcggatccatgctcatacccttctacaagggccccgtcctcagggtgtgggcgtccccgatccactggcgcttcgcggagcacgcgtcgccccccgccgccgccgccgcggcaggcgcccacacgggccccgccgcggtgctcggggacgtcctcgtcatcgccagctgcgtcgcctgggccgtctggttcattctccacaccaagatctcccaggggttctccgcgccctacaccagcaccgccatcatgtgcctcatggcgggcgtgcagtgcgcgggcgtcagcgccgccctggaccggagcctcgccgtctggaagctcgggttcgacatcaggctctactccgtgctctacatcgggatcgttggctccggggccgggttcacgctcatgtcgtggtgcatccaggtgcgcggcccgctgtacgtgtccatgttcagcccgctgctgctcgtcatcgtcgccgtcgtcggctgggccatcctcggcgacaagatacgcctgggaagtgctatcggctccgtgctcatcgttgccgggctatacatggtgctctggggcaaaggaagggagatggacagaccgggcctcgacaacgacaaaggcgacgaggagaccgccgccgcattgggccttgcggtcgcaagcagcaagggtggtgcggtcgtcgtaagcagccgtgtcgacgccgtcagcagcctgccggtgttctccacaacaactagccccaagaggcagcaactcattcacggatgaaatagctagtgggtcggagttggaggaactggccggggcgaagacggcggcgaagattggattggaggggcataactacagacttgtgcacggttggttgcattgcagttgcatgcagcagcgtcagagtcgtgtggtctgttacaaagaggaagcaaacaaacaggagtgtgatgtggctgtactagtgcctagtggaagctggaagggttgcttgctaccttggatgatttcgtgctactgtcgttgggcttctctgtgtgcgctgcacttcacttgaatgatctgatttggttcctccaaaaa

SEQ ID NO: 145920 - DNA, 1424 bp, Zea Mays
gtctagaagcttactcatgtacgctccttctcatgcaagaagacgtactcaatttctactctcttctatcagtctcctcactcctgtctctcatgtctccttttcctcccaccgttcctgtcacccacgcagcacgccggagcagctgtagcagtcgagctcggcatcagctcccttgctgctcactttgcagcacctcgccagctccctggtaacactctgcacctgccgtcgaactctctcaggttcggtcatccctgctcccttccaaatcaacgcccctccactcgactctactactgtgtcgtgcgcgcgcttcctcctgcttccgtcgctgggtgcgtgctcatcttccgtcgcgtgccacctggtcgatagaatgagcagtttggtcgtccccatctcgccgtggttcgtcctcaccatgttttcagatgtgtttgggctgagatgccattcgaaatcgatgatctgttcgtcgccaccggccgcaagcaccagttttgttgaacgtgagaacgtcttaatctgttgatatgagttgaaaattgatgtgtcgatctgtggtttgacctagtgttctcgtcatgtctatgttctggtcgaggccctagatacgtgattgaagatcctttgtggtgatgaaggtgaaatcagcatagcactcgccaagcgttctacagaaggtctggacgagagaaccatgttgtttcacgttttgttgagtcgggttggattagggtgagctgattcattgctctggctattaggtctaattaataggattggattttagaaataaaagtgcagtgccaaaaaaattatggcaatttttgaataaccttgttttggtcatttaagcacttggtaaaatttggaggctatttggaaatcctttgcttagaaagccttgtaaagtcacaaataggatggattaatccctttggaaaagatgaagtaagtttatggatgaaaactcatgtgttctagtcccttggtagtcatagtttatgggtgtagtctggtaatgctttttaatatttttttgttgcaaactgcataaacataagcatccatgatcatatcatttcatacagagccctcaacagaaggagtgaagattcaagatgaagtggtagctgaagaggagtttgctctagtgcctgttcatcaagtggatgtagccatctaactgatcatcatggtagaagtatctagaacctcttctctgcaacaaaggcaagccccggtgcatttgccccttccttgtgttttaaatgctttatcaccttaaatgatgcattaggtgataggagttgtgtgatgaacaattgatgcattaccattacttggaatttgaatactataccttgatccctgatttataaaaagaactgataatgcttaaccctgcttagaaactg

SEQ ID NO: 145921 - DNA, 1030 bp, Zea Mays
attatccttaggtcgaccaaatccttagaatgctcctgttcttatccagttgaggtctagaagcttactcatgtacgctccttctcatgcaagaagacgtactcaatttctactctcttctatcagtctcctcactcctgtctctcatgtctccttttcctcccaccgttcctgtcacccacgcagcacgccggagcagctgtagcagtcgagctcgacatcagctcccttgctgctcactttgcagcacctcgccagctccctggtaacactctgcacctgccgtcgaactctctcaggttcggtcatccctgctcccttccaaatcaacgcccctccactcgactctactactgtgtcgtgcgcgcgcttcctcctgcttccgtcgctgggtgcgtgctcatcttccgtcgcgtgccacctggtcgatagaatgagcagtttggtcgtccccatctcgccgtggttcgtcctcaccatgttttcagatgtgtttgggctgagatgccattcgaaatcgatgatctgttcgtcgccaccggccgcaagcaccagttttgttgaacgtgagaacgtcttaatctgttgatatgagttgaaaattgatgtatcgatctgtggtttgacctagtgttctcgtcatgtctatgttctggtcgaggccctagatacgtgattgaagatcctttgtggtgatgaaggtgaaatcagcatagcactcgccaagcattctacagaaggtctggacgagagaaccatgttgtttcacgttttgttgagtcgggttggattagggtgagctgattcattgctctggctattaggtctaattaataggattggattttagaaataaaagtgcagtgccaaaaaaattatggcaatttttgaataaccttgttttggtcatttaagcacttggtaaaatttggaggctatttggaaatcctttgcttagaaagccttgtaaagtcacaaataggatggattaatccctttggaaaagatgaagtaagtttatggatgaaaa

SEQ ID NO: 145922 - DNA, 1013 bp, Zea Mays
attatccttaggtcgaccaaatccttagaatgctcctgttcttatccagttgaggtctagaagcttactcatgtacgctccttctcatgcaagaagacgtactcaatttctactctcttctatcagtctcctcactcctgtctctcatgtctccttttcctcccaccgttcctgtcacccacgcagcacgccggagcagctgtagcagtcgagctcgacatcagctcccttgctgctcactttgcagcacctcgccagctccctggtaacactctgcacctgccgtcgaactctctcaggttcggtcatccctgctcccttccaaatcaacgcccctccactcgactctactactgtgtcgtgcgcgcgcttcctcctgcttccgtcgctgggtgcgtgctcatcttccgtcgcgtgccacctggtcgatagaatgagcagtttggtcgtccccatctcgccgtggttcgtcctcaccatgttttcagatgtgtttgggctgagatgccattcgaaatcgatgatctgttcgtcgccaccggccgcaagcaccagttttgttgaacgtgagaacgtcttaatctgttgatatgagttgaaaattgatgtatcgatctgtggtttgacctagtgttctcgtcatgtctatgttctggtcgaggccctagatacgtgattgaagatcctttgtggtgatgaaggtgaaatcagcatagcactcgccaagcattctacagaagagccctcaacagaaggagtgaagattcaagatgaagtggtagctgaagaggagtttgctctagtgcctgttcatcaagtggatgtagccatctaactgatcatcatggtagaagtatctagaacctcttctctgcaacaaaggcaagccccggtgcatttgccccttccttgtgttttaaatgctttatcaccttaaatgatgcattaggtgataggagttgtgtgatgaacaattgatgcattaccattccttggaatttgaatactatacc

SEQ ID NO: 145923 - DNA, 1276 bp, Zea Mays
ccccagtccccatcgtcgacactcgacagcctccgccgcacgttcacagttcacacacacaggcacagctcgcagcatccagctcccgtcgagctcactcgctcactccagtccagtctctatctacctatctacttcggttcaggatctcgattccccgcgcgccttctgccaacgagatggccgtgctgtggaagggttcgtcgtcttcgccctgtgactggccggaggcgacggtgaccaccgtcagcgacgccgacgacgacgcggcggcggcggcggagctgcggcgggggccgtggacggtggaggaggacgcggtcctggcgggccacgtggccgcgcacggcgaggggcggtggaacgagctggcgtgcgccgcggggctcaggcgcaccggcaagagctgccgcctgcgctggctcaactacctccgccccggcgtgcgccgcgggggcttcaccccgcgggagcagctgctcgtcctcgacctccactcccgctggggcaaccgctggtccaggatcgccgcgcacctgccgggccgcacggataacgaggtcaagaactactggcgcacgcgggtgcagaagcacgccaggcagctgggctgcgccgtcggcagccgccagttcaacgacgccgtgaggaacctctgggtgccgcgcctgctcgagaggatccacgccgacgactcagcagcagcagccgccgccgatgccgatgccgatgcctctcgctgctgctactccgcgagcccatcgcacgatgagctgtcgtcgtcccacccggcgcaccgaaacgctgcgcccatcacgggcgacgactgcgcgcgcgcaccgtccccggacgtgtccagtgtcgtcactgggtcctcgtggtcacgggaggcgtcccccacgtcgcagttgttcaagtcgagcagttcgaccgtggagggatgctctacttctaccgagaccgagcagtgccagaacggatgctcctcgagcgcgacgagcgttgacatgttcgacgagagctggtcggagcttcttgctcgcgccatccatgacgacgacgcggaattcggatcgggagaaaccggagacagctggtggagtttggaggacatctgggagcaaccgctctactgatcgatccatacttttctactacgtatggtccggcggcctgagacaaatgactcaatcatttgaggtgttatgcgattgacgattgattgataagagaagctaacaaataaacatgatttaattgaatgttttgctgtaaa

SEQ ID NO: 145924 - DNA, 664 bp, Zea Mays
cgtggccaacttgttcattaggtcccttcccttccgttccgtgcccactctcttgctctatataacatgccgcccggcagcacctcttctcacgtctggaacagagaaagatcatatagagagttaaacagcgggataccagcgaattatcaaccctgattccatggagagagttgcatcaagctgcaccagcatcctaacacaaaggaggccttactctgtggccgcggccatggcgaaggaagccgcacggagggccgacgggaacaaggctgcggctgcggctgcggtgaccatgaccaagcgcgtgatgggcaaaaaggaagtcaacaccgctgccgctgcggcggagcagaagaaggcatggctgccgaaccctgtgaccggctactatcgcccagcgggtagccccagggaggtggacgcggcggagctgtgcgccaagctgctgactggttaatcaaacagttattttgtcgagctcgactgctcgatcatggggtgtctgtctatctagtttgtattgctttaagatccgtgctccttgatagccgggctccttccttggcctagagcatgaggccatgagggtgctgttcatgcaaccaattatatattgtacgatacacaatgtattgaatttatttgagtaaaagaaaactgc

SEQ ID NO: 145925 - DNA, 230 bp, Zea Mays
cccaatctttatctagtgatgattcctactccatactatcatactgcttttgtgccagtgcactgctacgattatgttcctttttattgtggcccaccaaatgttgcacaagctctacatgaggttgtcaagccggtggttgtgcattcaacgcctccactgaacaccaagacctttacaacatgtctgaattgggcgactcaaatgcaaacggtggtattatatgctcc

SEQ ID NO: 145926 - DNA, 1242 bp, Zea Mays
gtcacggcagtgtgggaactttcgccagatcggcctcctcgtcgcgagctcggaggggaggggagcacgccatcgtcgtcggagttgaagccgaagtagagccggctccgcgtcgtcgaggtccgcttcgcgcgtggctgttcccgcgtcgtcgagacgcgcggtcgacgagcgccgcctccgcatgcttgagacgcgcggcccgacgaggcacgcggccgacgagcgccgcttccgcgtgctcgaggcgcgcggccgtggagctccgactcgcgcgcggctgttccagcgcggcctctcaacagtggctcaaaatttggcgtgcaaccttcgctcaaccaaacactagtctggcgtgcaacctttgctcaacggtgcctaaaaatttcaagatcattagggcgaggaaaaggcaaaagcaccccaaatttggcaggaagcacatcccacctgatcgtttacccttttcctgccacggcgcggcagtccagctcaccgcccctttccttcgttcctcgaaccgctcctccccttcggcttccgcttcgtgtctcgcccgcactcccaaacgccaaaacaaaccatccatataaatccccccgaggaatctatgaccggcgaggaggagcaggagcacggtggccacaggtacgtcaggatgcctccggagccgcccgagccggaggggttggccgccgcgtcgtcggcgtcgttccgcctgccggagtcggtgcgggtgttcgacgagctgccgcgggccaggatcgtccaggtctcgcgccctgacgccggggacatcacgcccatgctgctctcctacaccatcgaggtccactacaagcaggtccgtccccgggcgccgcctcttcccacctccggattcgtctggcctagctcttctcgttgggcggtcagcgtagtagtgcctggcatttggcggtatagaattgctgcgtgaattgggcgtctgggtgatttgtttcccgataggttctggttacatttttctaggtgatctcaagcttcgattatcgcttgaggtgccgggaactgagttgctcgttcgattcgggttctgtgagtgggttgtggttcaattcgggcctgctgctctgatgtggatgcgaatatggaagtgacttataactaggtagctttttgttgtattcctattcctttttcacaaaacctttttgtgcttactatggagaaaaatgatacctcttatgtgctttgggttgc

SEQ ID NO: 145927 - DNA, 1549 bp, Zea Mays
gtcacggcagtgtgggaactttcgccagatcggcctcctcgtcgcgagctcggaggggaggggagcacgccatcgtcgtcggagttgaagccgaagtagagccggctccgcgtcgtcgaggtccgcttcgcgcgtggctgttcccgcgtcgtcgagacgcgcggtcgacgagcgccgcctccgcatgcttgagacgcgcggcccgacgaggcacgcggccgacgagcgccgcttccgcgtgctcgaggcgcgcggccgtggagctccgactcgcgcgcggctgttccagcgcggcctctcaacagtggctcaaaatttggcgtgcaaccttcgctcaaccaaacactagtctggcgtgcaacctttgctcaacggtgcctaaaaatttcaagatcattagggcgaggaaaaggcaaaagcaccccaaatttggcaggaagcacatcccacctgatcgtttacccttttcctgccacggcgcggcagtccagctcaccgcccctttccttcgttcctcgaaccgctcctccccttcggcttccgcttcgtgtctcgcccgcactcccaaacgccaaaacaaaccatccatataaatccccccgaggaatctatgaccggcgaggaggagcaggagcacggtggccacaggtacgtcaggatgcctccggagccgcccgagccggaggggttggccgccgcgtcgtcggcgtcgttccgcctgccggagtcggtgcgggtgttcgacgagctgccgcgggccaggatcgtccaggtctcgcgccctgacgccggggacatcacgcccatgctgctctcctacaccatcgaggtccactacaagcagtttaggtggcttctatataagaaggcctcacaagtgctatatctacattttgcattgaagagacgtgcatttcttgaagaattccatgagaaacaagaacaggtcaaagaatggcttcaaaatttggggataggggagcatgtgccagttgtacatgatgatgatgaagccgatgatgtgcatgttccttcacagcatgacgaaaactctgtcaaaaacaggaatgtcccttcaagtgctgttttacctgttattcgacctgcccttggccgtcagcaatcaatttctgatcgtgcaaaggctgccatgcaagaatacttgaaccatttcttgggaaacttggatattgtcaactcaagagaggtctgcaagtttttggaagtttcactgttatcatttctgccagaatatgggcctaagctaaaggaagattatgttacagcaaggcacttgccgaaaattgagatggacagtaaagagagatactgttcatcctgttgttttagtttttgcagtagtagctggcaaaaggtttgggctgtactgaagccaggattcttggctttacttcaagatccatttgatcctaagctcttggacataattattttcgatgtgtcaccttgcactgatagagatggagatgaccaaaccactctagcaaaggagataaaggaacgtaatccattgcattttggatttgag

SEQ ID NO: 145928 - DNA, 1855 bp, Zea Mays
cttgattcgtatagcacctcacatccaaatatgcaacacatagataaggagaaggtgggaggcacaagaacgaggagatcaagttgcctctgtgcttgatgttggagaagttggtccccgagcagcatgtcgttgccagtggcctatggcgcgacgcagtggcctgtgggtggagggaggggggagccgaggtcagtgggtcgttagaagtgttggcccatggtcagcaggaacagctcaaatcgaaggaagcatccataatgcctatttttctcttattgaaaaggcagaacattttgtttacatcgagaatcagtttttcatttcaggtctttcaggggatgacacaattaagaatcgtgtattagaagcactatataggcgcatacttagagcagaaaaagagaaaaggcgcttccgggttattattgtcataccacttttacctggttttcagggtggcattgatgatggtggagctgcgtctgtgagggcaattatgcattggcaataccgaactatttgtagaggacctaattcaattcttaaaaatctgtatgatgtggttggctcgaaggcggatgattatatctcattttatgggcttagagcacatggaagatcagatgatgggggtcctctggtcaccaatcagatatatgtgcacagtaaattgatgattattgatgatcgcatggcattgattggctcagccaacataaatgatagaagcttgcttggatctagggattctgagattggtataattattgaagataaagaggttgtcagttctataatggatggaagaccttgggaagctggaaagttctccctcagcctacgactttctctatgggcagaacaccttggtcttcttccaggagaggttagttgcattatggatcctgtggatgattcagcgtacaaaaacatctggatggccactgctaaggagaataccgtgatctaccatcaagtattctcatgtgttcccaacgatcacatccattctaggtatcaatttcgccaaagttttgctcatcgtaaggagaaaattggccacacaaccatagacttgggtgttgccttagaaaacctggaaacgcaacaggagggagacctggcatgtgccaaaccaatggaacggttgcaggacgttcggggtcatattgtttgcttccctttggagttcatgtgccaagaggacttgagacctttcttcagtgagagcgagtattatacatctccacaagttttccattagggcttgttcggttatttcaatttcatgtggattggtgtgtattggagtgaattaggatgaattttgacttgctatggatttaaactgactcaataccatctaatccacatggattaatgttgaaacgaacaagcccttagtgtttattttcccgcttttggcgaaagtccgcccataggtacatgttatagggttattatacttgtatatgcctagatcgtgtctcgtgcctggatgaataggaaaaacaaaaacaaaggaacaaccatatccttgctagtttcgggtatataggatatgacggccaagatttgtacagatcgtttatcagagttagttcgggcagcagatgttgccctattagatgaattcttttatgcaaaataaaatgcacttaaagctgaatttgatgccttgtagtcttgtacattgagcattggcagattctgttgaaatttgttatctgatcattattgtggatgtggtactttggaagtttctgtgaggcagtgagggcacatttggtatattgttttatctaatgtaatcattgttttataggcaattaaatgtacatgctgagacgaa

SEQ ID NO: 145929 - DNA, 681 bp, Zea Mays
ccgcggctgctgctttagtgttttccctgcgcgccgcggtcgcctaacttgcgcccaggatctcctttcatcgtgtccctgtgttggagctcgccctggacgctattgtcatcttctgtcgttgagtcgtcgtctctcgcctcagctctcggctatggagctagcccctgctccttggcacgcctcggcaacgcatgccttctggccacggttggctctggtctaggtcgccgtagcgcccggtgttttggcacgtctccccgctccgaccaatttcgcaccttgtcgtccatgaagctcgcccagctcggatccgccgtcgcgtcctgttccctggtggcggagcatagcccttacgctcgtgcgttctctgttcaatttctagaacacctaggtttgtccaatgtcactcccttcgtcgttggtgctcggctccctgtttcagtttgccgtgccgcgccgtcattgtttctgtcgcgagcttgattcccgttgtcatcacttcgtcgtatttgccagtagccgccccgtcgtgctcgtctccggtgctcgcttcggtcgcggacgctgtcaagcccgtcgttttcccggccctgtgcttgcgcggctttctgcttgccagcgcgccctctcggctcgctcggccttaatccctatcgcgtcatcgacctcaccgcgact

SEQ ID NO: 145930 - DNA, 1273 bp, Zea Mays
gaaaacgcaaagaaccgatcttaatgccagttattatcatctaaaccttgcggttgtccttaatttccccattgtcgatctgctggaaagtggcaccgtgcaaggtatcccaaaaaaaaaaagcggacgcaaaaagtgcggggaaacataataagcgaaagcgagcaagtccgtgacggcgactaaactaatcgaggcagccgaccatgccagatgccaccttccacttccttcccttcccaattaagtaccccattccatcaacactccacatgctctcactcccactcccgtccctaccaccccgctccccgccatggcagcactcctcctcctcccgctcgtcctcgccgccagcctaggcttgggcaatgccgacccggctccggccaccatcgtgcacaaggacggcacgacctgcaccctctgcgcgtcctgcgacaatccctgcaacccgtcctactactacccgccgccgtcccctcccccggcgccggtcaccacgccctgcccgcccaccacgccgtcctacccttccccctccggcggaggcggaggccccgtcatctactcgtccccgccacctcctgctgcttccggcggcggcggcggccttggtggcggaggcttctactacccgccgcctaccggcggaggcggcggcagtggcggtggcgcgtcgcagcagggcggtggtgtgtacccgacggcgccgccgccgcccaacccgttcctgccctacttccccttctacttctacagcccgccgccgccgttgcactccggcgcgcgggccgtgaccgccgcctcgctgctgccggtgctcctcctcacaagcatgctgctgctgctgtgtcagacgccgtgaggggtccagatctgcagagcgagccatcattcaatgcgtgctgcacctgcatgcatgcatgcgctgtttctagtttctacaaggcggtgatcgatccagctggcgattcaattgtggttgggggtggcctgtgtattctaccggtactaaattgtaattgttgtttttttttacgattcggttcatttcctcgtcctctttcttcttctctttcggattcgtagcacagattgtacaaggaggggggcagcagttagtaataatctatagcatacccatttcatgtcacagaatgaagaagtctgttcgcctagctctctagctttgtttctcacctctctctctgttctacatgggatactgtgcctattttaaataattgttttgattatgaggttggtagat

SEQ ID NO: 145931 - DNA, 86 bp, Zea Mays
cacagacttccaacaaacgtccaacaaacaactgaaactctcagctctccagagtccagggcagctccacacaccaaataaaaacc

SEQ ID NO: 145932 - DNA, 522 bp, Zea Mays
ggcatggacgaccgcacctacaagggcggcatcaaggcgtactggaagcgccggggctactaccgcatggacggcgacgccgcgcggcgccgccagccgctccccaccgtggagctcggaaatggcgtctcccaggcccaggcccaggcccagccgccggcgggggatggctcgggccggcgccgccggtgccgcgggtggcgcgtgcgccgcggccagctggggcggcggctgctccgcgcgctgtcccctcgccggtggctcatgcggctccgcgacgcgtacgtgtccgccatgctgcggctggcctcctcccccgccgtcgggtacggcgccggcgcgcccttctgcgccacggcgacccacggcgcggcggcggcggcggccttcgcgcggccggcgcagctcaaggagtacgacgagaaggtgctggtggagatctacaggtccatactcgcgcgcggcgggcctctcgccggcgcgcctgccgccgccacgctgcggctaccgacggctgtttga

SEQ ID NO: 145933 - DNA, 938 bp, Zea Mays
atgcttctttaaattctgctgccattctgctaccgtgggcgtcgtacagcccccgttcccatagaggacagtctgctgccgcaagcctagcttcgtccacctctgaatcaagaaacaaaacaactaggcatggacgaccgcacctacaagggcggcatcaaggcgtactggaagcgccggggctactaccgcatggacggcgacgccgcgcggcgccgccagccgctccccaccgtggagctcggaggtggcgtcgcccaggcccaggcccaggcccagccgccgacgggggatggctcgggccggcgccggcgccgcgggtggcgcgtgcgccgcggccagctggggcggcggctgctccgcgcgctgtcccctcgccggtggctcatgcggctccgcgacgcgtacgtgtccgccatgctgcggctggcctcctcccccgccgtcgggtacggcgccggcgcgcccttctgcgccacggcgacccacggcgcggcggcggcggcggccttcgcgcggccggcgcagctcaaggagtacgacgagaaggtgctggtggagatctacaggtccatactcgcgcgcggcgggcctctcgccggcgcgcctgccgccgccacgctgcggctaccgacggctgtttgagcttgagcggcagaagagacgtgtgttcttcttgcttatttttattcttatgtgtcgcgacttgtactgagttgtaacttgcgtgcgccccacaagctagcgtttcttcttcgttcccaattcgatatcatcaagtcttatgttatgggcttggagtccaaagtctggtgcatattttttgcaccgcgggggaaaaaaaacgggctctgtctagtttgtctgctatactagtgcgagtgcatctatagtgaaaatgtttctattgatgaagaagaacaaaaaaaatgcttggc

SEQ ID NO: 145934 - DNA, 1528 bp, Zea Mays
ctagctcagcacttgccaagaagcagcccctcgtagacgtcgctgtcgtcgcatcgtataagtaggagcgcgcgtgcctcttcccggttcaacctggttcaaacacctcgcttcactagaggaataatctagcagcttctgttgcctccaaattgtccggagaaaggagttgaagcagtgtgagagggccctgagacgatggcgaacctgttcctcaagcaggcaaagcagtacgtggcgacgcggccggtctacccgccggagctcttcgacttcatcgcctccaagacccctcgccgcgacatggcctgggatgtcggcaccggcaacggccaggccgcagcgtcgctggcgaagctgtacaagcacgtggtgggcacggacacgagcgcgcagcagctcgcctacgcgacgcgcctcagcaacacccgctacgtgcacaccccagcggacctgcccctggaggggatccacgccaccgtggccccgccggcctccgtcgacctcgtcaccgtcgcgcaggccttccactggctcgacctcccgcgcttctacgcgcaggcccgctccgtgctgcgccccggccacggcgtgctcgccgcctggtgctacaccgagccacgcgtcaacgccgccgtcgacgccgtgttctggcgcctgtaccacgggtcccagggattctgggcgcccaaccgccggatggtcgacgacgagtaccggagcgccgacttcccgttcgacccggtcgagggggagaagcacacgggcccgttccagttctccacgcaccgccggatggacctcgatgactacctcatgtatatcacgtcctggtccgcctaccagactgccaaggataacggcgtcgagctgctcgatgcgcccaccgtccaggagttcgcggcggcgtggggcggcgatgccaaggaggtgaagaccgtcacgtaccccatcttcctcaggattggcaaggtcaggtcggagtgagctgcacggaaaaatgaaactcgacaaactatggatacactacggacgctccgacgattgatgatcgatcatctaggaatcgatgcttataacctttttgaataatgttttattcgattgcaaatgtttgttcgatctgcacaattgtatttcaaattctaatgcatgcactattctgttcgactttttttttctttgtgtcttcttagatagtgtaaatttcaatatctgtactgtgatgacaaaatatccacaataacccacgtggctgaaatctttggtcttcatatatgtcatacttggctaagtaaaactctttgagaaatcgttttagcaatatcactaccgaaatcgtgtttttttgcctgagtgtataagacactcgatagatttttttctttgtgtcttcttgatattgtaaatttcaatatttgtactgtgatgacaaaatatccacaataacccatgtggctgaaatctttggtcttcatgtacgtcatacttggctaagtaaaactctttgagaaatcgttttagcacc

SEQ ID NO: 145935 - DNA, 1282 bp, Zea Mays
aacctggttcaaacacctcgcttcactagaggaataatctagcagcttctgttgcctccaaattgtccggagaaaggagttgaagcagtgtgagagggccctgagacgatggcgaacctgttcctcaagcaggcaaagcagtacgtggcgacgcggccggtctacccgccggagctcttcgacttcatcgcctccaagacccctcgccgcgacatggcctgggatgtcggcaccggcaacggccaggccgcagcgtcggtcagtcgaccatgcatcctcgctctcccctacacggcacgctgcacacgcactgtccgtgcattatctttataaagtgaaggctggctgggtgaactttcattcaacttgcagctggcgaagctgtacaagcacgtggtgggcacggacacgagcgcgcagcagctcgcctacgcgacgcgcctcagcaacacccgctacgtgcacaccccagcggacctgcccctggaggggatccacgccaccgtggccccgccggcctccgtcgacctcgtcaccgtcgcgcaggccttccactggctcgacctcccgcgcttctacgcgcaggcccgctccgtgctgcgccccggccacggcgtgctcgccgcctggtgctacaccgagccacgcgtcaacgccgccgtcgacgccgtgttctggcgcctgtaccacgggtcccagggattctgggcgcccaaccgccggatggtcgacgacgagtaccggagcgccgacttcccgttcgacccggtcgagggggagaagcacacgggcccgttccagttctccacgcaccgccggatggacctcgatgactacctcatgtatatcacgtcctggtccgcctaccagactgccaaggataacggcgtcgagctgctcgatgcgcccaccgtccaggagttcgcggcggcgtggggcggcgatgccaaggaggtgaagaccgtcacgtaccccatcttcctcaggattggcaaggtcaggtcggagtgagctgcacggaaaaatgaaactcgacaaactatggatacactacggacgctccgacgattgatgatcgatcatctaggaatcgatgcttataacctttttgaataatgttttattcgattgcaaatgtttgttcgatctgcacaattgtatttcaaattctaatgcatgcactattctgttcgactttttttttctttgtgtcttcttagatagtgtaaatttcaatatctgtactgtgatgacaaaatatccacaataacccacgtggctg

SEQ ID NO: 145936 - DNA, 766 bp, Zea Mays
gcgattgagcgcgagtcaaaaaaaggaccgccaaggaagcgagcgcggaatcaggcgagatccccttcgcctacgacgccagtaggctcgagaatcgcgtccagctcgaggccgaccgagagcgcgtgcaggcagctgctgggcctgcagttccaccacacgtccggcgacctctactacggcgacgcgtacctggggctgatgggcggcgggcgccgcgacgggctggcggaggcggtggcggtgcgccactcaacttcgtcaacagcgtggaggtcgacctggagaccggcgacgtctacttcaccgacagcaacaccacgtactagcggaggtacatacgatcccacgccacaactagagagtccaactccgcctcctactccacgtcgtgcgcggtgcgccgacgccgccactatcgctgacgccgaacgctgcatgtcctcctccccgctagcgcctctgaagccgagtccaactcatgtcgtgcgccgccgccactacggcgccgaccccagctctgcggtttctacgctatggctgcttctctgttttggtctattgatcagaacttcagaagaatattatctcttggagtaccataattgcagggcattaacagaacaaaatatatcatgtgggtgtcggtttgtttactgaaatggttgcttcaggcataaaactaaactctactaccctagcaagcatacttgctagctttttagagctgaggttattgaggtatgaaaaaaattcattgcttctc

SEQ ID NO: 145937 - DNA, 849 bp, Zea Mays
agcgctagcgcgtcgcccctgcgccggggctggagcgcgagcgccgccgttagttccgccacgatctgctcctcgcgtcccacccaggcgtcgtagaacgccgccatatcgtcggagcaagacatggcgggcggtgggagggggaggacttggacgttgctcttggggcgagcgcggctgtggctgtggctgcggcggcacctttgctgcggtgcgcgaacataaagttcacggtttctttgcctttaaggttctcgattgcgtggtctgctttcttaggcgcggaggcaaacgcgcaacggcgaacgggggccggggaacagacgatgcgcatggaagcgcgcctggtggcggccgcggaaggtgacgacggcgtaggtccaagctagttgactataaacaacacgacgtccagtagaccagtacgactaggtgtaggactgcgctctgcgttatattaaataaatggggcttcgtttctttttccctgttgcctgctgggcctcccctgttttagtatccatcaggggaacgaggacagagcatgcccgcttgcacgcgaccgcgagtcgcgaggggagcggagaattccgcggcggtacgtcaccgtggcagaggctgccaattcgcatttcgcgtcggtgccgcgtggccttccggctcgctggcgctggggttggtgttgctcgtaggtggttcacgccgacccacgagcctggagaaatcttgtatgagaggttcagcggatgaatatggcctaggtggcaaacccctgccatctgttgcttcgacatttatgtaggctgatgtgctgagaactctgaagtgaaattgcatttacctcaacaa

SEQ ID NO: 145938 - DNA, 193 bp, Zea Mays
tctatgtccagatcataactcaaccgatgacggagtgggatggtggaaggaggagcattttagtgctgcagatatggatggtgatggctttctaaatcttactgagtttaatgattttttacatccagctgatactaccaacccaaagctaatacattggttgtgcaaagaagaagtcaggtacaagtttccc

SEQ ID NO: 145939 - DNA, 312 bp, Zea Mays
atagtcaagcaaaacttgaggataggtcatattctgatatgcagcaaaggtaggttcatcctgcatctccttcaagcatgaagcagccatccaatatgaaatcaatatcccctggtaggagagacatgcaagtgcaaaaccagaaacgatatgctcctatgcgggaagatgaagatattggatgcaaatcagaaatggggagtctgaaccagaacaaagatgtgattctcaccatggtttcaactgtgcagtattcaagacgcccaacacctacaaattgttggaggtgagtcatgttttaccttcattatg

SEQ ID NO: 145940 - DNA, 1857 bp, Zea Mays
tttttcttcttcggctgccttatcctcttcttcttccagccatcgtctacatccgtcgctggattttttttcccctgcgccgctcatctgctgttcttatcccatgccgccgttcgctggccgcgtgtactctggggtcgtcgtgctggccgcctccctcgtcttctcctcaggccctcccgcgctctccctgccttctgcacgcgcgcagctcgccccagatcctcccagccatgacgcgcgcttccctgtgccccgcgttccttctctgcactgcttcctctgctccatcttcaagcacgccgcgctccaaatcgcctgctgttcctcttccccagccatggccgcgcctggctcgccggcgttcaggccgcggcttcctcctccaactccggtcggccaagagcctagctgcccccttgcttctctccctccatttcccagcagcgccctgtccctgtcgaagcccttctatggcgcgcgtggatttctcctcctccatccccagctagcctgcgagctcctccctcctccctgcatccatggatctcggcgcccatctccatggctcgccctgcgtccagccgccgcgcccggttccgagtccctttcctggccgagttccctgctccatctctgccctctgccggcgctccagctcctccatccatggccatgcctgctgctcgtcggtgctcgccgcgggagacggcgcttggtcgcccaaccttcctgctcctccctgctgtcgtgtccctggctcctgctccactcgttgcgtgcgcctgcgcgctgcccagatggccgtctgtccttccgtgtcacgcctagctccagctcggtctctgctcgatgcccagcgtcgcgcagcacggctcggcccgacggcatagagtgtctcgtcatcgccggacttgtctcgccgaccatcgtggcgttgttatttcctgctacgccgtgacatcgtcgagctccggtgtttagtgtcgaggtcgctgcgtcgttgtcgctctgacttccgtgtcctcgcgcggtatgcggcggtagtgttcacatccgcggcatcagcatccccatcgccgttgaactcccagacatgttcctctctgttcgcttgtcctcagttccggtctgatctcgcgcgcgtgattttgaaactctgcgcgttcgtcgtgtcgcgatgtgtgccgatattctctaccggcagacctcgccatcaaccatgttcaagtaattgctggcccctcagacccggccattgtttgccgcggaaccactgttggattaatttttagcttccctcgcgcggctctttggagataatctcctcaccggctgtcgctcccaatcttcagctcatcgactcaccgtcgtgtttcttgttttccctcgtcggtcggcctcgccgtggctaagtatgtccgccgtgttatgtgcttcggtctttggtcgctgcctcttgctcaccatcccctattcgatctcgtcgtcaagcttcgcctcagccttagctcgttggtcacgctcgtcagatgtgcgaccgaggacttcagctgaaggccgtcgtcaggcaactaccaagtcgagttgtgatgtggtgagccgattcactatttttattatcggttttatgatcgtaaaataagacacttcgtatacgtatacgattaagttagaaatactagtaatgcgaggtgtgcacttggtaattatggatagattcgttattatgtcgttagggtgtgtgatattagggagtcgatgataggagggaaattctagccgttgggcgatgacgggaaggacgttgttcatcgcgtgcttaatgtttgatggatagtatgaactgaaatcatc

SEQ ID NO: 145941 - DNA, 2093 bp, Zea Mays
cagtcgccatgcccatgtccatgtgaaggagctcagagggctctcggggcacgcgtccatggcgggagaaaagtaatggccgttctaaaaccgaaaaaggaaacgacaataaatatacggcggaaaacagtcccgcgcgcctttaaaagcagcgctcgggtggccacttgtgccaagcgaggaggcagtgcggagacgggagccagtggccagtgacagtgagcggcgacgttccagtgtccactgtccagtaggcgagcgaggaggtggtccattggccggccatggctcgtctccgctgcgtcttcgtcgtcttcgtcctgctctcgtctgccctccgccttccaggcgacgccattgcctcccgggggcaccatggccccgccgcacacgactacagggacgcgctcgtcaagtccatcctcttcttcgagggccagcggtcgggcaagctgccgccgtcgcagcgcgtgtcctggcgcagggactcgggactctccgacggtcactccgccaaggtggacctggtgggcgggtaccacgacgctggtgacaacgtcaagttcgggttcccgatggcgttcagcatgacgatgctggcgtggagcgtggtggagtttggcggcctcatgaagtcggagctgcagcacgccagggacgccgtccgctggggcgccgactacctgctcaaggccacggcgcacccggacaccatctacgtccaggtcggtgacgcgaccaaggaccacgcgtgctgggagcggccggaggacatggacacccccaggacggtgtacaaggtggaccgtggcaccccgggatccgacgtcgccgccgagactgccgcggctctcgccgccgcctccctcgtcttccgcaagtccgacccggcctacgccagccgccttgtcgccagggccaagagggtgttcgagttcgcggacaagcaccgcggctcctacagcaccgggctggcggcggacgtgtgcccgtactactgctcctactccgggtaccaggacgagctgctgtggggcgcggcgtggctccaccgcgccaccaagagcccctcttacctgagctacatccagacgaacgggcaggtgctgggcgcggacgagtcggacaacacgttcgggtgggacaacaagcacgcgggcgcgcgggtgctcatctccaagtcgttcctggtgcagcgcctgggcgcgctccacgagtacaagggccacgccgacggcttcatttgctccatggtgcccggcacggccacggaccagacgcagtacacccggggcgggctgctgttcaggcttagcgacagcaacatgcagtacgtgacgtcgagctctttcctcctgctcacctacgccaagtacctggcgttcgccaagcagacggtgcgctgcggcggcgtggcggtcacgccgcagcggctgcgcgccatcgcgcgcaggcaggtggactacctgctggggagcaacccgatggggatgtcctacatggtgggctacggcgccaagtacccgcgccgcatccaccaccgcgcttcgtcgctgccgtccgtggcggcgcacccggctaggatcggttgctcgcaggggttcaccgcgctgtacgcgggtggggccaatcccaacctgctcgtcggtgccgtcgtcgggggacccgacatgcaggacaggttccccgacgagcggaacgaccacgagcactcggagccggccacctacatcaacgcgccgctcgtcggcgcgctcgcctacctcgcgcactcctacggccagctctaagctccctagcgttaattgttgccgtgttgattgattgttcggaaattagagcatcgcgatttgacgaccccagtgcaagcaaaaccaaggacgcttcgcttgtgggtcttaatatattgccactagtactcgtaggcgtgatttgtttgttacgcgacgccgctgctggcgcacgtatgtaagcgcggagacaaactgtgctccacggctccaccaagtgtactgctactaaggttgcagctcgcaactctatctgatgctatctactgttttgtttaattacatccacgaacctatccgcca

SEQ ID NO: 145942 - DNA, 1514 bp, Zea Mays
ggcagtgcggagacgggagccagtggccagtgacagtgagcggcgacgttccagtgtccactgtccagtaggcgagcgaggacatggacacccccaggacggtgtacaaggtggaccgtggcaccccgggatccgacgtcgccgccgagactgccgcggctctcgccgccgcctccctcgtcttccgcaagtccgacccggcctacgccagccgccttgtcgccagggccaagagggtgttcgagttcgcggacaagcaccgcggctcctacagcaccgggctggcggcggacgtgtgcccgtactactgctcctactccgggtaccaggacgagctgctgtggggcgcggcgtggctccaccgcgccaccaagagcccctcttacctgagctacatccagacgaacgggcaggtgctgggcgcggacgagtcggacaacacgttcgggtgggacaacaagcacgcgggcgcgcgggtgctcatctccaagtcgttcctggtgcagcgcctgggcgcgctccacgagtacaagggccacgccgacggcttcatttgctccatggtgcccggcacggccacggaccagacgcagtacacccggggcgggctgctgttcaggcttagcgacagcaacatgcagtacgtgacgtcgagctctttcctcctgctcacctacgccaagtacctggcgttcgccaagcagacggtgcgctgcggcggcgtggcggtcacgccgcagcggctgcgcgccatcgcgcgcaggcaggtggactacctgctggggagcaacccgatggggatgtcctacatggtgggctacggcgccaagtacccgcgccgcatccaccaccgcgcttcgtcgctgccgtccgtggcggcgcacccggctaggatcggttgctcgcaggggttcaccgcgctgtacgcgggtggggccaatcccaacctgctcgtcggtgccgtcgtcgggggacccgacatgcaggacaggttccccgacgagcggaacgaccacgagcactcggagccggccacctacatcaacgcgccgctcgtcggcgcgctcgcctacctcgcgcactcctacggccagctctaagctccctagcgttaattgttgccgtgttgattgattgttcggaaattagagcatcgcgatttgacgaccccagtgcaagcaaaaccaaggacgcttcgcttgtgggtcttaatatattgccactagtactcgtaggcgtgatttgtttgttacgcgacgccgctgctggcgcacgtatgtaagcgcggagacaaactgtgctccacggctccaccaagtgtactgctactaaggttgcagctcgcaactctatctgatgctatctactgttttgtttaattacatccacgaacctatccgccattttgtgttgtcgttacgttgccacttatatttcgtatttcttgttatcgttactgtttatacgtgaaactataacaaatgggaaatgtactccctctgcccaaaataaaa

SEQ ID NO: 145943 - DNA, 774 bp, Zea Mays
gaacaatttagattggacgaaacagcggacgaagaacatgcaaaacgtgtattccacaatgttgctagaaaagttataaatggttcaatgtcagatgcacgggtcaaagctgttaccatgtacttcaagaaagtgaatggtcaaagaatgaccaacaagcaggcatgtgaaatccacttgacagctgaggagtacaaacaaagtgaagtggactggctcactgctcatcctgaagcttgggtcaagctctgcgagtactgggcctcagatgagtacaaagtgatttcagatagaaatcgtttgaaccggaagagcaaaccaggcctccatcgatttggagcagatggatttattgggaaatcacaacgaatggaggctcgtgatggtgttgaaccccgattcattgacgtttacatggagggacaccgaggtccagatccagagcatccagaagttttatgtgacgacagcccgacagaaaaagctagtaggttggggatcggtgatggggttgtgagtcacgatagctttggttgtcggtcagtttcctcggtggggattagatctcgaacttcaacttcgagggaatcaaagcttgatgagcaactaagacaacaacaacaacaagttaaacaactatctcaacaagttcagatgatgcagggaatgctgatgcattggcactgtggcattagacagatcaaggattacccaagacaggacacctggaaagagaaaacctcctcgggttccagaattagttgcacacactga

SEQ ID NO: 145944 - DNA, 529 bp, Zea Mays
gtcataccgccgaaccaaatccaacgtccacagaaaagaaaacacattcccgtcgactcccctagtttcatcctattcatttctccccccaaacactccagctactagttactcgaggaatccatgtgcggcggcgcaatcatcttcgactacatcccggcgcggcgccgggtgtcgacagccgacttctggcctggttctgaagcagacgccgaggacattcatgcctcgcactccactgacccacagagaggtaagccctgcttccgtctttctctgctctccaggcgacaacacgccatccaggcagcaagctgcaaacggtcaatggtgtgacgccgtgctgccgactgttcccatgcagcgccgccgccgcgcgcgaaggcgaagcctgggcgccgcaagaaccagtaccgcgggatccggcagcggccgtggggcaagtgggcggcggagatccgcgaccccgtgaagggcgtccgcgtctggctcggcacctaccccaccgctgaggccgccgcgcgcgcgt

SEQ ID NO: 145945 - DNA, 1067 bp, Zea Mays
ataccgccgaaccaaatccaacgtccacagaaaagaaaacacattcccgtcgactcccctagtttcatcctattcatttctccccccaaacactccagctactagttactcgaggaatccatgtgcggcggcgcaatcatcttcgactacatcccggcgcggcgccgggtgtcgacagccgacttctggcctggttctgaagcagacgccgaggacattcatgcctcgcactccactgacccacagagagcgccgccgccgcgcgcgaaggcgaagcctgggcgccgcaagaaccagtaccgcgggatccggcagcggccgtggggcaagtgggcggcggagatccgcgaccccgtgaagggcgtccgcgtctggctcggcacctaccccaccgctgaggccgccgcgcgcgcgtacgaccgcgccgcgaggcgcatcaggggagccaaagccaaggtgaacttccccagcgacacctcctccagcgtcaccgtgccgacggcggtgtcgaggtctgctgctgctgctgctgcacaggccccggccgttctcccgctgcccaaggtggaggcacagactcaggtgtccgacgaggtcaaggagttgtccgaggagctgatggcctacgagaactacatgaacttcctcggcatcccttacatggagggagggactacagctgcaagtgccaccacagctgccgcctccgcggccgccggcgtcgccgaagaatcgcaggtcccggctccggccgggctgtggagcttcgaagattactactacccgccgtctctgtcgctctttactgaatgatgaacgtgctttgaccgtgcctgttttggtaacacctttgtgaacagatttcctgctcgtcgtagtcggtgtgatgtgatggcatcaatcgagctcctgtcctgtaattttgttgaacccatccattgtttcgtgactactgtgtgtccctgtaactcgcaagttgaggcatcaaagtttccagtttaactctgatctgtgctgctcagcagttctctgccgtaccgacgaatttgttttgttttgtacgtgat

SEQ ID NO: 145946 - DNA, 120 bp, Zea Mays
gtaatctttccaagtctgactggtcaacgtaaaagtcgtactccacgactccaccaacatttagtagtactcagggtcctgccattcatattttgaaatttggttttagcagttaggttg

SEQ ID NO: 145947 - DNA, 926 bp, Zea Mays
cccaaatcttccccgaaaccactcctcagcccggtgagcgctcgaccatcagaaatgggcgccggcgacggcaatggcacgcgccccaaggcgaacgaggtgacgatctcgtgcgacgagggtcccgggcacgcgtttccgttccccaagccgcacgcccccgaccccgacccaccgcaggcgtccgacccggcgaactacgccgtcgctggcaagatactcctcgccgcggcgggggcgttcgcgggcgtgctcctggcgctcgtcgcgctgcacctctacagcagcacccggcgccggcgcctcggcgccggccagccgcggctgctccggagcttggccatcgccggtggcgacgaggaccgccgcgacggcgacggcgacggcgcgggggcgccttccccccgcggcctcgactacgcagttctcgccgcgataccagtagtgtcgatcgaagcaggcgcgggggcaggggactgcgcggtctgcctcgcggagctcgagtcgggggagaaggcccgcgcgctgccgcggtgcggccaccgcttccacgtcgagtgcatcgacgcctggttccgtgggaacgccacatgcccgctctgccgcgccgacgtcgtcgtgccgccgagcgctaccgcgccagccgagggcggggcccagccggaggtgcgcatagacgtggcaggggacgccgtcgccgcgccgcccaatggcttcagggtggcgccggtgatggggaggatgcatagcgaccaggatcttgagaaggcgaggcgggtctttgcttccacccgattctcttccttctgacaagatccatcggctcccacggtcacagatcctcgaccgtttcggagtgccattccactgtgcatagatttgttggtgatgccagctaattttgcaatgatttgtagtgtgatttc

SEQ ID NO: 145948 - DNA, 1998 bp, Zea Mays
aaggataaaaatgacatgagttcccgttttgctcccgagttctctctcacgtccatccctctctctcgtctcgttctttagcagggccggctggagcgcccactcctccctccagcccggccccagccgcgccgccgcgccggtcgtagacccaacgcccgccgcccagcccagcgcgccctccggccgtgaggcggagaggatcgggcgggcctcggggcgagcgccacgcgtagacggcggttgaggagcctgagaaaacaacggtcctccttcaagatcctggcgtaggagattgtattccgtctgattaatcggcggagagcaagcgggtgttgcggctgcgcgagcatggcgggcgaggaggctgcggagggcagcggaaccaggaggcacatggatctaaacctgtatctcggcctccctccattgccgcggcctccagtctggctggacccgacgttgatgcccaacttgaccggtgctgcgccagaatcctcaataactggtgagcctgaggaatcgttggccctgggggcggcagcctattctccgtcgaatgcactttccaccccggaggagcacccaatgcttgatcccatagtttattcctggctcgacggcaacaggaccgatggtgaagaggacactgatgctcctgagccggggccagtggatggtgccaatgtctctaggtcgcagcttgtggtagctgccacaggattggaaggggatgatgatcttcctctagtaaggtttgtgcgccctagccagatggttgttgctggtggaatggagacggtgaacacaagtatacttcagcagtccattcaaagggctgctgcaattgaggccaggactcctgaactccgctttcagagggtgatacagattagccagcagcatagaattgtgaggccagcatcagtgaaccgcagtcaaggggcagctagtacagatgcggataggcttgtctgggcaatccagcgcactcataactctttagaagcaacaaggcggcaaaaactagatgacaacaacttgtgtggaaacggttctgctaagaaggatgagtcctgtgactgcaactccagctttgagtgcaatatctgtcttgacccagctaaacagcctgtggttacaccctgcggtcacctcttctgttggccatgcttgtaccagtggcttcatgcacattcaccccactctgagtgccctgtatgcaagggtgaggtgctagaactgaatgtcactccgatatatggaagaggcggtgaagaagggaattccaccaaccctgacttcccacctaggccacgagcaaacagaagggagagcctgaggcaacagctgcaaatgacagacacaagaggaattgcaacagtggtgaggcagttgatacaaaaccagggtataattagcgttctcccaagcccaacagggatcgagatgtcggtggttcctgcaggccggcaaagggctagggctcggagacagcaaaggcaggataataatgcatcatcttccatacacgttgtagcgcagaatatgggcaatgttgcccctgagagcagcaaccaaatccagttgtcacattctaacggtgacaatgctgcacagatggttcttgcagctcctcagcagtcatcatctgtcgaacagctgtcaacttctagcaccacagctgttatattgggcgagcctgggtcaagtaggcggtcaaggccttcggagtctccaaccataagaagaacgaggaggaggccacagtaggtactcgagtgttgtcactcccttcagtaaaatctacagaccatgccccagtgatagttattaccatgattatctccaataacatctcaaggttaataatgtagaaatgtatatgccatcactggtttctgcctttctcttacattccatgtatcatctattatgcaaaacgagtcgaaatatcagttccagtatctatgataatcttgacctttgtatactggg

SEQ ID NO: 145949 - DNA, 2035 bp, Zea Mays
aaggataaaaatgacatgagttcccgttttgctcccgagttctctctcacgtccatccctctctctcgtctcgttctttagcagggccggctggagcgcccactcctccctccagcccggccccagccgcgccgccgcgccggtcgtagacccaacgcccgccgcccagcccagcgcgccctccggccgtgaggcggagaggatcgggcgggcctcggggcgagcgccacgcgtagacggcggttgaggagcctgagaaaacaacggtcctccttcaagatcctgatccctacgcgcaggcgtaggagattgtattccgtctgattaatcggcggagagcaagcgggtgttgcggctgcgcgagcatggcgggcgaggaggctgcggagggcagcggaaccaggaggcacatggatctaaacctgtatctcggcctccctccattgccgcggcctccagtctggctggacccgacgttgatgcccaacttgaccggtgctgcgccagaatcctcaataactggtgagcctgaggaatcgttggccctgggggcggcagcctattctccgtcgaatgcactttccaccccggaggagcacccaatgcttgatcccatagtttattcctggctcgacggcaacaggaccgatggtgaagaggacactgatgctcctgagccggggccagtggatggtgccaatgtctctaggtcgcagcttgtggtagctgccacaggattggaaggggatgatgatcttcctctagtaaggtttgtgcgccctagccagatggttgttgctggtggaatggagacggtgaacacaagtatacttcagcagtccattcaaagggctgctgcaattgaggccaggactcctgaactccgctttcagagggtgatacagattagccagcagcatagaattgtgaggccagcatcagtgaaccgcagtcaaggggcagctagtacagatgcggataggcttgtctgggcaatccagcgcactcataactctttagaagcaacaaggcggcaaaaactagatgacaacaacttgtgtggaaacggttctgctaagaaggatgagtcctgtgactgcaactccagctttgagtgcaatatctgtcttgacccagctaaacagcctgtggttacaccctgcggtcacctcttctgttggccatgcttgtaccagtggcttcatgcacattcaccccactctgagtgccctgtatgcaagggtgaggtgctagaactgaatgtcactccgatatatggaagaggcggtgaagaagggaattccaccaaccctgacttcccacctaggccacgagcaaacagaagggagagcctgaggcaacagctgcaaatgacagacacaagaggaattgcaacagtggtgaggcagttgatacaaaaccagggtataattagcgttctcccaagcccaacagggatcgagatgtcggtggttcctgcaggccggcaaagggctagggctcggagacagcaaaggcaggataataatgcatcatcttccatacacgttgtagcgcagaatatgggcaatgttgcccctgagagcagcaaccaaatccagttgtcacattctaacggtgacaatgctgcacagatggttcttgcagctcctcagcagtcatcatctgtcgaacagctgtcaacttctagcaccacagctgttatattgggcgagcctgggtcaagtaggcggtcaaggccttcggagtctccaaccataagaagaacgaggaggaggccacagtaggtactcgagtgttgtcactcccttcagtaaaatctacagaccatgccccagtgatagttattaccatgattatctccaataacatctcaaggttaataatgtagaaatgtatatgccatcactggtttctgcctttctcttacattccatgtatcatctattatgcaaaacgagtcgaaatatcagttccagtatctatgataatcttgacctttgtatactgggaatatattttctgatttagcctc

SEQ ID NO: 145950 - DNA, 2078 bp, Zea Mays
ctctcgtctcgttctttagcagggccggctggagcgcccactcctccctccagcccggccccagccgcgccgccgcgccggtcgtagacccaacgcccgccgcccagcccagcgcgccctccggccgtgaggcggagaggatcgggcgggcctcggggcgagcgccacgcgtagacggcggttgaggagcctgagaaaacaacggtcctccttcaagatcctggtgggtcgcgccctgcgccgcgaaattccctgatgtctatgcatgttcatcttaaagattcgattttgttgacccttttgatccgacgcagatccctacgcgcaggcgtaggagattgtattccgtctgattaatcggcggagagcaagcgggtgttgcggctgcgcgagcatggcgggcgaggaggctgcggagggcagcggaaccaggaggcacatggatctaaacctgtatctcggcctccctccattgccgcggcctccagtctggctggacccgacgttgatgcccaacttgaccggtgctgcgccagaatcctcaataactggtgagcctgaggaatcgttggccctgggggcggcagcctattctccgtcgaatgcactttccaccccggaggagcacccaatgcttgatcccatagtttattcctggctcgacggcaacaggaccgatggtgaagaggacactgatgctcctgagccggggccagtggatggtgccaatgtctctaggtcgcagcttgtggtagctgccacaggattggaaggggatgatgatcttcctctagtaaggtttgtgcgccctagccagatggttgttgctggtggaatggagacggtgaacacaagtatacttcagcagtccattcaaagggctgctgcaattgaggccaggactcctgaactccgctttcagagggtgatacagattagccagcagcatagaattgtgaggccagcatcagtgaaccgcagtcaaggggcagctagtacagatgcggataggcttgtctgggcaatccagcgcactcataactctttagaagcaacaaggcggcaaaaactagatgacaacaacttgtgtggaaacggttctgctaagaaggatgagtcctgtgactgcaactccagctttgagtgcaatatctgtcttgacccagctaaacagcctgtggttacaccctgcggtcacctcttctgttggccatgcttgtaccagtggcttcatgcacattcaccccactctgagtgccctgtatgcaagggtgaggtgctagaactgaatgtcactccgatatatggaagaggcggtgaagaagggaattccaccaaccctgacttcccacctaggccacgagcaaacagaagggagagcctgaggcaacagctgcaaatgacagacacaagaggaattgcaacagtggtgaggcagttgatacaaaaccagggtataattagcgttctcccaagcccaacagggatcgagatgtcggtggttcctgcaggccggcaaagggctagggctcggagacagcaaaggcaggataataatgcatcatcttccatacacgttgtagcgcagaatatgggcaatgttgcccctgagagcagcaaccaaatccagttgtcacattctaacggtgacaatgctgcacagatggttcttgcagctcctcagcagtcatcatctgtcgaacagctgtcaacttctagcaccacagctgttatattgggcgagcctgggtcaagtaggcggtcaaggccttcggagtctccaaccataagaagaacgaggaggaggccacagtaggtactcgagtgttgtcactcccttcagtaaaatctacagaccatgccccagtgatagttattaccatgattatctccaataacatctcaaggttaataatgtagaaatgtatatgccatcactggtttctgcctttctcttacattccatgtatcatctattatgcaaaacgagtcgaaatatcagttccagtatctatgataatcttgacctttgtatactgggaatatattttctgatttagcctctgtttctggtatga

SEQ ID NO: 145951 - DNA, 103 bp, Zea Mays
tattgtttttccaatggatttatcaaaaatactgatttggaatttgagggggctgaacaagaaggctaggcatgatgcagtgcgggttatgattgactctacc

SEQ ID NO: 145952 - DNA, 92 bp, Zea Mays
gaagcatagaaatgcaggagtgtttgataaatctgctcccaatgtccataagatgctgtaagacattcaagatcttgccattcggtggaaaa

SEQ ID NO: 145953 - DNA, 432 bp, Zea Mays
gggccgtttcttggtttttcctctttctccttcctctcgctcgctcccctcccttcctcgctccctctcctcctcctccctttcattcctacctccgctcgcgccactctcctccgacagaggggcagggaccggtgcccacccgctcgtccgcccgccatggtctcctggatccgacggcagggaggccaaggtcacgtcggaggcggatccggcggcgcagcacgacgaggagcgctggtcgcgcctgctgccggagctgctcacggagatcatgcggcgcgtcgacgccggcgccgagcactggccgccgcggcgggacgtcatggtctgcgcctgcgtgtgccgccggtggcacgacgccgcggtctcggtcgtccgcccgtcgctcgtgtgtggcaggccaggatcaccttcccgtcgtcgctgggg

SEQ ID NO: 145954 - DNA, 529 bp, Zea Mays
agaggggtttggtcggagacaagggcaagggccggcgcacgtctgcggcctgtggcggcgctgcagacgaggtggatcgtgggtagctggccgtcgggggagtcggccggcggatcccccaccgcaggcaggcgcactcgaggcacctgatttctgctttgggaaagaagggatgtagcagcacggccactacacctttaataaaggaaccactgcttaataatgttgttaatcagggagggtcaagtctagggaattattatgttctagcctttcatggtagttgagctgatttttttgggggtgggctgagttacctatttttttaattggtcatgaatgtgctttactacttttgcattttgattatactacgtgaattatctgtcttttatatcctatatgaactctatgtgcccccccttgttatgcttctttcaagggaggtgctgccggattttgcaatattttctctctttatttcatttcttgtgttgcataagtttagtggaaagggtatttggtaaca

SEQ ID NO: 145955 - DNA, 99 bp, Zea Mays
atagtataaataagcacattacggatcagattgctttccaccctaagaataagaagctcatcatagaatggttgtggaaagtgttatccacaagagtgc

SEQ ID NO: 145956 - DNA, 108 bp, Zea Mays
taaacacatcaccattttagtccactttggagaactatcccctaattgcatgaactccgtctaccatggtatatcccctgattgcaatatcttaaacataacattaac

SEQ ID NO: 145957 - DNA, 867 bp, Zea Mays
accaaaaccaagcagcacatccaaccaagtcatccatcagctctgctcacgactcacaagcaagagctcagctcaattggagctcggtctctcgattcccaggaggaacggaaccaaattaagctccgttggttgcctgccagtagcgagtagtccggacacgggatgggcaacctcgtctcgcagtgcgtcgcgaacggtgccggcgcgcggcctctagtcgtcgagccggacggcagccggacgttggtggacaagaacaccggggtcgcagagctgatgatcgacgcgccggggcacgtggtggctcgcgccacggacgtggcgagagagcggcgggtgcgggcgatggcggccgacgagctcctgcgagctggcgtggtgtacctcctcgtgccggccggccgggccggtgcgcggctgggagaccgtgaagtcgaggccatcgcgcggttggtctgcgggaagaagaattcgaccaagagcagtcctggaggcggcaagagggtctttcccgacgtcaacggcgagggcaaccacgatcatggatttgggcccaggcaatggcaacccgccctacagactatctatgaggcctaggttttccttaagaagggaaatatagttttttttcttagagagagaataggaaccccattcattcattcatacatgcatattcttttttcttgttcttccttccggtgacgatggaagggcaagttgtgcatacaccctgtaaaggcataaccctctttggtgcagtcatttataagaaatcagaagagtaaaatgtatagatggtctctgaatttgtcaagagatgtcatttagatccataaactttgaaaataaatttctaacttc

SEQ ID NO: 145958 - DNA, 788 bp, Zea Mays
tctgtcaagtcgtgaatgccgataatattctgaaatttcaaatatttttaaatatataaatgaaaaagctaccctatttcatgagttcattgggccatctacgtactctaaaggcccataattgtaatcctcagcttggcgattcgtgcaaacccgtcatcatctcacgatcgaaatgcgggaaggcaccgaggtcaacaaggtcatttagcatacgcccgtacataatcctgctcttctcgccaatcacaaaaaccctaagcgccaccggacaattcgttgctcgcgatcctcgcttcgggatccggaagagatggccaagtcgaagaaccacacggcgcacaaccagtcgtacaaggcgcacaagaacggcatcaagaagcccaagcgccaccggcagacctccaccaaggggatggaccccaagttcctgaggaacctgaggtattcaaggaagggcaacaagaagagtggtgaggctgaggagtaggaaggaaagcatggttgtgtttcctatgttttagctcagttgtaaggtggaacttaggaccttttgctgccgaaatgtttttatgataatcatgttttgaagagttacggtttactttcattatttcctttgcccttggtaactaaaattagttgtttcgattgcgtctgggtttcattggaggctaacctgtttgggaggcggtttaatgttttatcttgtggtcgagtgagcattagagcatgtacaacttagagcttgatcggttttcatggtattatcatgcaatggaatgttt

SEQ ID NO: 145959 - DNA, 2476 bp, Zea Mays
cttggacatgagttgaaaggccctatcttttcatgtccatgtccatctcccgagtgaaagcgagcgagcgagcgaccgattgattgacgtgtgatgcctcactagctggagagcgctctctcctttgtggcaaatctcatcagcaacagagacggctggtgtgacaccttgtgaaaacgcccgctcgctcgctcagtcgctccgtctctctctccctccctccatatctccctttgccacctgctgtctccctcctcatctctctccagtcgagtcggcagtctctaccactctgcttcctttcccctcctcttcttctccagaaagcagaggcatggagcggcagaggaaggcaatgtggctgtaccccaaggtggtcggcttcaacccgccggagaggtggggccactccgcctgcttcttcgaaggggtcgtctacgtctttgggggatgctgcggcggcctgcacttcagcgacgtggtgacgctggacgtggagacgatggcgtggagcgcgctggccacgacggggcagcggccgggcacgcgggacagccacggcgccgcgctggtgggccaccggatgctcgtgttcgggggcaccaacggcggcaagaaggtgaacgagctgcacgtgctggacctgcgcaccagggagtggagccgcccgcagtgcaggggggcggcgccgtcgccgcgggagagccacagcgtcaccgtcgtcgggggcgaccgcctcgtggtcttcggcgggagcggggagggggagggcaactacctcagcgacgtgcacgtgctggacgtgcccaccatgacgtggtccacgccggaggccatcaggggcggcgcccccgcgcccagggacagccacagcgccgtcgccgtcggcgccaggctcttcgtcttcggcggggactgcggcgaccgctaccacggcggggtggacgtgctcgacgtcgacaccatggcgtggtcaaggtttcctgtcaagggcgcgtcgcctggcgtcagagcaggtcatgcggctttgagtgttgggtccaagatctatattatcggaggagttggtgacaagcaatactacagcgacgtctgggttctcgatgtcgccaaccgttcgtggagtcagctcgaggtgagcgggcagcgaccgcagggaaggttttcccacaccgcagtagtcatgaacaatgacattgcaatctatggaggatgcggcgaagacgagcgtcccctgaacgagcttctcattctgcaattgggctccgagcatccgaacggccgttacaacatttcgacgtgcaaggttctgagcaaccaatggagccaagagaggaggaagtttctccaatcagagactaaagatacaggtgcgagcaacggagaaacggtgcagaaacgtcgagaggcagaaattgagcagaggaatccgttcctgcgtggcctagagaacagccgtgcgaaacgaaggaaaaccgatgaagctcgcccgagcgaggcggccgagtcagagcagcaggaggagcactcgctgactctctcccagcactcctcgccgtcgcagtcagaccaagagcagaacggcggcggagctcacaagctctcgccctcgcccaacgcgtcggtctcagcgctgcaaccgttcgctcgcctcaaggctaacgacggcgctccgagtgctcctgggcgcggaggcggcggcgtgtcttcgaggccggctctgaagacggaccagttcctccgcaccgtcgcgccacagcatcatcggcaggaagtgcagttcctttcctccgaccataagaagcctcagccccggccggctcctggaccaccccttattggcgcagaggtccatgggacgatcgatggagctttcgattccgggtacctcatgacggccgtcgtgaatgggcagctcttcagaggcgttctgtttgctccgggacctggggttacggctccgagaccgacggtgcaccatcagatcctgacgagctcggccatgcctccccagcagcggccactgctcgcgcacgccatccctgtccacgcccggccggtgccgcaggcgacggggttcgtgctgccgaactgtgtccaccgcgcgcggcaagggttcccggcaaaggcagtcaagtccgagccggagcgaggcggcagcgacctgcacgatgttgtgctcaccctgggagggcctggagggggcaagtgagcccctcaagaacggtggtccaggtcgtcctggcctactgctgtttacctttgggaattgctttgtaaattagtcatctggtcgagtggaaataagtgtagcggcttttctgtgatcttttcaagggtcattttagggttcttcgatctgtgactttacatatatgaatatagtgttagcttgatctgtcattttagctagttttgttatcaacaagttggtgttgggagcttccttgcacacttgtgagtgtttgtattttct

SEQ ID NO: 145960 - DNA, 2487 bp, Zea Mays
cttggacatgagttgaaaggccctatcttttcatgtccatgtccatctcccgagtgaaagcgagcgagcgagcgaccgattgattgacgtgtgatgcctcactagctggagagcgctctctcctttgtggcaaatctcatcagcaacagagacggctggtgtgacaccttgtgaaaacgcccgctcgctcgctcagtcgctccgtctctctctccctccctccatatctccctttgccacctgctgtctccctcctcatctctctccagtcgagtcggcagtctctaccactctgcttcctttcccctcctcttcttctccagaaagcagaggcatggagcggcagaggaaggcaatgtggctgtaccccaaggtggtcggcttcaacccgccggagaggtggggccactccgcctgcttcttcgaaggggtcgtctacgtctttgggggatgctgcggcggcctgcacttcagcgacgtggtgacgctggacgtggagacgatggcgtggagcgcgctggccacgacggggcagcggccgggcacgcgggacagccacggcgccgcgctggtgggccaccggatgctcgtgttcgggggcaccaacggcggcaagaaggtgaacgagctgcacgtgctggacctgcgcaccagggagtggagccgcccgcagtgcaggggggcggcgccgtcgccgcgggagagccacagcgtcaccgtcgtcgggggcgaccgcctcgtggtcttcggcgggagcggggagggggagggcaactacctcagcgacgtgcacgtgctggacgtgcccaccatgacgtggtccacgccggaggccatcaggggcggcgcccccgcgcccagggacagccacagcgccgtcgccgtcggcgccaggctcttcgtcttcggcggggactgcggcgaccgctaccacggcggggtggacgtgctcgacgtcgacaccatggcgtggtcaaggtttcctgtcaagggcgcgtcgcctggcgtcagagcaggtcatgcggctttgagtgttgggtccaagatctatattatcggaggagttggtgacaagcaatactacagcgacgtctgggttctcgatgtcgccaaccgttcgtggagtcagctcgaggtgagcgggcagcgaccgcagggaaggttttcccacaccgcagtagtcatgaacaatgacattgcaatctatggaggatgcggcgaagacgagcgtcccctgaacgagcttctcattctgcaattgggctccgagcatccgaacggccgttacaacatttcgacgtgcaaggttctgagcaaccaatggagccaagagaggaggaagtttctccaatcagagactcaacatggcagaaagatacaggtgcgagcaacggagaaacggtgcagaaacgtcgagaggcagaaattgagcagaggaatccgttcctgcgtggcctagagaacagccgtgcgaaacgaaggaaaaccgatgaagctcgcccgagcgaggcggccgagtcagagcagcaggaggagcactcgctgactctctcccagcactcctcgccgtcgcagtcagaccaagagcagaacggcggcggagctcacaagctctcgccctcgcccaacgcgtcggtctcagcgctgcaaccgttcgctcgcctcaaggctaacgacggcgctccgagtgctcctgggcgcggaggcggcggcgtgtcttcgaggccggctctgaagacggaccagttcctccgcaccgtcgcgccacagcatcatcggcaggaagtgcagttcctttcctccgaccataagaagcctcagccccggccggctcctggaccaccccttattggcgcagaggtccatgggacgatcgatggagctttcgattccgggtacctcatgacggccgtcgtgaatgggcagctcttcagaggcgttctgtttgctccgggacctggggttacggctccgagaccgacggtgcaccatcagatcctgacgagctcggccatgcctccccagcagcggccactgctcgcgcacgccatccctgtccacgcccggccggtgccgcaggcgacggggttcgtgctgccgaactgtgtccaccgcgcgcggcaagggttcccggcaaaggcagtcaagtccgagccggagcgaggcggcagcgacctgcacgatgttgtgctcaccctgggagggcctggagggggcaagtgagcccctcaagaacggtggtccaggtcgtcctggcctactgctgtttacctttgggaattgctttgtaaattagtcatctggtcgagtggaaataagtgtagcggcttttctgtgatcttttcaagggtcattttagggttcttcgatctgtgactttacatatatgaatatagtgttagcttgatctgtcattttagctagttttgttatcaacaagttggtgttgggagcttccttgcacacttgtgagtgtttgtattttct

SEQ ID NO: 145961 - DNA, 2776 bp, Zea Mays
gaagcttaatacttactggtagctgcgaactagttcatcaggaagaagacgcatgctggtggtggtttgagctatgaccccgcctctaccggctgagggtagattattttggacaaaaggttgtttatcatctctggtgttcatcctctggagctgtgttttgtcccgctgctgtagtgtagcaagccagcaagcaaaatgtcgtgtagctttcaccaaaagcgagggagtccttgtccataacgggaaaaaaaaggttttttaagctgatgtcctcggttgtgctaagcagaacccgccccatctgcaatccagtttgttaatttgagctgaggtttcagtggtttagcgtcaaatgcactgcagcaggagtagagtaggacgagtggatgggaaaaaggaagaagatagccttttcgctcttgttcctctttcccccgtccgcttgggttgggccaggcgaggaccactccgccccgcgtttaagcttccccctgattgtgtgctgctgggatgatggtatggtcagtggtcacgcaaagagaaaaatgttgaatgccagcagcaattggatgggtgctacttactgcaccgacccggacgccgtcctctgctggacgatccgacacatggttccacttccacagtgatgttgatcagatcgaacgaacgagcaatcattctgcaatccgtttctttgtggttggtgtcggagctgctgtgacgcgacgcgattctttaactccagggatgctgcggcggcctgcacttcagcgacgtggtgacgctggacgtggagacgatggcgtggagcgcgctggccacgacggggcagcggccgggcacgcgggacagccacggcgccgcgctggtgggccaccggatgctcgtgttcgggggcaccaacggcggcaagaaggtgaacgagctgcacgtgctggacctgcgcaccagggagtggagccgcccgcagtgcaggggggcggcgccgtcgccgcgggagagccacagcgtcaccgtcgtcgggggcgaccgcctcgtggtcttcggcgggagcggggagggggagggcaactacctcagcgacgtgcacgtgctggacgtgcccaccatgacgtggtccacgccggaggccatcaggggcggcgcccccgcgcccagggacagccacagcgccgtcgccgtcggcgccaggctcttcgtcttcggcggggactgcggcgaccgctaccacggcggggtggacgtgctcgacgtcgacaccatggcgtggtcaaggtttcctgtcaagggcgcgtcgcctggcgtcagagcaggtcatgcggctttgagtgttgggtccaagatctatattatcggaggagttggtgacaagcaatactacagcgacgtctgggttctcgatgtcgccaaccgttcgtggagtcagctcgaggtgagcgggcagcgaccgcagggaaggttttcccacaccgcagtagtcatgaacaatgacattgcaatctatggaggatgcggcgaagacgagcgtcccctgaacgagcttctcattctgcaattgggctccgagcatccgaacggccgttacaacatttcgacgtgcaaggttctgagcaaccaatggagccaagagaggaggaagtttctccaatcagagactaaagatacaggtgcgagcaacggagaaacggtgcagaaacgtcgagaggcagaaattgagcagaggaatccgttcctgcgtggcctagagaacagccgtgcgaaacgaaggaaaaccgatgaagctcgcccgagcgaggcggccgagtcagagcagcaggaggagcactcgctgactctctcccagcactcctcgccgtcgcagtcagaccaagagcagaacggcggcggagctcacaagctctcgccctcgcccaacgcgtcggtctcagcgctgcaaccgttcgctcgcctcaaggctaacgacggcgctccgagtgctcctgggcgcggaggcggcggcgtgtcttcgaggccggctctgaagacggaccagttcctccgcaccgtcgcgccacagcatcatcggcaggaagtgcagttcctttcctccgaccataagaagcctcagccccggccggctcctggaccaccccttattggcgcagaggtccatgggacgatcgatggagctttcgattccgggtacctcatgacggccgtcgtgaatgggcagctcttcagaggcgttctgtttgctccgggacctggggttacggctccgagaccgacggtgcaccatcagatcctgacgagctcggccatgcctccccagcagcggccactgctcgcgcacgccatccctgtccacgcccggccggtgccgcaggcgacggggttcgtgctgccgaactgtgtccaccgcgcgcggcaagggttcccggcaaaggcagtcaagtccgagccggagcgaggcggcagcgacctgcacgatgttgtgctcaccctgggagggcctggagggggcaagtgagcccctcaagaacggtggtccaggtcgtcctggcctactgctgtttacctttgggaattgctttgtaaattagtcatctggtcgagtggaaataagtgtagcggcttttctgtgatcttttcaagggtcattttagggttcttcgatctgtgactttacatatatgaatatagtgttagcttgatctgtcattttagctagttttgttatcaacaagttggtgttgggagcttccttgcacacttgtgagtgtttgtattttct

SEQ ID NO: 145962 - DNA, 236 bp, Zea Mays
gccaacgccattgcggggaagaactaagagcagggagtacccgccaatgccgacctcgtccccaaccggcgttcgaggttccatggagggcctaggagcttcactgcgttacttggagggcgctcgtggccggggaaggaagaatcgaccactggggcgaccggaattcgtcaccgtgcacgagatccgccgcacgtcgtgagtggggtttgtaacttcttgaatcactgtgagca

SEQ ID NO: 145963 - DNA, 3986 bp, Zea Mays
ctattatctatggatccccgccgtctccccatccttctctccctcctgcttgccttcttctccgccgttgtcgcctctgacgagatccacggatgcggcggcgtcgtcgaggcgagctctggcttggccaagtcgaggaaggcatcggattccaagctcgattactccgacatcacggttgagctctgcactgttgatggtttggttaaagaaagcacacagtgtgctcctaatggatactattttatccccgtctatgataagggttcgttcatggtcagagtgaaggggcccaagggatggtcatggaagcccgaaactgttcctgtcatcattgatcacaatgggtgcaatggaaatgcggatataaatttccagttcactgggtttatgatatccggtaaagtagtgggagctgttggtggtaagagctgctcaaaacggggaggacctgctggtgtgaaaattgaactgatgacagattctgatgagttgattgcatctgctttgacgtcatcatcaggagaatattcatttacaaacataattccagggcgttacatattacgtgcttctcatcctgattatgaaattgagttgagaggctcaccagagattgacctgcgatttggaaatgccgtggcagatgatgtcttctttgtatctggttatgacatttatggcactgtggttgcacagggaaatccaatagtgggagtccacctatatttgtattcaaatgatgtaacgaaggtcccttgcccacaaggtttcagtgatgcacccaaggaaggtgcactttgccatgcaatatctggtgctgatgggaagttcacatttagatcactaccttgtggtagctatgagttgttgccatactacaagggagagaacaccgtatttgatatttcaccatcttcactttctgtttctgttgagcatagtcatttgacgattccccaaaaattccaggtcactggattttctgttggagggcgtgttatcgatggttatggtgctggtgtggagagtgccaatgttatagttgatgggcagttgagagccataacagatagtcttggatactatagactcgatcaggttacatccaagaagtatactataactgccgagaaggatcattataagttcaaccgtttggaggattttatgattttaccaaatttggcaagtattgatgatatcagatcagttagatatgatgtatgtggtattgttcgaacagttactctgaattcaaaagcaatggttactttaacacatggaccagaaaatgtaaagccacagcggaaattagtgggtgaaaatggacatttttgctttgaggttcctgctggtgaataccagttatctgcattacctgtagattccgaacgctcttctagtcttatgttttcaccgggatctattagcgtcaatgtaaatagcccgttgcttgatctggaattctctcagtcacaagtcaatgttcatggtaaagtctcatgcaaacagcaatgcagccagaacattctggtctcacttgttagattggctggcggagttgaacaggaaaagaagacaactacattggaacaagataatgttaattttgtgtttaagaaagtatttcctggaaaatatcgtgtagaggtgaagaattctttacccgagggcttagctaaggatgattggtgctgggaccagagtatcttgaatatagatgttggtactgatgatgtgagagacattgtgtttgtacaaaaaggctattggattgagctagtttcaactcatgatactaatgcttatattcagcagccagattcttctagacttgatttgttgataaagaaaggatcacaaagaatttgtgttgaaacttcagggcaacatgagattcatttaactaatccttgtatttcctttgggacctcgtctgttttgtttgatacagctaatttaatgccgatccatatcaatgcaaagaagtatcttgtaaaaggtgaaatccatgtggacatgagctccattcaggaaaacattgattccaaggacatagtcgtggatatcttgaagagtgatggcagtttcatagaaaagatatccacatcacttgttcttggaaaggacaatcaaaatgacttcactgcctttgagtactctatttgggctgaccttggggaggacttcatctttgtcccccatgattctagcattggaaggaacaaagtcctattttatccagcaagacagcagtattcagtttctatgaatggatgccaagatactgttcctctaatcactgcaagaactggtctatatcttgaaggatcagtgttacctgcaacttctgatgttgacatcaagattctagcagctggaaagagcaactatgcccatctgaacaaaggggatgtagcaacagaggcaaagacagattctgaaggatcattttttgcaggtcctttgtatgatgacatagtatataaagttgaagcttcaaaggatggttaccatctcaaacaaactggcccatacaccttttcttgtcagaagcttggtcagatattagtgcggatttatggtgaaaattcagagcttttaccttcagtattattatcattgagtggcgagaaagggtacagaaataactcaattagtagttctggtggaaccttcacctttgacaacttatttcctggaagtttctatctccgaccacttctaaaggaatataaatttaatccgtcagcagtagctattgatcttaattctggagagtctagggaggctgaatttcgtgcaaccagagtggcttacagtgccatgggttctgtaacactattaactggccaaccaaaggagggtgtttttgttgaagcaagatctgaatccacaggtttttatgaggaagctaccacggattcttttggtagatttcgtcttagaggacttgtgcctggatcgacttactctataagagtggctgcaaaagataatcttcagtttgcagcagttgagcgtgcttcacctgaatatttgtcagttaatgttggtcatgaagacatgactggtattgattttgtggtttttgaacgccccgaagtaacaatcttgagtggccatgtggaaggagatggcattgatacgttacatccgcatctctctgttgaaatcagatcagcaacagactcttctagagtagaagctgtacttcctcttcctctttcatactactttgaagtccgagatttgcccaagggcaagcatcttgttcagcttcgatctggccttccatcacatacacataggtttgaatcggagttagtcgaagtagatctggaaaaggatccccaaatccatgttggtcccctcaaatataaaactgaggagcgtcatcaaaagcaggaactgaccccagcaccagtttttccgcttattgttggagtttctgtggttgcactggtgatcagtatgccaaggttaaatgacttataccagagcgctgtagggatgacttctctgggttcagggatggcaccgaccaaaaaggagccacgcaagaatatattaagaaagagagtgtaaatggcagattagcttagccttaggggtcgagaaatgagacatgacaaattgagcaatttcaagagtggaatagcttctggtttccccctcgggtaattttgccgacgaaaaggaatgccagttttgttgtacgatagcactatgcacagtttttgaagccttagattgtgccgttttgcagttttagactataaagaaagagttgctgcatcatgaatgaactttctcaccagtcagcatgcacgatcgaataggttaatctgagcggtccaggactaagtagaatagacaagtttgttgtggcacgttgtttgcccctctttttgattgtacaacgaccaagtaaagcgtgcgcaatgacttctctatgacttacggatctggttcgcccttta

SEQ ID NO: 145964 - DNA, 569 bp, Zea Mays
atctcatggtgcaacctttggtaactatgggttagtaactattttctgtaatgttttgatctgtgcaggttaaatgacttataccagagcgctgtagggatgacttctctgggttcagggatggcaccgaccaaaaaggagccacgcaagaatatattaagaaagagagtgtaaatggcagattagcttagccttaggggtcgagaaatgagacatgacaaattgagcaatttcaagagtggaatagcttctggtttccccctcgggtaattttgccgacgaaaaggaatgccagttttgttgtacgatagcactatgcacagtttttgaagccttagattgtgccgttttgcagttttagactataaagaaagagttgctgcatcatgaatgaactttctcaccagtcagcatgcacgatcgaataggttaatctgagcggtccaggactaagtagaatagacaagtttgttgtggcacgttgtttgcccctctttttgattgtacaacgaccaagtaaagcgtgcgcaatgacttctctatgacttacggatctggttcgcccttta

SEQ ID NO: 145965 - DNA, 1705 bp, Zea Mays
aagctttacaggcctggatctgttggttttgtgtctaaatcgggtggcatgtcaaatgagatgtacagcaccattgccagagtgacagatggtatttatgaaggaattgcaattggaggggatgttttccctggatcaactctgtcagaccacattctgcgttttaataacataccacaggttaaaatgatggttgttcttggggagcttggtggaaaagacgagtattcacttgtggaagcattgaaacaaggaaaggtccagaaaccagttgttgcatgggttagtgggacatgtgcacgtctattcaaatcagaagtgcagtttggccatgctggtgccaagagtggtggtgagttagaatcagcacaagctaagaatcaggcactaaaggaagctggtgcaattgtgcctacttcatatgaagctcttgaaagtgcaattaaggaaacatttgacaaactgtattcaataatctattgcatgggaatcaaggttctgaggctcaaatatatttggcagtttgaggaaggaaaaatttctcctgttactgaaattacaccgcctctcattcctgaggaccttaaaactgcaatcaagagtgggaaggtccgagctcctacccacatcatctccactatttctgatgacagaggcgatgaaccatgctatgctggtgtccctatgtctacaattattgaacagggttatggagttggtgatgttatttctcttttgtggttcaagcgcagccttcctcgctattgcactcagtttattgagatatgcgtcatgctttgtgctgaccatggtccctgtgtatctggtgctcataactctatagttactgctagggccggaaaggaccttgtttccagcttggtgtctggattattgacgattggtccccgtttcggtggagcaattgatgatgcagcccgatacttcaaagatgcatgtgataggagcctcacgccatacgagtttgttgaaggcatgaaaaagaagggaatccgtgtgcctgggattggtcacaggattaagagcagagacaacagggataagcgtgtgcagcttctacagaaatatgctcacacacatttcccttcagtcaagtacatggaatacgctgttcaggttgagacctacaccttgtcaaaagccaacaatttggttatgaatgtcgatggtgcgatcgggtcccttttcttggatcttctatctggaagtggaatgttcaccaaacaggagatcgatgagattgtggagatcggttatctcaatgggctctttgtgcttgcacgatcaattggcctgatcgggcataccttcgaccagaagaggctcaagcagccactctaccgtcacccatgggaggatgtactttacaccaagtgagaaagccattctttgcaaggcataataaagtattattatcgcctagagcttccagttgcctgtacacttcattaaatcgagcacttgcaaaaaagaaagccagagagagaggaagacgaacatcactagtcagcactagattgtgtgttttatgttgagttgcaaattcaggtcctgatttttgtcctgccatgaaccgttaggcgatattgtattggaaaggatgcttcctttattgtttcacgatatatggcctcagaatagaaatttccattaaaaatgaactctgatttgttcgtcgataaag

SEQ ID NO: 145966 - DNA, 1232 bp, Zea Mays
gccatgcactgtccctgcgccgcagttgactccgtttgtctcgcggtctcgcccccgtctcgctctccgacgactggtgtgccgccgccgtcctgtgccaggtgctaaggccttcgtcagtatcttcgccggcgacgagcacccaccagctccttgatttctagaaagaaaggaggggttgttttcctacatcttgatcatttggagatttttctgtcattctaatggaggtaaaggaagtatgtgtccaagatatgttggttgacctggagaaaggcaagtgcttgctacccatagaggacaatagtgggatgaaggttaattcaatagctgggcatgcaagtacaatgcggcccagctcatgggatgatcttgtagcactgaaggatgataagagtcaccacatatgttgtttctcttcacaccgtcaagattcatctgttaaaagtggagagcctatgaaagctgaaggggagatcaaggttgggattttggataagtcaactgctgataaggaaaataaaaaatggtataagaagccgccacgacctccaagatcacagactacttcaccattagaccctgctgatcagaagctcatcagtgcactatcggagcttgcggtgttaaagaaggctaggattgagcgtatgaaggcattgaagaagatgaagaattccaaaccagcatcttccattgggaacttggtggctttgatcattaccgtcatcttatgtttcttcatactttggcaaggcttgctgatgaaataaaacactggtttttctcaaggcacgggtaatactggagtggctacgatgatggaaatccatggtgagatcaggagtgtcactgaataattagattgctgggcttcgttcgtcatagtcgcgtcgtggcgagtcccctctgattttgcatatgctccacggaatcaccgttgtccggtttgctccccaggccctgtacagtgtaaacttctgaaagttgaaattgccctttgcagaatactggtgttgtaaattatcactggttgattggtgatattttgtaactgttttttttaacaagggctgttattttgttgaagccatttaggaagagaaaactattgcttttttagtgacatcgtggagttaatttgcttggatgaattttaagaaactagtgcaactggttaggtatctgtatattgctacggtttctataaatcacataggtagatcttattt

SEQ ID NO: 145967 - DNA, 1315 bp, Zea Mays
gccatgcactgtccctgcgccgcagttgactccgtttgtctcgcggtctcgcccccgtctcgctctccgacgactggtgtgccgccgccgtcctgtgccaggtgctaaggccttcgtcagtatcttcgccggcgacgagcacccaccagctccttgatttctagaaagaaaggaggggttgttttcctacatcttgatcatttggagatttttctgtcattctaatggaggtaaaggaagtatgtgtccaagatatgttggttgacctggagaaaggcaagtgcttgctacccatagaggacaatagtgggatgaaggttaattcaatagctgggcatgcaagtacaatgcggcccagctcatgggatgatcttgtagcactgaaggatgataagagtcaccacatatgttgtttctcttcacaccgtcaagattcatctgttaaaagtggagagcctatgaaagctgaaggggagatcaaggttgggattttggataagtcaactgctgataaggaaaataaaaaatggtataagaagccgccacgacctccaagatcacagactacttcaccattagaccctgctgatcagaagctcatcagtgcactatcggagcttgcggtgttaaagaaggctaggattgagcgtatgaaggcattgaagaagatgaagaattccaaaccagcatcttccattgggaacttggtggctttgatcattaccgtcatcttatgtttcttcatactttggcaaggcttgctgatgaaataaaacactgtaagtcgttagactacttcagccccgagtgatcatgtcagaaataagactgcctaaaactcaccgccttcaattatacagggtttttctcaaggcacgggtaatactggagtggctacgatgatggaaatccatggtgagatcaggagtgtcactgaataattagattgctgggcttcgttcgtcatagtcgcgtcgtggcgagtcccctctgattttgcatatgctccacggaatcaccgttgtccggtttgctccccaggccctgtacagtgtaaacttctgaaagttgaaattgccctttgcagaatactggtgttgtaaattatcactggttgattggtgatattttgtaactgttttttttaacaagggctgttattttgttgaagccatttaggaagagaaaactattgcttttttagtgacatcgtggagttaatttgcttggatgaattttaagaaactagtgcaactggttaggtatctgtatattgctacggtttctataaatcacataggtagatcttatttag

SEQ ID NO: 145968 - DNA, 1325 bp, Zea Mays
tccgtttgtctcgcggtctcgcccccgtctcgctctccgacgactggtgtgccgccgccgtcctgtgccaggtgctaaggccttcgtcagtatcttcgccggcgacgagcacccaccagctccttgatttctagaaagaaaggaggggttgttttcctacatcttgatcatttggagatttttctgtcattctaatggaggtaaaggaagtatgtgtccaagatatgttggttgacctggagaaaggcaagtgcttgctacccatagaggacaatagtgggatgaaggttaattcaatagctgggcatgcaagtacaatgcggcccagctcatgggatgatcttgtagcactgaaggatgataagagtcaccacatatgttgtttctcttcacaccgtcaagattcatctgttaaaagtggagagcctatgaaagctgaaggggagatcaaggttgggattttggataagtcaactgctgataaggaaaataaaaaatggtataagaagccgccacgacctccaagatcacagactacttcaccattagaccctgctgatcagaagctcatcagtgcactatcggagcttgcggtgttaaagaaggctaggattgagcgtatgaaggcattgaagaagatgaagaattccaaaccagcatcttccattgggaacttggtggctttgatcattaccgtcatcttatgtttcttcatactttggcaaggcttgctgatgaaataaaacactggtttttctcaaggcacggggtgagcataagcttccataggccatctatatcatcagtcagaatgcatggtggtcttatctccatccagttctacattaagaatgtcacaactgttagcccccacagttcctctgcagctcaataatactggagtggctacgatgatggaaatccatggtgagatcaggagtgtcactgaataattagattgctgggcttcgttcgtcatagtcgcgtcgtggcgagtcccctctgattttgcatatgctccacggaatcaccgttgtccggtttgctccccaggccctgtacagtgtaaacttctgaaagttgaaattgccctttgcagaatactggtgttgtaaattatcactggttgattggtgatattttgtaactgttttttttaacaagggctgttattttgttgaagccatttaggaagagaaaactattgcttttttagtgacatcgtggagttaatttgcttggatgaattttaagaaactagtgcaactggttaggtatctgtatattgctacggtttctataaatcacataggtagatcttattt

SEQ ID NO: 145969 - DNA, 562 bp, Zea Mays
tcttttttttttgcgtaatggttgcaaataagtatggctagagacagagaacaaaggtttgaggtttctaaattacaaagcaaatattcaatgtcccaaacatgcctcagtccaacagtagactatctttcaagaacgaaccaactttaaactttcctgggttctgcttggggcttccagagaccaagacggtacttgtgtgcaaaactcaaaatcaattttctctgcattgtaggagaataacaattaataattaagattagcacagatgcttgttctcaatcttaacattatacaaaaaaaaatattacagaactacacggcaaacagtatttcaatcatgaaaaaaatgtttgcaatttagatccaacatttatcttaatccaccagcaaatgttaaagacagaaattagcacatagcaacaggttaaatggattttgcttcaaccatgggtccaagtacaactagatttggttatactgtacaaccaaatttggttaaacttgatttagagcccgagtacaaccaaatgtttccggaggtcataattttgctagatac

SEQ ID NO: 145970 - DNA, 106 bp, Zea Mays
cgaacaaataatttcttgtagtaaaagtgatggaacaatacttgtgtcgtggccatcactgcttgtggtctttgctggtcaggaatacacagaatacatatttttt

SEQ ID NO: 145971 - DNA, 1838 bp, Zea Mays
agccgcagcagtacccgcgcgggcccactccccctctcaccggttccacgcccagcgccagcgccagcgcgggcgcggctataaatggcgagccccagcagccccgagaccccgtgccacacatccatccccgttcgcctcttctcctccctcctgccgggtccttaataaagagcagcagcgcaaggtgagccgccagcttgccccgtacgtaccctgctgcttcttctccctcgttggaccgttcgttcgtcgtccttctcccgaggttcgtgcgtggttcgccttcgcccttcgggagatgctgcgaaccttaggcctttccttgctgcggacggggtaactgatacccatgttttgctgctggtggccgcaacgggatggcggatccgagtgtggggttcggtgatcagccggtttctctagatctgggatctccaaaatgtgttttttaatttatcgtgtctcagtcggcagtggagattttttttaaataatggtctgtcggcgtgatgtcgtttgcttgagggaagggagggttctctgattttgagatctgacggcactatttgttggccatccaattcgaacggtttctggttgtctgaattggtttgaacaaaattgcagaggttggtagagcgagcgagaagaaggcaatggcggcggagagcttcctgttcacctcggagtccgtgaacgaggggcacccagacaagctgtgcgaccaggtgtcggacgcggtgctggacgcctgcctggcgcaggaccccgacagcaaggtggcctgcgagacctgcaccaagacgaacatggtgatggtgttcggcgagatcaccaccaaggcgagcgtggactacgagaagatcgtgcgcgacacctgccgcgagatcgggttcacctccgacgacgtggggctcgacgccgaccgctgcaaggtgctggtgaacatcgagcagcagtcccccgacatcgcgcagggcgtgcacgggcacttcacgaagcggcccgaggagatcggcgccggcgaccagggccacatgttcgggtacgccaccgacgagacccccgagctgatgccgctgagccacgtgctggccaccaagctcggcgcgcgcctgacggaggtccgcaaggacggcacctgcgcctggctcaggcccgacggcaagacccaggtgacggtggagtacgtgaacgagggcggcgccatggtgcccgtccgcgtgcacaccgtgctcatctccacccagcacgacgagaccgtcaccaacgacgagatcgccgccgacctcaaggagcacgtcatcaagcccgtcatcccggagaggtacctggacgagaagaccatcttccacctcaacccgtcggggcgcttcgtcatcggcgggccccacggggacgccggcctcaccggccgcaagatcatcatcgacacctacggcggctggggagcccacggcgggggcgccttctccggcaaggaccccaccaaggtggaccgcagcggggcctacgtcgccaggcaggccgccaagagcatcgtggccagcggcctcgcccgccgctgcctcgtgcaggtgtcctacgccatcggcgtgccggagcccctgtccgtgttcgtcgactcctacggcaccgggaccatccccgacaaggagatcctaaagatcgtcaaggagaacttcgacttcaggccagggatgatcaccatcaacctcgacctcaagaagggcggcaacaggttcatcaagaccgccgcatacggccactttggccgtgacgacgccgacttcacctgggaggtggtcaagcccctaaagaaggcatccgcttaa

SEQ ID NO: 145972 - DNA, 1788 bp, Zea Mays
agccgcagcagtacccgcgcgggcccactccccctctcaccggttccacgcccagcgccagcgccagcgcgggcgcggctataaatggcgagccccagcagccccgagaccccgtgccacacatccatccccgttcgcctcttctcctccctcctgccgggtccttaataaagagcagcagcgcaaggtgagccgccagcttgcccccgagcgagaagaaggcaatggcggcggagagcttcctgttcacctcggagtccgtgaacgaggggcacccagacaagctgtgcgaccaggtgtcggacgcggtgctggacgcctgcctggcgcaggaccccgacagcaaggtggcctgcgagacctgcaccaagacgaacatggtgatggtgttcggcgagatcaccaccaaggcgagcgtggactacgagaagatcgtgcgcgacacctgccgcgagatcgggttcacctccgacgacgtggggctcgacgccgaccgctgcaaggtgctggtgaacatcgagcagcagtcccccgacatcgcgcagggcgtgcacgggcacttcacgaagcggcccgaggagatcggcgccggcgaccagggccacatgttcgggtacgccaccgacgagacccccgagctgatgccgctgagccacgtgctggccaccaagctcggcgcgcgcctgacggaggtccgcaaggacggcacctgcgcctggctcaggcccgacggcaagacccaggtgacggtggagtacgtgaacgagggcggcgccatggtgcccgtccgcgtgcacaccgtgctcatctccacccagcacgacgagaccgtcaccaacgacgagatcgccgccgacctcaaggagcacgtcatcaagcccgtcatcccggagaggtacctggacgagaagaccatcttccacctcaacccgtcggggcgcttcgtcatcggcgggccccacggggacgccggcctcaccggccgcaagatcatcatcgacacctacggcggctggggagcccacggcgggggcgccttctccggcaaggaccccaccaaggtggaccgcagcggggcctacgtcgccaggcaggccgccaagagcatcgtggccagcggcctcgcccgccgctgcctcgtgcaggtgtcctacgccatcggcgtgccggagcccctgtccgtgttcgtcgactcctacggcaccgggaccatccccgacaaggagatcctaaagatcgtcaaggagaacttcgacttcaggccagggatgatcaccatcaacctcgacctcaagaagggcggcaacaggttcatcaagaccgccgcatacggccactttggccgtgacgacgccgacttcacctgggaggtggtcaagcccctaaagaaggcatccgcttaagaatgtattgggaagttcactggacatgaggttcatcttcgtctggctctgctgatacctgcaaggattgctgctgctgctgccgcccctggatgtgtgtttgatcagtgactggctgctctgctccatagaagatgaatgaagagagagatgcaagccatgtcggcgccactgaccggcttagtgattggtataatttggtgtggcagcagccaggattaatgcgctggtcttttatctttactactagtttggtctcgtccggtatcttatttttctttccccttttcgagtctgtactgaaactgctgagagatttgcagttttgatctatcatatcctttggtaatactgttcgtctcgagtgcgcactggtgcttgctct

SEQ ID NO: 145973 - DNA, 1676 bp, Zea Mays
ccgtgccacacatccatccccgttcgcctcttctcctccctcctgccgggtccttaataaagagcagcagcgcaagaggttggtagagcgagcgagaagaaggcaatggcggcggagagcttcctgttcacctcggagtccgtgaacgaggggcacccagacaagctgtgcgaccaggtgtcggacgcggtgctggacgcctgcctggcgcaggaccccgacagcaaggtggcctgcgagacctgcaccaagacgaacatggtgatggtgttcggcgagatcaccaccaaggcgagcgtggactacgagaagatcgtgcgcgacacctgccgcgagatcgggttcacctccgacgacgtggggctcgacgccgaccgctgcaaggtgctggtgaacatcgagcagcagtcccccgacatcgcgcagggcgtgcacgggcacttcacgaagcggcccgaggagatcggcgccggcgaccagggccacatgttcgggtacgccaccgacgagacccccgagctgatgccgctgagccacgtgctggccaccaagctcggcgcgcgcctgacggaggtccgcaaggacggcacctgcgcctggctcaggcccgacggcaagacccaggtgacggtggagtacgtgaacgagggcggcgccatggtgcccgtccgcgtgcacaccgtgctcatctccacccagcacgacgagaccgtcaccaacgacgagatcgccgccgacctcaaggagcacgtcatcaagcccgtcatcccggagaggtacctggacgagaagaccatcttccacctcaacccgtcggggcgcttcgtcatcggcgggccccacggggacgccggcctcaccggccgcaagatcatcatcgacacctacggcggctggggagcccacggcgggggcgccttctccggcaaggaccccaccaaggtggaccgcagcggggcctacgtcgccaggcaggccgccaagagcatcgtggccagcggcctcgcccgccgctgcctcgtgcaggtgtcctacgccatcggcgtgccggagcccctgtccgtgttcgtcgactcctacggcaccgggaccatccccgacaaggagatcctaaagatcgtcaaggagaacttcgacttcaggccagggatgatcaccatcaacctcgacctcaagaagggcggcaacaggttcatcaagaccgccgcatacggccactttggccgtgacgacgccgacttcacctgggaggtggtcaagcccctaaagaaggcatccgcttaagaatgtattgggaagttcactggacatgaggttcatcttcgtctggctctgctgatacctgcaaggattgctgctgctgctgccgcccctggatgtgtgtttgatcagtgactggctgctctgctccatagaagatgaatgaagagagagatggtgaagaaggctttggcaaatggcaattgccgcagcaagccatgtcggcgccactgaccggcttagtgattggtataatttggtgtggcagcagccaggattaatgcgctggtcttttatctttactactagtttggtctcgtccggtatcttatttttctttccccttttcgagtctgtactgaaactgctgagagatttgcagttttgatctatcatatcctttggtaatactgttc

SEQ ID NO: 145974 - DNA, 1792 bp, Zea Mays
ccgtgccacacatccatccccgttcgcctcttctcctccctcctgccgggtccttaataaagagcagcagcgcaaggtgagccgccagcttgccccaggttggtagagcgagcgagaagaaggcaatggcggcggagagcttcctgttcacctcggagtccgtgaacgaggggcacccagacaagctgtgcgaccaggtgtcggacgcggtgctggacgcctgcctggcgcaggaccccgacagcaaggtggcctgcgagacctgcaccaagacgaacatggtgatggtgttcggcgagatcaccaccaaggcgagcgtggactacgagaagatcgtgcgcgacacctgccgcgagatcgggttcacctccgacgacgtggggctcgacgccgaccgctgcaaggtgctggtgaacatcgagcagcagtcccccgacatcgcgcagggcgtgcacgggcacttcacgaagcggcccgaggagatcggcgccggcgaccagggccacatgttcgggtacgccaccgacgagacccccgagctgatgccgctgagccacgtgctggccaccaagctcggcgcgcgcctgacggaggtccgcaaggacggcacctgcgcctggctcaggcccgacggcaagacccaggtgacggtggagtacgtgaacgagggcggcgccatggtgcccgtccgcgtgcacaccgtgctcatctccacccagcacgacgagaccgtcaccaacgacgagatcgccgccgacctcaaggagcacgtcatcaagcccgtcatcccggagaggtacctggacgagaagaccatcttccacctcaacccgtcggggcgcttcgtcatcggcgggccccacggggacgccggcctcaccggccgcaagatcatcatcgacacctacggcggctggggagcccacggcgggggcgccttctccggcaaggaccccaccaaggtggaccgcagcggggcctacgtcgccaggcaggccgccaagagcatcgtggccagcggcctcgcccgccgctgcctcgtgcaggtgtcctacgccatcggcgtgccggagcccctgtccgtgttcgtcgactcctacggcaccgggaccatccccgacaaggagatcctaaagatcgtcaaggagaacttcgacttcaggccagggatgatcaccatcaacctcgacctcaagaagggcggcaacaggttcatcaagaccgccgcatacggccactttggccgtgacgacgccgacttcacctgggaggtggtcaagcccctaaagaaggcatccgcttaagaatgtattgggaagttcactggacatgaggttcatcttcgtctggctctgctgatacctgcaaggattgctgctgctgctgccgcccctggatgtgtgtttgatcagtgactggctgctctgctccatagaagatgaatgaagagagagatggtgaagaaggctttggcaaatggcaattgccgcagcaagccatgtcggcgccactgaccggcttagtgattggtataatttggtgtggcagcagccaggattaatgcgctggtcttttatctttactactagtttggtctcgtccggtatcttatttttctttccccttttcgagtctgtactgaaactgctgagagatttgcagttttgatctatcatatcctttggtaatactgttcgtctcgagtgcgcactggtgcttgctctgtcgctcgtcgtcggtggcctttgaggaccatgaaaggtgaaaacaatgtttcatgtgacctttgggc

SEQ ID NO: 145975 - DNA, 1655 bp, Zea Mays
accctgctgcttcttctccctcgttggaccgttcgttcgtcgtccttctcccgagaggttggtagagcgagcgagaagaaggcaatggcggcggagagcttcctgttcacctcggagtccgtgaacgaggggcacccagacaagctgtgcgaccaggtgtcggacgcggtgctggacgcctgcctggcgcaggaccccgacagcaaggtggcctgcgagacctgcaccaagacgaacatggtgatggtgttcggcgagatcaccaccaaggcgagcgtggactacgagaagatcgtgcgcgacacctgccgcgagatcgggttcacctccgacgacgtggggctcgacgccgaccgctgcaaggtgctggtgaacatcgagcagcagtcccccgacatcgcgcagggcgtgcacgggcacttcacgaagcggcccgaggagatcggcgccggcgaccagggccacatgttcgggtacgccaccgacgagacccccgagctgatgccgctgagccacgtgctggccaccaagctcggcgcgcgcctgacggaggtccgcaaggacggcacctgcgcctggctcaggcccgacggcaagacccaggtgacggtggagtacgtgaacgagggcggcgccatggtgcccgtccgcgtgcacaccgtgctcatctccacccagcacgacgagaccgtcaccaacgacgagatcgccgccgacctcaaggagcacgtcatcaagcccgtcatcccggagaggtacctggacgagaagaccatcttccacctcaacccgtcggggcgcttcgtcatcggcgggccccacggggacgccggcctcaccggccgcaagatcatcatcgacacctacggcggctggggagcccacggcgggggcgccttctccggcaaggaccccaccaaggtggaccgcagcggggcctacgtcgccaggcaggccgccaagagcatcgtggccagcggcctcgcccgccgctgcctcgtgcaggtgtcctacgccatcggcgtgccggagcccctgtccgtgttcgtcgactcctacggcaccgggaccatccccgacaaggagatcctaaagatcgtcaaggagaacttcgacttcaggccagggatgatcaccatcaacctcgacctcaagaagggcggcaacaggttcatcaagaccgccgcatacggccactttggccgtgacgacgccgacttcacctgggaggtggtcaagcccctaaagaaggcatccgcttaagaatgtattgggaagttcactggacatgaggttcatcttcgtctggctctgctgatacctgcaaggattgctgctgctgctgccgcccctggatgtgtgtttgatcagtgactggctgctctgctccatagaagatgaatgaagagagagatggtgaagaaggctttggcaaatggcaattgccgcagcaagccatgtcggcgccactgaccggcttagtgattggtataatttggtgtggcagcagccaggattaatgcgctggtcttttatctttactactagtttggtctcgtccggtatcttatttttctttccccttttcgagtctgtactgaaactgctgagagatttgcagttttgatctatcatatcctttggtaatactgttc

SEQ ID NO: 145976 - DNA, 3360 bp, Zea Mays
gaacccagccggcctacccgcgccgtcgggccgcaagcatttctactaatctgctcttctcgtagacagaaaacccgcgagccccgagccccgaccaataggaagccgaggtccagccgtagtgacgtcgatttcgattaacccgagcggcgcaaatccggtgtcaccgaagcacatcttccatctccagcaattcttccttcctcctcgtcgcattccacgtccggatctcaaattgtcccatcccgtgctcctcctccccgatcccatccctccgctccagatccgcacgccgccaccggatccgcagccagcgcggccggcatggaggagacgccgccggggcagcgcccgcagccgccgccggcgcacgcgtctcctccgttcgcctcggcgcccttcacaccgccgccgcgcgtcttctctccaggcctcgccgccgcgcggggcacgcccagccccggctcggggcccggccacgcgctgccgcacctcagcacgccacccggcccgcccgtcttctcctcgccgctgcgccctgcggccgtgcccttccgcgccaccccggcctctccccaccccgtgtccttcgccgcttcggggggctactcctcgtcctcctccgccactgccgctaccaccgcctccctccccacctcatcagcgccgcactttctcaacggcgctgccacgcttcacggggaccatgcccctgcgccatcatcaatccagggagacggcctcgacagtccctatgtacagttctccgcaaacaaggttctgaagcagaagaagctgctcaatgcccctagcttggggttcggagctctggtttctccagggaaggaggtgtcacctggcccagaggttgtggagcgtgatccacgccgttgcctgaactgtggcgcctatgtgaacttgtactgtgatgtccagatcggctccgggcagtggcaatgcgtcatttgcaagaagctcaatggcagcgagggggaattcgttgtctccagcaagcaggacctgctccagtggccagagcttgcatccacgactgtggattatgtgcaggtggggaacaggcgtccaggctttgtcccagtgtctgacacgagggtgtccggccccatttttatcctcatagatgaatgcctcgatgaggcgcacctgcagcatcttcagggctccttgcatgcctttgtggattcgctccctcctaccgcaaagataggaataatcacctatgggagaactgtctcagtgtatgatttctcagagggggcagcagtgtcagcggatgtgctacctggaaacaagtcgcctacccatgagtctttgaaggccctaatctatgggacaggtgtttacctgtctcctatacatgcttcgctacctgttgcacacacaatattctcatctctgagaccctatcagctgagcgtgccagaagtgttaagggatcggtgtgttggagcagcagtagaggttgcccttggtattattcaagggccatcagtggagttgtctcgtggaatcatcaagagatctggtggaaactgtaggatcttggtgtgtgctggtggccctagcacctttggaccaggatcggtgcctcattcagctaaacatcccaactatgcttatctggagaagacagctatgaagtggatggagagtcttggtcatgaagcacagagacacagtactgttgttgatatcttttgtgctggacagtgtcctgtgagggtccctgttctgcaaccattggcaaagtgttctggaggtgtgctcttagctcatgatgactttggagaggcctttggggtcaatttgcaaagggcatcaactagagcagctggttcccatggcttatttgagatcaggtgttcagataacatgtatgttactcaagttattggccctggtgaagaggcttctcctgattctcatgaaacgttcaaacatggtagttccttctgtatccagatgcatagtgttgaggaaacacagagtttttctgtgtctatggagacaaaggctgatatcaaaagtgattttgttttctttcagtttgctgtccattattccaatatatatcaaacagaaatcactcgggtgatcactatgaggctgcagactgatgatggtttgtctgcatatctggcaagtgtgcaggaggatgttgcggcagttatcattggtaaaagaactgtattgcgtgccaggactgcctctgatgctattgatatgaggctctcaattgatgaaagagtaaaggacatagctctaaaatttggtagtcaggctcccaaatcaaagctttaccgcttcccaaaagaactagcatcactcccagagtgcttgtttcatctgaaaaggggaccacttttaggtagcataatcggacatgaagatgaaagatccgtacttaggaatttgttcctgaatgcttcgtttgacctttcgctccgtatgttggcacctcggtgcataatgcatcgtgaaggtggtacatttgaggagctgccagcatatgatcttgtcatgcaatctaatgctgcagtggtactggaccatggaacagatattttcatttggttgggtgctgagctagcagcccaagaaggacaaagtgcagcagctttagcagcatgccgtactctggcagaagagctcagcgagaaacgttttccagctcccaggatactttcattcaaacaaggaagctctcaggctagatattttgtctcacgcctgatcccagctcacaaggaccctacatatgagcaggagtcaaggtttcctcaattgcggacactcactcctgagcaaagggctaggctaaagagcagcttcatccagttcgatgactatagtttttgcgagtggatgcgcagcctcaaattggtcccaccagaaccaagctaacacaactagtctggggggtacacttccgaacggtggatagcaacaaaatctatggcgtggcatctgatagagctttccctctaagatagatgtgatcttcatgaaccaaattatggcatcgccagatattcgtgagccgatcatacgtttggtttggtgggcagccatttaggtgcggtggaactgtatgattttgcataattcattttcttctccttttgaccatgatgtagtagagtaagttcataaacagttccttgtcaattgtcatacaggtggagaaatctacacaataagtttgtcaattgtcccaaatgttacatgtatacaacctttgtttgaagaggtctcactatattatttgaaattccttcatttctcaggggtagccgcagctctcagcctctcaccttcctgggaggatcaaggcctttg

SEQ ID NO: 145977 - DNA, 369 bp, Zea Mays
atggccagggagggacacgcggtctctcgccggagcggccagagcggctcgccgacggcggtgctcagccagggagcgggccacggcggcatgcatgcacaacaacttagcaggaaggggatgcgagaccttaccagtcggggtggcgtcggcgatgtgttgcgcacagtgttccagcgaagcacgtctatggcggagctccagacttctacccgtgtctccactagcagcttcaagggaacccccttccttgacaccacgaggagatacggaagtgagagtcttgccttgcgtatgggagagaatgagaatatggcggatggggtggttttgatcggccaggacaggactgggagttgcaggaggtag

SEQ ID NO: 145978 - DNA, 429 bp, Zea Mays
atgtcgccggctggggccatcgttgtctcctccaaggatgaggcagaggctacgccgcgtgccgcgacgcccacggtctctgacctcctctgcgatatccctaacacccccaaagttgcgccgagctcgggggcgggacacgcagagggggccagcacctcagaggggtggtggaagatacccttcgggccgctgcgcagcgacgtgattatcgtcgagccccctatcgtgggggttatcggtgatctcgtccgctctaggccggatacctcgttccattcaaaggcgcccctagtgtgggtgtctaccgagggcgatccgtacttcattcttgacgatgtcgacgagcggggtgcctgggccgagttccgggcacagggccatgtatgggtgttggcctcttctttgccgaggttccttgtcccttag

SEQ ID NO: 145979 - DNA, 432 bp, Zea Mays
atgcccttggtggggagagaaacggtggtggtggaggtggaggtaggggcgggggcgggtccggttactaggtgtgccggatcgctgccggccggcgggacactcggcgaacgaggagactggatggcgcgggctgtggtaaattggtgcttgggagggagctcacgatctgatctagaggtcttggctgccgggaagggcaggcaggcggcggtggggcgggcggggcagcttggagcggcagtgggggagggctcgcttgccgtgggggcaaggcgggagggcgaaccggacatgctcagttctggctatatgagtgatgcagttgtgacttccttgaaagataggtcttgtttaatcagcagacagttcccctttgtgtatttcatggatggtgcaaagacttggtacgaacatatttgggtaaactag

SEQ ID NO: 145980 - DNA, 467 bp, Zea Mays
ggtgaaaaatgggcaaagcacaggagaattcttaatcctgcatttcaccatgaaaaaataaaggggatgatgccagtattttctacttgctgtattgaaatgattactagatgggataattcaatgccgtctgagggatcttctgagatagatgtctggcctgagttctagaatcttactggagatgttatctcaagaactgcgtttgggacaactatcaagaagggtggagaattttcgagctgcaaggagaactagctgaacgcctcatccaatctgttcagacaatatttatcccaggctatttgtttgttacgctttcctctactaaccagcagcaacgttttattcaagtgaaattgcatatccaagcatttcaatacatgaagatttgtttcatcaattactccttagccctattcatggttttgtaattataaaatttgtcatgaaaataacatttttag

SEQ ID NO: 145981 - DNA, 1910 bp, Zea Mays
aattagaggtattttgactgaatagttaagaaaactatacgaagtagtctgaccggacacagccgcacataatatgaacatgctacactgaaacactgacgcggaccacaataaaaaaccctgaaactttagcactactgccctttttctcttttcagctactgaccgctactgttaatggaatggaaatgcacgcacggcatctaatttgggtggccggcggtggacgggctggacccaattgtctgctggtgtgctgcgagcggcgacgcgccggggtggtggtcgaccgaggaagagttggcctcggccatgtcgagctcgacctccttgtgccggagcatgagcagcaagcgtcggctctggatccggaggcggtcattctgcaggcgcgcgcgttccatgtcgcgctctttgttggcgcggaaccgatcccatttcagccgctgccgctccaggtcgtacgcgtgggattcgaggaggatctgctgctcctccacctccaccgcgcggcgtcgcacccagcacctggcctgctgcgggtccatcgccgcggcagccgcggccgcgagctcgctcttcaactgctgcagcattgccgatgggtcgggtgccgcccccgtcctcgcgcgtttcccaccgccggccgcctcgtcctcgaggtcctcggccgcggcgctatcctcgccatgctcgcgcttgccgcgccggcggccgccgccgctgtgctgacgactggtgaggtggctgtggtacatgtgaccgtcgtcctcctcgtcgtagtcgtcctcgtcctcctcgccgttgtcgctcacggcgtcgctgtcgtcttcatcgtccgcgacgtcggcggaggagtccttcatgcacggcggggacggggctgcctggtagtggcgagcggcggacgaggctgcgccggccacgggcaccggcggcgggtggtggaggcaggcggcgtcgcccgccgcgccgccgccggcgtgcggcggcaggtgcgagcccccggcaacgccgctgttgtggtaggcgcacatctcgcggaagaagaggtgcttggagctgagtagcttgcgcgcctcgtccttggccttgggcgtgagctcgtcgatggcgtcgagcagcgcgtggttctcgaccactcggcaggcgcggccgcggccgagcaggtcgaccacgcgcttgtagcgcttgttgaggtcgttgaacttgtcctcgcactgctgcggcgacaccacgaagcccttgtccatcatggcgtgcgacaccgacttccacttgcccttcttctgctgctgcgccgccgccgcatgaccgtggccgtgccccgacgagcccgccctgctcgccttgcctccccccgcgccgccaggcattgccgcgccctcccagtcatccccaacgctgtagaccacgctgatgagcaggcgcaccatgtcgtcggtccacttcatcctcgtccacgggcaccccgccgccgccatctgttgctgttgctgctgctgcaccaccactcctcccttcccgcagcagccgttgcccaccgtgtcttcatcgtgccccaccgtcgccgcgctcaccacgaccctggacgacgacgtgttggagtagggcgagaacgacggcggcgggggcggctgctgcagctggaacccatcgtggtggtggtcctgctggtgctggaacgcggcggcggccgggtgcatctgctgcgcggcgaggtgcatgtccagccccagcattgcccccgacccaaccacgccgccccgcgtcgccatccctccttccccgtcgcctctccccatcggcaaaccgccaatctctacccagctctagaaaccacttggcactcccgcccccgaaatcggcagcaaggtgggtgtttttattggaggggagctgtgtgggcg

SEQ ID NO: 145982 - DNA, 884 bp, Zea Mays
ccatctccgaatcaatccctcgcctccccggcggttgttgcttcggctccgctcgggactcggccggcggaagcggagatgcagatcttcgtgaagaccctgacggggaagaccatcacgctggaggtggagtcctcggacaccatcgacaacgtgaaggccaagatccaggacaaggagggcatcccgccggaccagcagcgcctcatcttcgccggcaaacagctcgaggatggccgcaccctcgccgactacaacatccagaaggagtcgacgctgcacctggtgctccgcctcaggggaggcgccaagaagcgcaagaagaagacgtacaccaagcccaagaagatcaagcacaagcacaagaaggtgaagctggccgtgctccagttctacaaggttgacgacgccaccggcaaggtcacccgcctccgcaaggagtgccccaacgccgagtgcggcgcgggggtcttcatggccaaccacttcgaccgccactactgcggtaagtgtggcctcacctacgtctacaaccagcaggcgtaggatgcccctcctttctgtcgggaaggaaaatgggaagtcttgctaggtgataatcctttttgctttgttttgttttgttgcaatggtagtagtttcttggaacagaacacctgtatctcttttggcgacgcgtagtttgggtttaattatatcatgttgttatgggtcctgtcaagcactgttgaattcgaatggtttttgaattaatcttgtactatgtttttatgatgccattctcggcccctgaattaatttgcgaattactgtgtgcaatcgatcggatacatgtcgctattcgttttgtttagcatgtgatgactcgtatcgtcgtatgcttg

SEQ ID NO: 145983 - DNA, 793 bp, Zea Mays
atacacacacagccccatcccgccgccgcaggcgagaaccagcgccaccttaggttagggcggccgccgccggagaagtgcgcggttgccaagatgcagatcttcgtgaagaccctgacggggaagaccatcacgctggaggtggagtcctcggacaccatcgacaacgtgaaggccaagatccaggacaaggagggcatcccgccggaccagcagcgcctcatcttcgccggcaaacagctcgaggatggccgcaccctcgccgactacaacatccagaaggagtcgacgctgcacctggtgctccgcctcaggggaggcgccaagaagcgcaagaagaagacgtacaccaagcccaagaagatcaagcacaagcacaagaaggtgaagctggccgtgctccagttctacaaggttgacgacgccaccggcaaggtcacccgcctccgcaaggagtgccccaacgccgagtgcggcgcgggggtcttcatggccaaccacttcgaccgccactactgcggtaagtgtggcctcacctacgtctacaaccagcaggcgtaggatgcccctcctttctgtcgggaaggaaaatgggaagtcttgctaggtgataatcctttttgctttgttttgttttgttgcaatggtagtagtttcttggaacagaacacctgtatctcttttggcgacgcgtagtttgggtttaattatatcatgttgttatgggtcctgtcaagcactgttgaattcgaatggtttttgaattaatcttgtactatgtttttatgatgcc

SEQ ID NO: 145984 - DNA, 2440 bp, Zea Mays
gttgtatccccaccaaacccaaaccgaaccgttctttgcactttcgcattcgcagatcgaaccctcttcgaccaaatatttgacacaagttacctttgcctgtattgctttcttgcgcgtagccccctgaagctatctccgacgcgcgcccgtgtccttcgccggagcttgccatatgaatggtcaaaccccgatggggctcgccgcagcagcagccgcagcagtgaggccgtgccgccgccgcctcctctcgtccgcctccgctgccgcggcgtcaaagacggcggcgcgcaccgcgaccccgctatttcccagattgccccacccgcaccaccccccgtacggccggcgcctccccttcctcgtctccgcggcgtcgcagtcgcaggcctcgcagaccggcccggacacccatgtactggtccccgtcccctccgacccccgcgccgccgtttcaggcaacctccctttcttcgaccgcgtcctcttcccggactcgttcccgcttgagaccccgcctgtcaaggaggaggacgcggcggcggcacagaccgatgaggcggtcgcgccggccgcgcccttgaggcaggagacggagacggagagggaagcgtggaggctgctgcggagggcggtcgttagctactgcggcgagcccgtggggacggtggcggcagaggaccccgagtgcacggagacgctcaactacgaccaggtcttcatcagagacttcgtgccctccgcgctcgccttcctcatgcgcggcgagaccgagatcgtccgcaacttcctcctccacaccctgcagcttcagagctgggagaaaactgttgattgttacagccctgggcaaggattgatgcctgctagcttcaagattagaaccctaccacttgatgagaacaatgaaggatttgaggaggttttggaccctgactttggtgaggcagccattggccgtgtagctcctgtggattctggactgtggtggattattttgttgagagcttacagcaagattactggggacagtgctttgctagaaagagttgatgtgcagacaggaattcaattgatactgagtttgtgtttggctgatgggtttgacatgttcccaacattactagttacagatggatcatgcatgatagacaggaggatgggaatacatgggcatcctcttgaaatccaagctttattctactctgctttacgatgctcacgagaaatgcttgtcgtgaatgatggatcgaaaaacctcatccgtgccattaataacaggctcagtgcattgtcctttcacatcagagaatattactgggttgacatgaagaaaataaatgagatatacagatacaagacagaagaatactcacatgatgccactaacaaattcaacatttaccctgagcaaatcccttcctggcttgttgactggattcctgagaaaggaggttaccttatagggaatctgcagccagctcacatggattttaggttcttctctcttggtaacctttgggctatagcttcgtctctaactactccaaaacaagctgagggaatccttagccttatcgaagaaaagtgggatgatcttatagcaaacatgcccctcaagatatgctaccctgcaatggaagatgatgaatggcgcattattactggcagtgatcctaagaataccccatggtcatatcataatggtggatcttggcccaccctattatggcagttcatactggcgtgcataaaaatgggtagaccagaattggcccggagggccattactgtggccgaggagagactgtcagatgacaagtggccggaatactacgacactcgatctgggaggttcattgggaagcaatcccgatcttatcagacatggactattgctggttttctgacctcaaaaatgttgctggagaacccagagctggcttctattctgacctgtgatgaggaccttgagctgctcgaaggctgtgcttgctgcctgtccaagaagaggacaaggtgctcacggcgagcggccaagtcacatgctgcgtgaaactgtgaagcttatgttgttttttatactgttgatgcacaatgtgtactaccaacggagaattaaccaagacagactcttcagagatacattagtataggtttatgttagatacccatccattcatttcctaggtggttgctcattcttttttgctgagctaccactgatgggaactaccctgggtgataccggtggttgaaagaacagagcaaaacatatttgaagtttgtgctctcttgttgaagccctaaccattgtatgtcttgttggtacttgaaagtaatatgttgtgtcatttgcaaaccaaactgtgacactgtatcatgttcgtatcatattatggttacacctttgttgtattggattgtgcttggatatgct

SEQ ID NO: 145985 - DNA, 1223 bp, Zea Mays
ctcttgtgtgggactaatttagtttataacaaaaagaaaatacttattttataaacctagatctattcgatatatcagctgaagatttgtacttacaagttctttctgttacccaggctttattctactctgctttacgatgctcacgagaaatgcttgtcgtgaatgatggatcgaaaaacctcatccgtgccattaataacaggctcagtgcattgtcctttcacatcagagaatattactgggttgacatgaagaaaataaatgagatatacagatacaagacagaagaatactcacatgatgccactaacaaattcaacatttaccctgagcaaatcccttcctggcttgttgactggattcctgagaaaggaggttaccttatagggaatctgcagccagctcacatggattttaggttcttctctcttggtaacctttgggctatagcttcgtctctaactactccaaaacaagctgagggaatccttagccttatcgaagaaaagtgggatgatcttatagcaaacatgcccctcaagatatgctaccctgcaatggaagatgatgaatggcgcattattactggcagtgatcctaagaataccccatggtcatatcataatggtggatcttggcccaccctattatggcagttcatactggcgtgcataaaaatgggtagaccagaattggcccggagggccattactgtggccgaggagagactgtcagatgacaagtggccggaatactacgacactcgatctgggaggttcattgggaagcaatcccgatcttatcagacatggactattgctggttttctgacctcaaaaatgttgctggagaacccagagctggcttctattctgacctgtgatgaggaccttgagctgctcgaaggctgtgcttgctgcctgtccaagaagaggacaaggtgctcacggcgagcggccaagtcacatgctgcgtgaaactgtgaagcttatgttgttttttatactgttgatgcacaatgtgtactaccaacggagaattaaccaagacagactcttcagagatacattagtataggtttatgttagatacccatccattcatttcctaggtggttgctcattcttttttgctgagctaccactgatgggaactaccctgggtgataccggtggttgaaagaacagagcaaaacatatttgaagtttgtgctctcttgt

SEQ ID NO: 145986 - DNA, 357 bp, Zea Mays
atgaggaaaaggcggtacgacaaccatcagatgaccgtgaagagcctagtcgatctcttggatgatcgttcatccaggcatagagccgttcaccttctcgcgtgtgatccgctcgacgtggatgacccagcggcggtggtgccgcgcacgacctgcacctcgtcgtccttgcggatcgggatggagctccgtcgacagcccggcggacatgagaacgcagcggacggaggacgaggccgtgaagtgcgccttgcggcacttccggtgggagctcgtgatgcggggattgcgcttcatggccgcggcgggatgggcgctcctgcttacctgggaggccgcttcggtggcggcggctag

SEQ ID NO: 145987 - DNA, 572 bp, Zea Mays
ggaatgcttttctggaggctgacttgcaatgttctaataaagttcagaacatggaatcaaaggtgcgagcagcatgtaaccgttcgaatgcaaaattagatgacatagtcaggctccttgatgacctactcacagagtatgagtcaacggcctatggtcctggaaaatggaaaaggctagccacattcttacaacagtgtttggctggccctgttctggaccttttcagaagacagttagagcatatagatgctgaaaggaacgccatgagattgaaatgcaattcaagcgatgataagttggcattgctgaggaagcagcttgaagcaagcgagagtcacagagctgagtatgtgaggcgctatgaggaaattctgaatgataaacagaaaatttccaaggattactctattcgtataactgaacttcaggccaaaagtagcaagttggatgtgaacttatgtgaatttgtgaactaaaaatgtgcactatggatgtgaacttatgtgaatttgcgaatttatgtatttagacttatgtgaatttgtgaacttatgtatttagacttgtgt

SEQ ID NO: 145988 - DNA, 1520 bp, Zea Mays
accactatccattttcattcaatgcgtccgcgccgcgcgcctccattcctctcgattccctccctccttccttgttcgaggacctccgcgaccgtggccgagggattgaggacggaaagcgaaaatgatgctgacgcgggcgtcgatgggggtgatggatgcggcggcggtggacgaggtggtgcgtcgcctcgtcgagggcggccgcgggggccggcaggtgcagatgtccgaggccgagatccgccagctctgcgtcgaggccaaacaggtgctgctttcgcagcccaacctcctccgcatccacgcgcccgtcaagatctgcggtgatatccatggacaatttgttgatctcttgaggctctttgatttgggtggttatcctccaacttcaacttatattttccttggagactatgtggatagaggcaaacaaagcttagaaaccatatgtctgcttctggcatacaagttgaagtaccctgataatatataccttttaaggggaaaccatgaagatgcaaaaattaacagagtttatggtttctatgatgaatgtaaaaggagattcaatgttcgactatggaagatattctgtgattgcttcaactgcttgcctatggcagcacttattgatgacaaaatattatgcatgcatggtggcctctcacctgaattgactagcttggatcaaataaaagatattgagaggcctaccgaaattccagactatggtcttctgtgcgatctcctttggtctgatcccagtcatgatacagaaggttggggggagagtgatagaggtgtttcttgcacttttggcgcagataagcttgttgaatttttggagaagaatgatcttgaccttgtgtgcagagctcatcaggtggtagaagatggctacgagttctttgcagagagaagactagtgaccatcttttcagctccaaactactgtggcgaatttgataatgcaggtgctctattgagcatagatgaaagcttgatgtgttcttttcagatcttgaaaccaaatgaaacaggtgcaccacattcaaggaaacctcttccaagcaaggcaccaaaaggagagaacgtctaatttgtatccagtgacctaatcacaatcgatgtcagctcgaagggggcgatctcgttgtctcggatccaccagggcatggcattagcgttctacacttgctgaatttgtgtggactcaatcggcagcgcttacattcttctgtacagcagcagtgtttctaacttggcatatcgtccgttctgatagtgacattgccacagctgcaatattttagtcgggtggacaaggcattttgttgggtacagtagctgttgttttgttagcctttttttggtaatgtttgtttggttgattgaacgctgtgagttttgtttgccgcgtatcttcgtcaggctcgggtatttacatcctgcaactgtgtaaatgattttgtctaacgaatgtctgttgacataaagattgctgcttacagtaacaa

SEQ ID NO: 145989 - DNA, 1741 bp, Zea Mays
gacacgcaccgatctagagagaggagccaatgctgttgtgcttcgagccttgtgttgcgcatcggttgtagcgtcgtcgacgacctaacaagctcgttctgtcgcatcgggattcattcctcacgcgtgatcccgccagacgaaggaacagcaggggaaacacgatgacccttccatctcatagaagagaatcagatctggagatcaatggggcttcgcaagatacagtcggcgcaaagaaaactgcatgcaagacgacgcagcggcaaatattgcgatctgaaatagttagcacttttcttctcaagggaaaaattgaagaaccgcgtccgagcattcaccggagcattcgtagttatgatttcccccgtgctccttgccatcgtgctcaagaaagtcagcttgactggcaccggcgggaggtatcaggggaggatacgactacgagcgctggaagcattcgtcgacctcgtccaaagaaggttcgcccacctcgcagccgtgactctgcagatgggcataatgcccttcctgtgcgtgatggtcgcggaagcgtgcgccagcttgccgccgctcagctacgtcgccccaaggctggtggccgcgtgcagagtgctggtgttcctctccaacttgctgctcatggccctgggctgcgggatcctcctcctcttccacagcaacgccctgctagtgctcactatctgctccgccatggcgctcggtgtcgctgccgtgcaaattcggtacctctgccgcggcgtcgccgatgccggggccgccgacgacgcggaggcggaggagtaccacagcaagctggagcagttgcttgagctgtcggccgggatgaccgtcatgatgttcctggtgctggaattcgtggcactggagagcctgctgaggaacactcgtcaggggcaggctgtcaaaagagggcagacgttcctcggcgtcgccttgctcgtcagcttcatggccagcacgctgggcgtctcgctcatgaacgtatggaccacgccccacgtcatcagcggctgcgtcgtcttgaccgccgagttcatgagggtcctgaatttctccttccatgctctgccgatcgccgcggtggtggtcttgatcacgctggatgtgcttccgcacgcgtggaagctggcagtgtggctgccgttcttccctctggtcatagtgctcctggtgctgctggcgcggtacagccgtgaggcgatgaaacagcaggagccagcagcaagaggaagagggaagcaaggaccagaagcaacgggcagcagcacagcatcggatccatcgtcatcaggtgaaaagaagcctgatgatccaaagccggcctcgttggagttgaccaaggtggcattcacgggcttcttggccgtggcagtacccagcgtcaccagtgcttctttctgcgtcccgtctgcattctttgtgttattcagtgcagcgaccgttctcctgggcctcttgtggaggctcctcacgcacgaggcggaaccaccttcgtgtgtcctccaagctgccaatcatgcttccttctccgcgcacatgtccattttcttggccgggattgcattctgggtcatggctgcctttgctcttcattaatgctcgacgtcatcctttcacagtttaacatcgtattcacggtctgctgtaccgtacgctttttttaatggtgtaacggagaatgtggaacagcctaccaatcgagcgcaaaattctttaa

SEQ ID NO: 145990 - DNA, 1303 bp, Zea Mays
attaaatcgccgtccctacgcctgcctcaccaagccggagcgaggcccttgcgcctcggcatgcagcaaccggtgacggcggccgcttcgtgcggcttgcgcccgtcagtcatctgcctctgccccggaaacaacgcagtcgtggccgcggcagcttcacgaggcttcagctcgccactgctccgggcctcgccctccctcagctcggcaattttccctaaatctcaggagtaatttgatggagccatactgacctcacgtttccaatcccttgagaaggagaagggatagcatttgacatatctgtacatcttctttccaccaacaagtctccttcgttccccttcaaaatggcgcccgcttttccgacgaccctcctccaccaggcgtcgacctccttccgttttccagccggcgccgcagggtgcatccgccctcactgcttggccccactggcggcccccacaacgctctctttggcggccacgccagcggtacctcgccggctcctcctcccagtggcggccggcatttgggacctgatctccggcggagctggcgccgccgccgctgcgtccctcgccgtccggcgaggtatgcagcttttccggcagggagatgtagctggctcgttggcagaatttgacaaggcgatcgagatggacccgcgacagaagcaatatctttggcaacggggcctctcgctgtactacctagacaggtttgaagaaggtgcagagcagttcaggatagacgttgcagctaacccgaacgacaccgaggagtccatatggtgctttctgtgtgaagcgcagctgtacgggactgaagaagcaaggaagcggttcttggaggttggtttggactcgagacctgtaatgcgtgaagcatatgcactgctcagaagtggtgcagatcctgaaaagttagttgcaaagttttcgagtggaactgatggtgaggtcttctattcttcactgtatgctggactatactatgaatctcagaaagatgcagatatggcaaaatctcacattgttgcagcatgcaagtcgccgtatggatcgaggtccggcgattacatggcttcccttgcacttgtccactgccagtgtcgcaactggaaagtagtttgaaagagatcaccaccatattcaagaggacccgacaattctgtttggaaattacttgcaatccttgatatatagactgcaaattacttgcaacaaggacatgggttttcagacaatgacggaccgagttaaggaaaatatgagaggctatcgagtttgggaaaaaaaaa

SEQ ID NO: 145991 - DNA, 580 bp, Zea Mays
gagcgctaaaacttgattgagggatcagagaagtcggttgactagctatggtggctgatacctaaggaagactgataggtgtcatgacatgatagattagacgtgttgccgatgtggtcgaagaccaacatgacacatatctaggaagtgggggatgtgtatggatatgctagatgtggtcgaggaccgacatgacacatatctaggaagtgggggatgtgtatggatatgctatctgcggcggttcgggggttgaacccgaaaaaccagccagcgatgtttcatgggtttgaccttagaactcggagagcattttaaacgggaatcaaaggtgacacgtggagcgatcacggaggttacatcaaggcaaagcaaatatgtaaaaaggagtgtggccattagatcaacaaattcagagttagaccattatggcagtggctgatgagtttaaagcatattgtaagtctcaacacattgctaggcactgcactatacattatatgcctcaatagagtggtgtagctaagcgttggaacataactatcctctctaagacatgttgcatgttgtcttgttcata

SEQ ID NO: 145992 - DNA, 512 bp, Zea Mays
gatctatggcgccgaggatgtctagacgtggtaaatctgctaaacaaagcttatggaaatttaggaagggtcctttgaccggaactgccttcgacccgctgcctttgccaagtggtgttccagtgcctatgtgtttttgtggtgatccttgtaaggttgataagtctgaggatcatgagacttatcgacagaggtattggatgtgtgctaactttgcatttgagccaactattgtttcaacgtcggatgaatttaatgaaatatcagagaaagacaagaagtggttggataatcttaaaaagtgggatgcagaggacaaagagaggattgagaaaagacgagagaagcttgctgccgagcaacaacgtgaagacgagcagaaaatgaggcgtgttgctgaatgcagggaagagaaggagaagaagcttgagcgtgcacgtcgtgcaaaggaagcaatgaaggacaaccctgatgcatttcgcaagggcaaatggccccgttgcactcagtag

SEQ ID NO: 145993 - DNA, 249 bp, Zea Mays
atcacaagttcacagctcgcccggacccagagggagcttgtacttccaaagttccacagttccactgcacagatcgtcggcggcggcgcaggcaaggccacaatgtctccggcgcccagcagcggcaagcgcgggagggttcccgacccggaggaggacgtctacgtcgacaacctccactcccacaagcgctacctcaccgagaaggacatccaaatcatctgtatcgtttgctgcgggtacacttga

SEQ ID NO: 145994 - DNA, 975 bp, Zea Mays
atgagagtggagaatgcttcttgcattagggatgagatgagtatgcagtactcacctatgtcagaagagtcagatgattataggtactatgacactcaagtaaacaccaatgggaatcaaacagatgtactgggtaatccctcaactagtctaatctcatctgcacaccgttttcagaggccacacacttggttctcttctgcaagtccataccctctcccaagctgctccctcccagcagtgatctgctcccctgctcgccgtggttgtggcactgaacaggaaggctggatcccatcctcacctaatgacatgtgctatggtggagatctgagacgaaccgcacttctgaggtcagttcaaatgaaggtgcagagcccccatccatgtgatgtgcatgaacgagaacaagggcgttctaatgtacatgctgacgagcttcaacaggatcagaaagaagctgtgggtgtacagctggaccaaaggcctctctcttgtccaaagtcaacccaggatgctaagtgccagagctctatacactgatgacgcggattttgttgaggatcagattacggtgtgaccagtcaaagtttgtcgaggatcatcacatatctggtaattttttgcgtagatttggatgaccataaataatactccctgtttcccaatatattgttcgtcctggcggatctattgacaccctaaaacgaatactattttgggttggagggagggagcatgttgcatggcccgttcgtaatttagtaaccattaacagtattctagtggtggcctgccccgttcgatgaacttatgtgacactaggttgtaagaagatgggacactaattaatcttgatcttagaaatgcaatgtgatgtagatgatatcagtgcttttattatgattagattaagaagttaagcagtctctgtcacttgcactttcaaggttcagatattgtttggatttgttt

SEQ ID NO: 145995 - DNA, 818 bp, Zea Mays
atggttttgcgcgtcaactgcttttgagacgtctcgcctcctgcttcacccgagggaaagccaaataaagtccacagcttggtctttcatgcttgctttgcaacaagaacaaagcctctttaagctcccccctcccctcctctttaagctgaccaaacaagctctccatcttctgtgtgcttcattattccggttgcctctgagtcggtccatggcgtcagcactaatgtccacctgatgttccattcttaattcatctgcgtgtatggcattggcaagagcacgggatcaccagaagcttgtgtgtgccgttctcctcatcttcgccctgcagatcccgttgctgctcagttcctgttccgcgcacgccattgctgtcgtcgaccctgcgacggccgggcggcgtcttctatccgtgcgcacggtacaggcggcgcagtccgtggaggcgaaggagacggtggtgcggcatccacggagcatggagagaagagcaagaagcaacagcagcggctcggcgccattcatgaacgcagtgagcaaacatcaggtgccgagcggagccaacccggactcaaactagctatagccatggattgattcggctggctggagaactgcgagagtgaagtatctatcatacctgtatgctttgtgcaaatgtgagctttattagtctgttgctcatgacaattatatttagatgtcttttttaaaaaacttttggcttccttaacttttctacatatgtcctcctttggtttcatttcagaatcttttgtgatgtcttctatcaatttaagatatgtttaatactc

SEQ ID NO: 145996 - DNA, 938 bp, Zea Mays
cagccgtggagcatcagcaatccacatcatctcccttggctgagtggttcccttgcggcgcccaggatccttcccagacgcgctcggctccatggtctgtaaccttgccggcgttcccctccacctagcatgcccatcaggccctctcttcgcctccctgccatggagctcgccccatgcccaatgccggccaacctcacttcccatggccgtcccttcctcctccctccctatggtcaacggcctcaccttccatggcttccaagatctgctaaacatccatcccagcgcgcacccctacttccgtgtactggtggccgacgcccctccctagagctcgcccttactcatccactcgtcctcgtcttcgttgcgggcatcaacgcccttcgcctcctaccggtgagcagctcgccgccggtcgttacgactccatcccgcttgatcacgtttgtctcgctgctccttccagtcagcacctagcgctgctcgtctcgtcgttgatctacgctccaagctctccttgatgttgcattcggtggacaggagagaaattggaggaatctggcgaagaagaaaagaaccctgtctgtcgcgtccaagccgcgtcgagccccttcgtctcgccctttccctgcatcttcactatccatggtcgcttctctcctttccctgattaatactaggcgcagcagcagcaacatgccagatctctgtagcttaggtgagaccaactgcttgtgttctatttattccccaccaattcctatatttgattatttactgtataagtttgtgtgtttgtggtggaggtaaatcctaggaaatttagatgagaagaaagctttagcgaggcgcttgccaagtgcttggtgaatcgtctcaaccggatgtggttgtcgatctcgcagagtcgagtcgagtttagtcgtggtaag

SEQ ID NO: 145997 - DNA, 939 bp, Zea Mays
cagccgtggagcatcagcaatccacatcatctcccttggccgagcggttcccttgcggcgcccaggatccttcccagacgcgctcggctccctggtctgtcaccttgccggcgttcccctccacctagcatgcccgtcaggccctctcttcgccaccctgccatggagctcgtcccatgcccaacgccggccaacctcacttcccatggtcgtcccttcctccttcctccctatggtcgacggcctcaccttccatggcttccaagatctgctcaacatccattctagcgcgcacccctgcttccgtttcctggtggccgacgccccctccctggagctcgcccttgctcatccactcgtcctcgtcttcattgcgggcatcagcgcccttcgcctcctgccggtgagcagctcgccgccggtcgttgcgactccatcccgcttggtcacgtttgtctcgctgctccttccaatcagcacctagcgctgctcatcccgtcgttgatctgcgctccaagctctccttgatgttgtattcggtgggcaggagagaaattggaggaatctggcgaagaagaaaagaaccctgtctgtcgcgcccaagccgcgtcgagccccttcgtctcgccctttccctacaccttcactatccatggtcgctactctcctttccctgattaatactaggcgcagcagcagcaacatgccagatctctgtagcccaggtgagactaactgcttgtgttttgtttattccccaccaattcctatatttgattatttactgtatatgtttgtgtgtttgtggtggaggtaaatcctaggaaatttagatgagaagaaagctttagcgaggcgcttgccaagtgcttggtgaatcgcctcaatcggatgtggttgtcgatctcgcggagtcgagtcgagtttagtcgtggtaag

SEQ ID NO: 145998 - DNA, 524 bp, Zea Mays
catgcatatggatcttattagttgtctcctagcctgcagcattgcataatatgacttcaaattattttcattgcatttcaatcaatactatacttcattatcattttccctttttcacatttttaataatctacatattgggttgttcattttctagaaccaggctaagtattgatgttaatgttctctagccattgtcatttcagttgcttagatcagtaaaacttgataaataaatgtttgatgcagattcaacaattagattgtttagtggtctaatttaggagatttcatagaccttcatctgtaaaggccataacttacataaaaggttatctccacaagatgtagcaagcactatccaaactaaacaaacctgtgcagtggtaaaacataatgctcgaatcagtggtcgaatgccttttctaaaaaatcattctttgtctgagaatggcattacttctatccaaatgtaccatagacttacatgtatatgtttctgtatgtaatagaatttgtaggtg

SEQ ID NO: 145999 - DNA, 1380 bp, Zea Mays
cgaaggccgaaggggccgcgcgtcgacgcgtttgcttgctcgatcgtccgttcgctcgctacaacaacagcaatggcggcgaggagggtggcgctgctcttcgctatcctcctcctgcaccaaacggtgtcttcgcttgctggaaagagctactatgagattctgcaagtgccaaagggtgcatcggaggagcaaatcaagagggcataccgcaagcttgcgctgaaataccacccagacaagaaccccaacaatgaggaagctggcaggcggtttgccgagatcaacgatgcctacgaggtcttgacggatcggaagaagaggaaagccgatgactggcacggtgaggaggatttagccaagtacatgggtcgtgctatgaaggtcgatgtcgaatacgtgtttagcaatggtggaagtccgaaacaggaggaagaacagattttgaagggtgatgatgtcactgttgaattggaggcttcgctagaggacttgtatatgggtggttccttgaagatttggagggagaaaaatgttataaaaccagctcctggcgtcaggcgatgcagatgcaggaatgtggttcgtaaacgagaagtcgctcctggagttattcttaacttgagtcaccaggaatgtgatacatgcccaaatgtgaagtacgtaagagaaggggctttcattaatgttgatattgaaaaggggatgcaagatggacaggaaattttattttacgaggacggagaacccaagattgatggagtgcctggtgatttgaagattaaaattcggacagcacggcatgaacgctacagaagagacggcaatgacctacacacgacagtggaaatctcgctggcagaagctcttggcggattcgagaagaaggtaacgcaccttgacaaccatgaggtggaaatcgggaccaaggagatcacgagaccagaagaagttcggaagttccaaggcgagggcatgccactgtaccgtagtaacgagaagggagacctgtacgtcgttttcgaggtagtcttccctgaagacctagctgatgatcagaagaccgagctgaatagcattttcactggaacaccgtcaatttcagctcttgggctagttgccaagagcaaaggtaggcaaaggtcaatggcaggagtaatgtttcttttagcgttgttgctcagattcataggtagtcaaaggtagaaaatggatgcatcagtatatctctcaagtgcctggctgttttactttcaactatctcctccgccagcaatgttcgtgaatcgtctggttcaacgcaaacaaaaagtaaaatatactggcggaggagatagcgttcatgagcaacatgtacaaagcctgcatttttttactttc

SEQ ID NO: 146000 - DNA, 927 bp, Zea Mays
caaatgaatacatgcattgataacgcaaccaccgatactcagtaccaatccaccaccatattataacacataatttaagcaatcaataatcttataatgcatcgcaggcaagtccttagtaaaggtcctacggaaaagcaaaagaattccaggagtttgactgacataacaaaatgttttcacgctaaagattcaacatgttccccaatgttaagcactgttttttcctcttcatacccctccatgatactgtcatgatatgatgatcatcgttcacgtgacgaaataccaaccagaacaaataacaaggcaaaaaaatcgctgggctgagcaagcgccccggcaagggccctacttgatgtattgggagacccacttgaaaccatcgccgtagcccatcttgcgaacaacactgcacatgaaaacctcaagtggccggacattggagtcgccaaggttgaccttgcccttcccggttgtgaagttgctaaggcctaggtgataccgcagctcctcttcagaggcagcatacgggatatcaatcttgttgccaaggatgagaaatggaacatttgccaaggaatcatctgacaggagagcgtccagctccttttttgattcagcaaatcgctccttatcatacgcatctaccaggtatactacagcatcaacctgttgcaatatgaaaaagaaaattcagtcagacatatatgaaaagcagtttctggtggaataaaagcagatgcataagcaaaataattagcttatagagagaagcaaaacaaagatagaacacagggaacgaaccacaactgtccgcaactaatcattgcttcacaaattttggtgcaaggaataaggatagcataatgtgcaaagacaataggaaataatggtaacatcagcatgtaacatgaaatatcacgt

SEQ ID NO: 146001 - DNA, 324 bp, Zea Mays
gaaggcaagtgtttcccggaccgtcattttgccgacatgaacatcgtgctgcccaatgtatgtcgatgtcctctgagggacaaatccatccatgtcatgaccattattggagtcaagtttccctgccaaagccagaagtagacttgttttcccggatccaggaggtccaagcagcaaggacattctgaacaaagtgccagttagtaagtacaactacagaaaaactgaaaaccttgcactttaaaattttttggcttcttacctgtcgggtcttatgaccccactgatatcgtgaaggatggagacaggcctcttcccgctaga

SEQ ID NO: 146002 - DNA, 727 bp, Zea Mays
cgaacacgcgcgcaaaaaatattgacgaaaactggaggggtaaaggggaaaaggcgacggccgcctgggccctggaggagcgagaaggcggaagaaggggagcggcagtcgcaggccgcagctcgttgatggtggttagggtttcgccgcccgcacgctcgacctgctgaagaatcgcccccctgttgaagaggtctgcgcctcgccctataaggctccggggaagaggagatagacatcagtggaccccggcgcgcggctgatggcggagcaggagcggagggacgcggaggctgggggcgatgccgcgggcgcagcggtggcgtctcacaccagcagcatgcagcgtgtcaaagtataccgtttggctgatggtgggaagtgggacgatcaaggaacaggtcatgtttctattgattacattgagggttcgaaagaactcggtttgactgttttagatgaagatgacaatgagacgctacttatgcacaacatcacatctgatgatatttacagaaaacaagaagaaacaatcatttcatggagagatcgtgaagcagcgacagacttagcactaagctttcaggaagctgcaggatgctcctacatatgggaacatatatgtgaaattcagagaaaccttcagttcagtaaccttggtgctccggaagttggtcgtcgtcaatcatcagaatctctagaagcctctagaataatgcattcaaat

SEQ ID NO: 146003 - DNA, 78 bp, Zea Mays
ggcatggcgaaacactgccatggtattgtatcagttctccaaatgtgtaaacgcatggctgcagactatctgtactac

SEQ ID NO: 146004 - DNA, 3418 bp, Zea Mays
agagtggattcttatagtatctccttgcaattccagagaaataatgggcagtcttggtggctgacttgtgtctatggacctcaaagtaattctgaaaagatcctttttcttcaagagttaaggcatttcagaagcatctgctctgagccttgggtaatagtgggagactttaatctcatctacaaggttgaagacaagaataatgataatattaatagatctatgatgggtcgcttcagaaaatttatcaatgatgttggtctgattgatactcccctaattggtcgcaaatatacctggtccaatcatcaatcttcaccaacactggtccgactggatagagttctctgcactactgattgggaagcgttgttccctaaccatctccttcaaagtgctgcttcagaggactcagatcattgcccactgattcttggacttaacagtatgtgttctggcaagcgtcgatttcatttcgaatccttttggccaaaattggaagggttccaagaggtagttctggaagcctggaattcggttaatgaaagaagttgccctttcctgacattcgaactgaaattgaaatcaactgccaaggctctgcagagatggagtgctaagaaggtaggccatgtgtcctcccagttggcacttgctagagaaattcttcatcagctggagattgcccaagactctcggctcctgtctcctttggaggtttggctcttgagagggcttaaaaaacactccttagcccttgcctccctcaaacgcactattgcccgcctacggtccagaatcagttggataaaggagggcgatgccaactctaagcttttccatatgcatgctaggcacaggcaaaggaagaactttgttgccaagattgtgtcagggatgaacactttcactgatcacggcgagaaggctagagcagtagatgagttttatttcaaacttttgggctgcaaggcggacagatccttgactgttgatttggattacctgggtctaccttctcatgacctgactgatttagatgcgcagattgatgaaaatgaggttctggaatccataatgcaactaccttctgataaggctccggggcctgatggttacacaggcagattttataaagtttgttggccaattatcaagacggatgtgatggctgttattgctgcaatttggtgcagaaaattccagcagtttggaagacttaacactgcatttgttactcttatccctaagaaggagggggctgaggaagtaaaagactttcgacctatcagtctggtacacagcattgctaaacttgtcaccaagttgatggccaacagattgtcccaacgactgcatgatcttgtttctcttaggcagagcgccttcatcaagggccgtttcatccaagacaacttcatgctggttcagcagactgccagattgcttcaccagcaaggccaaccgagggttcttttgaagcttgacatcactaaagccttcgattctgtttcttggccttttttgcttgaagtacttcagagattgggtttcgggcagatttggagggatatcttaagtggccttttagcaacttcctccacacaggttttactcaatggagttccggggaacaccatcccccacaagagagggctgcggcaaggggatcccctctcccctatgctttttattttagtgatggacatccttggttgcattgtggccaaagctgatgaggaggggcagcttgagcctctctcttccaaaccactgcaccacagaatttcgctatatgctgatgacgcggttctttttttccacccaagggagagtgaaattcatactgtcctaggtattctgaatttgtttggagaagcttcaggattaaaaactaatattcagaaaagcagtgtgtatccaatccgttgtgggcaggatgagctggacatcctcaatgattggcttccttgtgaactttcgtctttcccatgcaaatatcttggtctacctttgtccttaaaaaagctgtccaataatcagctgcagcccattattgacaaagtggctgatcaactttctgggtggaaagcggacctcatgacacgggcaggtagaagagtgcaggttcagtacgtgatgactggcatgcttatatatctagtcatggcagttgacattcccacaggctcgctcaaagctatcgacaagatcagaaaaggatttctctggcgtgggaggaaagaggtcagaggaggacattgtttagtggcttggggaagagtttgtagacctcttgaaattggtggacttgggatttctagtcttaaagaactaggatgggccttaagaatgagatggttgtggctgcgcaaaacggatccggataagccttggtcctcattgcccatgcagatatccaacaaaataaaggcctttttttgcaccgccctgctcactgaaattggaaatgggtcctcaaccttattttggctggatcgttgggtccacggaaagaatattgaagatattgctcctcgactgcttgcagcggtaccaaagagaattaggaacagcagaactgtgcttgaggccttgacagacaggagatggctaactgatattaaaggggccttgacagtaggtgtctttgccgatctcctagatctctgggatgaacttcaaagtgtccagcttcattcagacagggaggacaaacatattttcaggttcgctaatgatggaatttattcagcgaaagcagcttacagaaggtgctggacagcagatcgtttgcagaagagaggtcttagccatcctgacaaatgtgtcctgtgtgaccaagagcaagaaaccatagatcacattttggtggggtgtgtttttgctaggagtttttggtttcagctgctgggacaggtcaacttatctgcctttactcctgtgatgggagaaactaaaatgatggagtggtggagcagaagcagtgagcagttacaggggattgctaaaaagggattcaattctttgattacccttgggctttggactctctggaaccacagaaatggatgtgtttttgatagagctacacctagcatggagggtgctatcagaagagctgaagaagaaattattatttggaattttgcgggggccaaacatcttgcccttattacagctcccattccaggtgtcatgtagggatctaggagtaagttcagtagttaacctcactagggaagggtgttggttggttaagtttagattgtgggggtaggttggtctagtttgctttctttcttctcctttttctttttctttttctttatatttctttttctgttgtgtttgtaattggtctaatttttagacccttcttcttaatacaatgatacgcagctctcctgcgtgttcg

SEQ ID NO: 146005 - DNA, 2185 bp, Zea Mays
tgtggaggccatattgtttgacaagatctgacttattcatgtatagctcatttactcttggttgcaattgacttggagtgaaatgaaagatggcccaacttgccctcaaattctcaatgccactattattatttcttcctagtcatgtttgtgtataatttcaatgctaatttttaggttaaaggcatggtaactgacttcggtgaggaaatgcactgccagtttctagaaatcttgcgcatattgatggattctttcactatgtctggagcacatagagacgtaattattgagattttctacgaaaggcatcttgactatttggttgatgtaatagcatcctcttgtcccccgaggagcttgtctcgaccaagatctaactctgtacgtgttggtggaaacgctgaaggacatcatatcaagcctgagattttgttaaatgtttgtgaactactgtgcttttgtgtagttcatcatccctacagaattaagtgcaattttcttatgaataatgctatcgagaaaatccttacattgactcaacggagggagaagtttttggttgtagcagctgttaggtttatgcgtactattatatccagaaatgatgagcatctcattcgccatgttgtgaagttcaacttgttgaaaccaataattgatatctttgttgacaatggggagaggtacaacatgctacattcaggagtacttgaattgttggaatacatacgaaaggaaaatataaaagctctcactatctatgttattgagtctttctggtatgaacttgtcaagtttgaacacttcgggagtattcaggccttcaaactcaagtatcaacagtacgtggagagtgctgaaccaatgttaaatgcgagtgtgcctaacatgagaaagaaggcagaacaaagaggtctagagaaggaagaggaagactacttcaataaggatagtgatgaagaagattcaggctccggccggcgggataaacatgcacagaaccagcatagcaagcctaagcccaaggtccctaatggaagtgaagctgatgacactgatggcgcctctagacctaaatctgctggacttgtggactatgacgatgatgacgatgaagacttcaatccaccaccaatggagccttctacgcctgcagaggatgatgtgcccttaaacatatccccggtgaagcggaagccagtggatgtgaaacatgcagatggggagggtcgcaggaggcaaaaaatagaaaccagaattagttgtgctaaaattgctgctgttactagtaccattattaagcacacagatctacaaaacaagcatgcttgctacttgcctacatcagccgcgccaagtactgaacccaatggtgtttttagggagcgtggcactaactctgaggagcatcaacattctgtagagaacacagaaacttcacgacaagctggtggtgattgtataaaagacgggggcagtatgtctcccgagaaggctgtaaatacgacaacgacaagtgattcggagccttattcagtaagatgactgactactacacagctggtttgtccctgtacccaacctgttctcttgccaacaggaaggaatcggaatgtgtttggctccaaaaattcattgatatcaagctggaagcatgattggaggtgacatagattgcagctacctttacatctcaagtaaaattccagttacccctttttgagcctgtaaagttaattttccacaaggaaagatctgacgaacatcagaattgggatggctgtagattggaacattgaatgggccttgctcctgctgctatgctcgctattgtatctcttttatgagctaatggagtagcagtgaatgtgtgccttcaacttcactgttttctctccagtcattgactctgatgttactgctgtaaaacaagtaggactaaggcatagtttcagttgaatagcgtttttgccggattctgctgactcacttatacgactgtaatttgatggttcatagttttggctggacatgctgtcttggataattattcaagccttgtggtagaatagttctttaggccaaagatgtgctaggtagaatttcgaaagtgaataatgttggatgtattgggttaaggatggcaggtgtacatgatatcctactccagaacaggttcgct

SEQ ID NO: 146006 - DNA, 2323 bp, Zea Mays
tgtggaggccatattgtttgacaagatctgacttattcatgtatagctcatttactcttggttgcaattgacttggagtgaaatgaaagatggcccaacttgccctcaaattctcaatgccactattattatttcttcctagtcatgtttgtgtataatttcaatgctaatttttaggttaaaggcatggtaactgacttcggtgaggaaatgcactgccagtttctagaaatcttgcgcatattgatggattctttcactatgtctggagcacatagagacgtaattattgagattttctacgaaaggcatcttgactatttggttgatgtaatagcatcctcttgtcccccgaggagcttgtctcgaccaagatctaactctgtacgtgttggtggaaacgctgaaggacatcatatcaagcctgagattttgttaaatgtttgtgaactactgtgcttttgtgtagttcatcatccctacagaattaagtgcaattttcttatgaataatgctatcgagaaaatccttacattgactcaacggagggagaagtttttggttgtagcagctgttaggtttatgcgtactattatatccagaaatgatgagcatctcattcgccatgttgtgaagttcaacttgttgaaaccaataattgatatctttgttgacaatggggagaggtacaacatgctacattcaggagtacttgaattgttggaatacatacgaaaggaaaatataaaagctctcactatctatgttattgagtctttctggtatgaacttgtcaagtttgaacacttcgggagtattcaggccttcaaactcaagtatcaacagtacgtggagagtgctgaaccaatgttaaatgcgagtgtgcctaacatgagaaagaaggcagaacaaagaggtctagagaaggaagaggaagactacttcaataaggataggtttactatttttttcttactggtcatttatttcttcattattttagcaatatagtcgagcttcgacattccagggtgccattatgttcaaagattatacagtgaatttgcaagtgaaatgatctttgttcttcctagtgatgaagaagattcaggctccggccggcgggataaacatgcacagaaccagcatagcaagcctaagcccaaggtccctaatggaagtgaagctgatgacactgatggcgcctctagacctaaatctgctggacttgtggactatgacgatgatgacgatgaagacttcaatccaccaccaatggagccttctacgcctgcagaggatgatgtgcccttaaacatatccccggtgaagcggaagccagtggatgtgaaacatgcagatggggagggtcgcaggaggcaaaaaatagaaaccagaattagttgtgctaaaattgctgctgttactagtaccattattaagcacacagatctacaaaacaagcatgcttgctacttgcctacatcagccgcgccaagtactgaacccaatggtgtttttagggagcgtggcactaactctgaggagcatcaacattctgtagagaacacagaaacttcacgacaagctggtggtgattgtataaaagacgggggcagtatgtctcccgagaaggctgtaaatacgacaacgacaagtgattcggagccttattcagtaagatgactgactactacacagctggtttgtccctgtacccaacctgttctcttgccaacaggaaggaatcggaatgtgtttggctccaaaaattcattgatatcaagctggaagcatgattggaggtgacatagattgcagctacctttacatctcaagtaaaattccagttacccctttttgagcctgtaaagttaattttccacaaggaaagatctgacgaacatcagaattgggatggctgtagattggaacattgaatgggccttgctcctgctgctatgctcgctattgtatctcttttatgagctaatggagtagcagtgaatgtgtgccttcaacttcactgttttctctccagtcattgactctgatgttactgctgtaaaacaagtaggactaaggcatagtttcagttgaatagcgtttttgccggattctgctgactcacttatacgactgtaatttgatggttcatagttttggctggacatgctgtcttggataattattcaagccttgtggtagaatagttctttaggccaaagatgtgctaggtagaatttcgaaagtgaataatgttggatgtattgggttaaggatggcaggtgtacatgatatcctactccagaacaggttcgct

SEQ ID NO: 146007 - DNA, 713 bp, Zea Mays
atgtcagatgcacgggtcaaagctgttaccgtgtacttcaagaaagtgaagggtcaaagaatgaccaacaagcaggcgttggggatcggtgatggggttgtgagtcgcgatagctttggtcgtcggtctgtttcctcggtggggagtagatctcgaacttcaacttcgaggaatcagagcttgatgagcaactaagacaacaacaacaacaagttcaacaactatctcaacaagttcagatgatgcagggaatgttgatgcaggtaataattttagtaatccaccattcattcgattttcagatgcattgcaaaaactcaagcttattgtatttgcagatgtatagtgctcagatgggatctcaaatgggaccccagttcacctgtccgtcacaatctggacagaccccaaataccaacgaaacacagggttctgagaccggacaaggaaacccacagatggacatgcagtggtcgatgccccctagaggacagattcttcctcctccacaaccaggtatgggatattggcccgccaccaccatggggatatcctacacatccaatggggccttggggatgcccccatggccaacacagccacttccatcaccagcgtatgttcctgattcatgctgcttgttacttttatttgctacaaattggactttttttggggactactccactgctgcttgtacatctggcgtttga

SEQ ID NO: 146008 - DNA, 1008 bp, Zea Mays
gagcaaacaaaattttattctaaaggtaaaaatcaaacacttgaaagaaaaattctttactataattaccactaatatttaaatgcattattttaagttgatggttttgaggtgttacaccatggcggcgcgaactagagctccatgcctctacgaccaccatcccatccctacgaatggaatgccggcagaggatgacatggttactactccggggggtcagcatcctcatcaaccccgacagcaaacgcgctgctcgctgtggatggccaccatacttcatcgacgaagacaccggtcttccaacaccaacgccggcttcaccggtaccggctcggactccatggaatccggccttcaccttcctcccgagcgtaggcaccctcaacgctaatagtggaggaggcgccttcttctcccctggcaagggggataccccttggaattaaaccaggagaaggggcaaggggtcggcagtgcccgtgggggcctcgaccggagcgcccaaggctaggacgctctcagccggcgcgccctctgctgacgcgcacgtggctggtgcgccctcggccgatgcacccttggtcggcgcgccctagttcgccaccatggctaggatgctcttggccggcgcgccctcggccggtgcaccctcggctggcgcggccacatcgactacggcaatggatggatctccacggcaacagcggcgacggcgggtggcgtccattggcggcggcggttacagggcgccggcagctgtagggcgattagggtttccctgtcgcgcctcaaataggccatgcacctctgttgggtcggcctgcaaggcccagcaccgtctaccctccccctccttactacgccatagttgggtcggtccctaggcccaatgtccgcctccccctgcgccaatgggctgacctacaagttggcccatctagcactcccatacacatttacctttatatttttaaagttcagttctaaattcgcaagaaaaccttt

SEQ ID NO: 146009 - DNA, 1252 bp, Zea Mays
tcgagagcgagccaaaaactcgaactgttcaaaccccgccagcccttccgctcccacgacccaaccccactgcccggagcccccgagccttctcgaatcttgcgagaaccccaggggcgaggagcagatgtcggcgaggctacgggtggcggagctccgcgcggagcttcagcgccgcggcctcgatgtatccggcaccaagcctgctctcgtgcggaggctggacgccgcaatttgcgaggcggagaaggccgtggtggctgctgcgccaaccagtgtggcaaatgggtatgacgtagccgtagatggcaaaaggaacggcgggaataataagaggaaaaggtccggggatgggggtgaagagggaaacggcgatacgtgtacagatgtgacaaaactagagggcatgagctatcgtgagctgcagggattggccaaggcacgtggagttgcggcaaatgggggcaagaaagatgttatccagaggttgctctcggcgactgctgatcctgctgcagttgcagatggtggtcctcagggcgaaaaggaagtcataaaaggtggtgatgaggaggttgaggtgaaaaaggagaagatggttactgccacgaagaagggagctgcagtgctggatcagcacattcccgatcacataaaagtgaactatcatgtcttgcaagtgggcgatgaaatctatgatgccaccttgaaccagactaatgttggagacaacaacaataagttctatatcattcaagttttagaatctgatgctggtggaagctttatggtttacaatagatggggaagagttggggtacgaggtcaagataaactacatggtcccttcccaacacgagaccaagcaatatatgaatttgaggggaagttccacaacaaaaccaataatcattggtctgatcgcaagaacttcaaatgttatgcaaagaaatacacttggcttgaaatggattatggtgaaactgagaaagaaatagagaaaggttccattactgatcagataaaagagacaaaacttgaaactagaattgcgcagttcatatccctgatctgcaatattagcatgatgaagcaaagaatggtggaaataggttataatgctgaaaagcttccccttggaaagctaaggaaagctacaatacttaagggttatcatgttttgaaaaggatatccgatgttatttcaaaggcggacaggagacatcttgagcaattgactgggtaagctaat

SEQ ID NO: 146010 - DNA, 1280 bp, Zea Mays
aagtcatagactttcaaaatatcaatgataactgtcagtatgttcctgttgccatacatggtatggtcttcaatatcgtaacgattgattatggttgtttgccaatctcaaggtatgaactaatttattggaaatattgatagctgttctattcttgaattgtagggaattctacaccgtgattcctcatgactttggtttcagaaagatgcgtgaatttattatcgatactcctcagaaactaaaagctaagctggagatggttgaagcccttggtgagattgaaattgcaactaaacttttggaggatgattcaagtgaccaggatgatccgttgtatgctcgatacaagcaacttcattgtgatttcacacctcttgaagctgattcagatgagtactctatgataaaatcatatttgagaaatacacatggaaaaacacactctggttatacggtggacatagtgcaaatatttaaggtttcaaggcatggtgaaacagagcgatttcaaaaatttgctagtacaagaaataggatgcttttgtggcatggttctcggttgagcaactgggctgggatcctttctcagggtctgcgaatcgctcctcctgaagcacctgttactggttacatgtttggcaagggtgtttactttgctgacatgttttcaaagagtgcaaactattgctacgcctctgaagcatgtagatctggagtactgcttttatgtgaggttgcattgggcgatatgaatgagctactgaatgcagattacgatgctaataacctgcccaaaggaaaattaagtaccaagggagttggtcaaacagcacctaacatggtcgagtctaaggtcgctgacgatggtgttgttgttccccttggcgaacccaaacaggaaccttccaaaaggggtggcttgctttataatgagtacatagtgtacaacgtagaccagataagaatgcggtatgtcttacatgttaacttcaatttcaagagacggtagatgttgcaaagagctgaaactgttgctgagatcttagcagaacatatgtggacttatagcaccaggtgccctcagcctcattttctgagcaaatttggtagcctttgcatttcgattttggtttcaggcttctagccccattgatgattgatactgagtgtatatatgaaccattgatatccaccttccatgtacttaagtttttttaacatgtcccatgcatataaatctgatgaagcatatagcactaatacgattctaacttgag

SEQ ID NO: 146011 - DNA, 3306 bp, Zea Mays
agcggaacatctcgccttctctgaaagccatttcagaaccaccttcaaagttcgaactccatctcctccgcgtccgcaaaccaatccctagatcctctcgccctcgcaccaacccccaattcgatccaccccgtcccctatccgcctcgagtcccacccaattcggcgctagcctgatcggcattgcctgccggcctcgtcgtacagatctgagcgccgtctcgagcgccagatctcgccggctccgcgcctagcattccgccaggaccaggattcgcgcagcgccggcgccggcaccggcaccggcgcctgacgccaagttggcgcctcagaagcggtcccagcgtggcggcggcggaggtggcgcctccgccgccgccgcggcttcgtcagccgccgcgggggactccggcgacgccgttatggcgcggtggctgcagtccgcaggtctgcagcacctcgccgcgtcctcggccgcaggcggggccggggccggcgaccttcgcgttggtggcctgagtggcggtggcggcggcggccttctcccgagtcttctcatgcagggatatggaccacaaacaatcgaggagaaacagaagctttatacattattgaggagcctaaatgttaatggtggattagcatctgcatctatatccgagccctatacttcaacaggacagagctttgctggtggtgctcctgtagatggattttattcacctgaacttagaggtgaatttggggctggccttttggatcttcatgcaatggatgacagcgagcttctttctgagaatgctgcatcagaaccatttgagccttcgccttttatgccaaaagaaatggatgatgacgactacgatgtaatagcagaaaaccaacaaggtctagtagacaaccagagtgccttcaccaacgaaaaagaaaacactgtggtcagtgcaagagaaagtaatgtagcaaagattaaagtcgtggtaaggaaaagacctctgaacaaaaaggaggtatctcgaaaagaggaagacatcatagatgtacacaattctcaattcttaactgtccatgagcctaaactaaaggtggatttgacagcttatgtggaaaagcatgatttctgctttgacactgtcttgggcgagaatgtaactaatgatgaggtgtaccgtgagactgtggagcctattataccattaattttccaaaggacaaaagcgacatgctttgcatatggccaaacaggcagtggcaagacctatacaatgcaacccctacctcttagagctgcacatgatatggtttgtcttttacatcaacctatgtatcggaatcaacatttcaagttatggcttagctactttgaaatttatggtggcaaactctttgatcttcttagcgaaaggaggcaactcttaatgagagaagacggaaagaaacaggtctgtattgttggtttacaggagttcgaggtttctgatgtccagattgtcaaagaatacattgagaaaggaaatgctgcaagaagcacaggcacaactggagccaatgaagagtcctcacgatctcatgctattctgcaattgtctgtgaaaaagcatatcccagttactgaaacccggagacagagagaccgagatgctattgaagcaaagaatacaaagcatgtggggaaaatgtcatttattgatcttgctggaagtgagcgtggtgctgatacaacagataatgacaaacaaacaagaattgaaggtgcagagatcaacaagagccttttggctctcaaggaatgtattcgggcactggataacgatcaaatacacattcctttcagaggaagcaagctaacagaggtgcttcgggactcctttgttggaaactcccgtacagtgatgatttcttgcgtttcaccaagttcaggttcatgtgaacacacactgaatacgttaagatatgctgacagggttaaaagtctttcaaaaggtggtaacacaaaaaaggagcagtttgctgtgcagtctgtatcatctggcaaggaatctacctacacatcgtaccctttatcatgtgaagctgaagagactatggagcagactcaagaaattaggcctgttgattcttctaggaaaggtgttgacagtttcacttccaattcttccattgagcctgagaaaaactcctattgtatgattccaagctatccacataaaggaaaagaagaaactagtactagatctggtttgaatgatagggagagaggggacttgaaatataaccaggctggttttaatagtaaaacacattcacttcaggaatcaataaattcacaagaagaggtgaaagtgacaaaagtctcaccaccccggagaaaagctaacagggatgagaaatcagaaaggcaggtcaactacatgaaaaaagaaagtgggcctgaaattagtcggactggtgttaagcagcaacagcaacttaaacagctgcaaaggccatcatcaacctcatcgtcgcaggttttatccaagcaatctgagaaggaagatatggaaataaacacaatacttgaggaagaggcgctgatagcagctcacagaaaggaaattgaaagtacaatggagatagtacgagaagagatgaatctattagcagaggtcgatcagccaggtagtcttattgacaactacgtggcacagctaagctttctgttgtcgcggaaggcttctggtttggtaagccttcaggcacgcttggcacggtttcagcagcgcctcaaggaacaggagattcttagccgtcaaaaaccattgagatagtttaaaccgcccaaaatggaaacctttcggtttgtcgttgatcgcgagaagcctcggatactggaaactgccatcgattgcgacagcctcggatcatggcctccaacatcgccttttagggatctaagggtgaaaggatgggagatggaaatgtgggctgatgaagtgcgcattcattattgattttgaggttttatgaaccagtttactaatttttcttttactgaaaagggtgcttgagtgtattttctatcgatgtcatgggtttgtcaacgtttgccattttcttttgtacgagtatagttgtaactgttgttcgaataccggtagtgaagtgctgcgagtgaggaaataaccttgccttgccgttatggtgttgtatcttttgttgatatttatttcgcatcaacaaaagaaaagcagcgttcgataaatgtctacaggatttgctttgtaccttgggggtgccctgtttattgtgactacaagtctgtga

SEQ ID NO: 146012 - DNA, 3472 bp, Zea Mays
accaacccccaattcgatccaccccgtcccctatccgcctcgagtcccacccaattcggcgctagcctgatcggcattgcctgccggcctcgtcgtacagatctgagcgccgtctcgagcgccagatctcgccggctccgcgcctagcattccgccaggaccaggattcgcgcagcgccggcgccggcaccggcaccggcgcctgacgccaagttggcgcctcagaagcggtcccagcgtggcggcggcggaggtggcgcctccgccgccgccgcggcttcgtcagccgccgcgggggactccggcgacgccgttatggcgcggtggctgcagtccgcaggtctgcagcacctcgccgcgtcctcggccgcaggcggggccggggccggcgaccttcgcgttggtggcctgagtggcggtggcggcggcggccttctcccgagtcttctcatgcagggatatggaccacaaacaatcgaggagaaacagaagctttatacattattgaggagcctaaatgttaatggtggattagcatctgcatctatatccgagccctatacttcaacaggacagagctttgctggtggtgctcctgtagatggattttattcacctgaacttagaggtgaatttggggctggccttttggatcttcatgcaatggatgacagcgagcttctttctgagaatgctgcatcagaaccatttgagccttcgccttttatgccaaaagaaatggatgatgacgactacgatgtaatagcagaaaaccaacaaggtctagtagacaaccagagtgccttcaccaacgaaaaagaaaacactgtggtcagtgcaagagaaagtaatgtagcaaagattaaagtcgtggtaaggaaaagacctctgaacaaaaaggaggtatctcgaaaagaggaagacatcatagatgtacacaattctcaattcttaactgtccatgagcctaaactaaaggtggatttgacagcttatgtggaaaagcatgatttctgctttgacactgtcttgggcgagaatgtaactaatgatgaggtgtaccgtgagactgtggagcctattataccattaattttccaaaggacaaaagcgacatgctttgcatatggccaaacaggcagtggcaagacctatacaatgcaacccctacctcttagagctgcacatgatatggtttgtcttttacatcaacctatgtatcggaatcaacatttcaagttatggcttagctactttgaaatttatggtggcaaactctttgatcttcttagcgaaaggaggcaactcttaatgagagaagacggaaagaaacaggtctgtattgttggtttacaggagttcgaggtttctgatgtccagattgtcaaagaatacattgagaaaggaaatgctgcaagaagcacaggcacaactggagccaatgaagagtcctcacgatctcatgctattctgcaattgtctgtgaaaaagcatatcccagttactgaaacccggagacagagagaccgagatgctattgaagcaaagaatacaaagcatgtggggaaaatgtcatttattgatcttgctggaagtgagcgtggtgctgatacaacagataatgacaaacaaacaagaattgaaggtgcagagatcaacaagagccttttggctctcaaggaatgtattcgggcactggataacgatcaaatacacattcctttcagaggaagcaagctaacagaggtgcttcgggactcctttgttggaaactcccgtacagtgatgatttcttgcgtttcaccaagttcaggttcatgtgaacacacactgaatacgttaagatatgctgacagggttaaaagtctttcaaaaggtggtaacacaaaaaaggagcagtttgctgtgcagtctgtatcatctggcaaggaatctacctacacatcgtaccctttatcatgtgaagctgaagagactatggagcagactcaagaaattaggcctgttgattcttctaggaaaggtgttgacagtttcacttccaattcttccattgagcctgagaaaaactcctattgtatgattccaagctatccacataaaggaaaagaagaaactagtactagatctggtttgaatgatagggagagaggggacttgaaatataaccaggctggttttaatagtaaaacacattcacttcaggaatcaataaattcacaagaagaggtgaaagtgacaaaagtctcaccaccccggagaaaagctaacagggatgagaaatcagaaaggcaggtcaactacatgaaaaaagaaagtgggcctgaaattagtcggactggtgttaagcagcaacagcaacttaaacagctgcaaaggccatcatcaacctcatcgtcgcaggttttatccaagcaatctgagaaggaagatatggaaataaacacaatacttgaggaagaggcgctgatagcagctcacagaaaggaaattgaaagtacaatggagatagtacgagaagtaagttcaagttactcagttgtatttaaatgtcaccacagatgtcagtgtttggtaataaatggttgtccaactctatgttgctcatctcagtaaaaaaatttgccagttccatgtctcagcattgcactatgctgctaaacatgacatgcttttttttcaggagatgaatctattagcagaggtcgatcagccaggtagtcttattgacaactacgtggcacagctaagctttctgttgtcgcggaaggcttctggtttggtaagccttcaggcacgcttggcacggtttcagcagcgcctcaaggaacaggagattcttagccgtcaaaaaccattgagatagtttaaaccgcccaaaatggaaacctttcggtttgtcgttgatcgcgagaagcctcggatactggaaactgccatcgattgcgacagcctcggatcatggcctccaacatcgccttttagggatctaagggtgaaaggatgggagatggaaatgtgggctgatgaagtgcgcattcattattgattttgaggttttatgaaccagtttactaatttttcttttactgaaaagggtgcttgagtgtattttctatcgatgtcatgggtttgtcaacgtttgccattttcttttgtacgagtatagttgtaactgttgttcgaataccggtagtgaagtgctgcgagtgaggaaataaccttgccttgccgttatggtgttgtatcttttgttgatatttatttcgcatcaacaaaagaaaagcagcgttcgataaatgtctacaggatttgctttgtaccttgggggtgccctgtttattgtgactacaagtctgtgatatgcattttttatacctttattttttgtacctttttctgattgaatccgaaatccacacaacacccgaagccaaatgtcagacaaaaatagtgctcaggcaaaaaaaaa

SEQ ID NO: 146013 - DNA, 1897 bp, Zea Mays
tttttttttacttttatgtatttaaatcaggctacatttttattcttttgcttttctgtaggcaactcttaatgagagaagacggaaagaaacaggtctgtattgttggtttacaggagttcgaggtttctgatgtccagattgtcaaagaatacattgagaaaggaaatgctgcaagaagcacaggcacaactggagccaatgaagagtcctcacgatctcatgctattctgcaattgtctgtgaaaaagcatatcccagttactgaaacccggagacagagagaccgagatgctattgaagcaaagaatacaaagcatgtggggaaaatgtcatttattgatcttgctggaagtgagcgtggtgctgatacaacagataatgacaaacaaacaagaattgaaggtgcagagatcaacaagagccttttggctctcaaggaatgtattcgggcactggataacgatcaaatacacattcctttcagaggaagcaagctaacagaggtgcttcgggactcctttgttggaaactcccgtacagtgatgatttcttgcgtttcaccaagttcaggttcatgtgaacacacactgaatacgttaagatatgctgacagggttaaaagtctttcaaaaggtggtaacacaaaaaaggagcagtttgctgtgcagtctgtatcatctggcaaggaatctacctacacatcgtaccctttatcatgtgaagctgaagagactatggagcagactcaagaaattaggcctgttgattcttctaggaaaggtgttgacagtttcacttccaattcttccattgagcctgagaaaaactcctattgtatgattccaagctatccacataaaggaaaagaagaaactagtactagatctggtttgaatgatagggagagaggggacttgaaatataaccaggctggttttaatagtaaaacacattcacttcaggaatcaataaattcacaagaagaggtgaaagtgacaaaagtctcaccaccccggagaaaagctaacagggatgagaaatcagaaaggcaggtcaactacatgaaaaaagaaagtgggcctgaaattagtcggactggtgttaagcagcaacagcaacttaaacagctgcaaaggccatcatcaacctcatcgtcgcaggttttatccaagcaatctgagaaggaagatatggaaataaacacaatacttgaggaagaggcgctgatagcagctcacagaaaggaaattgaaagtacaatggagatagtacgagaagagatgaatctattagcagaggtcgatcagccaggtagtcttattgacaactacgtggcacagctaagctttctgttgtcgcggaaggcttctggtttggtaagccttcaggcacgcttggcacggtttcagcagcgcctcaaggaacaggagattcttagccgtcaaaaaccattgagatagtttaaaccgcccaaaatggaaacctttcggtttgtcgttgatcgcgagaagcctcggatactggaaactgccatcgattgcgacagcctcggatcatggcctccaacatcgccttttagggatctaagggtgaaaggatgggagatggaaatgtgggctgatgaagtgcgcattcattattgattttgaggttttatgaaccagtttactaatttttcttttactgaaaagggtgcttgagtgtattttctatcgatgtcatgggtttgtcaacgtttgccattttcttttgtacgagtatagttgtaactgttgttcgaataccggtagtgaagtgctgcgagtgaggaaataaccttgccttgccgttatggtgttgtatcttttgttgatatttatttcgcatcaacaaaagaaaagcagcgttcgataaa

SEQ ID NO: 146014 - DNA, 1586 bp, Zea Mays
ggttctccagatggtgagtattgggagcagcctttggtgctttaatcctctgcgctccacaagctgctcctttagttgctccccctttgagtgtggtccagtattccttggtcatgattgtggttgtatatatttgcatttagtttaggtgtgggcgtgggtgtgagttggagtttttggggtgtttctagagtatgccttgtgcctcttgtttcccctccttttgtttctctgtttgaaatggcactcaggtctcctgtgccgttccagaaaaaatcttactgatatcacggattgataaacagggttaaaagtctttcaaaaggtggtaacacaaaaaaggagcagtttgctgtgcagtctgtatcatctggcaaggaatctacctacacatcgtaccctttatcatgtgaagctgaagagactatggagcagactcaagaaattaggcctgttgattcttctaggaaaggtgttgacagtttcacttccaattcttccattgagcctgagaaaaactcctattgtatgattccaagctatccacataaaggaaaagaagaaactagtactagatctggtttgaatgatagggagagaggggacttgaaatataaccaggctggttttaatagtaaaacacattcacttcaggaatcaataaattcacaagaagaggtgaaagtgacaaaagtctcaccaccccggagaaaagctaacagggatgagaaatcagaaaggcaggtcaactacatgaaaaaagaaagtgggcctgaaattagtcggactggtgttaagcagcaacagcaacttaaacagctgcaaaggccatcatcaacctcatcgtcgcaggttttatccaagcaatctgagaaggaagatatggaaataaacacaatacttgaggaagaggcgctgatagcagctcacagaaaggaaattgaaagtacaatggagatagtacgagaagagatgaatctattagcagaggtcgatcagccaggtagtcttattgacaactacgtggcacagctaagctttctgttgtcgcggaaggcttctggtttggtaagccttcaggcacgcttggcacggtttcagcagcgcctcaaggaacaggagattcttagccgtcaaaaaccattgagatagtttaaaccgcccaaaatggaaacctttcggtttgtcgttgatcgcgagaagcctcggatactggaaactgccatcgattgcgacagcctcggatcatggcctccaacatcgccttttagggatctaagggtgaaaggatgggagatggaaatgtgggctgatgaagtgcgcattcattattgattttgaggttttatgaaccagtttactaatttttcttttactgaaaagggtgcttgagtgtattttctatcgatgtcatgggtttgtcaacgtttgccattttcttttgtacgagtatagttgtaactgttgttcgaataccggtagtgaagtgctgcgagtgaggaaataaccttgccttgccgttatggtgttgtatcttttgttgatatttatttcgcatcaacaaaagaaaagcagcgttcgataaa

SEQ ID NO: 146015 - DNA, 815 bp, Zea Mays
taaaaactgtgccacttcttcatgctcctcgtaacctcctccagtcgtgtcggtggcacagcaggatagatcacctgagcatgttcgtcacaacctcaagatgccgctgaggaagaaggggccgcgagtcccacggaggcatgcgggctagcaccagcaaagcggctccaggcacctaagcacgaaggcacattgaagatttgaagttcaataaaaagatacagaacctactcctacagactatgagaagcagagagcaattacaatcatgaagaacaatcaaatgaggcaacggctagggctttctcaattacgatcaatgatggctagtattctgagtggaaggataaacgatgctcctccttaggaatctggatcgctgtatgatggtgatgatattgagggctctgacgatgagatggttagtaaggtaacattcatattttcctccaatgatttatcattacctttgcttccacaatcaaatatatagtatattgtgttgtacctatgcatgaatccctagttgataaggttgtacgtagccacaccctccgacaatggcgtcgaactctcttcaaaaaatacaatagcctctaaaagggttgttgcacatgaagtacaataacaaccaattatagtcactagacgaaggagtactaccataaaccaagagtccaaccaaagcataatggccggtacactgccaaattcttgtggtgccacaaaccaggattgcacccaaagcatgtatgccgctatacaacttagttcaccaagacagactgagagcaaggatcccacttgagaccaag

SEQ ID NO: 146016 - DNA, 814 bp, Zea Mays
taaaaactgtgccacttcttcatgctcctcgtaacctcctccagtcgtgtcggtggcacagcaggatagatcacctgagcatgttcgtcacaacctcaagatgccgctgaggaagaaggggccgcgagtcccacggaggcatgcggaagatacagaacctactcctacagactatgagaagcagagagcaattacaatcatgaagaacaatcaaatgaggcaacggctagggctttctcaattacgatcaatgatggctagtattctgagtggaaggataaacgatgctcctccttaggaatctggatcgctgtatgatggtgatgatattgagggctctgacgatgagatggttagtaaggtaacattcatattttcctccaatgatttatcattacctttgcttccacaatcaaatatatagtatattgtgttgtacctatgcatgaatccctagttgataaggttgtacgtagccacaccctccgacaatggcgtcgaactctcttcaaaaaatacaatagcctctaaaagggttgttgcacatgaagtacaataacaaccaattatagtcactagacgaaggagtactaccataaaccaagagtccaaccaaagcataatggccggtacactgccaaattcttgtggtgccacaaaccaggattgcacccaaagcatgtatgccgctatacaacttagttcaccaagacagactgagagcaaggatcccacttgagaccaaggcaagtggttccgtggttgtctatatattgatttcttatgatttttctataccaataaaactacaaat

SEQ ID NO: 146017 - DNA, 825 bp, Zea Mays
taaaaactgtgccacttcttcatgctcctcgtaacctcctccagtcgtgtcggtggcacagcaggatagatcacctgagcatgttcgtcacaacctcaagatgccgctgaggaagaaggggccgcgagtcccacggaggcatgcggaagatacagaacctactcctacagactatgagaagcagagagcaattacaatcatgaagaacaatcaaatgaggcaacggctagggctttctcaattacgatcaatgatggctagtattctgagtggaaggataaacgatgctcctccttaggaatctggatcgctgtatgatggtgatgatattgagggctctgacgatgagatggttagtaaggtttatatggaatcaatggcggcagcctcagttgaagatggacaccgtattcatcaatagaagtggtttcccaagcgctgcctaaatcaacttgattccatcataatgtaggcctagccgtcgccaacagaagctctttaaggattgtttcagcaaagatgcaacaacttgagtcttaattatagactgagaggcaagaaaaagatggactacaggatgaagtccaaagcttgaagtttaagacacagacatctgatgagaccattcctaagcaatctgatgagattgcagaattgaagaagttcatagcaaaaaataatagcctcctttgtttgattttaagcatcaatcgtagccaagtgcctccttaaatatgtatatcaacatgatggtgtcaaggttcatcacataccagatcgaggattaaagttatatgagcttaagttacatgattattaggattt

SEQ ID NO: 146018 - DNA, 720 bp, Zea Mays
taattaagtctttgtatttaatatctaatacatacaatgctttgttaattcatttgttgtacgaatgttcttgtaatcttatactgcatgcttcaccaaatcaatgtccaacatgtgataaatgttctttgctgataataataaattcacaccatttcagaagcaagataaatttaaagatatagaacctagtgcaattgatcttttcaagtagatgcaatgcagcaagaaggacttagcgaaactgtccaaaaaggtttatatggaatcaatggcggcagcctcagttgaagatggacaccgtattcatcaatagaagtggtttcccaagcgctgcctaaatcaacttgattccatcataatgtaggcctagccgtcgccaacagaagctctttaaggattgtttcagcaaagatgcaacaacttgagtcttaattatagactgagaggcaagaaaaagatggactacaggatgaagtccaaagcttgaagtttaagacacagacatctgatgagaccattcctaagcaatctgatgagattgcagaattgaagaagttcatagcaaaaaataatagcctcctttgtttgattttaagcatcaatcgtagccaagtgcctccttaaatatgtatatcaacatgatggtgtcaaggttcatcacataccagatcgaggattaaagttatatgagcttaagttacatgattattaggattt

SEQ ID NO: 146019 - DNA, 165 bp, Zea Mays
atggttgcaaatgagtctcaagctgatagtgttctttttggaaatgctggtgctgtaccagttttatctgctggaacatctgtcatcctttcttctatagtttctcctggatttgtgatccacctcaacagaagattagaagataatgacttcagggacagatga

SEQ ID NO: 146020 - DNA, 1824 bp, Zea Mays
gttcatgccatttttttcagaactgtattggtgcaatcgacggcacaatatacccatcaccatagcagaacatagggcccctccatatagaaacaggaaaagaactctttcacacaatgttatggtaacctgcaactttgaccttaatttcatatttatttcatgtggatgggaggggtcagcctcagatgcaggggtgcttcgatctgctattagcaaaggatttagtgtgtcagaaggaaagttttatctagtagatggtggttatgcaaatacatcatccttcattgcaccatttagaggggttcgataccatctcaacgagtttaggaggcgtcgttcatcacaaagtggttatgcgaactacaaagagttgttcaaccatcgccatgcagttcttcgtaaccatatagagagggccatcggtgttctaaagaaaaggttcccaattctaaaagtaggcacatttcatcccatagagaaccaaattaggatcacagctgtaattgttgcatttcacaacataattagagggcaaaatggagacgaaagatggcttgacaaccaacctgattacatctctccaagtcaatatgttgatgttctagagggagatatcaactatctcaatgacacagaatcaagtgatggaagtgctctaagagatcagatcgcacttcagatgtgggctgcctacaatagctagatgttataataggatgcctacaatagctagatgtgagctgcctactattattacttatgaaatctttatggtttgtagtttgtcatgtagctagttgccaagttatgaacttaaagttgcttagttatatactattatttccacaatttcagttttgaataaaggatgatttggaacaatgtgtacaagaaaggcttagtcgatgtaatgcatgatcacaaagataatccaaaattcaaaggtcaaaatggttggaatcgtgatggatggaatagtatcactaccaagttcaatgaaaagttccctctagctcatttctctaaacaacaactgcaagagaaggagagagagcttaaaggatactacaaggcattaagggattaaagaaaagaaagcggggttggttggaatgacaccctatgcatggtactagctgaaccagaagtttgaccaaggctgattcgcgtattaaagtttcgcaacaggccattccctctttttatagtttagaagggttatatgaaggtagtgtggctaccggagagttaaatttcacatcaaccgttgttgatcttcctccacattcagctccatccaggagtgtgtctggacaaagtctcaatcccttgagtactaattcacttgatttggatggaaaagaaaccacaagtgtgttcaatctatcttctgatgctcaatctgtcccagtcaatactaatgaacccactgaagctcaatttgtcccatctaatcaagaatcaagctagagagaaggtggcagtgggagaagcgtaagcaaatccatgttgtattagctcttgaaagttatgtggagtttaaaaagatccaaaatacagaaacacttgaaactcttaacgaacataagaggcaagaggatcaattttctattagcaagtgtcaggctgaattgaaaggaatggatggattaacaacagtggacaaatcatatgctttggagcttttcatatctgcgacaaaccgagagattttcttaacaacaacagagcatgatgttagaaaaatttggctcaagcgcaaaattaggttgcttcgtgggagtgatgcatggcctgaacaaatgatatgagcaaattggt

SEQ ID NO: 146021 - DNA, 402 bp, Zea Mays
atggaacagaatgagcgaaaggacaaagtaagtggaggacgaaccacaggcacacgcggcgctgggcctcgggaaatgctggtggattcgcagccgggaggccgctcagggaagcaggagatgcaagtgcaggtgggcaggttcggtttgtcaaggactacagtctggactttgcacggcgagagaggggatgttagtgtagatggttcatcatctcgtggaggaaactcgtcgtcgtcgacgacgaatgcaggtgcgccaactagcaccgccgttgctagcgacaatgatgttgatcatcatgattacattgtagtggacgatttgttcggtgataatgctgatgatgaggatgttggtgctacattgctagagcctgaggatgcggagctttttttataa

SEQ ID NO: 146022 - DNA, 324 bp, Zea Mays
aataaccaagtcagtttgttgcttttgcaaatctattgccatgacaagccaaatgttaatatgaagaaaaaatgggatgttcaacactacaacttaggcatttggatatggagtgcatggtggccagaacatttcagagcaaattttttacatagtggacatttttaccactatcttgtcagagtactgtcaagaaacaacactaagttgcagattaatttctacaacagccatcaggttatttgatttgaaatgcaccatagaggatggaaggatcgaggaaaggctatttgatttttatggcctgaatgtttcatcttataa

SEQ ID NO: 146023 - DNA, 225 bp, Zea Mays
gcggattgccttttgtaggctagcctttgtgtaaggggaaaggaaatgctctacatgtactgtgaaaaatgaggtgttgcccacaaacgaatcagcaaactcatcgttgccactggtgctgcagaggttccaaagctgaacatgcttctcagaaatgccaaagaaagcggggtggatgatcttcagttgatggagggttctgaagctatggagatggtgttgcat

SEQ ID NO: 146024 - DNA, 258 bp, Zea Mays
tggtgtactggagactgcccagtatgggctctgttgtgatccaagaccgtaagagtggtcataaggttttgactgatgtttattacattcctgagttgaagtgtaatatagtaagtttgggtcaactggaagaaaaaggttttctttttgagggcaaaaatgggaagctgtgcatttatgatctggaacacaacctgttgatttctgctcctagaactggaaataggctgtatactgtcagatttggtttatcttcac

SEQ ID NO: 146025 - DNA, 249 bp, Zea Mays
gctgacgtgacctctcaaacaaatgaagtgcataacatggttcatgtcgagcagcagcaacaacaatctggccatagaagtcttggacgaactcaagtccatacatctgcaccacatgagcaaacacctttaaaggtatgttagaaaggcctactcaattaccaatgcacatgtatcttgtatttttttgtattttgttacctgcttcaaagttgttattttgcaaatgattaagcctcccccgcagcc

SEQ ID NO: 146026 - DNA, 933 bp, Zea Mays
atggcgcccgaccgagctcctcactgccgtgttcttgctcggcgttcagttttcctgcgcgtcacggtcttcctccccgagctcgccccatccccttaccagtcgcctgaccgtacatcggtcggttcagcttcagcgccgaaaaagcatagcgcttcctcacggggccgacgccgtaacttctcgtcgtcaacgtgcaaggattttctccgcaagtttgtggacagcgagcttctgacgtcaagcctagaggactggttctccggtcacagcgaagattgtggtttcaggaagccaggtttcaacgttcctttcgagcttacagagttacagaatttcgattacgctctggagggcgttacttttcagcagctatttggcggagtggtaaaagtgcaaggtgatttgaacaagctggattttgatctcaacaacgtttttgattgtgccgctgaatggataaagaaacattccagaatttcagtctgttccgtagaccgagtatggaacaaacttgggaatgctaactggggagacattgggacccttcaggttctcatcgcaatatttcactcgatgatccaattttacggagagcctaagtattctctcgatgaactggcaacggaacatagttcaaggctacaaagccgaagatcagaaagacatctggttgacagacaagctaatggcaatggtttatttcgattccaacagcgaagtcattctcctgaaattgttgagttacaggaggaagcagcagttgatgtgaaaccacatgaaaccttaaggcttgaaatagggtatgttgtattgatggatgatgcttacacacagaaaggttttcaaatcagtgacatcctaacaggcagtgatcctcctatttatacttctgctcctgtggaagaacctaccaaaacttgttactgctag

SEQ ID NO: 146027 - DNA, 234 bp, Zea Mays
tcgtcattcattcctattttccccaccatatgccgcctcgtcatgacgcgtgtcgtcgtctttaatctcaatagctcttctgatacatgcctcgccgtgcttcgcctcctcatgatcagccccatctgggtcatgtgggtggaagatctcaacacctatcagatgttcaacgacaggcccgaaccagaatttatcaacattctcacaagtattgaatcacatttgatgctggta

SEQ ID NO: 146028 - DNA, 525 bp, Zea Mays
cttgcctggcacttgagattccaggtaccaacttgctcatcaggtgactcgtgacctcacacaatggtgaggatgctgatattctccgaccacggcgctagtggttccgcggcgaagcagcggcatgagtgagaaattctggtggccacgaggtccttctccgccccccgacgacaacgcaagcatcgaagctcgtcgtcgaccaatgaaccgagtgcatccatcccaatacctcgcgcgtgaagaagatccgtactgccggtcaccacggcatcttccttctctccttctctcttgccccagtcggtggtggtggccaacacagcagcggcatctggctttctctctccatctctctccgctgcttgctcggaggcctcacgagtctcgacgatggccgagggagtcacaacccgcgtatatttatacgcctagaactaaaggagataggatcggctagcaaggatcacgtatatgtgatgtcaggggtgtcatcgtgatgatgtcaaatccggcaaggtgaat

SEQ ID NO: 146029 - DNA, 3332 bp, Zea Mays
gccagtgttatgggtatgtggattgttttttttccatgtgttcctaaccaatgcttgttcttgctagctgctttaccttaattgttgccacccctgatcaagtgattatattcattgttggtttaaacttgatccttcttattatgaccacaaatctatctcaacatgcacatccctactatgcttagctgctggatgtgcagctgttttagtaggtcaatattctgtgccaggcaacatcactggcgcaattggcttatcgccatggtggaacttatcctttagctatactagaatttataatcatgaatgtactgtacagccttttattatagaagcagaactatatcttggtggtatccgttagtccattactctctctcctggatcaattgatgatttcttacttatctttgcagcacctggtaaggttgaggtgggaggagctcagtgctgcagaacggaatgaatttgctaatatgacaattaatttgatatcggatgttgttggccctcatgaggtgtgggccttgaagagtcaaacagctgctttagtagcagaggtggttcgaagggagggagttgatttgtggattactttactcccatctattgtttctctctctaacaatggccctactgaggctgagttagttgccatgattctaaggtggcttccagaggatatcactattcataatgaagatttggagggtgataggcggagatctctgttgcgcggccttactgagtcactgtcacaaattctgcctctgttgtattctctacttgagaaacattttggtgctgctttaagtgagcatgcgaagcagcaaatggatttggctaaacaacatgcagggacggtgactgcagttctaaatgctgtcaatgcatatgctgaatgggttcctgtgacagatctagccaaatatggtttaattcacggatgtgggtccttgctttcttacagcgattttcgcctccacgcttgtgagttttttaaagtgatatgtcagaggaaaagacctgtggatgtggcagttgctgagtatgatgctgcaatgtgcaacatattccaggtgttgatgaacatttcacaacaatttttgaccagatctggcatgcaacccagttctattgatgagagcgaatatgagtttgcatcatgtgtttgtgagacaatggttgctctaggatcttcaaacatgcaatgcatactagccgatggagccaggactttccagttcttacaacaaatgctggagtattaccaacactacaaaatcacacttcatttccagtctctattattttggctggtggtattgagagaaccatcgaaatctaagtctattgcacgtgtttctggtgataattctgctgctggtaattctgcatctactggtgacttatcaacagaaaagaagaaaggggtatcggtatttgtcactgatgaaatatacagtacaattttggatgtttctttcaagagaatgctgaagaacaatggaagtgcaacttctgggttgttagaaatatggagtgaagagcttgaggggaagagcgacttctgcaactaccgcaccaaattgttggatctcattaaagtcattgcttctcaaagatctgtgattgctgcagcaattgtagttcagagaataaatgttgtctttggagatgctaatcaagcaactaagtccccacaggatcttgatgcaatggaaggggctcaactggggcttgaagcagttgtcaatgctattttcgatggctcagttgattgtgggaaaactgatttggatacgaaatcccaactgcacaagatttttgaaggcttacttcaacagcttctttctttaaagtggacagaacctaaccttgcagttattcatggtcattatttggatgctttgggccctttcttgaagcatcatccagatgcagttgccagtgttgttaataagctttttgaactgttgacgtctctcccaatcacatttcaggatccatcaaacaattctcgcctagcaaggttacagatctgctcatcattcattcgtatatcgagagctgctgataaagcacttctgcctcacatgaagaacattgctgataccatggcttaccttcaaggagagggtcgcttactacgtggtgaacataatcatttatgtgaagcgtttcttgtgatgtcatcctctgctgggattcaacagcaacaagaagttcttgcttggttacttgaacctcttaataaaatgtggactcaagtggaatggcaaactgcatacttgtctgatccttctggtttgacaaacatgtttgctgatagccaattcatgtggtcaatttatcacacagttacattctttgaaaaggcactcaagagaagtggaaccaaaaagtcttcagcaactccacaagcacccaccacaacagtacctggttatctgcatccgatgtcttcacatctagcatggattgtgccccctctcttgaggctgctgcgatgcatacatgtcctttggtctgagccatttgcccagtctcagacggccgaaatcaaagcagcaaaaagcatgactgttgcagagcaggctagccttctaggagagacaggtaaacttaccaaaggtcaggttgctccagctgatggtttgctggatgttcaaagagatggagaatctaaagaaaacaatataaaaaactggttgcgtgggatccgagacagcgggtacaatgttttaggactagcagctactcttggggaagcattctttcgatgcatagagggttcttctgtcacccttgctattatggagaatgtgcaagttatggagtttcggcatctgcgccaacttatccaccttgttattattccatttgttaaatattgccctgccgatttatggctgtggctagtgaaccttttgcagccgttatttgtccactgtcagcaagctcttaattattcatggtccagtcttcttcatgagggtcgggctaaggttcctgacagcattggtaatctttctgggtcagaactgaaggtagaggtaatggaagaaaagttgctacgtgacttgactcgtgaagtatgttctgtcctttgggctttatcatcaccaggcttaaataatggacttccatccttggaacaacttggaccttccaaccggatggattctgttttgaagaatctggagtcctttgcttcaagttctctaactgggtaatgcaaatattttgagcaccttgcgtgatttacctaatacatttctatgccttttaaaccaaatgttattgaccttcccattctttgagctttg

SEQ ID NO: 146030 - DNA, 130 bp, Zea Mays
cgggtatttttttaaattgattctcgtatggagccgaaagattgggagtcatttttgtgaagaaaggtgggatctaaaaaaacctgctccaccctcccttaaaacagctcctcaaccaaccaaatatgga

SEQ ID NO: 146031 - DNA, 112 bp, Zea Mays
tattattttcactgaaagtagtaattcaaattttagttcctatatcaaacatttttttatcgtaaatatatacacatctttataagtgattaaaatatttcatcatcacaca

SEQ ID NO: 146032 - DNA, 179 bp, Zea Mays
tcagccaccattttgttcactggtgtggtagctttgttgattggagtacgcaatggaaggctgtgcagctggaaaggtgagccttctcaaacaatatcagtcttgaaactgcaaatggtcttcctcagaagttaatattttttttggtcgtcgtgatgataaagaaaagcttggtttta

SEQ ID NO: 146033 - DNA, 1281 bp, Zea Mays
atggagcagaagatgtcgaaccatcgccaagctacgcgcccgagagggagtagacgagagacggcggaggcaggagatcgacggctggggaagacgttggcaaggaggtccagccgtccagctatggctctagaaaaaattgcctccatcgttcaagtgactccgttcaacgtgacgtcggactcatacgccacgttcatccagaacgtacgtgtagctctggccggcgcgaagcctgacacggtggtagggcccaaatccaaggtaagtcggccggtgctggccaaagaggcgtcgtcgtctggcctgcagccgccgaagtggatccacgtcgtgctcaacggcaagggcggcgccgcgcccacggtggccatccgcagcgacaacgcctacatcgtcggcttcaccaacagcaaggggacgtggtaccagctcagcaggacgggcgcccaggagaagctcgtcgacgacaaccccgtgatggcgggcttcgacggcaactacaacacgctcatcggcggcagcgacaagctgctgaccctgaacgtcgccaagtttagcgtggcggccgcggccgccacgttctggaaccacaaggccggaaacacatcatatggtgacgactgcggcagcgacgaggaagaagaaagcggcatgctccgcgctggcgacccgctgaaggtggcggtggcgaccctcgccgtggccatctgcgaggcggcgaggttcgtccccgtctccacggtcatcggcaaaggttggggcgagcaacgggtgagcgtcacggccaaggaggtaagctacatcatggactggggtgacctgtcccgcgcactgctcaagtggaagagtggcggttataaggacgacaagcctttccagccattcaagggtatcgggataaataacggggaggaagccttggctgtggtggcccttctgaagctcatgtcgggaagccagagcctgttggcctggctcaagtgcttctgggggcttctggtgaagaagctcaagcgggaggacatgaattacgagaagccaaagactgcagccatcgttaacccactttaatctgttatagcatacactcgtcatccgagaataaatgtgttgttaattgcttaattccaagggaagtatataatcctttaatgcgtattgcatgtgacatgttcacaagagtgtcttcaaatgtgatggtgtatccataaatatggagtacgaattaaacatgtttgtcactttctcgcaaaacaattaattaatgtggtattgtgt

SEQ ID NO: 146034 - DNA, 2156 bp, Zea Mays
atctcttcccaccgtctttggctcaagcaaaaaaaaatctcctcatgtcttctaccacacaactctctagacttctcacacggcgctctttgctcctcgcctctcttctggctgcatggcccttgcgctcgctcagcttgctagtgaccagcacatggcgctcggcctcaatttcgccatgactgtgtccctgcagcagcgccgtccggccatcagcagcatcggcgagctcgcttcgagctccgtccatggccgcgagtccacctccgctgagctgccagtttccagctcctctatcatttgctccggcgtgcgggcgtcactcgtccgtgatcccagccgtgctagttgacatggtcggccattttagccggcatcgccaccagccgtccgtcgccttcctgctccccacgccgacgtccagtgcatcgtcgccagggttcgacttgcagcttgtgcaagctgctatcgagctcgcccggccatggcgctcacgccccagccttttgcctgctcctcgcaccgtgattgccgagttcaccggcaacagcagtctcgtcgtgccgcaaactgtgagctgggtctccgctgttttcggcggtcgactagctcgccaaggcgtttttcaccagtgaagcatacttgtcatgcccagtgtcctcgccgtgtctgtaaagccgttgtggagttgttgttgttcgcctccacgccatgtgagacagcgtcgtcgatcccttcaaggtgctcgtcgtcgtctcctcatcgccttgccgaacgtctcggaccacaccagcctgtcgctggagaaacatagtgcagtacgatgccccatcaagtgttcggtgttatgcgcgaactagaagtcgttgctgatatcgcggtcttcaagttgagtttattttattggtgagctgattccctacttctattattttgttttaatgatttgatgtgttagattaaatattggtcataatgatagtcattatatgctatttttttttaaaaaataggttattaatgtttatgtaatttctggtaataattattagttagacgtttttatatgtatatggtaaagtttaggcggcaatgtaatttaggtgaggagtactttgatggtggatacgaatgactagggtaatgtaatcgatttaaaatttgcaatgtgcttgagatcgcaattgtgacatagacacatcgtataaagctcgggtttaaaatacggtttaggcgaaggagattttggtagacaagtatacgatgttggtgaatcgatgacgttaaaataggtttagtattaaatcagctagctgacatgttttgttagggtagttgtgttagattcgactaatcttaagaagcatgattattgtacttagtcatctgttgttggccagtgaacataagtactccagatatttaagtcgttgagaaattagttttaccaaacgctatgttatctgttaatgttgtatcggttagagtaaatattgtgttgtttgatttagttaagtatgtaattgaggttaattaagacgcactgtttaaagagttaattagattgctcctatacttattttaagtcgttggtattcaataataatgagtccatgttttattagacttctgatgaaatattttactaaagatgatagtgcaggttaattaatttattcttgtttgatttcggtattagatccaatcagaaaggaggagcatgattgtcgtaagtaacaatatatggatagttagtgtctgtaatacctcgccattaagtgttttatttctcttttgcgtagcatcgtaatatcttgtgttattcttcttatgttcatacatgtgcattatgcatctcattaggtacgctagtttatcacgtgatgcagaaaacgagtcaactcgactgtaagatgatgtaatgggtgggctactccacaaggtaatgctgatggatcaacctgaagaagaaccgactgaacaagtgccaacacaaaaggatggtcgtcaagtggtcgtcatctaacaaacacttacgtagtgttattccaggcaagccccggtgcatgcaaccccttctgttggtaacttgttctcaaatgctatgagttaagaacaaggcaacacaaaatgttaatggttaaagacattcgtcc

SEQ ID NO: 146035 - DNA, 530 bp, Zea Mays
gggtgcggaggctgacagcagggaactccgtgatgggcagcgaggctcgacggtgaacgacgcgacgacaggtagagagagagctcagactggggaagagactcagcaagctaaaccaccagggggcacgcgtgcacgggagctccatggcgagggaaagtggcaccgcggccatggcaacggcagtagggagcacggccagagctcctgcgcccgcagcttcccaaacgccaccagtgcgcggccggtccaagtcggccgccgactgcgccaccgcggccaggccgagtggccatggaggagcacgcggcatgggcgagcgcgccagggagcaggaggagcggccgagctgggctacggcgaccatggggatgagcttgaggaagagagggcgagctgctcggctgcttctttcctagttcgccgcgccagactctagctgctccgtgtggacgcgagagcggagcggcggtgggcgtggtaggcaaggcacggccagggatggagctcagcaagttcacgcgacgggc

SEQ ID NO: 146036 - DNA, 103 bp, Zea Mays
cttcaatatactaacgaatggctcaaccgtaggtacaattaaggaaacactaatggtgctgaaaatagaaccttgcaaaaagttatactatataatcagaaac

SEQ ID NO: 146037 - DNA, 571 bp, Zea Mays
tacacaaaagctagatggctgatatcatgcaaaacataaatcgttacataaagttgcataaacacctacaccgtacatcataattaatgaaaaattagtatgggctcaaccaacagccgcatgcataaacaaagaattggaggaggtcatcggaggacgccgccgccgaggccatcagatcgaaggagttggtcatcgaaggacaccggagccaaccacgcctcatgtggccaccaccgctggagacgaccgcgcctcacgcacccgtcggagctacccgcgtgtcccatggccaccaccgtcactgccgaagcctatcgtgcctcgcacaatcaccgttaccaccgagcctagggtgcgacgccgccactcgttcgactcgggactgccgtcgccgcttgcccgcccgcctctggagcgtcgccatcactcagtcttaggggagaaccaccgctgcctgcccgctgcctcgggagcgtcggcgtgggtcacccacctcggggcaccaccgccgcccgcccccgatatctccaccgcttgcacgcccgagggaaccgcggtcaccgctaaa

SEQ ID NO: 146038 - DNA, 681 bp, Zea Mays
atgaagggaaatgacgatgttgtcgctcacagaacaaaggcgaacgacaacgacatgggtagtgctggatgtggccgaatccattcagagcttcacttcgacgaccaccagatcgatatcgggactcgacggcagcgcaacaccaccacgggacggagccaaactggctacgacggcctaggacgggtgcggaggctgacagcagggaacttcatgatgggcagcgaggctcgatggcgaacgacgcgaggagcaaagcgaggtcgtggccgggcggactctacggtgcggactgctctgcggccaggatggctgccgcgacacacacgacgtcaccacgccacaacaccaccacggctaggaacagaagcgcgcacagggagccaggtcgaggacacagtcgagcgagacctcggcagggagctgggagagaaccgcggcgcaagcagggaaccagccacggcgagaaaagggacacgactgcgtgctgcgtgtgcgcagggaatagggcacgacgctgggcaagtttcgacggtgcggacagcgagggagctcgacgcgcgcagcaggggcgagcaacaggcgccaagctggagaatggatagaggaacacgacgcggtggccatggccaggggctcgcggccgccgagcaggagaccacggctgggcacgcgcattag

SEQ ID NO: 146039 - DNA, 374 bp, Zea Mays
gaggccttgtatgggagaaggttgtaacaccccaggtgttactcagggtgtccaccccagggttaccccctttttacccattatcacatgaagattgaattgggcaaagtataccaaacttggaattctaggtcctaagcaagtgtaacccaccttgggtgtcatgccctagctcatcatgcacatctaagtggggatctcccaaaaccctaaagcaaaacccccataggcaatgggaaccctaattgaagccatgatcaaaagatcatgtgaaccttatgatcatggtttgggccaaatataaaagttgtaatatacttaataacctacaattaatagtaaggaagtacccccaaaaagttttcagaaaagcc

SEQ ID NO: 146040 - DNA, 325 bp, Zea Mays
atgatgaacaaggtcttatttttgaagctgctgaaactgctcaattggtacaagaaaaaggccaaaagtgtatgggagtgatagcgaagaagatgatgatgacgatacaattttggagtattgcaacgaagccgaaggaggtgccacaaatgatgttgacagtgatgacgaatagctgatactactgatatttagttgtgaaatgacacttgtaatatttatttggatataggctgtagtattttctgcaatttagttgtgaatgtaacttgaaatatttatttggatggaccatgttcatttcagatcaaggttttatgaataa

SEQ ID NO: 146041 - DNA, 686 bp, Zea Mays
ctttgcagcagccattactatgtagagagcgcagagggccgtcacctggtccgctcgccgttgtgtccattcggggcaaacacagagacctcgggagcctgccgcacctccatcgagcggaacggaagaatggtgggagaacagagaaactccaccgccatggcccggcgccgcgcctcctctggtgcactggtaccgctgccatgtgccgtgcagtgcgttggtgggatcctgtcgtcgtggtgggaatccagcggccctgggtaattcgggtgtgcgcccacatttggcctcggtgaccagctacaggattccgccgacatctccagtgcaaatcatgtggtcattccgggtggattgatgccgggggaccctgggattgttcaccggaaaatctacacagcggcaaagcgactctgagcggtgaccggagtgattacgccatcccatttggtaagaagcttacctgtcaattctatttttcctccgcaacgcatagatcgtctcggtgtgggggttttaggctcggaatctaggcaggaggtggtgtgtggcatggcgctgtaacacccatgtgtttatattctgctcgacaacgagtatggatttaaacgcataatatcagtggataaaatagatactaaattttaatcatcttcatctatcgcgattttaatatcgcatct

SEQ ID NO: 146042 - DNA, 698 bp, Zea Mays
gtccattcggggcaaacacagagacctcgggagcctgccgcacctccatcgagcggaacggaagaatggtgggagaacagagaaactccaccgccatggcccggcgccgcgcctcctctggtgcactggtaccgctgccatgtgccgtgcagtgcgttggtgggatcctgtcgtcgtggtgggaatccagcggccctgggtaattcgggtgtgcgcccacatttggcctcggtgaccagctacaggattccgccgacatctccagtgcaaatcatgtggtcattccgggtggattgatgccgggggaccctgggattgttcaccggaaaatctacacagcggcaaagcgactctgagcggtgaccggagtgattacgccatcccatttggtgaagagcctgcggagctttgctacttttgtgcaatggtggttcccaagcaggaggaagaaccgaaaatagaagtgcgttgttgtggatggtgctaagtgccggtggactcagccttcttaatagtctcagtacctcttctatacttcttattgaggatggtcacttaagctagcatatatttcaaacttacaagtaatttataacatttcaaagtttatttctttgaatcactttgtaatcactccgataaacttaatgtaaatttgatgtaacttgtaaccttttgtaataaagaaattccgctgc

SEQ ID NO: 146043 - DNA, 451 bp, Zea Mays
agccattaccgtgtagagagcgcagagggccgtcacctggtccgcgcaccgttgtgtccgttcggggcaaacaccgagacctcgggagcctggcgcacctccatcgagcggaacggaagaatggagggagaacggagaaactccgccgccatggcccggcgccgcgcctcctatggtgcaccggtaccgccgccatgtttcgtgcagtgcgttggtgggagcccgtcgtcgtggtgggaatccagcggccctaggtaattcgggtgtgcgcccgcgtttggcctcggtgaccagctacaggattccgccgacatctccagtgcaaatcatgtggtcgttccgggtggattgatgccgggggaccctgggattgtttgccgggaaatctacatagtggcagagcgactctgagcggtgaccggagtgattacgccatcccatttggtaagaa

SEQ ID NO: 146044 - DNA, 390 bp, Zea Mays
atgtcggacgtcgaggccgcggcgctgggcggcgtggggggcagcggcggggggtacgagacccccgctgccgcggcagcggagaggtggtgggaggagcgcggggtagccagcttgatatcgcggggaaaccgacccagccaggcggcgatgcggaggcggcccccgcctcgccctgccctgccttcaccgatggtacggactagaggagagatgggagccactggaggttggcggaggtcctcctcctggccgttggcgcctaacaaggagaggggtagtggaggcgaagaggacagagcggctgtcggagcggaggcgcccatgtcggatctgtgcccgcttgccatgaaatcgccccaatcgaagaagtggaggcctgggggatga

SEQ ID NO: 146045 - DNA, 1799 bp, Zea Mays
gcctccggggctctcttgcgctcacactcccaccgccgcatatccgagtagagcgccacgaactccacgagctctccgcccagcgagactgtccgatgccccctccttcacccgcctcgcaagtgcgcacttgcgatgctggcgccgcgtagtcgcccacgcgcgggacggtgagtgagatggcgcgctacttccgcagcagcaacctcgcctctaggatcttcgaccgtcagctcatctccccgctccctggcgctaccgttaacacgattagacagttttatgaaaatttggtcccaagctatactatatatgacatagattgcccagattattcgtttcgcaagttcactgatgatgggaaatatcttgtggcttttagccgaaaccatcaagatttgattgtataccgtccaatctggttcacatattcatgcaatgaagaatgtgaaactcatgagcttccgccaaaggcaaagaagtttgacagcttctttaagcagctttattcaattcctcttgcatctagcaatgagtatatttgcaaggactttttcctgtacatggaatgccatcgatttggtttatttgcaacatctactgcacaaagtaacgaatcaactgccactgagggtgcaatacatggggtgccattgattgagaaaataactttccatcttgtgaggctagaagatggtgtgatcctggatgaaaaggctttctgcaatgattttatcaatctggcacatagtattggtgcttacatgtatgaggacctgctttgtattgtttctttgcgataccaaacaatacatatcctacagatacgagattcaggcaaccttgttgaggtacgcaacattggtgcattctgtcgggaagatgatgagctatttcttcactcacatattcagactggttatgggggttcttttcttcctggcataaagcaacggttgttgtcatatattttttgcaagacgtggaatgaggttccagatcagactttgagggtccaacatctaaagaagaagttctattttcacttccaagattatgttgatcttatcatatggaaggtacagtttttggatcgccatcacctatttgtcaagtttggtagtgtggatggaggggtttctcggagtactgaccaaaacctagcattctttgccgtgtacaacatggagacaacagatatcgtttcacttcatcagaattcttcggaggatatctatgccttgtttgaacaattttatgatcattttcatgcaaatccacaagcttcatcacatggaaaatttatctcctctcattccaatgatattcatgctttggatcaacttcgggttataaaaaacaaagcaagtagctcctcacagtttgtgaaaaagatgatgacgtcattaccttacacttgccaatcacaaagtccttcaccgtacttcgacctgtctctttttaggtatgatgagaagctgatttcagcaattgatcggcatcggcattgcacagagcatccaataaaatttatgtcagtgaggcaaaatgttgtcaaatttaagatcaagccaggttcagattctggtgcttctgacagcagagcaaaaagaatctcgtccttcttgtttcacccatttttcccgcttgcactttcgattcagcagacttatatgcagccaactgttgtcaacatccatttcaggagatagaaaaggtataacggttgccttagttgtatttgtgtcattagtgaacttgcagcattgctggtggcaaagttttggccatatgtgctc

SEQ ID NO: 146046 - DNA, 1382 bp, Zea Mays
aacaccctgtaaagggtcctgtccgttaaatatagaggactgtcaggtcccctacggctccagtaagggactctatagcgtcctctaaattttagaggatgtggcaggcactctaaatgtggagggcaccgggagtgcgctatccgcgctgctcctccaccagccgccgcgaggaaactttcgcgtcctcctaccccgcgctggcgactgcatctttcggggccgagccctcgatccggcgcgcttcgccgccggcatcgaggaaggagggcgagaagcggccgtgtggaggcgggtctgtcggcgtagagctcgcaccccttcgaaccgaggccacgcgacccaccacaacccaagatccaagccagcttccccttgctcgtcgccggagagtcgccatcggtaaaaggcttcgtcgtccgccgacttcgtcgaaggcagtcggcaaaaggaagagaagctcgtcgccgccgtcgtcttcctcttcgattcggtccaccgaggcagatatgcgaagagcgagtatggggagtgattggaaccaggtgatgtctcaatatggaagcttccttagccagattgacgagcagcctatcggaacacaacattctgaatttccagttgatgggcaacccgagggctcaagaacaccagctgttactaaaaagccaactcaaagaactaagctagcaaacttcactgctgaagaggacacaaggtgttccacttttgctggatacatgatggcagtcctccgacagaatcctagtggactcagtgacgcagacaagacatcactggcagcttctaggtttgcagcaattgagaagaagcctttccactttttacactgttgggccattcttaaggaccaaccaaaatggatggacaaccacatgggtcaacaacatcagcaagccaacgctaatcccacacattctaacactatcgatgtggatgcagaagaatctgtaccatcaagcttcacatcgaagaggccacttggtcgagattcttctaaggaaaaggcaaagaggactaaatctgtggacacatcttcatcagattctgagttcatgacacgcatgggagatctttctttggagcgcctgtcagtgtacaaaacagctgttacaactgaggaaaagaagttggattcaatgaacagaaatgagaggcagaaattgctcctagaaaagaagaagttgaacctagagaaattaaggcttgaaaggcagaaactaaaggaggacaaggaagaggagataatgatcttaagcatggatttgagcaaatgtaaccctctactccgcaagtactatgaagccaagcaaaaagagatactggtaagggttattgggtctacttcatctggccagtga

SEQ ID NO: 146047 - DNA, 1878 bp, Zea Mays
atgagggctgtgaatatgatgaagaacaatcaattgtttcaacggctaggccttggacaattaaaaacaatgatcaccgcgacaactccaaacaacaaacaaggtggtcctcaggaatcaggttctttatatgatggtgagaacgttgaggattctggtgaagaggatgttggcatggaattccaagctcgtaagggtgtccctacccacatcttccaagctcgtaagggtgtccctacccacatctccaatgatggtgaacatatgtcaacaaaagtaacaagaggaaataaaagaattatggcacctgtgcaggaatggccagttagagtcactagacaaagagttgctgaagtaaaccaaatgtctacccatagcctaaatgtttctacacaacccagttcaagtgccgccacaaaccatgatttaacccacaaccttattgttcctacacatcctagttccaatactgccacaaaccatgagcccatccaagacatggatactattgcacaagctactttccagatacaggagggtgataaccacactgggaatcaagaaatcataccaaggagaaaaagtatgggcaggcaacttgaatcgttaagcagaggactgggaatcaagattccaatccaaatcactgaagggaacaaaagcccagagccacctattcaagctgctaagtttgcatcagagggtggaatcacattgaggcagcacattccaatatttaaccattggaaggaatacaagaagagagagaatgaacctataataagaaactacattggcaaagttactgctaatttcacggtggacagtgagagcatgacagtggaagatgcatgtctagacatgctaaagagtggacaacgccaaatgaggtatagactgaaacagaagtacttcaatgggatacctgctaatcaagtgaggactacatcacctattccaagcatgtctgacaacgtctggagaaagttggtggagaagtggtctaccccaaatcacaaggaaagttgtgtgaagaacaaacttaatcgtgaaaaagtacagtatcaacaatgcacaggctctcagtcctacattgcaaaggcttttatattgaagcaagaaaaatataaggacgcgaaacctagtgcaatagatcttttcaaggagatgcaatgtagcaaaaagaaaggttttagtgaaaatgttcagaaagctattgttgacatggaagaaatggtagcagcaccagttcaggatggacaacaaccaaaatctcctacagaagttgtttctaatgtgctaccaggctccagtgtgttcctacgcaatgttggtcttaagtctgcatcccagaaaagctccacaacgactgtttctgtaaaggttcaacaacttcaggatgaactccagaccgagaagcaagaaaaagatggccttcgggaagaagtggaaaccttgaaggctcaagcacaagcatctcaggagaccattgatagtatgaagaggtcgatggaagaaaataacaacctccttcgtcaactattaagcttcaatcgaggccaagtgcctccatcataagtctggttgaccactataggacatacagccttatggctgttatagtggctagttatagtagctctagatttgaagttataagatcatttttcaattctgcttaatgtttaatactttgagttgaagttattggacttgttttggattttaagttaaaggatttgcagatatatgttttaaagttatattattctcttctagatgaaatatttgtgatgaacaaattcatatgatattttggttctgatgtgtaatattctatgacgatatgaatgcatatgatgtattccttgcgatgat

SEQ ID NO: 146048 - DNA, 92 bp, Zea Mays
cttcaaaaagcatgtactgttgcccttggctgcatgtcagctgctatactgctggttgaggctactttacttccaagtggtgttgatctatc

SEQ ID NO: 146049 - DNA, 820 bp, Zea Mays
aaacacgaaacctatcattcgtcttactaatacaccaggtcgcaaatatagaaacgattcaatcctacttcacttaggtttacccacatattcatcgcataatagacatctaaacctaaccttcacatgacgactaatctaggaccgtgatcacaagcacttcacaaacatctaatacaccacaacacgcatgctacagacaggatcattatcgacctgcatatataaccactccgggcataggaccaataacagtgaattggcttaccacactaaactgaactcgatgaccgcgagaacgacgatggtcctgattcaggcgttttgtcgagcaccaagcaagcgttgcacgagcaagatgacgtcgaggcgtggatcaaagacggacaaccggtccgaaagagcgaaactcgacgtggaagctcgacacgtcgtggcgagcagagaacttcgcgcacaacaacgcgacagaggagaacttcgcggcagcacgcgcaggaacaacggaacgcgcgcatagggaaaacaacgagatgggagagctgcacgtgaccttggcgcaaaggtacaagctcggcgaggaagtagagcgcgcacaagggagcaggccgggcgtggcagtaggcgcacaagcgagcttgaggaagcgagggtgagccagagacctacacggcacgcggccatggaagaggcctcggcaacccggaggaatagaggacgtcggtgaggaagatccgcgagcagagcacggcgcgcaacacagggagaatcggagcagtagggcgagcagagccgggctacgagctgagcgagcgcatgg

SEQ ID NO: 146050 - DNA, 2463 bp, Zea Mays
atgtggctgacggacccagagtatggcctgtcacccaagaacaccatcggcatcgacgtgtacaaccctccaccgctgcactggacgagcctcctggttctggcgtaccagagctgcggcgttgtgtatggcgacctgagcacgtcgccgctgtacgtgtacaagggcaccttctccgggtcgctgcacaggttcctggacgaggagacggtgttcggcgtcttctccgtggtgttctggaccatcacgctcatcccgctgctcaagtacgtgttcatcgtcctcagcgccgacgactgcggcgaaggcggcacgttcgcgctctactcgctgctggtgcggcacgccaagttcagcctgatgcccaaccagcaggccgccgacgaggagctgtcggcgtactacaggcccgggtactcgacggaggagacgcccatcctcaaggcgctgcggaacttcctggagaagcacaggaagtcgcgcacgttcctgctcctcatggtcctcttcggcgcctcgctcgtcatcggcgacggcgtcctcacgccagccatgtcagtgctgtcgtcattctctggtctccaggtccactccaacgcgttgacacacggtgaggtggtgctactgtcgtgcatcgtgctggtgtgcctcttcaccctgcagcactggggcacgcgccgcgtggccttcctgttcgcgcccgtggtcgtcctttggctgctcttgctcgcggcactcggcatctacaacatcgccgtctggaacccgaggatcctgcgcgcgctctctccctactacgtcgtcaggttcttccagcgcaccggcaaagacggctggatctcgctgggaggagtgctactctccatgactggcaccgaagctatgtatgcagatcttggccacttcactgctgcatccataaggatcgcgttcgtgggcctcatctacccgtgcctggtgttgcagtacatgggacaggcggccttcctgtccaagtctcccgactgcaacatccacttcatcttcttcgagtccattccccgccccatcttctggcctgttctggtgatcgcgacgctggcggcgatcgtgggcagtcaggcggtcatctcagcgaccttctccatcgtgcgccagtgcaccgcgttgggctgctttccgcgcgtcaagatcgtgcacacctctaaccgcatccacgggcagatctacagccccgagatcaactggatcctcatgctcatctgcctcggtgtcaccgtcggcttccgtgacaccgacctcatcggcaacgcctacgggatggcgtgcgcgggagtcatggtggtcaccacgctcctcatggcgctcgtcatggtcttcgtgtggcagcagggcttcatcctggcagccatgttcctgctggccttcggctccgtcgagtctgtctacctgtccgccgcgctcatgaaggtgccgcagggcgggtggctgccgctcgccctgtctctggtggtggtggccatcatgtacgtgtggcactacggcacgcggcggaggcacctgttcgacgtccagaacaaggtgtcgctcaagtggctgcacgcgcttggccccagccttggcatcgtgcgcgtccccggcatcggcctcatctactccgagctcgccaccggcgtgcctgccatcttttcgcacttcgtcaccaacctgccggcgttccaccaggtgctggtcttcgtctgcgtcaaggccgtgcccatcccccacgtccgctgctacgagcgccacctcatcgggcgcatcggcccgcgcgagttccgcatgtaccgctgcgtcatcaggcacggctacaaggacgtcccgggcgacgacaacgacttcgagaacgacctggtcgttcgcatcgccgagttcgtacacatggaggctgctgaggccgccgcccacgccgacgccccgcgctgcagcgacgcctcggtcgacgggcgcatggccgtcgtcaaccgcccgttcgacctgtcccggacgggcctgctcatgcgggcaccgctccccaacccggaggacagcgtcgtcgtgcgcgcggccacggccgtcaccactgctggcgacagcagcaagacggaaacgatgcagtcgctgcagaccatgtacgaggccgagtctccggggttcgccatccggcggcgcatccggttcgagatcgacgactccacgagcgagagtatggacccggcggtgaaggaggagctcagcgcgctcgtggaggccaagcacgccggcgtcgcctacatcatggggcattcatacatcaaggcaaggaagagctcgtcgatcgtcaagaagttggccatcgacgtggcttactccttccttcgcaagaactgtaggggccccgccgtggcgctcaacattccgcacatcagcctcatcgaggttggcatgatctactacgtctagtagccagcgttattttattttatg

SEQ ID NO: 146051 - DNA, 408 bp, Zea Mays
ggattgggtgtgatgcatgtgcggatccatgtggcgggactagcttctagttttttccaaatttaagggatatggcttctgaaaatttgggtgaacttttagcttgttcagtgtagactgacccctgaaagtttattgcaggacactgtatgtccagtcttacaggcagtttcatcaatcccatcttgtaaactgcttgaagaagtatgcaagaggaatttttctatgcattttgattattgcacaactgcttgcaccaactttgtgtcattagatgaggcaacatttaaggatattcttgaggcaagtaatataacctttttgttatatcagcttactgcagttatactagatataaaattatgtccttgagaacatagattagggtgtttatcatgattgaacatt

SEQ ID NO: 146052 - DNA, 723 bp, Zea Mays
actcacggtgccgcggaacagcgaagcaaatgaccagacgtaggaggagatggcggacggagagccagggcataagctgtcgccggcggactcccgtgcggtgacgctggcattcttccgcgccctaggcgccgacgcgcgcctcccggcctcggccgaccagcccgacgcctactccgctctcgtccgcgcaatcctctcctctgttgccgtctccgcctccccgaccccgcggatctcttgcaccatcaccgtctcgcacgccgtgactaacacgtacaacacgctccacggcggcgcggtggcggccgtggccgaggccgtcgggatggcgtgcgcgcggcagccgccggggatcgagagatgttcctcggcgagcttagcatcgcgtacctcgctgcagcccgatgcgatgtgatcttctaattaaattctctgcacctcgcttttccagcatccatttgttggtcgaatctcgaatcccacattgctatgtactcttggggcaactttgtgcagcaattcaacacgtcaggataatttaggggattggggagtctagctactgcttttgaactggttattattattatgtagttacacaacacagttctatgatgttttagaagtaaatagctaattgtaaataactaaataagagttgttgggcaagcattgcagctttgccagaaagggtgtgtatttgattgacatatagtagaa

SEQ ID NO: 146053 - DNA, 787 bp, Zea Mays
tttttttatttgagtggtactgagataaggacttgtcccacagccggaagcatttgcactgcgacagctctcttgctgcgcgacatggaaacgaatcgatcgagctcgtaaaaaccaatcagttcaaccatgtgtttcatttcacttttttcagacatcatagcttcagagagaagatatatatatacctaaacctagtgacaaggccatcagcatctatgcatcagtgaattacctaaacctagtgactcaagcttattgtttttgcagatgtatagtgctcagatgggatctccaatgggaccccagttcacccgtccgtcacaatcaggacagaccccaaacaccaacgaaacacagggttctgagaccggacaggaaacccacagatggacattcaggggtcgatgcctcctagaggacagattcttcctcctccacaaccaggtatgggatattggccaccaccaccatggggatatcctacacatccaatggggccttggggacgccccccatggccaacacagccacttccgtcacatgcggattccggctctcatcaagtgactcctccccctcacgctgactttgcggacagatgtctcaattctagtggtggagctacgaacaacaatccgatgtcctgatcgagagcgatggagctaatgtttgaacttgtgaactaaaaatgacaactatggatatgaacctatgtatttggacttgtgtgaatttgtgaacttatgtatttggacttgtgtgaatttgtgaacttatgtatttg

SEQ ID NO: 146054 - DNA, 834 bp, Zea Mays
atgaggtcgtttgctcctgtctttctgtcggcggtcgtggcctggctggagctggcgggcaccgcgcagggcggcaacttctaccaggacacagagatgacctggggcgatggccgcggcaaggtagtggacggcgggcgcgggctggacctgacgctggaccgcacgtccggctccgggttccagtccaagagcgagtacctgttcggcaagatcgacatgcagatcaagctgggcgacgcgcacgacgagatcgacttcgagttcctgggcaacgtgagcggggagccctacacgctgcacaccaacgtgttcacgcgcggacagggccagcgggagcagcagttccgcctctggttcgaccctaccactgccttccacacctactccatcctgtggaacccgcagcacgtgatcttcgcggtggacggcaccccggtgcgggacttcaagaaccacgaggcgcgcggggtggcgttcccgaggacgcagcccatgaggctgtacgccagcctgtggaacgccgacgactgggccacgcagggcgggcgcgtcaaggcggactggtccaaggcccccttcgtcgcctccttccgcggtttcagcgccgacgcctgcgtctgggacggcggcaggcagcgctgccctgagggcaccatggaggccgccgccgtcgcgggtgccggctccggccgcggctggtggaaccagcagctcagcgacatgagctaccgccgcatgcgctgggtgcagcgcaagttcatgatctacaactactgcgccgacgccaagcgcttcccgcagggcgtgcccgccgagtgcaagctccggtga

SEQ ID NO: 146055 - DNA, 3342 bp, Zea Mays
atggcgaagccgatgaagtacgacgatgaggaggagatctcgtcctccgccgaggaggaggaccagtccgacgccgccggctccgtatctggcgaggaaggggatgacgacgacgaggatgctgcggcgccgcccgcggaggaagctgagggcgaggggcagcaggaggaggaggtcgacgaggaagagatcgaagccgtcactaccggcgctggagctgaggacgaggaggacgccggtgccgttaccgccgctgaaggcgacgacgagtcccagtccaccgaggacgacgagcccgtcgcgagggacaaggacgatgacgacgagactgatgcagtggttgggaagcgagagaaagcaaggctaaaagaactccagaagatgaagaaacataaaatccaagaaatattagatactcaaaatgccgccattgatgctgacatgaacaataaagggaagggacggttgaagtaccttcttcagcagacagaaatatttgctcactttgcaaaaggaagtcagtccaacgagaaaaagccacgcgggaggggacgccatgcatcaaagatgactgaagaagaggaagatgaagaatacctcaaagaggaagaagatgcccttgctggtgcagggggaacacgtttagtttcacagccttcatgcatcaagggaaagatgcgtgattatcaattagctggacttaattggcttatacgattgtatgagaatggtatcaatgggatattagctgatgagatgggacttgggaaaacacttcaaactatttcattgctgggctatctgcatgagttcagaggtataactggtcctcacatggtggttgcgccgaagtccacccttggcaactggatgaaggaaatccaacgtttttgccctatcctacgtgctgtgaagttcttgggcaatccagaagagcggaaccatataagggacgatttgctacagcctggaaaatttgatgtgtgcgtgactagttttgaaatggcaatcaaagaaaaatctgcgttgaggcgcttcagttggcgctacataattattgatgaagctcaccggataaaaaatgagaattctcttctatcgaagactatgaggatttacaacactaattatcgtctcctcatcacaggcactccactccagaataatctccatgagctctgggctctcctcaatttcttgctccctgaaatatttagctctgcggaaacctttgatgaatggtttcaaatttctggggaaaatgatcaacaggaggtggtccagcagcttcataaggttcttcgcccatttcttcttaggaggctcaagtctgatgtagaaaagggtctacctccgaagaaggaaaccatacttaaagttggaatgtctcagatgcaaaagcagtactatcgcgctctgcttcagaaggatttggaggttattaatgccggtggtgaacgcaagcgattgcttaacattgccatgcagctgcgcaagtgctgcaaccatccatatttgttccaaggagctgaacctggcccaccctacacaactggtgaacatctagttgagaatgcaggaaaaatggttctactagataaattgctgcccaagctaaaggagcgtgattccagagtcctaattttttcacagatgaccaggcttttggatatcttggaagattatcttatgtatagaggttatcagtattgtcgaattgacggaaatacaggtggagaagatcgtgatgcatccattgaagccttcaataagccaggaagtgaaaagtttgttttcttactttcaactagggcaggtggccttggtatcaacttggccactgctgatgttgtggttctttatgacagcgattggaatccacaagctgatctgcaagctcaggaccgtgcacataggataggtcaaaagaaagaagttcaagtgttccgcttttgcactgagataatgcaaacgaaattacagtacactatcgaggaaaaggtgattgagagagcatataagaagctagcattggatgctttagttattcagcaaggacgattggcagagcagaaaactgtcaataaggatgaccttctgcaaatggtgcggtttggtgctgaaatggttttcagttctaaggacagcacaataactgatgaggacattgaccgtattatagctaaaggagaggagacaacagctgaacttgatgcaaaaatgaaaaagttcacagaggacgccattaaatttaagatggatgataatgccgaactgtatgattttgatgatgagaaggatgaaaacaaggttgatttcaagaaacttgttagtgataactggatcgagccacctagaagagaaaggaagagaaactactctgagtctgattactttaagcaagcgcttcgccaaggtgcaccagcgaagcctagggagccaaggattccaagaatgccgcacttgcatgatttccagtttttcaataaccaaaggctaaatgaattgtacgaaaaggaagtgcggtacctcatgcaagcaaaccagaagaaagataccattgatggtgaagacgaagatcaattggagcctttaacagcagaggagcaggaagagaaggagcagttattagaagagggttttgcatcatggacaaggagagacttcaacacatttattcgtgcatgtgagaaatatggtcgcaatgatattaaaagtatatcctctgaaatggagggtaagacagaagaggaagttcaacgctatgctaaagttttcaaggagagatacaaggagctgactgattatgatagaattataaaaaatattgaaaggggggaagcaagaatatcccgcaaggatgagattatgaaggctattgggaagaagttagaccgctacaagaacccatggttagagttgaaaattcaatatggccaaaataaagggaagttctataatgaggaatgtgaccgctttatgaatacgactccaacaaagagagcagcactaaggaattcagagggtgagagtgctccgttgagctcattcaagaggcgacggcagtctcttatggacgattatgtgggctcgctctcagcgagatgcagtctctgcaatgctttaagcccgtacgtgctgtgcttagtttcttgtgcacgtgagttgaatgcctcaagggctggtgactttgtagttgctgtagattcggacttcgcaattgcaactgttgctacacttttgattcactttttcatcgtggccctaacactcattccaaattataagattagagattttaacttaacactagagttcgatcaaatttatgcaataaaataa

SEQ ID NO: 146056 - DNA, 1715 bp, Zea Mays
accggactaggtacaactggacagatagcaacccggtgaccagggagcctgcatatgatacagcgcgtggcctggcggcattgggatgcacgatgggttgtggcggcgaggcagttgaagcatctacctcggaggtccaaagggacttgacgacctgccacccatcatcactcgagcggacgttgctcgaggccttccactggcgacgccaggagggaatggaggccttgaccgcaatcccgggcgacttcggaagctcccgcaccgaacccgccggggagcgtccactgccgtcgtcctcaggagcgcgtccttgaaagttccaggcatggcggcaggcaactcatctccatacgacccaactagagggctgcatgaggatgagcctccgccaatccaagccgggctgacttctgcctaacgttggagcttggaccgtcccttagggagaatcggttccgcggacgaagacaaggaggaggtggagcacgacacctgaagggagggaggaaccgcatgggagcaagcggcagggtaggtggttgccggaacctgggcggcagacggcgagctgttggtggaatgaggggcgccgggtgaggtgggaggcaagggggtgggagacgagggggcgggagccttttttttgcagtgtgtgaactcaacatcatggtggaaactgtacaccctctctcctgaactcaacatcatggtggaaacttactgtacaccagtgactggaaggagcgtcattttcaggcaattgttgtataaaaagagtggagaacattgatggatggttcaagtgtccttgcagttatacctctctgtcttatactttaaacctactagtgtcaggtcccaaggatatgtaaaatatccttactccagatgatatttgcagagtagcagcttcaaattggaatggaaaaggctctttcctattcacctcgagtactgctgtgtatgactgcagtgacaatggattctgcagtgaggattctccttgtgtacccattggtcaaagcactcgtactgatgtgcttctaaaagctgaaaatgttgtccttgaggcaggcggctgtgttcttaggctaaaatcagatcggggtcctcatgtttactggctgtcaaaaggaaccttggatgtgcgtcctgatcatatactcaatctgatacattatgaagatgcagcctctcttgtaatttccatcatgaaaaagagattacggagctgcatctttgtgggttgtgacaacgagcctctgtccaggctagagatcatggaccgtgtcaacagaagcaggaaatttgacacacagtttcatggcttcactgggactgatggtccgctggggaagaggatggacaactccaaaactcgggcaaagcttggatggcagcccaagtatccgagctttacagagttccttggtctcagcaatctctaactttcatgcgatgtcactaaatacctgttattaaagatgaatatactgatacataaaagagatgatgacagatttggaagtggaatgttgtttgcttataccgcagttttcgactatcttttgatttcttctgttagatcttgtaaagcattgcagcatggtgtggcatgtacctgtgttgccttctattcgcttctgttaactcatgaaagcattgacttcaatacctgttaattgtttccatggcttcaatctatcgaacca

SEQ ID NO: 146057 - DNA, 1860 bp, Zea Mays
accggactaggtacaactggacagatagcaacccggtgaccagggagcctgcatatgatacagcgcgtggcctggcggcattgggatgcacgatgggttgtggcggcgaggcagttgaagcatctacctcggaggtccaaagggacttgacgacctgccacccatcatcactcgagcggacgttgctcgaggccttccactggcgacgccaggagggaatggaggccttgaccgcaatcccgggcgacttcggaagctcccgcaccgaacccgccggggagcgtccactgccgtcgtcctcaggagcgcgtccttgaaagttccaggcatggcggcaggcaactcatctccatacgacccaactagagggctgcatgaggatgagcctccgccaatccaagccgggctgacttctgcctaacgttggagcttggaccgtcccttagggagaatcggttccgcggacgaagacaaggaggaggtggagcacgacacctgaagggagggaggaaccgcatgggagcaagcggcagggtaggtggttgccggaacctgggcggcagacggcgagctgttggtggaatgaggggcgccgggtgaggtgggaggcaagggggtgggagacgagggggcgggagccttttttttgcagtgtgtgaactcaacatcatggtggaaactgtacaccctctctcctgaactcaacatcatggtggaaacttactgtacaccagtgactggaaggagcgtcattttcaggcaattgttgtataaaaagagtggagaacattgatggatggttcaagtgtccttgcagttatacctctctgtcttatactttaaacctactagtgtcaggtcccaaggatatgtaaaatatccttactccagatgatatttgcagagtagcagcttcaaattggaatggaaaaggctctttcctattcacctcgagtactgctgtgtatgactgcagtgacaatggattctgcagtgaggattctccttgtgtacccattggtcaaagcactcgtactgatgtgcttctaaaagctgaaaatgttgtccttgaggcaggcggctgtgttcttaggctagtaggactttatatatcctcacatacatgatttttttgggttccaaccttcaagcagctagtgttcttcttagatgtttacattgcctgattcctactgaattaaattgggccaaattggtgagatattccttgacttccattacaaatcagatcggggtcctcatgtttactggctgtcaaaaggaaccttggatgtgcgtcctgatcatatactcaatctgatacattatgaagatgcagcctctcttgtaatttccatcatgaaaaagagattacggagctgcatctttgtgggttgtgacaacgagcctctgtccaggctagagatcatggaccgtgtcaacagaagcaggaaatttgacacacagtttcatggcttcactgggactgatggtccgctggggaagaggatggacaactccaaaactcgggcaaagcttggatggcagcccaagtatccgagctttacagagttccttggtctcagcaatctctaactttcatgcgatgtcactaaatacctgttattaaagatgaatatactgatacataaaagagatgatgacagatttggaagtggaatgttgtttgcttataccgcagttttcgactatcttttgatttcttctgttagatcttgtaaagcattgcagcatggtgtggcatgtacctgtgttgccttctattcgcttctgttaactcatgaaagcattgacttcaatacctgttaattgtttccatggcttcaatctatcgaacca

SEQ ID NO: 146058 - DNA, 124 bp, Zea Mays
gtttaattactattattacttttccattcttctaactcttttgcccgtatatttttcagagctcaaatttgaatttgaagctagatttgtgtttttatttttaatatacgtttgagttctacgc

SEQ ID NO: 146059 - DNA, 822 bp, Zea Mays
aaaattattttggtttgaccaagttaaacctcatttatatattgatactagattcaaatctgagagcacgaatatatatggattagtgtgtaaaaaaaagaaataaaaaaaaggaaaatatctcagccgctcctatccttccaccgctttctccttgattttttcccctggccgcgttggcttcctaggcgtgtctctctctcgccgtgtctctctctctccttcagctttcacggcgctcctcctctgtctcccatggcgcgcgcctgcttccctcataggggcggagctacatagaaattagggggtgcacatgcatccacgaaaatttggaaatctaatggtttggaccaaattttcaccatatatgcaccacctgtaaattgttatcatgcaccctcaagacatatgcaccctcccctaatttactctagcttcgccactgttccctcatggcactcgaccatcatctcccatggccgccatgccctggtctaagctccctgctcttctctatttcgagctccctccaacagcgccgtcgtacctgcgtccacgaatccaaagccatctttaactccgccgctctacgctacgacatcttcttgaccctgcgcgccgctccttggatgacctcacgctctctcccatttgccggccgtgcaagtgatccctctgcgtcgagcatccgctgtgagctcaccgaaccgccttcccatggccgcgccctgctcggctcttacaccgtcgatttggagctctagcgagctcttctctggtgcccaggtgcagttcgtctctcttagcattgtctccagctgc

SEQ ID NO: 146060 - DNA, 467 bp, Zea Mays
tggcaatccaccccggcttctgcgtcagtgttctactaactaaaccagttgcaagaagacaatggatagtggcagttgggaagatagcagacgacgcgtaccggacgggaaggcgtcgaggagcgcgagggcggcgtcggcgcgggcgcggagtgcggcgactttctcggaagggtcccgggggaaaaaggtgtcacggaggcggtacagctcttccgccgcgttcgcagcgtcagccaaaggcgtcctgtccccttcctccgcctcggacggggccggggcggagctcgtgcacgcgccagttagcagattctgggtagacatggatctgagaaaggactggggcagtcgagacggccagacggggaaggggagcttacaaaatgggacggccaacatcgccgttttcactttttctctactccatgggcgtagctaagggctggcatacctagggatggcagttg

SEQ ID NO: 146061 - DNA, 378 bp, Zea Mays
atggatagtggcagttgggaagatagcagacgacgcgtaccggacgggaaggcgtcgaggagcgcgagggcggcgtcggcgcgggcgcggagtgcggcgactttctcggaagggtcccgggggaaaaaggtgtcacggaggcggtacagctcttccgccgcgttcgcagcgtcagccaaaggcgtcctgtccccttcctccgcctcggacggggccggggcggagctcgtgcacgcgccagttagcagattctgggtagacatggatctgagaaaggactggggcagtcgagacggccagacggggaaggggagcttacaaaatgggacggccaacatcgccgttttcactttttctctactccatgggcgtagctaa

SEQ ID NO: 146062 - DNA, 883 bp, Zea Mays
gcttgatctaaaatggacaaatatatacatatatataaatgtctactattcctgtatatactaaaagaagagaaataaaaaaaggagaaaagaaataaaaaaaggaaagaccgttaggcccattcccctgaaccgacgctctcatctcccctccctctctcattcttacaggtgagccctctcctcctctctctctccctctacctcccctggtcgcggtttcctcgccccctcgttttctcccctgcgcgtccgcccgcctgcgcggtggccggcgagcgcggccagcagcgcacccaggcgccctcaagcgtggaggcgagcccccggcggcggcaacctaccagctcggggcggctacggcccgcgcgccatctcgtggcgtggcagcctgccagctcgcggcggctacggcccgcgtgacatttcgcagcatggcggccagcctacgcgcggcggcctggctcggcaagccggcgtggcggcctgtggacaacctgcgcgcgacggcttgcggcccgccagcgtggcttgcccgtggctgggtccgagcgcagcagcgcggcttgccagcgcagatgcctcgccgtgcacgcgtccaacagccgcacacgggctcgtcgtctgcacgcctgacatgcctcgtcgtctgcacacccgacatgcctcgtcgtctgccgtcgtcgcaaggtgagatcccgtccacgaatccctttcttcctcacaaccagcacgaccaagtgtcccccacacgtcgttgcgtcatgtctctgcatgcgcgccctcgacccagcccttgtgcgcgtcgttcgtcgtcgagccatacccgtatcctcgctcgtcgagatgggcagcaggcgtctacccctatgcacgacccccg

SEQ ID NO: 146063 - DNA, 919 bp, Zea Mays
atggcgccattggttcctcagcagaatgtgatgcaaaggttcagtaacaacgttaagactgttcttggttctggaacacaatatgctaatggatttgctgtggcggatattgaacgatcatctctaatcctatgcggtaaagcatttgctaattcagctatcgtgaaagatgcacttgctgctatgacagccccaatattgtctgcaagaggaggcctcccggttccaggatggattatgagctttggtggttctattgtattattgtttgccctagtggaaatcatgatgtcctgcacagaaatccacaatgctctattgtccattgactgtggtgcagtcatctcttccaaggggtctactgtgcttttcccaacaaaggcaagcagggagcagaaactgcttaccgaaccaactggagtaattatcgtatcatctgatagctctggtgtcataccatctgtatgcaagctctctcctggccaggctgcctaccatttcttggctggatatcacgatggaaaatttgtcccagcatacactagagccccctctcctgctgacccacttgcacttgcaatttctttattctcacatttgaaagaagatgatacaccggcatatctgatcaacgctaagcactctggaaagtacattggcggcaatgggcttatgaaattattaaagctggcactatctcacgatcttcctaacaaaaaaactgaaggctctagagttcaagctctgcaacgggaggtctgttcagtttgacgtcggcaacgtggtcatggtgacaaggaacaccggatgtgtaggagtgatcaagaactgggagaagcacaagggcatcttcgaggaaaacatagaatggaattcaaatttggtggtcgcaaaagtgtggagacttgaattcatataa

SEQ ID NO: 146064 - DNA, 2293 bp, Zea Mays
ctcctcctgctgccgattccgtgctaccaccaactgcccgctgcgctgctgcattgccagtccatctccagcaccagcaggccagcagggtccgtttggtcagcatcagcggcgcagccttcggtcgtgttggcggttggcctgttgcattgcattcccttacgccgcaagccatagaaatgagacgcggtttggttccttccgccagaccgccacgcagcacgccatgtttaaaatgacgcgagtccacgccagccgacgcggtcatggtctacgacgactcttctactctgcgttcgcgtgctaacgccgtccacgactctctatgcgcgtccctgtgcttctgcttcctgggttcttccgggcggttctgagtactgctgatcctttaaggctcgaacaccacgccccccgccggcccccactcaaaatccgactgtgagttgagacttagagatgatccaccaccaccgggcgagcttgctggtgcaccagcacagaaagggcgaggcggcggcagaggatgcgctgccggctgaagagtcaggcggcggcaggatgaaggagctccggggccgcttggcagactacgcctgtcaacaccgaaagcacgggcacgatgcgctgctccgtatgcttgccggcttcgcgctcgtatcctgcctcctgctgctgcttcctggcagccccgtctccgccaccatggacgagctgctgcagctagggaggagggcgcggcacgacgacggcgcaccggcaccgccgtgcgccgacgtggccaacgacaccgtctgctgcgaccgcaccgcgctccgcaccgacgtctgcgtcatgcgcgggcacgtccgcacccaggccgcctccaactcgctcttcctgctcctgcctcccaactcgtctcgaccggccaccgacgagcacatccgcccatacacgcgcaagtgggagtccagcatcatgagcaccatcgacgagctccgcctccgctccgcgccagagggagcgcccagccgctgcgacgtccgccacgacgtccccgccgtcgtcttctccaccggcggctacacgggcaacgtgtaccacgagttcaacgacggcatcatcccgctctacatcaccgcgcgccactataacaagaaggtggtcttcgtcatgctcgagtaccacgactggtggatgaccaagtacggccacatcgttgagcagctctccgactacccgcccatcgatttcaccaacgaccgccgcacgcactgcttccccgaggccgtggttgggcttcgcatccacgacgagcttgctatcgacgccgcgcggatgccagccaaccagacgatccaggatttccgtctgatgctcgatgacgctcaccgtggtcgcatccagacgatcatcgaggagaagaaggaagctgctgctgcgaggagacaggaacatcgcggaagcaagaggagccggcagcgcagcaagacagccttggctgagaagccacggctcacgatcatctctcggaacgggtcgcgcgcgatcgagaacgaagccgagctggtgcgcgccgctgcgggcgccgggttccgcgtcgccgtgctccagccacgccaggacacggagctcgccaggatgtaccgcgccctaaacgcctctgacgtcatggtgggcgtgcacggcgcggccatgacgcacttcctgttcatgcgcccgggctcggtgttcattcaggtggtgccgcttggcaccgactgggccgccgagacgtactacggcgagcccgcgcggcggctgggcctacgctacttgccgtacaaaatcctgccgtccgagagctcgatttacaggaagtacgccaacgacgacccggtgctgactgacccggataccgtgaacgctaagggatggcaggtaaccaagcaggtttatctggacggccagaacgtgcgcctggacatggcacggttccgccgccggttgcgccaggcgtatgaccactgggcgcagcgccaccgtgcgggattgggcgtggaacagaggatataccactgaagcgtgggtgtcacatagtgatttttttttcattttttcacggtggaggatattttcaattggtttttttcatttttgtgacagtgaatattgtaattttaatactcctagaacatatacagagggtgatcggtgctccatgcggagtttgatgagtaacatttgtacaggccccgtacataacaagttgtcaaataaacgtgagaaaaaaggacagagagaaatttggttcaatacaaaccatttccttctc

SEQ ID NO: 146065 - DNA, 2376 bp, Zea Mays
actttccaggccatcgtctccttccccttctttcaccggcctcgagtcacacgcgtgagatctgtgccttccgccgcggccacatgccacacaacgacgcccggcgagcttcaccgcgatagaggtaggcccgcccgataccaaggaggatggcggcagtgggcgttggtgcagcggacgagcggtgggcttcgttgtgcaactgcgtggtgaacttcttgctggaggagcggtatcacctcacggcgctagagctattgcaggagctccaggaggacggccgctccgcgcacgccctccgcctccgcgctttcttctccgacccagcgcttttcccgcccgatctcgtcgcccgctcatcctctgcgccgcccggtgctgatccacagattttgctagaagagaaaatagcagcagaagaaaagttggcactcacggagtatgatctgcgcctagccaaagaagacctttcacagttgaagcttgaattacaaaaacaaaaagaatcatctcctgatgattcaaatgggctccttttgggtgcttctatacgcgaaggatatactaggcaacaagaaaattgggatgtgaaaatttcagcattaggccctctaaaggataatgaacgaaaagatcttaattgcgctgtaaaagaatacttgcttttggcagggtatcgacttgctgttatgacattcattgaggaggttcctgatcaagaccttgatgtttggccaaacagttcagcttgtgttcctgatgcccttcgtcgttattactatcagtatctttcttctactgcagaggctgcagaggaaaaaatatccatacttcaggaaaatgaaacattactcaaggacaatgaacgactcaatgctgaaaatgattccttgatgaagagcagggaaggagctaatagtcaggttgccgctttaaggaagtctttggaagctgcacacaaggatataaaagacaaggaaaaaatgattcaagacttgaggcagtcactggatgtccagaggaaggagctgaatgactgcagagctgaaatcacagccctgaagatgtacatcgaagggactcaatcaatcaaacaattgtttgttggaactagtgatggtgtaaagtcgcattcctttgctaattctgtgggagcatcatcattgaataatgaagatgaagattcaaaaggatctgaagccataacaaataagctagcatcagcagtaaatattactgatgatacgcagaaagatcgccaagttctagaaagtagcgctgaaggttcctcagtttcagaaactccagtgtctttcacagctgttgagaatgacagctatggtacatcaaaagaagataaatctgtgtcaaatatctcatcgaataatgtatgttttcagagtaatctgcatggagcttccatgactggtaaaagccaggggagttcagatggcatatccatgtatttatctattgagaaactagagagcccaagtaaacaaaaatcttcagataagattgctttggagactataaagatagtttcagatgcacttccaaagattgttccttatgtgctcataaaccatcgaacttcttccattgatcatatgtgctatagaaaagcatccagatagcgatgtacgggattccttgactcatacattgtttaacctgataaaacggcctgatggagaacagagacgcatcataatggatgcttgtgtagaattagcaaagagcgttggtgagatgaggacagaaactgagttacttccacaatgttgggagcagataaaccaccaatatgaggagcgcagattgcttgttgctcagtcgtgcggtgaacttgccgtttatgtccgtccagagatacgagattccctcattttatccattgtgcaacaacttgtcgaagatgctgcaacagttgtaagggaagctgcaacacataacctggcattgcttcttcctatgtttccaaatctggacaaatattataaggttgaggagctaatgttccaattggtctgtgacccgtctggggcggttgtggaagttgcactcaaggaacttgttcctgctgtagtaagatggggagataaattggatcagatatcaagagtactattggctcatatcctggcatctgctcagcgatgtccacctatttcaggtgttgaaggtacaatagactctcatcttcgtgttttaggagaacaagagcgctggaatattggtgtccttcttcggatgttgactgagttgcttccatttattcatcagaaagctatacaaacttgcccctttgcatcagctgatccaacaagctctacaccagagaacttctcagcatcctgcctaaaatcatatgca

SEQ ID NO: 146066 - DNA, 1151 bp, Zea Mays
caaaacaccaaggatggttcattttctatgcatcatactactgagatcattaacgcagttcggtttctttgtgtcatctttaacattttgtgggagatggttgcgagctcggataccagcctgaaaataaatgctgcggctctactgagagcacttgtaccctacacggatgtgaaaatagcatcaactcatattttgccagcacttgttacccttggctctgatcaaaacttgaaagtaaaatatgccagtatagatgcatttggagctgttgctcagcatttcaaaaatgacatggttgttgacaaaatacgcattcaaatggatgcttttcttgaagatggatcacatgaagcttctgtttctgttattcgtgcacttgcagtagctgtacctcattcaacagataggctacgtgaatatcttttaaccaagatatttaagatgacatgcatcacacctgtcggcaatgatattgaacggcgtcgtgaaagagcaaatgtactctgtgaagcgctccgggctctggatgctacagatcttcctgctatgggtatacgtgatttgcttctgccatcaatacaaaatctgttaaaagatctggatgctctagaccctgcgcacaaggaggctttagaaatcataagccgggaaaggtcagggggtacgctggaaagcattagcaaggtaatgggggcgcatcttgggattgcatcatctgtcagcagtttctttggtgagaacagtctcctcacaaagaaagaaggtggcgaggaacatgatcctgctggccccaccgctcctgagcaaaacctgcaggctcagccagagagcacgaggtttggtcgcataatgaggagcggctttggagacatattgcgaggtcaaagcaaaggacagtgatgcacttagattgaaatgatcaattacatacatagctgccgataccacattctttgtttgtaagttgacagaatatacctcaagggttgtatgttatttgccgagataaaaaaaaaggatttgacgttgcaaatctagcatcaaacttcctgtatgtaagttgcctgtagttagctgctcatttataagatgctaataattgtgtctttgtttcatttgtttttataaataaaatatataactagata

SEQ ID NO: 146067 - DNA, 260 bp, Zea Mays
aagatggtgttcgcatgaaataacaaatatagataacaactatatataagggaataaaatttctctttttaggcttttcttacaaagtgggcattacacttcggaaggggaaggcccccaacagtattatttctttagtatatgaaaacataggggagacatgaaatgttgcatcatgctgatccaaaactttgtttttggttaatgcaaatgtttgaaatattcaaatttgaatttgtggtttggttggatgtgaattc

SEQ ID NO: 146068 - DNA, 1720 bp, Zea Mays
gcaatcttccggaacatccatcgatctccccccagcggcgaggagagccggcggccacaggaaggagaaatggcttccgcacacaacgctctccgggtgtttttcatcctagccgtggtatgtgccgtatgcacagcgaaaaggacaggagccaacaaggaagaatcggcggcagcccccggtggcgctgctggaggcagcggcgggacgttcgacatctccaagctcggcgcgaccagcgacggcaagacggactgcacaaaggcagtccaggacgcgtggacgtcagcgtgcgaagcgaccggaagcgccacggtggtgatccccaagggcgactacctggtcggccctctcaacttcactgggccatgcaaggggagcaacatcgccatccagctggatggcaacctgctgggatcaaacgacctggacaagtacacggcgagctggatcgaattgtctcacgttaacaacatcgggatcaccggctcgggcacgctggacggccaggggaccgccgtttatagcaagagcaagaccgacaacgtgaaggcgatgcccaacacactggtgctgtttcacgtgatcaacgccactgtcgccggaatcaaactactcaactccaagttcttccacatcaacatcgacaactcagagagcatcaccgtgaaggacgtgaacatcaccgcgcccgccgacgttgagaacacggacggcgtccacgtcggaggctcctccaagatcagcatcctcaactcgaccatcggcaccggcgacgactgcgtctcgattgggcccgggtgcaacggcgtcttggtggacagcatcacctgcggccccgggcagggcatcagcgtcggctgcctaggccgctacaaggacgagaaggacgtgagcgacatcacggtgcggaactgcgtgctcaagaacaccaccaacggcgtgcgcatcaagtcgtacgtggacgccgagtccgtgctgacggcctcccatctcaccttcgagaacatcaggatggaggaggtggccaaccccatcgtcatcgaccagtacttctgcccgcagaaggtatgccctggcaagcggagcaactcctcgcatgtctccgtcaaggacgtcacgttccgcaacatcaccggcacgtcgtccacgcccgaggccatcagcctgctctgctcggagacgcagccatgcagcggcgtctccctcatcgatgtcaacgtggagtacgccggcaagaacaacaaaaccatggccgtctgcagcaacgccaagggcaccgccaagggaagcatcgaggcactggcttgcctggtctgatgatgaccttccttttgcatgcatgcatggtatctcatccttgatgatgatctagctcactagttctttttaatttccgcttcattcgcttttccaaattcgattgtgtttcagccaagttgtttagcgggacatctcttgtctgatcttcctgctaaatagagttggactcctatatatagaggccttccggcacatataatatacgtcggaccaatattattgtgatcactagttatgtctctatatgttgcgacggggataaaaaatttgaatgaaacatagatactgaacgacaaacatcaccatgatatataaaatttacgtggcaaacattatcaatatcgtgttgagtaagcagcatccagtctgtaatcgtgtcaatgtttgtcagcatata

SEQ ID NO: 146069 - DNA, 574 bp, Zea Mays
gccccggctcggcaccgacagcaggccacgacgccgccgtgccaccgccccggctcgcgccaccgccctggctcggcaccaccgccccggctcggcaccgacagcgggtcgcgccgccgcccctgctcgccaaccccagcggttcaaacattagctcgttttcactgctactgcattgggttctgcatagttcttccttggttgtttgatgtaaaccacagctggggagcttagctgtatagaactgatttcacgtgtttgttgacgagtttagctgcatagggtgcaagaactgtgctaacgtgtgttctaaggtcttccaaatcgaggatgatttcggacgggcaagagtttacgaccaatcaggcagcacagaactgattcaagaagctattgacagttggcaagttcacgctgggagaaaagacaagccaaagtcctggagaaggtaagaaggcggatgagccaagatgattccagaaagggtggctcatggagtgacatctggggagcaccaacaagatacgagaagaacggtacatcccattactaaaggagacatttatgttcccac

SEQ ID NO: 146070 - DNA, 1573 bp, Zea Mays
ttttttatctttattatctgtgattctgcaatccacatgtttgattttttacttagtttctctttgagaccggtcgccatgtttggttagcacatctagaatgcattacaattggaggcaatagctgttcactatccactataacctgaaagcttagctgttcaactgagctttctgattcttccattttttcccattcaagtatatgatattcttgtgtgctattcaatattacaaataacaaatttgcatatgagaataattaagtaaatttggccacctaatcagtaggattgtttggttggaggaatttttgtagcatgtgaaacttgagctaattagaaagcaaccactaccttctcttcagcatgaaaaaatagcttagccatttcttagagttaagcccttagccacttgctggccttatcgtctggaagaagaaatggtactcaactgctggtctctttggcaaatttttctttgcacttttcttgttcgaactggcaatccacaaccaagtaccttgcttgcaccaacaaaagtcccttctactgtagggcaatccatggatttattgcttgtcctgaaatttgatagaggcattcatgatatcagttgctcgttaattccatttgtttcttgttctcttgtgcattgttatgacatatttgcaccttttgcggggaacgatcgaccaacaatggagtggcccactagattaaagatcgctctgggtgctgccaagggtttagctcatcttcatgaagactgtcatccaaagatcatccaccgcgacattaaggcatctaacattcttcttgacttcaaatttgaatataaggtatgctctgagtttttcttttctgttctagagttaatagctaactgtttttgttaactgaaaatgtatttatcacacaatgcttatataaaccacttgattaagttatattatgttaggacattttggcagtccactaattatatctggtttgatgttgttataaagtgatctctgctatctaatctattttggtggccgtaaagttttgcttgcttgaaatttgatcacattagttgaattttgtctataaccagatcagatgagaaattatacagccttcttgcttaaatgtacagaccaccgtttaattttttgaactttattttatctaacaattgtctctctacaggttgctgactttggacttgcaaagttcactactgataataacacccatgtttcaacaagagtaatgggaacctttgggtatttggcacctgagtatgcagcgtctggcaagctcacagaaaaatctgatgtattttctttcggagtcatgcttcttgagcttattactgggcggcgaccaattgacacaacccaattggcactgcttgctataagcacatatgtacttccatttgcatgttgtataatactaataccaattgcaaaattatagttattttttctacccttgttagttaataagcatatttctggtcaataggttgtattcttattcttgtaaccgtgttaattaatgttatggacttgtagtcttgtatt

SEQ ID NO: 146071 - DNA, 406 bp, Zea Mays
cctttctacaagactcatgcaacacatagagaaagaaagtactgcaaaatccggcagcacctcccttgaaagtagcataacaagggaagcatatagtttatacaggatataaaagaaagataattgccatagtataatcaaaatgcaacggtagaaaaaacattcatgaccagacaaaagatagacatctcagcccaccaaactaaacagttcaactaccatgaaagattagaatgtaataattccctagacttgacccttcctgtttaacatcattaataaacagttattcctttatttaaaagtgtggtggccgtgctgctacatcccttctttcccaaagcaaagatcaggtgcctttaccgaagttagggcaaaatccctaagaacgatccggaagtccacc

SEQ ID NO: 146072 - DNA, 3349 bp, Zea Mays
ccgctgcatgcgccacatttcccttcccttccttgccctttgtcattgccaaatttacactccaccaatctttgtgtggaatggcgtccgcggtgacgccgcggtgagcgagtgcacacgcacgtaggaaccattggttgtgttggtgagctgatcggttctccggggatggcatcgtcgtcggggtacgcggatggcggcaccggaggtctaggcgacggagaccccccggtgccgtcgatgaggaagcaaccctcgcggatcgcgtcagggatgcgtcggctagcatccaaggtgtctgcggcggtgcccgagatgcggggcctcaagcgtacacagtccggtgcccagtcaggcttgcgcgggctgcgtttcctggacaagacgtctgccggcaaggatggctggaagaccgtcgagaagcggttcgacgagatgagcacggacggccggctgcagagagagaacttcgccaagtgcatcggtatggctgattcgaaggagtttgcaagcgaggtattcgtggcattggctaggagaagacacatcaatccggacgacggcgtaacaaaggaacaactgaaggagttttgggaggagatgacagatcagaacttcgattcccggctacgcattttcttcgacatgtgcgacaagaacggtgatggtaagctgacagaggatgaggtcaaggaggtcatcgtgctaagtgcctcggcaaacaagcttgcgaaactgaagaaacatgctgcaacctacgcctctctgatcatggaagagctggaccctgatcaccgcggctacatcgagatttggcagctggagaccctgctacgcgggatggtgaccgcctcagggccgacgaacatgggggcgtcagcatctctggcgaggacgatggtgccttccagccaccggaccccgctgcagcggcgcatgaacaaggccgtggacttggtccatgagaactggaagaggatatgggtgctctccctctggggcgtcctcaacatggccctcttcgtattcaagttcacccagtaccggaggcgcgcggtgttcgaggtgatgggctactgcgtatgcatagccaagggcgcggccgagaccctcaagctcaacatggcgctcatactgctgccggtgtgccggaacacgctgacgaggctgcggtccacggcgctcagcaaggtggtgccgttcgacgacaacataaacttccacaaggtcatcgctcttgcaattgccatcggatctgcaacccatacgcttgcacacgtcctctgcgacttccccaggctggtggcgtgccccaaggacaagttcatggagaagctggggcccttcttcaactacgctcaaccgacctgggcgaccctgctgtcgagcatcccggggtggaccgggatcctcctcatcctcataatgtccttctccttcacgctggcgacgcactcgttccggaggagcgtcgtgaagctgccgtcgccgctgcaccacctggcaggcttcaacgccttctggtacgcccaccacctgctggtgatcgcgtatgtgctcctggtcatgcactcctacttcatattcctcaccaagcagtggtacaagagaacgacatggatgtacttggcagtccctgtcgtgttctatgcctctgagagaagcatcagaagaattcgtgagaaaagctaccgcgtgagcatcataaaggcagcaatttacccgggaaacgtgctgtcactctacatgaagaagccaacaagcttcaagtacaaaagtgggatgtacatgtttgtaaaatgcccagacgtttcacctttcgaatggcaccccttctccatcacttcggctccgggagatgactacttgagcgttcatatccgtacgctaggcgactggacatcagaactcaggaatctgtttgggaaggcttgtgaagcagaagttacttctaagaaggctacactagcaagacttgaaacaactgttgtggcacatggtctggcagaggacactaggtttcctaaggtcttcatagatggtccctacggcgcaccggctcaaaactaccgcaaatacgacatccttctgcttattgggctcggcattggtgcgactcctttcatcagcatactcaaggatctcctaaacaacataaagtccaacgaggagatgcagagcatgcatgacaccgagttgggttgcagtttcaagaccaacgggccaggaagagcctacttctactgggttaccagagagcaaggctccttcgagtggttcaaaggtgttatgaacgacgttgccgagagtgatcacgacgatgtaatagagatgcacaactacctgaccagcgtgtacgaggaaggcgacgcgaggtcggccctgattgccatggtccagtcacttcaacatgccaaggacggcgtggatatcgtgtcaggcagcaagattcgaacgcattttgcaaggccaaactggagaaaagtgttctctgatctggctaatgcccacaagaactcacgcataggcgttttctactgtggatctccaacacttaccaagaccctgagagatctttcgatagaattcagcagtaccacgacgacccggttccatttccacaaagagaacttctaacaagcaatggcgccactcacatttcagtggccttggtagctttgtggaactgggagctaggcctgggcttgactggaccaagagcagtatgcttggtcaggtttggtgttggtatgcgcaacccagagaacagctgagcaaaaaaattcagagtaggaagttccatgtaggaaaatgataattgtaatgtaatttttttctctagccatgtctttagttgagtcacgaattgggacgtggtcaggtgggacctgattgctttagttcagttcgacaaggatgcagatgaacaccgtttctttctagacttctgctacaagcccatcaaacttattcatttttgtcggagaggaaattctccggccgagtggcggaacgcacccgccctaaatcctaagatggggagggttctaagcgttttgtctgtctgctacatgatcgatgaacacaagaacacacaagagcgtaataccctactccactgtgtgttgtattgagcttgagtgtatcagagtctaagtgagcgtgagagcgtgtgtcagtgtgagagtgtctgtcttgtaacgtcatgtgtcctcccttttatagctcaaagaggggcacgtacaaggatactgagcctcgacgtgtgggcccaggggcaaaatggaaggaaataactaatgcctataacgcctgggcgatctccgagcgccataatgttcgtagtcca

SEQ ID NO: 146073 - DNA, 2504 bp, Zea Mays
atggcatcgtcgtcggggtacgcggatggcggcaccggaggtctaggcgacggagaccccccggtgccgtcgatgaggaagcaaccctcgcggatcgcgtcagggatgcgtcggctagcatccaaggtgtctgcggcggtgcccgagatgcggggcctcaagcgtacacagtccggtgcccagtcaggcttgcgcgggctgcgtttcctggacaagacgtctgccggcaaggatggctggaagaccgtcgagaagcggttcgacgagatgagcacggacggccggctgcagagagagaacttcgccaagtgcatcggtatggctgattcgaaggagtttgcaagcgaggtattcgtggcattggctaggagaagacacatcaatccggacgacggcgtaacaaaggaacaactgaaggagttttgggaggagatgacagatcagaacttcgattcccggctacgcattttcttcgacatgtgcgacaagaacggtgatggtaagctgacagaggatgaggtcaaggaggtcatcgtgctaagtgcctcggcaaacaagcttgcgaaactgaagaaacatgctgcaacctacgcctctctgatcatggaagagctggaccctgatcaccgcggctacatcgagatttggcagctggagaccctgctacgcgggatggtgaccgcctcagggccgacgaacatgggggcgtcagcatctctggcgaggacgatggtgccttccagccaccggaccccgctgcagcggcgcatgaacaaggccgtggacttggtccatgagaactggaagaggatatgggtgctctccctctggggcgtcctcaacatggccctcttcgtattcaagttcacccagtaccggaggcgcgcggtgttcgaggtgatgggctactgcgtatgcatagccaagggcgcggccgagaccctcaagctcaacatggcgctcatactgctgccggtgtgccggaacacgctgacgaggctgcggtccacggcgctcagcaaggtggtgccgttcgacgacaacataaacttccacaaggtcatcgctcttgcaattgccatcggatctgcaacccatacgcttgcacacgtcctctgcgacttccccaggctggtggcgtgccccaaggacaagttcatggagaagctggggcccttcttcaactacgctcaaccgacctgggcgaccctgctgtcgagcatcccggggtggaccgggatcctcctcatcctcataatgtccttctccttcacgctggcgacgcactcgttccggaggagcgtcgtgaagctgccgtcgccgctgcaccacctggcaggcttcaacgccttctggtacgcccaccacctgctggtgatcgcgtatgtgctcctggtcatgcactcctacttcatattcctcaccaagcagtggtacaagagaacgacatggatgtacttggcagtccctgtcgtgttctatgcctctgagagaagcatcagaagaattcgtgagaaaagctaccgcgtgagcatcataaaggcagcaatttacccgggaaacgtgctgtcactctacatgaagaagccaacaagcttcaagtacaaaagtgggatgtacatgtttgtaaaatgcccagacgtttcacctttcgaatggcaccccttctccatcacttcggctccgggagatgactacttgagcgttcatatccgtacgctaggcgactggacatcagaactcaggaatctgtttgggaaggcttgtgaagcagaagttacttctaagaaggctacactagcaagacttgaaacaactgttgtggcacatggtctggcagaggacactaggtttcctaaggtcttcatagatggtccctacggcgcaccggctcaaaactaccgcaaatacgacatccttctgcttattgggctcggcattggtgcgactcctttcatcagcatactcaaggatctcctaaacaacataaagtccaacgaggagatgcagagcatgcatgacaccgagttgggttgcagtttcaagaccaacgggccaggaagagcctacttctactgggttaccagagagcaaggctccttcgagtggttcaaaggtgttatgaacgacgttgccgagagtgatcacgacgatgtaatagagatgcacaactacctgaccagcgtgtacgaggaaggcgacgcgaggtcggccctgattgccatggtccagtcacttcaacatgccaaggacggcgtggatatcgtgtcaggcagcaagattcgaacgcattttgcaaggccaaactggagaaaagtgttctctgatctggctaatgcccacaagaactcacgcataggcgttttctactgtggatctccaacacttaccaagaccctgagagatctttcgatagaattcagcagtaccacgacgacccggttccatttccacaaagagaacttctaacaagcaatggcgccactcacatttcagtggccttg

SEQ ID NO: 146074 - DNA, 550 bp, Zea Mays
aaagtttcaacaacacctgctacttgagccaacaaacaacacacagcttgtcctcgccattgctcacttgggagcatccaatccaacccacaacacttcgtgactgcaatatgaagctgctcgctggaggccagaggaggaggcagaggggattcggcaaggccctcaaggagcagagggccaggctctacatcatccagagatgcgtcgtcatgctcctacgctggcacgactgaccaaccgctgggatccacgccatggggaagcttcatccaaggtcggacgagctccgatccatcgtgtcttcgcctgacgactcatcgggtgccgaagtttggggggggggggggggggggggggggggggctcgtgctggtgccacaaatggttgccggctgctgtacatagagggccagtatagtgtagtactccgacaaaaagaggtggtagcagtaggattcactctggtgttcgtcgtcagtgtctaccgtgtcattgtgtaaccacatcggtgtgatggaataccaaatcaatcaaacatagaacaacc

SEQ ID NO: 146075 - DNA, 288 bp, Zea Mays
acccacaccaagagcaaaatcatacgccacgccttgtgagttctgtccaaggctgtgacagttcagattgtaaggatgaagcttgggagcccaagccgaaggacaggaggattcagcgaagccctcaaggaacaaagatcaaagctttatatcatctcgcggtgtgttgttatgctgatccggtggcatgactgacgaagaacttttttttttgctattgaattttgtttccttttcacagttcttggtgttttttttctgctactcctactaaacagatcgggaaat

SEQ ID NO: 146076 - DNA, 308 bp, Zea Mays
gcctcctgcgacggtcgcgcccgcgcccaccgctggtccacgccctccagcaactctagctccagcgccgggtcgtggcgccgcacgcagcaccacccgtcggtcgcctcgacggcgatgaagtccttgacgaccaggcgcgcgcaccgcccatacaacagcgatgtatcacggagcctgtccaacttgagcatgtccatggcacggtccatgctcagccgcgtcgacacggcggtgcactttagccacccgacgcggtacccgtgcgccagcacctgtggcccgtgcgcggccaccagctcctccgt

SEQ ID NO: 146077 - DNA, 323 bp, Zea Mays
ctggccgactcgtgtcgcgcatgcatgccattagtttgggctctttgccgacgagcgatgcgcaaggcgtgacgtcgacaagggcacgggttcccatgatggcacgtcggcgctacgcagattcggcgaagcgagacgcggagacagtcgaaccgcgtagatcaacggcgcagcatggggctgtccaaacacccacgcgacgccttggtcgggactgtgcaggtcgagtgaagcacgcgatgcggaggggattcggagctgccgcggtgggccggcaccgctgcgcagatcgagtcgacgctggctgcggacaagcgcacagg

SEQ ID NO: 146078 - DNA, 184 bp, Zea Mays
gctttgttcagttcgtgtcggtggtcgagtcgtgttgctggtttaggttgtatcttcgtcgtagttcaactgcaccttcgctgctatcccatccaccataacccagatcacaagtcgatcaccccattaatcggcttgccctaaccgccacgccgctttctagtcgtgcctccaaaaacataac

SEQ ID NO: 146079 - DNA, 2335 bp, Zea Mays
ggaagtttctagtttctgccccattttacgcaagcgacgacgttctcctccccgtacacaacacgcacgccatctctctcgaagcttccgcttcctccagccgccaccgacccgaacccaccccggacgcggcgcctcccccgcaccctatattgttccccgagctccagccgccaaggattggcgaaaggagccgggcagatattgaaactcgtttcagatcggatccgaggactcgagaaattgcagggaaggaatttgaggatggatttcgagctgcggcaggcgcgggagaagctggagcgcgagcagcgggagcggatgcagcgcgccaaggccaaagcggagcgcgagagcctggccaaggcagaggcggcgcgccgccaggaagcgctcgaggcgtcccaccgcgagcgacgactcgatgccgcacgggcccaggaagaggctgaccggacaatggaagaggtgatgcagctggggaaggggatttcattctcgcacatgtttgaggcacttcgatatgatggccctggggataagatcaagttgccaccatcttcgtttaaggagttgtctgatgaaggagctctcgataaaggtcccatgtacttcaggttgtcgaaggttagggacacagtcccaggtgctgctatggaacaagatgctgggacaacctgttgtggtgttcttgaattcacggcaagggaaggctctgctgaactcccgctgcatgtttggaacaacctgtttgggagtgacaccccagaggtccctctaattgaagtcaaatataccagtttgctcaaaggaacatatgcaaagttgaagccagaaggaggtgggttttcagatctccctaaccatagagcagtcctcgaaacagcgctccgcaatcatgcaacactatctgaaaatgatactgttgtggtaaactatggacagctgcagtacaagttgaaggttcttgaactgaagcctgcctcaagtgtatctgtcctagagacagatgttgaagttgacatcgtgggatcagattcggttttggacaacgaagatgaccaacatgtgcttgtgcctcttgtaattggaaatatagaatccagtgttgtggaagaaggaaagttcaggtactacaaattttcagttgaaggaaatgtgagtgagaaagtagcttctgggcatgcaaatatcgagattaaaatagatacggacgcgagcggtggtgacactgatatctatgtttcaagacatcctttagtatttccaactcagcaccgacatgagtggtcttctcatgaaatgggatcgaaggttcttatactcaaaccacgggatgctacattggtcagtggtgtttacagtattggagtttatggtttcaaagggacttctaagtaccagctctctgtagctatcaaggatgttagtggccaaaggattggtgaatatgctagtgcctcgggaagtgttgattttgattctgtgctgtgtagaaactgtaagcgccatatagccagccagtctgctcatcttcatgaggcatactgcatgagacacaatgtagcctgctcacatgatgggtgtggagttgtccttcggaaggaagaagcagcagatcatgtgcactgcaacaagtgcggacgagcttaccagcagagagaaatggaaaagcatatgaaagtcttccatgaaccgttgcagtgcccctgtggggtggtcctggagaaggaagatatggttcagcaccagtccttgacttgccccttgcgattaattgtgtgccgcttctgtggtgacacagtccaggctggtggagagccttctgatgttcgtgacaggatgcgaaacatgtctgagcatgagagtatctgcggatccaggacagcaccatgtgactcctgtggacggtcgatcatgcttaaggagatggagattcatcttattgctgtgcatcagaagagctaatcacctactgacgctgggctggtctgaacttgagcctctattgtcatttggtcaacagaagctgtgaactttaatgtgccattccagggttgttggattgaaaactacaccttgggactgggagctatatgtgattcgtaattcgtggtgttccatgggattaaacatactggtgttatctgtattttatttctctgtatacattatttataaatctgattttacattcggtattacctatttcctaagtgggtgttttgctgactaaagtttgttcacgtcacgtcaaaggtttgatttgaatatcaattatggttattaaatatatgtttaattagatttaataaatttgtctctgtttttagtc

SEQ ID NO: 146080 - DNA, 521 bp, Zea Mays
gctttcaatttctatttccttaacaaaacctcaggcaccttaaagacagcttggatgattggtttcatgaacagctagagaacttcttggatgatgattatcttgtgtttgattgccctaatatattctcaaatcatcttttcatgctttagttgtttcttaatagttgcacagtttcatctcactcatattcttgccacttacatgtatgtgacaaaacagacaatccgtcttttttattgcttttggcgttgtgcattatacatgtccaccaattatatacaaataccatttgtgggttacctctggtgtgtttaggtattcctcatattcctgacatttttttctgtctttaaatgtcatatcactattaaaaaattgatttttgttgtctaaaataccacaactacttttctaggtgcgagctacaatcaaagttaaggcattagtcatcatttgcttcacctcttctggataggctgcaagagtagtttggacaaagaaaaattgagactgcaaac

SEQ ID NO: 146081 - DNA, 180 bp, Zea Mays
tctacatgtaatttcagctcgtcgcgaaatgaaggaggcgagaaaccactaccacacgcggggctcctcgcgcggcggcggcggcaccgctgccgagcgcgacctggtgttacagtggggcaaccggaagcgcctgcgccgtgtcaaggtgcagcgccgcgacgaggccgccgccaccgc

SEQ ID NO: 146082 - DNA, 230 bp, Zea Mays
aagctggatcaccctgggttggcaaaactgatcgccgcacatgcacaccctccggcttacttgatgttctttgacttcttcgagcctccaaatcttgcagaaaagatacatgtcgaggaatggatcccttctatccagcaagtggttacgatggccagtgatctaggtctgtgtttgttacatatcttgtgttactcttagatactaaaataaatatatacttgaggggt

SEQ ID NO: 146083 - DNA, 345 bp, Zea Mays
atggggcccgctgcttctcacctagtggtgtcggtagggaacatggaggtggtattggtggcaggggctggatcacggcacaacaacgtcgttgggaggcgcggatgggggcgtagcgcgctggaggacaggccggtgggggagtccgacggctggagaacacgccggcgccggagggcagggcggcagaggactctgacagcgggcgtggtcgggggtgcagcgcatcggagggcaggccgacgggggagccgattactggagaacaggccggcagcggtggtgcgccctgcgcccctgtgcaggttgcgctcaggtgaagatatggtgtggccgtgtgggtga

SEQ ID NO: 146084 - DNA, 406 bp, Zea Mays
cataccattttgcacgatatctttgcagcaaaggctctccaatacctacaaatccttggggtagtacacagagatataaaacctgcgaatattttgctagacaaagatctccatccatatctagcagattttggcttagccatgtttcaaaaggatattaagcgtgtctcagttgagaactggaaatcatctggcaagcctactggtggtttccataaaaagaatatggttgggacactaatttacatggcaccagaaattttgagaaaggatatacatacagaaaagtctgatgtgtatagctttgcaatatctatcaagtaaggcgtctctcctctagaattgaatgtaaatgacatcatgctattcagcaacttcacccaacagtacaacatatgttattttt

SEQ ID NO: 146085 - DNA, 796 bp, Zea Mays
tttcaggcacacactgttcttgaaatgacatatactgaacaacaacttacagcagcaattgtttctcaaggattgcgtccagcacttgcccttcctgaatctggtgccccaccaactcttttgtcacttatccagcgttgctgggatcctgatcctgaaaagagaccatcatttgaagatataattgatgagctaaatatagttcaaaagcatatagtttcaaatgcttctgttccatcatctcctgtcagcaagactcaaaatggtaccatagaagtgcaccattatcaagaagcattgaactggttcaaccagggggagctttttgttaaaggatcaagtagatcagaccttaagaatctttggtctgattgttttgatcaatcttcagagtaccatccaacattaagttggggctcttttgcaacgtgtggtcgaagggaaaccatggaagacacccattttgtacttccccatgtgagcgaagaaaatgatgtttttgcctttggcatttttgatggccatagaggttcagcagccgctgaattttctgtccgagcagttcctggatttctcaagcaatttggtcagggtgcaagcccaactgacgctctttcagaagcgtttgtaaggactgacatagcatttcgagagaactaattctcaccggaagtcaaaaaggatattcaaaagattggcatcctggttgccacggcataacgcctgatagtgagaaaacaagcttttgtagcaaatgctgtggattgcgagcatccttgaccgtaagggcaaccat

SEQ ID NO: 146086 - DNA, 684 bp, Zea Mays
ttccatttgctgttataggatcatgttgctagttgcccaaatgaaagagaacgagtaacaaaggcggggactgaagtaaaatggcaaatagatacgtggcgagtgggttcagctgctcttcaggttacaaggtcaattggtgatgatgacctcaagccagctgtcacagcacaacctgaggttattgaaactgctttatcagctgatgatgagttcctggtgatggctagtgatggcctatgggatgtggtaagcaaccaggacgtgctgtcaataatcaaggacacggttaaagagcctggaatgtgctcgaagaggttggccacggaggctgcggagcggggcagcaaagacaatatcactgtcattgttgtctttcttcgccccgtctccacagctgagcgaatctactgagtcacctcccaaaacctattctcattaacttcaggtggccataccgcacgccttccgctgttaagtcgcaatttttgtattcgatccacatcggttctcaagaagaaaagaagctatactatacgtccattcttgtatttgtagatagaagaaacagcagcctctgcggcggctctttttttcaatcttttgaaacatttctcgtgtgtaaactatgcaagctgaatggatattgttggcatcgatttgagcgtcaatccctagaacgaa

SEQ ID NO: 146087 - DNA, 236 bp, Zea Mays
cctcccatccatggagcagcagccctccctccatggcgcccaccctctccaatggtggtgctcgcccctccctccctccttctccattgctgcagctccccttcgtggtggctgtcgctccccctgcagcagcccctcctctgctctccatggacgccagccatggcagccccctatgctgctgcgtgatggctggaggtggaggtagaagaagactccatgaggctatgattggt

SEQ ID NO: 146088 - DNA, 1681 bp, Zea Mays
gatcatctaatatccgataaagtttaacttaaatatcatctaatatccatcaaagttaatctatccatcatcccacacataagatcatctccattcacacgtacaaatagataatataacatagaaacagagtacaagtcccttcattataaactttgacactagactaaattgagtttgactccttttttacaagcttcatgtggagtgtcgttccatcttccttttccatgtcagcttcatatgttgcttccacttaacactctgcaagtaccaagtaataccaattgacacacggtttagtttacaccatgtaccaatattttacaactaggaaatatgcactgtatgcacaaagaaaaacccacagccaagaaatgtatgcacaaatatgcaccatatgcacaaatatcataaggctatgttccaagtatcctacaagctactttaccattcaaggatacagttatgtaaattggttgtctaatgatacaacatggacagatgtaaacaatatgaagatgttgctgctaccatgttcttggatggcaatatgaagctgctgtcacacaatatgtgctcatgtaagctgaagccaaaatcataaagctatgttttgttacatgcttaactaatgaacttaagtagtctttctaactaatgaacaataagttctaggccatacaattgccagattcaacaaaaattcaagttataaaactttgaatattttcttcacatgattaacaacgaacaacgtgattagaatgatcagcacacatgtaactaacaacactccacttatgacagcactccagttatacctgacagcagtccagtaaaaaaatgatcagtacacatgtaaaaaatgatcaatattttcatccaaagaattttcttctcttaaaaaaatgaaaataaattaacatcagctttttggttgctcgaagacacagcttaggaaaagtcccaaatgtgtgcatttttgtgattttgcagaaaagtaatattcctgctttcgaccttagggagcaccaatacaacttaagaaaaaagtgagactgttttggaagaaatattttaagaaaaagccaaatgatccaatgaaaaaggatagctagccacactttctacacgggatccttcctagtttcctagaaacaatatatatccaatcgattttattaccagagttaattttatgacggtgcttcctattgctagtagcaaagataaatttatgacggtacttcccattcgtactgagactctcgattctaatgtgcgctagccttgtttcaaagacctaaaaaaatctgaagtcctgctgtcccgtgacttaagcctggaagccgcaagcctcccaggcgcagaggcccatgcagtagcataggcacagcggcagctgcgaagtgagcgcgtctggcgaggacaaacgaatctgagcgagatctacaaggtgagcgagatctacaagaatccgagcgaggataaacgacgaaaacctagtagcagggatatgaagatgtgagcagagcccttacctgagaaggcgaagttgctagatctgagctgatgatgatgacaaaggagacgacggcatgctcggaagagttgtgaacagaaacgatgtcatgctcgggagagctgcctgatgtctgtaggccggcccaatatcccc

SEQ ID NO: 146089 - DNA, 405 bp, Zea Mays
ctgccgtagaggagggggagacgccatgggagggctgccaaggtgagggaggagcatgggagggctcggtcgccagctccatgggaggaggctgctgctgcatggggagctagagagagagatagagagagaggaagggagtagggaaagtggcatggggagagggagggagaggaaatggctggatggggaggtggcgtgggggatttaaaggagaagaaaaggggctggtttgattgcttagaagagaagcaaggggttgcttacaagagaagcaaaggttgcttagatgacaagcaaaatatgaagcaaagtaaattatttaaagggagaaaaatctctcgcgggatttgccggtgcggagaacagggagaaccggcgtctggcgaacgagagtccgaggaa

SEQ ID NO: 146090 - DNA, 419 bp, Zea Mays
atctgttacaatcctatcctatctattaggaacactaacaaactcgaatctagaataggtaacagtgatgcaagattcggcaagtggaataaaaaaataggaggaaaaactcacgtgggttgtgttccttaagtggccgaatagataagccttttatttgctattctttttttcctattttttttatttctcgatttaattatcccaattgaaatctgattttaaattttgaaaccatatttatatgcacaaccaaaacaccaacatgaatgcaaatattttacacttatttactccttatttactttgctcaaataagtatttgtatgcatgaaatgtaataagcatggaattcacataattatataacccaataggagtaatttatatagaataactcactatccaatttattgtag

SEQ ID NO: 146091 - DNA, 677 bp, Zea Mays
tgtcgccggaacatcgctgaccgcgcgctaccagcaagcctttcaggcgatgggttgcgacgtgacggcggtggcgggcgacacggcatttcaggctggtataaggagcatcgctcatgcagtggcaaactaaactcccgctgatcgccattttgcgcggtattacgcccgacgaggcgctggcgcatgttggcgcggtgattgacgccgggttcgacgcggttgaaatcccgctgaattccccacaatgggagcaaagcattcccgccatcgttgatgcgtacggcgacaaggcgttgattggcgcaggtacggtactgaaacctgaacaggtcgatgcgctcgccaggatgggctgtcagctcatcgttacgcccaatatccatagtgaagtgatccgccgtgcggtgggctacggcatgaccgtctgccccggctgcgcgacggcgaccgaagcctttaccgcgctcgaagcgggcgcgcaggcgctgaaaatatttccgtcatcggcttttggtccgcaatacatcaaagcgttaaaagcggtattgccatcggacatcgcagtctttgccgttggcggcgtgacgccagaaaacctggcgcagtggatagacgcaggttgtgcaggggcgggctttaggcagcgatctctatcgcgccggggcaatccgtag

SEQ ID NO: 146092 - DNA, 333 bp, Zea Mays
gttccatacaaccttccaccagctctttgcatgaaatatgaatttattttcttgtgtcgtgtaatacctggtctggatcatcctggaacaaagatcgatgtgatgatgagacccctgattgaagaattgaaaattttgtgggaaggagtcgaggcgtacgattgttacaagaaacagaagttcaacctgagagccgcgtttttatggtctattcatgattttatggcttatggtatctttgctggatggagttgtcatgggattttgacatgtccgatatgcgttgaagacactttatgctttcgactaaagtttggtggaaagatatgttac

SEQ ID NO: 146093 - DNA, 129 bp, Zea Mays
ctctctctctctctctctctctctctctctctctcgctctctctccctcaccgtcgcgccgaaccgccagagctccgccaccgagccgccttgctggaccgtccgcgctcaccgtccgctgtcgaccac

SEQ ID NO: 146094 - DNA, 1533 bp, Zea Mays
cagaaaaccacgcgccctgcaggggttcttgccctcgcctggcttatataaacccagcccctcctgcccccctactacgcagtgcatacatcctcaccacactgcaccatcattgcattagcaagcagtgaagcacaaagcacaaacaaagcaagccgatcgaattaataggtgcagcatagtgctcgatagcttgctcagcagcaagcaagcaagctaggtagccgtgtgaggttggtcgatcgacgagatgaagaagggagcaatggcctcattggtccctctggttgttgcgctcctcttgtgcccgtcgtcgtcgctggcaatggcatccggcgccggccctgcgcagtgggggaagaagctggacccgcacttctacgaccagtcgtgccctcacgcgcagcacatcgtggcgtccatcgtggggaaggcgcaccaccaggacccccgcatggccgcctccctcctccgcctccacttccacgactgcttcgtcaagggctgcgacgcttcgctgctgctggacagcagcgggtccatcgtgagcgaaaagcggtccaaccccaaccgggactccgccaggggcttcgaggtcatcgacgagatcaaggccgcgctcgaggctgcctgcccggccaccgtctcctgcgccgacatcctggcgcttgcagcccgcgactccaccgtcatgactggcggccctgggtggatcgtgccgctggggcggagggactcccgtggcgctagcgtgcagggctccaacaacgacatccctgctcccaacaacactctccccaccatcatcacaaagttcaagctccagggcctcgacatcgtcgacctcgtcgcactcctcggtagccacaccatcggcgactcccggtgcacaagcttccggcagcgcctgtacaaccagacggggaacggcctcccggacttcaccctggacgcgtcctacgcggccgcgctacgcccgcgctgcccgcggtcggggggtgaccagaacctcttcttcctcgaccccgtcacgcccttcaagttcgacaaccagtactacaaaaacatcctcgcctaccgtggcctcctcagctccgacgaggtgctcctcaccggcagcggagccaccgctgaccttgtcaagctctacgccgccaaccaggatatcttcttccagcacttcgcgcgctccattgtcaagatgggcaacatctcgccgctcaccggggccaatggcgagatcaggaagaactgcaggagggtcaaccacgcctgatcgattattatgtgacccctctactgtttggttgcttggtttgttgattcagtggccccagcttcctgaggtttattatttgtttccttcaaactctatggatttcccttgtccatctgttgttttctttcaaaattgttgaccttgttagaggaatccatttcaattgcagcacggattggaggtgcattataattaatgtttgttatgtatcagtttccggtcaagaaaatttggtgaataaactagaattttta

SEQ ID NO: 146095 - DNA, 2917 bp, Zea Mays
ccatctcccatcacctcattccctgtctgccatcccgagcgattgtctctgtgactaggccatggcttctaacagcggcggcaactccccaccctccgtaccgtcgtcggatggtcgaccgtcgagcccgctcccggtcacccactcctccccatctcagcccacccgccgctccggtgggcgccgccgccgcggctccgccagcccttatgcttcgtccccatccctctgggggttcgagacgccgccacaccctggccgccgcacgccgtctggtgccggggctggcgccgcccggcagcagcgtcagaatttgtctggccggttcccgccgacgccctccaccccaatgtctacagatgacgtcccgccgtcctccgaagccggggacgacgagacagatggcggcgacggcggggtcgacgccaccccggtcttcgtctggggcaccaacatcagcgtgcaggacgtcaatgccgccatcctccggttcctgcgccacttccgggacccgcgtgacgccggccgcgtcgacccggtcatggacgagggcaagtacatgcgctccatccaccgcatcttggagctcgagggcggggagtcactcgacgtcgacgcgcacgacgtgtttgaccatgactcagacctctacagcaagatggtccgctacccgcttgaggtgctagccatcttcgacattgtgctcatggacctcgtcgcgcgcatcgagccgctcttcgagaagcacatccagaccagggtctacaacctcaagtcgtccatttgcttgaggaatctcaacccatctgatattgagaagatggtatccatcaagggtatgataattagatgcagctcagtcattccggagctcaaggaggctgttttccgctgcttggtttgtggtttctactcagagcccgtcatggttgatagagggagagtaactgagccacacatctgtcagaaagagcaatgtaaagccacaaattctatgaccctagtgcacaaccgatgcagattttcagacaagcagatcataaagttgcaggaaacaccagatgagatacctgaaggtggcactccacatacagttagtgtcttgatgcatgataagcttgttgatgctggaaagcctggagatagagttgtgataactggtatatacagggctatgagtattagagttggaccaactcaaaggactgtgaagtctatattcaagacatatatcgattgccttcacataaagaagacagacaagtctaggcttcatgtggaggataccaaggatattgataattctaatgctagcaaatgtactgaagaggattttcttagtgataaggttgagaaactaaaagagctttcaaagttgcctgatatctatgacagattgactagatcattagctccaaacatatgggagttggatgatgttaaaagaggcctcctttgccagctttttggcggcaatcccttaaagcttccttctggagctagcttccggggtgacatcaatattttacttgtgggtgatcctggaacgagtaaatcccagcttctccagtacatgcataaactgtctcctcgtggtatctacacaagtggcagaggaagttctgctgttggtcttactgcatatgtcaccaaagatcctgagactggtgaaactgttctagaaagtggagcactagttttgagtgacaaaggtgtttgttgcatagatgagttcgataagatgtctgataatgcacgaagcatgttacacgaggtgatggaacagcagaccgtatccattgcgaaggctggaataattgcatctttaaatgctagaacatctgtcctggcatgtgccaatcctaccgaatcacgttacaacccaaggctttctgtaattgacaacattcacttagccccaactctactttcaagattcgacctaatttatcttatcttggacaaggcggatgagcaaactgataggcgcctggcaaagcatattgtttcgttgcattttgagaatccaaatttagaggagctcgaggtgttggatctgcagacactagtttcctacataagctatgcaaggaagtatattcagccacagttaactgatgaagctgcagaggagttaactcgtggctatgttgagatgaggaaaagagggaatagccctgggagcagaaagaaggtcataactgcaactgctagacaaatagagagtttgattcgtctaggtgaagcattagcccggatgcggttctctgaagtggtcgaggtgcgagatgttgtggaggccttcaggcttcttgaagttgccatgcagcagtctgcaacggatcatgcaactgggacgattgatatggatctaatcatgacggggatatctgcaagtgaaaggcagagacggaacgaccttgttgctgcaacccgtaaccttatcgtggagaaaatgcagctcggagggccttcaatgcatatgattgagttgctggaagaactcaggaagcagagctcaatggaaatccatctgcacgaactccgcggtgctcttggcactctgatgactgaaggtgcggttgttatccatggagaaaacgtgaagagagtttgatgttaactgccatctgcggtgatgcttctgtaagctcagtctgccgtttccttcaacagtcaaggttgcgaagatctgaacaactgtagggttttagctgccagagtgctaactaatgtggtctgagatttgttccagattgtgtaactccctaacagcggtgttgctagctgtagatttttttaatgaaatatcaaaaaattagttcacgaattgtaaatggtaattatgattggaattaaaaaaattatttaacattatgtgttacccatcacgtgaatcaaatagcaccttatattc

SEQ ID NO: 146096 - DNA, 1803 bp, Zea Mays
cttggcatacagttcttgtttgtgcaaactgtcaaacttacttgttttgcttcttttacagataactggtatatacagggctatgagtattagagttggaccaactcaaaggactgtgaagtctatattcaagacatatatcgattgccttcacataaagaagacagacaagtctaggcttcatgtggaggataccaaggatattgataattctaatgctagcaaatgtactgaagaggattttcttagtgataaggttgagaaactaaaagagctttcaaagttgcctgatatctatgacagattgactagatcattagctccaaacatatgggagttggatgatgttaaaagaggcctcctttgccagctttttggcggcaatcccttaaagcttccttctggagctagcttccggggtgacatcaatattttacttgtgggtgatcctggaacgagtaaatcccagcttctccagtacatgcataaactgtctcctcgtggtatctacacaagtggcagaggaagttctgctgttggtcttactgcatatgtcaccaaagatcctgagactggtgaaactgttctagaaagtggagcactagttttgagtgacaaaggtgtttgttgcatagatgagttcgataagatgtctgataatgcacgaagcatgttacacgaggtgatggaacagcagaccgtatccattgcgaaggctggaataattgcatctttaaatgctagaacatctgtcctggcatgtgccaatcctaccgaatcacgttacaacccaaggctttctgtaattgacaacattcacttagccccaactctactttcaagattcgacctaatttatcttatcttggacaaggcggatgagcaaactgataggcgcctggcaaagcatattgtttcgttgcattttgagaatccaaatttagaggagctcgaggtgttggatctgcagacactagtttcctacataagctatgcaaggaagtatattcagccacagttaactgatgaagctgcagaggagttaactcgtggctatgttgagatgaggaaaagagggaatagccctgggagcagaaagaaggtcataactgcaactgctagacaaatagagagtttgattcgtctaggtgaagcattagcccggatgcggttctctgaagtggtcgaggtgcgagatgttgtggaggccttcaggcttcttgaagttgccatgcagcagtctgcaacggatcatgcaactgggacgattgatatggatctaatcatgacggggatatctgcaagtgaaaggcagagacggaacgaccttgttgctgcaacccgtaaccttatcgtggagaaaatgcagctcggagggccttcaatgcatatgattgagttgctggaagaactcaggaagcagagctcaatggaaatccatctgcacgaactccgcggtgctcttggcactctgatgactgaaggtgcggttgttatccatggagaaaacgtgaagagagtttgatgttaactgccatctgcggtgatgcttctgtaagctcagtctgccgtttccttcaacagtcaaggttgcgaagatctgaacaactgtagggttttagctgccagagtgctaactaatgtggtctgagatttgttccagattgtgtaactccctaacagcggtgttgctagctgtagatttttttaatgaaatatcaaaaaattagttcacgaattgtaaatggtaattatgattggaattaaaaaaattatttaacattatgtgttacccatcacgtg

SEQ ID NO: 146097 - DNA, 161 bp, Zea Mays
gtgctcaaacctttggtgaaccttttggggcttttctgaaatctttttggggttactttcttactattatttgtaggttattaagtgtactacaacttttatatttggcccaagccatgatcataaggttttcatgaccttttggtcatacttacatctag

SEQ ID NO: 146098 - DNA, 922 bp, Zea Mays
ctctgcgccgccgctcgcctgcacttctacgtgtgaaacgcgtccgcgcctatggcctgcccgtgcccagctgccccctctccacgcgagcctctctaggcgtcaagcgtgccattaagcaaccgtggcccccacccctcctcggctctctgcgtgagcacaagcacgtctctgtagcccatgttcaacggaagcgaaaggtgtcagtgctagaggatttggaaaggcgctgtttgataagaagacaaacccgtgtcctggcaagtggatacctgtagcccgaaacaggtcacccatcacattcgtcatgtgcaattctctcatgccgtgcagcccattaattccactgaagaaaacatagaatgtgcatcataatgtcacagaaggcctaaaatgttatagtgtgcggccattgctcacgaggaggcagagtgccgtgttgccgagtgccactggaccacatacgattgttgatggtaaagaagttgtgaactttgcatcagcaaagtacctcggtttaattggcaacgaaaagattattgattcttgcatcagttcattggagaagtatggtgttggttcttgtggtccacgtggcttttatggaacaattgatgtccatcttgactgtgagtcaaagatagctaaatttttggggactccagactccattctttattcatatgggatttctacaatattcagtgtgatacctgccttctgtaagaaagaagatatcatagtcgctgacgagggtgttgactgtttggtgaaatgcttgggacatgacggccagcaacaatggagtctgggaacaacgataggaggggtgcggcagcggcacccgatgtatcccttgaacaatctggttttgattgatgcagatcaatctgatgtacactgtattccgcacttgcactga

SEQ ID NO: 146099 - DNA, 1167 bp, Zea Mays
ccgccggcagctaattcgacgtccccgtaccactacgcctatccctactaccggtaccagcaccctgatccgtcccgcggcgtcgacgggttcttccctgccgccgcagaagccatgctggaggcggtgaaggtggacccctcgtggtccagggtcgagtcttcgaggtcggtctcagttcctgtccgcttcgtcggttccgacccggagccggtgcgcagggcggccaggatgccaccggcggcggtgctgaggaagcgggcgccgtcgtcagaggcggcggtgattaggctgcaggccgcggcgcgcgggttcatggcgaggaagtcggtgcgtgctgttcgtgaggtggagcgtgaggcggcggaggtcggggagaaggttgcgcgtgaggcagaggcgctgcgcggggacgcgagggcgcggatcgccgtcggggaggcgctgatgaagatgatgttgcgactcgatgtggtgcgcgacgcgcgtgaataccggaagagggtcaccaagcgggtcctcgcgctgcaggatgttgttgatgccctcgaaccaaagtcggcgctgtattcggaggtcgtggcggaggagaacgagtctgaggtgacgtccgagatggcggacgacggcgcggaggcggcggagatgccggtcgccgcggagcacagcggcgggattgaggtgaatgcagcggctgagacggttgccaatatggaggtggacgggggtaaagctaacagcgaggcggtgccagaagcggtgaaggaatccgaaaataagcaggacgacatgcacattaatgacgaccagacggaagtctccgatgagggcaaatggaagatggtggcggatgaagcggagcgtacaactgaggcgacgaggtccacggaggcgctcccgcaggcaccgatgacgagcgaggtgacgaggatgacatgggaggccggagctgccgacagcgtcctggacactcggaaggttatggagatggtcgaggccctgtgcgggcagaacacgcagcattgtgcggtgatcggggctctggcggagcgtgtgggcgcgcttgaccgtgccgtgcggctggtggagaacgccgagcgccgtcggcggcggggcaagaagctgaagaaggatgggaaggggaacaacaggtgctacaccaattga

SEQ ID NO: 146100 - DNA, 1872 bp, Zea Mays
agcacgatcacattacccatgtcgaaggctctgtcgcgcattccgtcgagcacattaacctcgctcctcccccgctccctcaacccccacgtcgccgtcgtcgacctcatcgccatccacctcaccgccgtcacggacgacgccaagcccgtaaacttcacctatctgctcccctatctcggccacgacgagctcactgctgtcgttctgcgcgcaggccactcccaaccgctccgaaccctccgtttcctcctcgcactcccgccaccgctccagccctcgcctccccaccttgcattccttgcgcactcgctcgcctcctcccgcctcttttcccacgcgctcgacgcgctctctcacctcatccgcctccacccgcggcacgacctgctgcccacgctgctcctcgcgtccgccaccgcgccgcacccttccctcccgggcctccttgtcaaggctctccttcgccacgcgcgcctccgggacgcgttccgctccgccctccgcgctacggccgccggcgcgccccccgacgccgctgccttcaacgcgctcctcgccgcgctctcccgcgcgaaccggttcgatgagctctgggccgcgcgcggcgccatggcgcgcgccggggtgcggcctgacgcccgtacgttcaacatcctcgtcgccgcgctgtgccgcggcgaggacgctgagcgcgcgtatgggtttctcgaggagctggaggagcaagggttcgagccggacgtcgtgacgtacaataccctccttgcgggctactgccgcaaggggaggctgcaggacgcgctgcacttgtttgacgtaatgccgcacaggcgcgtgccgcctgatttggtctctcacaccatcttgatggacgggctgtgcaaggcctggaggctgaaggatgctcgtcggatgtttgacaggatggtacatggggggttgcgccctgacgctgttgcttatagtgttctgatcacagggtactgcaacgagggacaactaaaggaagcgaggtcgctgctgatggagatggctgggagtgggctcttggacatagctttcgctctcagggttgtcgttcagggtcatgtaaaatttggaaagctacttacctgcttgaacatggtggcaccactaaggaaatatggtatcgtcatcccatcacagagttatagctgcttgattggtgcattgtgtgaggatatgcgccctaatgctgcgaggggcttgctgcagtggatgatagaggacgggcactgtcctagtttgcagatgtacaatatgattgtggattgcttctgtcgatgtgataatccaaaggaggctttggatgtgaaggttgagatgacctctagggaagtgaaaccgaactataacacttaccagacactcataatctgcctttgcagattgggaaagagcttgtcaggtcagtcagtaatggtggagatgattgagtccgatttccatccaaatgaggccatttgtactgccttggtttgtggcttctgcaaggaaggcgaccttgatagaggagaactaattgtgaagttgttcgcgctcgattttcagatccgctgtaatgagagctacactgcattgatgaggacttactgcgagactaggagcacagcagactcactagcactgcaggaccggatgttagagctgggttttgttccaaacagtgagacttgtcgatctattatctatggactttctagaagctctggttgagttgctgtcttgctaacatctgttacagaaggcaccagcttgaatcttattcttgaattatctacattattgcttaatgtgcgtgtatgatgcacccatttcccatagtgacggtgttccaaggccagactg

SEQ ID NO: 146101 - DNA, 115 bp, Zea Mays
gaggtaaagtctaaaaaggaatataccaggagtgcattagactatctccagttgacttcctatcttactccctatttcaaacagtgcaaaacggtactttgcacggtaaacagtg

SEQ ID NO: 146102 - DNA, 287 bp, Zea Mays
ttttttcttttatctacttctccagaaccgtgaaattttgtttcattgccatagtggaaattgcagctgcaatgcgtgagggatggttgtcgggggtgtttccctgactatatatgccttaagatatttccatgaggaggcaatcaatccctgacatcatgcctcatcattgggtaagaatagtacttgttttattatatttatctttcatactctagaactgttgagctcaggtatgagtactccttttttggacaggagagaggatactactctacaactttcac

SEQ ID NO: 146103 - DNA, 1130 bp, Zea Mays
ccggtgcttggacgccatcgagctgttggtttggggaggtgtggctgttcacgcgtgaacaatagccgtggtgaacagtaatgttgatgaaccttagtaaccgggaaatgggaacttggccatgttcctcgttccgggaacgttcgttctgttctaggaacgtgggaacaatctcgttccagtagtgttaaatcctagttttagtagtgtatcgcgtatcacgttctcgttcctcgatcccatcgatccaggaacctggttactaagtgatgaacagtatcatcggtgaacaatatcgtgggtgaacagtgcacgtggtgaatagtaatactgataaacagcatcgccaatgaatagtatctcggatgaacagcacacggatgaacaatatatgagttgggggagcactggcaagatggggctatatatatggctgagatagcagcctcaaactctatccaagactaacaacctgatcctaacaaactctatccgatccaacaaactctattagatctaacaaactaagcaaattaacaaacggcggtatgggatgccagccataacaccaatgttgaaacaaaaccttgtagctagccaattatacttataccaattaataagttagagctaatgccaaaaaagaagaaataaaatcagtaagcatacaacttgcaacagggctgtggctgtgctgcttggtggaactgactcaacaccacaattttcctccaactcaaaataatattgaagatatgttagtttataaagtaataagttacaccatctctgtcagatttccagcttcacataagcacagtatatacaaaaaatatcacaatgatcatggtagaatactatattattgccatgatactccctacgatttagcaaaaattagaagatgcaataaagtgacttgctgtttgtttcaatttaacatgaacctaagaatgtaaattcaggtcccagctaaaaatataaagaaactagtcaaatgcacgtacattgctgcagcttctatatataagtagattttgtgtaaataaaacacaaaaatgtatgtgtcctgttggtaaggtgactgtgaatatgaagtcaacaaccaaggttcaaatcactagtgcaca

SEQ ID NO: 146104 - DNA, 666 bp, Zea Mays
atggagaacctttgtaggctacacgggtggatgacaggagctggagggcgtcggtgcacaggtaccgggccggagagacgaggtgcgcgcacttccggtagacggacgcgcagctcctcgccgacggccgactccgcgtggcactgcagcagcttctgcttccgccgcatcagcgactttgccaagaccgcgtggcactggacggtggaccacaccggcagctgctggggcctagtggtgggggtagtgggggcacataccagatctacggaggcgacaaatgaatcgaactccgcgtggcactacagcagcttctgcttccgccgcatcagcgatttcaccaagaccgcgtggcactggatggtggactgcaccggcagccgctggggcctggtggtgggggcggagagcggcaggacgactgagtccaaccccttcgcggcgcgtgccgtgcggatccacctccgcaaagtgcgcgactcgcaggccaaggcgtgtggcatcccctacgaaaagaagaagaagcgcaagcgcgcgcagcaggctacgaagccttcgacgagcttgtctactgctgccgccgggagcggcagggctacaacagcagctgctgcagcggcccctgctcaggctggagggagtagcgctgcaccgagctccacttga

SEQ ID NO: 146105 - DNA, 286 bp, Zea Mays
cgaggaaactagtgagtttgatgttttggtagtgggccttgatatcctcatagagtctccaaacaacattgtgtcctcctggggattgcctgccataaagacaatgccaaccctgcaattggaaccttagcaaggcattgtacctgaccacgacaacggtcttcttgaggaaatgtgcaaggggctacccataggtgtgagggaacacatggctgatcacatgagcgtctgacgagtcagttgcaattgcgtcgtcaccatactccaccctgacagtagtgccctg

SEQ ID NO: 146106 - DNA, 83 bp, Zea Mays
tcgtagagtgcacacagcatgtctccactcaccacactacatgcgtattccaggcagcacttcaccacactctgtcatcctcc

SEQ ID NO: 146107 - DNA, 1094 bp, Zea Mays
gatctggcgagccactgtagcctacgctaccactgtagctgctttagggctcaccgttgcatgagatagcgtcgtaccgtggccgcttaacaaaggggagggggaggtcgcggcagccgttgaaagcgagcagctcaacaccatgtcgactcccgcgcttgcgactgctgccgagggagcgacgcgcatcatcctggtgcacggcacgggccacggcgggtggtgctggtaccgggtcgccacgctgctccgcgccgcgggacaccgcgtggacgcgccggacctcgcggcgtcgggcatcgactcgcggcagctccgcgacgtgcccaccttcgaggactacacgcggccgctgctcgacgcactccgggcgctcccgccgggagagagggcggtcctggtgggccacagcttcggcggcatgagcatcgcgctcgccgcggagacgttcccggagaaggtggcggccgccgtgtttgtcaccgcgttcctgccggactgcaccaacccgcgctcgcaggtcatcgagaaggttaccgtgtcagactggatggacaccgtcacggatgcagagcacgttccagcctcggtgttcctggggcctgaatttctgcgccacaagctctaccagctgagcccaccggaggactacacgctgtcccagagcctggcccgggtgagctcctactacgtgcccgacctgcagagccagacgccgttcagcgaggccaggtacggcgcggtgagcaaggtgtacgtggtctgcaagcaggatcaggccatgaccgaggcgtaccagcacacgatgatcgccgcctgccccgtggcggaggtgagggagatcgccgacgccgaccacatggccatgttctccgcgccggctgagctcgctggccacctcgcccacatcgccaacacgtacgcttgataccagtaccaatgttttgtaagaaacgtctcccctggcgaaaatggaaaatactccgttaatactgtacttcacaggccgtttttaaaatattgttgcgagctgccaagaatggaaatgtaatattaagtctactatataaaatgctactttctatggtttcaca

SEQ ID NO: 146108 - DNA, 117 bp, Zea Mays
aatcaccctggtaactggaatctcaagtgccaggcaagttgtgcccttgatcacttacttttcccagccatgttcttattaattttaatgatctgcataggttaattttgatgggag

SEQ ID NO: 146109 - DNA, 101 bp, Zea Mays
gtttcattttggggtatggtggaaccgagcctctccactatcaatttattgttgcttgaattgattctatgtaagatagaggtactctaaaaagaaaaaaa

SEQ ID NO: 146110 - DNA, 2163 bp, Zea Mays
caagctcatcagcattcgatcgctccagctagctgcagacccataccaagcctgtttgatctctcagcggcagttctcttgtgttgctaatatatataattcgtccactaataatcagttcaaaccaatggacggcaagaaggtgcaggagagggcagcatggtgcgttagcgacggtggcggcaacctagtgcaggatgccgtcgactacaggggctgcagggcggacaagtccagcacgggcggctgggcgtcggcggcgctcgccgttgggatcgagctgtgcgagcgcctctccaccatgggcatcgccgtcaacctggtcacgtacctcactgccaccatgcacctgcctagcgccgcagctgccaacgtggtcaccgacttcatgggcacctctttcctcctctgcctacttggtggattccttgccgactccttcctcggacgatacctcaccatcgccatcttcgccgtcgtccaagccatcggcacggggctcctcgcagtgtctacagaggtgaggcagctgaggccgccgccgtgcggtcccggcgcggctgggccgtgcgagcaggccacggggctccagatgggcgtgctgtacgtgtgcctctacctcatcgcgctcggcactggcgggctcaagtccagcgtctcgggcttcggcaccgaccagttcgacgagcgcgacgcacgcgagcgcgccgccatgggccttttcttcgaccgcttcttcttcttcgtcaccttcggcacgctcctcgccgtcaccgtcctcgtctacgtccaggaccacgtcggccggagctgtgcctatggcatctgcgccggcgccatgctcgtcgcggtcgccgtcttcctatcaggcaccaggcggtaccgctacaagcgcagctccgggagccccatcgtgcacatcctccaggtcctagttgctgccacccgaaaacggaacatcgtcatgcagccactcaccgccgccgcgctctacgaggaccaccctgagcacgcgcgtatcccccacaccgcccagttcccgtgcctggacagggcggcggtgatggctggcgacgacgacaacgaggtgggccacgacgggcggccgacgatgaacccgtggaagctgcgctccgtgtcccgcgtggaggaggtcaagatggtggcccggctgatgccggtgtgggctacgaccatcctgttctggaccatgtacgcgcagatgatcaccttctccgtggagcaggcgacgaccatggaccggcgcatgggcgggttcgagatcccagccgcctcgctcaccgtcttcttcgttggcgctatcatgctcactctcgccttctacgaccgcgtctttgtcccgctctgccggagcctcatgaccggccggcagggatttactaacctggagaagatcggaatcggcctggtcctctccacattcggcatggctgctgcggccatctgcgagaaaaagcgcctcgccgtcgctgccacgagtgtcgccgtagggcatgggtcgctgcccatcagcgtgttcatgctgacgccgcagttcctgctggtgggctccggcgaggctttcatctacacggggcagctggacttcttcatcatgcggtcgcccaagagcatgaagaccatgagcacgggcctcttcctcaccacgctctcgctcggcttcttcctcagcagtgcgctcgtctcgctcgtcaagagctgcacgcggtggctcggcgacaccatcaaccacagccgcctcgactacttctactggctgctggccgtgctcggcgttgtcaatctcgtcgcctacatcgtctatgccatgtgggccgcagcaccggccagcagtcaggcggagcagccgcagcacgcgatggccgcggacgagaaatgctagcaagatctatcaactaccaatcgacctcagctgctgtgctgcacccatcgcttaataactatcagaggcacacctatacgcttaccaatttagaggattttatagttctgatgcgtggatgcagtgacgacatgatttccctacatactaaaacaagttctcctctggttattgaaaaagatgaaaaaagttaatatgttttttcttgtctaatcatatattcatgtaaaacaatgctctaatgggttttgttagaggtc

SEQ ID NO: 146111 - DNA, 2151 bp, Zea Mays
caagctcatcagcattcgatcgctccagctagctgcagacccataccaagcctgtttgatctctcagcggcagttctcttgtgttgctaatatatataattcgtccactaataatcagttcaaaccaatggtgcaggagagggcagcatggtgcgttagcgacggtggcggcaacctagtgcaggatgccgtcgactacaggggctgcagggcggacaagtccagcacgggcggctgggcgtcggcggcgctcgccgttgggatcgagctgtgcgagcgcctctccaccatgggcatcgccgtcaacctggtcacgtacctcactgccaccatgcacctgcctagcgccgcagctgccaacgtggtcaccgacttcatgggcacctctttcctcctctgcctacttggtggattccttgccgactccttcctcggacgatacctcaccatcgccatcttcgccgtcgtccaagccatcggcacggggctcctcgcagtgtctacagaggtgaggcagctgaggccgccgccgtgcggtcccggcgcggctgggccgtgcgagcaggccacggggctccagatgggcgtgctgtacgtgtgcctctacctcatcgcgctcggcactggcgggctcaagtccagcgtctcgggcttcggcaccgaccagttcgacgagcgcgacgcacgcgagcgcgccgccatgggccttttcttcgaccgcttcttcttcttcgtcaccttcggcacgctcctcgccgtcaccgtcctcgtctacgtccaggaccacgtcggccggagctgtgcctatggcatctgcgccggcgccatgctcgtcgcggtcgccgtcttcctatcaggcaccaggcggtaccgctacaagcgcagctccgggagccccatcgtgcacatcctccaggtcctagttgctgccacccgaaaacggaacatcgtcatgcagccactcaccgccgccgcgctctacgaggaccaccctgagcacgcgcgtatcccccacaccgcccagttcccgtgcctggacagggcggcggtgatggctggcgacgacgacaacgaggtgggccacgacgggcggccgacgatgaacccgtggaagctgcgctccgtgtcccgcgtggaggaggtcaagatggtggcccggctgatgccggtgtgggctacgaccatcctgttctggaccatgtacgcgcagatgatcaccttctccgtggagcaggcgacgaccatggaccggcgcatgggcgggttcgagatcccagccgcctcgctcaccgtcttcttcgttggcgctatcatgctcactctcgccttctacgaccgcgtctttgtcccgctctgccggagcctcatgaccggccggcagggatttactaacctggagaagatcggaatcggcctggtcctctccacattcggcatggctgctgcggccatctgcgagaaaaagcgcctcgccgtcgctgccacgagtgtcgccgtagggcatgggtcgctgcccatcagcgtgttcatgctgacgccgcagttcctgctggtgggctccggcgaggctttcatctacacggggcagctggacttcttcatcatgcggtcgcccaagagcatgaagaccatgagcacgggcctcttcctcaccacgctctcgctcggcttcttcctcagcagtgcgctcgtctcgctcgtcaagagctgcacgcggtggctcggcgacaccatcaaccacagccgcctcgactacttctactggctgctggccgtgctcggcgttgtcaatctcgtcgcctacatcgtctatgccatgtgggccgcagcaccggccagcagtcaggcggagcagccgcagcacgcgatggccgcggacgagaaatgctagcaagatctatcaactaccaatcgacctcagctgctgtgctgcacccatcgcttaataactatcagaggcacacctatacgcttaccaatttagaggattttatagttctgatgcgtggatgcagtgacgacatgatttccctacatactaaaacaagttctcctctggttattgaaaaagatgaaaaaagttaatatgttttttcttgtctaatcatatattcatgtaaaacaatgctctaatgggttttgttagaggtc

SEQ ID NO: 146112 - DNA, 183 bp, Zea Mays
atggctaccgctgttggtgtttcccgtccagatccagctgccttctacttcgatattacagcgcttggctccagcattccacaagaatcatggcaacaaccagatcctgctcccgccttccccagttccagcttcagcataggctccaaggcagctgtcacctccagcaacaagagttggtga

SEQ ID NO: 146113 - DNA, 1068 bp, Zea Mays
ccgcttgcgtctggcactcccatggtgttatatagacggctttaggaaagcccatacagatccagagccaataaccattaaccagctgagtagcagaggcattgacatagcaatggcagcccgccatggcagcaggagaacaagggcagatcaatggctgtttggtgggaagtggaggggaaccgtaaaggagacaaggcatcctccgcctgtccctgaggccaagcttccaaatcccgttcccgttcagaaggacgaaggcgtctgccttgagaagcctcgggtgcagagagaggtcgccgacgtcgcgcccggaaggagatctatgccggagatggagatcaacatgaaagaagtcgttgcggtgctcggggtgaaggtcatggctgcagacatgccgccgttcatgcagctgcatgccttccggtgcgctaagcggtcccatgacaacttggacaagttcagctcaaggcaactggcccatgatgtgaagaaggagttcgataaagtgtatgggcctacctggcactgcatcgttggtacgagctacggttcctttgtgacacattccagaggctgcttcctctacttctccatggacaaaatcatagtgatgctgttcaagaccaagataaggaaagtgttagcatcctgagcagcctgtccatcatgaagggcgtggtcagtccagcttttctatgatactgacaattgtaaaatattgaaccttatagcttggagctgaagagctaacttgaatcattcttgtctgtgagtggcaacttgctaacatggggccgtactgcggtgctgttgttgtagactaaaaaattaaccgttcaaagcaatgatgaattatttgcatcggtgtagtgtaggagtactttgctgaggcacagctctggtatgccagagtgccaggctgcatcagcgatcacggtcaaggtcacgttgtaagattcctgattggcagagatctgtttgccatagggagggccatgcaaagaatggcatggtcacgtcacgccgtggaccaaaatcaaattttttttggcttttacatcgttt

SEQ ID NO: 146114 - DNA, 976 bp, Zea Mays
atccgatccgttgaaccagttgtttaaagtcgcgctcgcgccttggctcgtcagtcgtcacgaccatgatttggtaactgaagcaacaggaagccggcggtgtaggcgacccatggcgccacagaggaggagagagagggcggtgggggaggcgcggccgagctcgtcggcgccgacaccggcggggccggggtgggtcgaggtgcagcgccggcgggtgggcggcggttggacaagccgccggatctctatctacgcctcccgagtctacttcctcctcctgatgctccagatcccgctcttcagggttccttgtagagcaggcacatgcacaactcctattcaagtcacatcgtctcagttggtgtcaaacgagatattcccaccagctgttgtgaaggccatgctctaccctggagctatcgtgagcagcctaactaaaagcaaggcatttccgagttggagtgacctgtttgacatgtacaacctgacagaagccaaaaatgcttctgctgtagttgatctccagcgtctagaggtgctttccccccataaccaatctacaatttttctggaacaatgcttgaactctttaaataactgtctctccccttaatcagatacttgcgggaagctacttctgtgttgctggagggcttcttggcatcataaatcctgggaggacgactttgtttggtactcttttggttatctggggtctcgtgaaggaagcactatttgggaagccagtgaacagcgatccgactgaatcaacttatgtctacccaaccattttgattgcacttatatgtgctttcatgtcaataacttacaatgtaaagaagacagcagcaagtagtcctgtttctctcgcgaagccactgaaaagttctgccaagtcaaaactgaagtagaccctgttacaactttaatccttgtaactcattccaaatatttatttatccttgtaactttc

SEQ ID NO: 146115 - DNA, 931 bp, Zea Mays
atccgatccgttgaaccagttgtttaaagtcgcgctcgcgccttggctcgtcagtcgtcacgaccatgatttggtaactgaagcaacaggaagccggcggtgtaggcgacccatggcgccacagaggaggagagagagggcggtgggggaggcgcggccgagctcgtcggcgccgacaccggcggggccggggtgggtcgaggtgcagcgccggcgggtgggcggcggttggacaagccgccggatctctatctacgcctcccgagtctacttcctcctcctgatgctccagatcccgctcttcagggttccttgtagagcaggcacatgcacaactcctattcaagtcacatcgtctcagttggtgtcaaacgagatattcccaccagctgttgtgaaggccatgctctaccctggagctatcgtgagcagcctaactaaaagcaaggcatttccgagttggagtgacctgtttgacatgtacaacctgacagaagccaaaaatgcttctgctgtagttgatctccagcgtctagagatacttgcgggaagctacttctgtgttgctggagggcttcttggcatcataaatcctgggaggacgactttgtttggtactcttttggttatctggggtctcgtgaaggaagcactatttgggaagccagtgaacagcgatccgactgaatcaacttatgtctacccaaccattttgattgcacttatatgtgctttcatgtcaataacttacaatgtaaagaagacagcagcaagtagtcctgtttctctcgcgaagccactgaaaagttctgccaagtcaaaactgaagtagaccctgttacaactttaatccttgtaactcattccaaatatttatttatccttgtaactttcaatcctatagcattcagttttttccttgtatttacag

SEQ ID NO: 146116 - DNA, 776 bp, Zea Mays
ccagtcacaatcttccacgtcgcctccctcttggttagaaccctccttataatacataaaaacagacaccttcttcattccagttcaataattgaggttccactctgtctgttccctccttcctgctgttacaatgattgttactattagccagtctgagtaatacatgtgcatttggtattgtccttgtttactagtagctaatagctgttaagatctaaaaccagccatccgtcttctgggaagaagaggtatagtctcccgatcctagttctgcctctccagttgcatccttcgtcactcactctccctacatcctgtcacgagactggtgttcagacctgagagacctttactcccatggttcagatgtctttgcagaggtccgtttctgtatgctacttcttggaatccagctttgtgtttactggtgcttagtgtctgtgatctagaatgccgcagcttttacacagtgattcaaaacctgttcttgcaggagcatagccgtatatcctcgttgctccttatctgattcgttccatcgtgtgggtggttcacgaagaagatgggcctcttgtaggtcccagtcatcacgttttgcttataatgcaagaccatccccaattgttctcaagaccgaccatgcaattgatccccctgaaccaaaggatttggatgcaagttcctcagcttcaagaagtggaccttacattgggacttgccatccatcaggcgcagtcggagtgatgggtgcgtcttcctcttcctgcctcaga

SEQ ID NO: 146117 - DNA, 1541 bp, Zea Mays
ccagtcacaatcttccacgtcgcctccctcttggttagaaccctccttataatacataaaaacagacaccttcttcattccagttcaataattgaggttccactctgtctgttccctccttcctgctgttacaatgattgttactattagccagtctgagtaatacatgtgcatttggtattgtccttgtttactagtagctaatagctgttaagatctaaaaccagccatccgtcttctgggaagaagaggtatagtctcccgatcctagttctgcctctccagttgcatccttcgtcactcactctccctacatcctgtcacgagactggtgttcagacctgagagacctttactcccatggttcagatgtctttgcagaggagcatagccgtatatcctcgttgctccttatctgattcgttccatcgtgtgggtggttcacgaagaagatgggcctcttgtaggtcccagtcatcacgttttgcttataatgcaagaccatccccaattgttctcaagaccgaccatgcaattgatccccctgaaccaaaggatttggatgcaagttcctcagcttcaagaagtggaccttacattgggacttgccatccatcaggcgcagtcggagtgatgggtgcgtcttcctcttcctgcctcagatttttagagaaatttgtgagttggagcactggaggtggagaagaggcacctccgttcatcatctgcaatgacccgcttgtcaagaaagagctgttgccatctggaacccaatccacttctggctgcagtgccagtattgctcttgggaagttaaggcagaagaggctcttcttggagcaatctggagcatgctgtattgttatgccatgccagttcttacatgcctggcatgatgagatttcgcagggttgctcggttccgttcatccatgttggtgattgcgttgtgaaggaactcaaagctgctaacttgaaacctgttgagtatggaagtaatgtccgtgtgggagttctcttcactgacaataaattggctacaaactgttacctagacaagttggagagccagggttttgaggtgctatgtccagataaggcttccatggagcgtacagtgttaccatcagtggctgcattcgggaagggggacatggaaggtgcgagaaacctgttgcgagtgtcgctgcaggttcttcttgtgagagctgtcaattcgataatccttgcgtccgatgaccttgtaggcattttgcctgatgatgaccctcttctcaagaaatgtatagacccactggatgccctggtccgagaggccatcgcatgcgcccgagcaccacagccatgatttgccgccctagctagattactctgtttacaccttggctgctctgctgatgagcacatatgtaaataagttttacacaaggtagaaaaagacggatattggttgaactcattacgcattttcatctatgttagcccatgtaatgttcggatactagttaaaaaatactaaatatagtctaattacaacactaa

SEQ ID NO: 146118 - DNA, 1364 bp, Zea Mays
aattgaggttccactctgtctgttccctccttcctgctgttacaatgattgttactattagccagtctgagtaatacatgtgcatttggtattgtccttgtttactagtagctaatagctgttaagatctaaaaccagccatccgtcttctgggaagaagagacctgagagacctttactcccatggttcagatgtctttgcagaggagcatagccgtatatcctcgttgctccttatctgattcgttccatcgtgtgggtggttcacgaagaagatgggcctcttgtaggtcccagtcatcacgttttgcttataatgcaagaccatccccaattgttctcaagaccgaccatgcaattgatccccctgaaccaaaggatttggatgcaagttcctcagcttcaagaagtggaccttacattgggacttgccatccatcaggcgcagtcggagtgatgggtgcgtcttcctcttcctgcctcagatttttagagaaatttgtgagttggagcactggaggtggagaagaggcacctccgttcatcatctgcaatgacccgcttgtcaagaaagagctgttgccatctggaacccaatccacttctggctgcagtgccagtattgctcttgggaagttaaggcagaagaggctcttcttggagcaatctggagcatgctgtattgttatgccatgccagttcttacatgcctggcatgatgagatttcgcagggttgctcggttccgttcatccatgttggtgattgcgttgtgaaggaactcaaagctgctaacttgaaacctgttgagtatggaagtaatgtccgtgtgggagttctcttcactgacaataaattggctacaaactgttacctagacaagttggagagccagggttttgaggtgctatgtccagataaggcttccatggagcgtacagtgttaccatcagtggctgcattcgggaagggggacatggaaggtgcgagaaacctgttgcgagtgtcgctgcaggttcttcttgtgagagctgtcaattcgataatccttgcgtccgatgaccttgtaggcattttgcctgatgatgaccctcttctcaagaaatgtatagacccactggatgccctggtccgagaggccatcgcatgcgcccgagcaccacagccatgatttgccgccctagctagattactctgtttacaccttggctgctctgctgatgagcacatatgtaaataagttttacacaaggtagaaaaagacggatattggttgaactcattacgcattttcatctatgttagcccatgtaatgttcggatactagttaaaaaatactaaatatagtctaattacaacactaa

SEQ ID NO: 146119 - DNA, 900 bp, Zea Mays
atggccgctcccatccacgcgcgtctcctcccgctccccttgcacccgaacccaagccccagtctccacgcgagcggcacacgacgggtgccctggcccccgcgccaccgccgccgctgcttcgcgacgccgccgtcgcggaacgggagctcctcctcgccggagatcgactggtgcccggtgccgccggaccagctccccgtgaacgagtacgaggcgcttgcggcctccctgcccttctcctgggcggcggggggcctccgcgtctactgctcccgcctcgcgctcacgggcgccgccgtcgcgctcttcgtcgggctcccggtcgccgccttcgggggccgcggcggggccggcggcgacgctctgcacctcgcgctcggtgccacggggtccgggatcctcgccgtcacgctcgctgtcgtgcggatgtacctcgggtgggcctacgtcggcaaccgcctgctcagcgccacagtggagtatgaggagacgggatggtatgatggtcaggtgagatgtttctgttgatcccgtcctttcttgtacttgatcctaattttctaataaatttctagattgaactgtagtacttagaggtactccgtgtcactcaggtagaacggggatcatttctagaggctagagctgacttgctgcttggttaggccttgaaatgttttggtgatacaaacaattggacaaaaggaatatgatctagaaaactacggggaatcatccaaccattgatacacacttagtgccaccaaaacagatactgaaaatgtgcccctatggtcctatgggccccgtgtgcatccatcgttggatacttggatgcatacgaggaagcatgtgagcaggaaagagaaatattgagggcacctctctccggctgta

SEQ ID NO: 146120 - DNA, 949 bp, Zea Mays
atggccgctcccatccacgcgcgtctcctcccgctccccttgcacccgaacccaagccccagtctccacgcgagcggcacacgacgggtgccctggcccccgcgccaccgccgccgctgcttcgcgacgccgccgtcgcggaacgggagctcctcctcgccggagatcgactggtgcccggtgccgccggaccagctccccgtgaacgagtacgaggcgcttgcggcctccctgcccttctcctgggcggcggggggcctccgcgtctactgctcccgcctcgcgctcacgggcgccgccgtcgcgctcttcgtcgggctcccggtcgccgccttcgggggccgcggcggggccggcggcgacgctctgcacctcgcgctcggtgccacggggtccgggatcctcgccgtcacgctcgctgtcgtgcggatgtacctcgggtgggcctacgtcggcaaccgcctgctcagcgccacagtggagtatgaggagacgggatggtatgatggtcagatatgggttaaaactccagaagttttagctcgtgatcggcttctaggctcattttctgtcaagcctgtgctaaacagggtgaagttcaccttggtgggtctggcaggctccctgatcctttgcattcttctgtacgtgaacacggaaaccccaaaggaaccttatggaaatacaggtggaaggtctatcccgggagtgtacagcgacgctgctgcaaggtcgtttgagcccgatgcattctgtggagaacctgatttgtcgtagcatcgtaaagcgtggagcatggaaggtttgtagatggcagtatatatggtctcacagggtatatacgggggtttctgtacggggtttttaatccatcaaactagggtaatgtaaatatttggccacacccacactagtatcgatattttagacgcaagcctcttatgaaaat

SEQ ID NO: 146121 - DNA, 2885 bp, Zea Mays
gattaattaatcgcccgttaattgcccgctaatcctctgccggccgctgccgcctcgctttttctcgcttaaataattgcctagtcaagctgatccagctcggcgggctgcgggcggacttggggagacagacaaacatacagagagagagagaggggcagaggcagcccgggatccgatcgggcggtcgatgctacggccggtggcgggcgtcgtcggggcatggctagccaggctgcgcggcgaggaggcgcgatgagaccaccgagcagcggcgtgcgcacggcggccgcgcggccgccggccgcctcgttcctgctggccacggcggccacggcggcgctcgtcggagggttctacttctggttggtggtctcgtcgttccggctccccgactcgggcgccgtcgggtgccgccccgacggcgaggggtcgtgggcggtcggcatgttctacggcagcagccccctcgcgctccgtcccatcgagctggaagggaggagcaatggcaacagctcggcgtggccggtggcgaaccccgtcctgacctgcgggactgcgacggaggcggggtacccgagcaactttgtcgccgacccgttcctctacgtcgagggggacacactatttattttctttgaaacaaaaacaacaacctcaatgcaaggtgatattggagttgcaagaagcttcgaccaaggtgcaacgtgggaatttcttggcattgcactagatgaggcatggcatctgtcatatccttttgtgttcaagtatgagaacgagatttatatgatgccagagggaaacaagaagaaggagctgcgcctttatcgtgctactaagtttcccctcgaatggacattggagaaggttcttgtcaataagccacttattgatgcctcgttagtccaatttgagggatactggtggctatttgcatctgattttacacggtatggtgttgagaagaatgcggagcttgagatttggtacagcaattctcctcttggtccttggactgagcacaagaaaaatcctatctacaaatcagacaaaagtttgggagctcgaaatggtgggagactcttcatttttgaagggtcattatatcgccccggccaggattgcagtggtacttatggccggatggttaagttgcacaaggttgaaaagctaagcaaggaggaatacaaagaggtccctgtaaatcttgggatagaggagccaaagaaagggagaaatgcatggaatggcatgaggtaccatcacatggatgcacaacaactcgcatctggtggatggattgctgtaatggatggtgatcgagttccttcaggtgattcaaccagacgctctctcattggttacttagctttcctgttggccagtgcccttgtcgtttttgtgggttttatgaaaggtgcaatcagttgttacgttcctcccagtttatgggttcctctcacaaggagaacagaattatcccgtatcttctacgtgcaccgcttcaaccagaaagtccgcagatattctaccagcatcagcagatatatctctgctgctaaaaccaagctcagcgaaaagacttggtccaacgtgcttttcttctgtgtagttgctctatttggtgccataaatgtctgcattgccgtgcatttcttatgtggcggcaatggcgctgaagaggcgtacacatatcaagggcaacactcccagtttacgatgatcacaatgacatatgaagcccgtctctggaatttgaaagtgttcatcgaacactactctagatgtgaatcggttagggagatagttgttgtttggaacaaaggtaaccctccaagtagtgacgcgtttgactccactgtgcctgtgaggatacgggtcgaggagaccaattctcttaacaacagatttagggtggatcctctgataaagaccagagctgttcttgaactggacgatgatatcatgatgacttgcaccgacttagagaaaggatttagggtctggagagaacaccctgagcggatggtgggcttctacccccggatgatagatggcaaccctatgcagtacaggaatgagaggtacgctaggggtaagaatggatacaatctgatactcacaggtgctgccttcatggacaaagagtttgctttcaagacttactggagcgagaaggctcgtgaggggagggactatgtgcacaagaacttcaactgcgaggacttgctcatgaattttctgtatgcgaatgcaagctccaccacaaggaccgtggagtacgtccaccccgcatgggctatcgatacgtccaagctttcttctgttgccattagccgggacacccagaagcactatgacatcagaacgcattgcttggcaaacttttcctccatatatggccccctccctcagaaatgggagttcggcatgcgtgaagaccgttgggacaaataggatggcgacggtggtacacgacggacaaacacatgatggtgaaaccttctcttttttttttgtcaatcccctggaaagttttgtagcttcgggcgaaggtataggtccttggggcagaagtgcccctggtttgtgatgtgcctattagatctggctagaagcttagacctgatcaggatagaccattgttcaaaagttgaggatagaccaaaggcagtgcagtgtatgtgtatgtgaattgtggaaggcaaagagggaatttgagaactgcatagtgggtggaaagtttagactgttgggttcccttctctgtagtttgtgtacatctcttcctttctaagattcagctagcatgttgtgtgattatttaccgtaaggattctttttacagctcgtagtgtttattatttcagtctaatgaggac

SEQ ID NO: 146122 - DNA, 321 bp, Zea Mays
tcgcaggagaagtactgggaggatcaccccggcgaggcggtgccgatcatgccgcccaagttctactgggggccttggagggtgatgaacggagaagttccgcgcttcattcagccgcccgacgaggccaagacggcgtaggagcttcgagcttgcttcaaaacttttcagaagaagcatgtatctggtctcgatcgaaaaaaagaaattggagccctgcttttgtgcctctcccactctcctggttgtacgcctgtacctgtctgtctggaatacacgagtaagataagatcaggagaactgaagacctcaaataaagaa

SEQ ID NO: 146123 - DNA, 2161 bp, Zea Mays
aatggagggcatcagacaaacaaacagaacctttaaagtgccagaccgccgcatccgccgccactagcggagactgccccgccgcgctttctccaagttcagctgacggccgccgtgcctactccaggccccgccgacgccctgtgaagaagaccctggttgcgctggcgcccatcgcgagcaagaagctctgaaactcgacggcggagcctcaagctcgtgcgccgaagttcattctttcgccctgtagaaacaaagggcagaaattggctaggactatcctggccccccactggccatggcgtgtgctgcttacagcatcagaagccctctcaagctcgctgtaaggcacggctcggatgtgttgagtagcaacaacttgtgcaatggctttaagtcttcggtgtcttacctcaattctcaacgttggagcagcaactgctcagccgtcacaatgcggcatgtcgcatcccattgtcactcgattgttaagactccagcaatgtggccctcaaaagcttcagcaactgatgcagccacagcttccgatgagaggataactgtactggtcattggtggtggaggcagggagcatgctctttgttatgccttgaaccattccccatcatgtgctgcagttctatgtgcccctggtaatgctggtattgctcagtcccgggatgcaacatgtatcccagatttggacatctcgagtagtgatgatgttatctcattctgccgcaagaggggagtgggaatggttgtagtgggccctgaagcccctcttgtcgcgggtcttgcaaatgaccttgtcaaagttgggataccaacctttggcccttcatcagaggctgcagctttagaaggatcaaaggacttcatgaagaagctgtgtgataagtataatatccctacagctaagtatcacacatttacggatgctgtggaagctaaaaaatatgtaaaaaatgaaggagcacctattgttgttaaagctgatggactggctgctggaaagggtgtggttgttgcaatgactttggatgaggcgttggaagccatagattctatgttggttgaaggctcattcggttctgctggttcacgggttatcatcgaagaatttctagagggtgaagaagcgtctttctttgcattggtagacggcgaaaatgctttgcctcttgaatcggcacaggatcacaaaagagttggtgatggtgatgttggcccaaataccggtggtatgggtgcatactcccctgctccaatagtgacagatgagctcaaacgcattgtaatggaaagtataattatccctactgttaaaggcatggcagccgaaggttgcaaatttgttggtgtattatacgcagggcttatgatagagaagaaatctgggctgcccaagcttattgagtacaatgtaagatttggtgacccagaatgccaggttctgatgatgcgattagaatctgatctggcacaagttctgttatctgcttgcaaaggagagttgagcaatgtttcactgacctggtctcctgaaatggctatggtggttgtgatggcaagccagggataccctggctcttataagaaggggaccgtaataaaaaacgtggacaaggctgagcgagtgtctccagctgtcaagatattccatgctgggacagcagtagatggtgatggcaatcttgttgccgttggagggagagtccttggcttcactgccaagggcaaggacatcgaggaagcaagggcaagagcgtacggtgcggtagacgctatcgagtgggtagaagggttctgcaggcgtgacattggttggagagcactgaggcagaagcaagtggctaaccagtagctattccatgaccatgagatttccccagagaaccgcaactacggtgagcctgtactgtttacaagtaataaaaagggaaacggtgcgacccccattgtttttggttgtggaaagacaagtattgctgatcaaacagtagttaacacctgttgatttcagcatgattcggtatatgtttgcaccgatattgtgttcagagtccagacaagcgctagagtgaaaacagcgcgcgccatctgaattctgaccaattgtcttcagttatcggataagtggacctttccaaataattgt

SEQ ID NO: 146124 - DNA, 489 bp, Zea Mays
atgatagtcctcgcctcagttgccgccacctcgttcgtcatcctacttcttttctctatcccctcacgcctccgcgccaccccattctcggcagaggacgtgggacaagacgcttccttcccgtatttgtctgacaccagccccgacaccgacccacgcagtggctattgcacgtccacgaggacatttcacagcatgcgggcaccatcgttttcgccgtcgtcggatgtcccattcgtcttcctggccttcgctctgttcttcctccccaacctgttgcccccacccatggtcgcaaccgcgagccgaccgatgctcgtcgacgcgggtacgtggcgagtcggtcttgctcctggcctttctccatgcgtaccgccgaggaggacagggtggcgcctgcctcgcttaggttatcttggcgagatgaggagtccaggtctgagatattggacaaccaagacccgtagcgtggcagcagtcgacatatga

SEQ ID NO: 146125 - DNA, 1632 bp, Zea Mays
gcagggatgaagagagacattctaccgtgagatcagcggtggaagatggcccggcgcagccgcgacaggatcgagctccggtgtgcgcgacgggtccggagcggagcggagcggagcgggggagaaggcatataaaatgcgaagatgagacgagaagcggaggattaacagagcaggaaggtgaattgggcgcagagactctcagacgcgcagtttttgaagctcgtcgcgaaatgaaggaggcgaggaatcactaccacacccggggctcctcgcgcggcggcggcggcaccactgccgagcgcgacctggtgttacagtggggcaaccggaagcgcctgcgctgcgtcaaggtgcagcgccgtgacgtcgaggccgccgctaccgtggccgccgagaaagccgccatcagccagcgccgcgccgcggccacagctgcccagcaccacccagacggccacacccaccaccgtgttttcaggaacacagaagagtttgcgatcatgaaatcgccagcacggcaacaacagaacagcaggatcgacgcagttgcttcaccggacagggagtgccctggtagaggtaacaacaacaacaacggaggtccacagacctgtccagatgacaagaaaggctcttcatcggggagtgaggggtccatctggccgaagtttgcagtcaccctgtcgaacagggaaaaggaagaggatttcctggtgttcagaggatccaagctgcctcaaagacccaagaaaagagccaaggtcatccagagaactgtcaatttcgtatgcccaggaacgtggctgtgtgacctgactcttgaaagatacgaagtccgagagaagaaggtttccaagaagcgccccaggggattgaaagctatgcacgacttggacagtgactcggaataaaaaacagagagagaagagatcactgaacatgagaagctgaacattagagagaaggccaggacagatgcagcagatggaggtcgaccataaagcttcctgatggaatgaggaccaacgggtcaccactcctcgcgattgatactggagatcgatttgtccaaaaggactaggtttttttaaaagcaaatggcaggagctctgcctatccattaagagagagggagagagagaaatttacaagaagtgagcacaataaaagcacgcccaaacataacgagggatcccaataagaagtcgtccctgctgctacaaaaaaaaaaggacttgtagcgatcggaggacgaccgagatgtcaggaagttgcacggaagaacagagaggagagctgcaggagctggagttcctgaacattagcaaactattcaattccctggaaagcagcaacgctgttttgctattctctcatgttaatatgaatggcgagctagccagtcctgtcgcgtctagtttgccttccgtagtttttttttatcctctggtgctgtatgaaaggtcagtggatattctttcaggggcatgagacagtgtccggcactctcagtccagtgcgagtggatcaggattcaggcaaacatagaccgacgatcggactttatgtgttttcaggactgccagacttgtaaattctgaaagtttcagtgaattttttttatagttt

SEQ ID NO: 146126 - DNA, 1615 bp, Zea Mays
gctctttctcctcaccaggcatcaagagaggacgagagggggcgtccggaatttcctctgcttccttttaccgcgaaacctttgccttgaaggaagaatccgttcctctgcttgatctgtgttgtagatgagacgagaagcggaggattaacagagcaggaaggtgaattgggcgcagagactctcagacgcgcagtttttgaagctcgtcgcgaaatgaaggaggcgaggaatcactaccacacccggggctcctcgcgcggcggcggcggcaccactgccgagcgcgacctggtgttacagtggggcaaccggaagcgcctgcgctgcgtcaaggtgcagcgccgtgacgtcgaggccgccgctaccgtggccgccgagaaagccgccatcagccagcgccgcgccgcggccacagctgcccagcaccacccagacggccacacccaccaccgtgttttcaggaacacagaagagtttgcgatcatgaaatcgccagcacggcaacaacagaacagcaggatcgacgcagttgcttcaccggacagggagtgccctggtagaggtaacaacaacaacaacggaggtccacagacctgtccagatgacaagaaaggctcttcatcggggagtgaggggtccatctggccgaagtttgcagtcaccctgtcgaacagggaaaaggaagaggatttcctggtgttcagaggatccaagctgcctcaaagacccaagaaaagagccaaggtcatccagagaactgtcaatttcgtatgcccaggaacgtggctgtgtgacctgactcttgaaagatacgaagtccgagagaagaaggtttccaagaagcgccccaggggattgaaagctatgcacgacttggacagtgactcggaataaaaaacagagagagaagagatcactgaacatgagaagctgaacattagagagaaggccaggacagatgcagcagatggaggtcgaccataaagcttcctgatggaatgaggaccaacgggtcaccactcctcgcgattgatactggagatcgatttgtccaaaaggactaggtttttttaaaagcaaatggcaggagctctgcctatccattaagagagagggagagagagaaatttacaagaagtgagcacaataaaagcacgcccaaacataacgagggatcccaataagaagtcgtccctgctgctacaaaaaaaaaaggacttgtagcgatcggaggacgaccgagatgtcaggaagttgcacggaagaacagagaggagagctgcaggagctggagttcctgaacattagcaaactattcaattccctggaaagcagcaacgctgttttgctattctctcatgttaatatgaatggcgagctagccagtcctgtcgcgtctagtttgccttccgtagtttttttttatcctctggtgctgtatgaaaggtcagtggatattctttcaggggcatgagacagtgtccggcactctcagtccagtgcgagtggatcaggattcaggcaaacatagaccgacgatcggactttatgtgttttcaggactgccagacttgtaaattctgaaagtttcagtgaattttttttatagttt

SEQ ID NO: 146127 - DNA, 837 bp, Zea Mays
gctgggcaatttcttcagtacctcttgtctatctattaagcacccttgctcttcaaggaactttggctgcaaaacctaaccacttgtgcattctctcaagacccccctggaagggaaggaaacatgcaatcgcagaggaagatggtggtgtcgaagaagaagctgatcaaggtcggcccatggggcggcgccgggggacacccgtgggacgacggcggctactccgggatccgcagcatcaccatgtcctacgaccggttcatggagtccatcagcgtggagtacgacagggacggcatgcccgtcactggggagcggcacggaggagccgccgccagccacacgacccaggcacgtccgccgccaaaccaatcacccccgtcagtcacgatcagtgacacggctccttccgctgggtggtttctgaaccgtgcgcgcgtacgtacacagatcaagctgggctacccggacgagtacctgacaacggtgagcgggcactacgcgccgatcgcgcccggcggctcgccggtcatccgctcgctggcgttccggaccaaccagggggcgtacgggccgttcggcgtggcggagggcacgcccttcgagttcccggtggacggcggcgtcatcgtcggcttctgcgggaggagcgggtggcagctcgacgccgtcggcctctacgtcgcgccgctgcgcccggagaccgtgtacgacagggtgcacaagcttggcctcacggcttaccgcgcagtttggcagcggatcgggtcccagcagcagcagcaagaaccggtgaaactgctgaacggcaacgcgcagattactcacaagatgtaa

SEQ ID NO: 146128 - DNA, 906 bp, Zea Mays
gctgggcaatttcttcagtacctcttgtctatctattaagcacccttgctcttcaaggaactttggctgcaaaacctaaccacttgtgcattctctcaagacccccctggaagggaaggaaacatgcagcaatcgcagaggaagatggtggtgtcgaagaagaagctgatcaaggtcggcccatggggcggcgccgggggacacccgtgggacgacggcggctactccgggatccgcagcatcaccatgtcctacgaccggttcatggagtccatcagcgtggagtacgacagggacggcatgcccgtcactggggagcggcacggaggagccgccgccagccacacgacccagatcaagctgggctacccggacgagtacctgacaacggtgagcgggcactacgcgccgatcgcgcccggcggctcgccggtcatccgctcgctggcgttccggaccaaccagggggcgtacgggccgttcggcgtggcggagggcacgcccttcgagttcccggtggacggcggcgtcatcgtcggcttctgcgggaggagcgggtggcagctcgacgccgtcggcctctacgtcgcgccgctgcgcccggagaccgtgtacgacagggtgcacaagcttggcctcacggcttaccgcgcagtttggcagcggatcgggtcccagcagcagcagcaagaaccggtgaaactgctgaacggcaacgcgcagattactcacaagatgtaaccaactgccaggatgccaaccatgactatctatattctgcagtccgaatgtatccagctagcgtatggatctaatgtacctgtacctcatcctgatttgaacacttcagcgtatgaatctaaacatgcagcaaacagtcctgcgacgggacttggctgctggcca

SEQ ID NO: 146129 - DNA, 864 bp, Zea Mays
ctgcacggctgcacccgccttgtttggaccgcacgcgcggccacccttctcctcctctcctctcttcttcacctacctattctctctcgctcggcgcgcgtagaagagaagaggcacttcttcctcctcgccggcttcccctcgcgtgtcgcaagtgctttaccctacaccgtggcccgtggatcgtcgccggacgccaggcatcggcaagcggcagcgcagccgtccaccctgagtccctgattttgccaagcgtttcggccgcttaagcgcagtgtatgtctttgcaagaaagatgatgatgtcagctcgatcggaacagattaactgctgctgcaataacccactcagagcacctacatctgctactgcagaaaacagacagcggagcaagccacacggaaatgagcaacaaagaatggttttgaaatttcagtatggtacagaagcatggtggacagcaccagcacagcatgtggccgtgaaatagaagcagcaagttacagatactctttatacaggtacatgtgcatacaccaaccgtggcccagacacttctgtccaggcgggcactgtttgttcagtgttatccgtgtcggattattctgccactatgagcaggcctttcctccgaagagtttcacatgtgttggagatgctactctaaaatcatcatctccaggtatgggggagaagtgaaaaagtatcatctcgactcccacaacaaggtctcaaagaataatttacacgtattttggtcctgcagaatcagaggaagttcagtaggtgcgaagccacaaggcaaataataatttgtttggtattgcaatcgagggagcaggatgcgtatccttttatttacct

SEQ ID NO: 146130 - DNA, 1300 bp, Zea Mays
ctgcacggctgcacccgccttgtttggaccgcacgcgcggccacccttctcctcctctcctctcttcttcacctacctattctctctcgctcggcgcgcgtagaagagaagaggcacttcttcctcctcgccggcttcccctcgcgtgtcgcaagtgctttaccctacaccgtggcccgtggatcgtcgccggacgccaggcatcggcaagcggcagcgcagccgtccaccctgagtccctgattttgccaagaaaacagacagcggagcaagccacacggaaatgagcaacaaagaatggttttgaaatttcagtatggtacagaagcatggtggacagcaccagcacagcatgtggccgtgaaatagaagcagcaagttacagatactctttatacaggtacatgtgcatacaccaaccgtggcccagacacttctgtccaggcgggcactgtttgttcagtgttatccgtgtcggattattctgccactatgagcaggcctttcctccgaagagtttcacatgtgttggagatgctactctaaaatcatcatctccagaatcagaggaagttcagtaggtgcgaagccacaaggcaaataataatttgtttggtattgcaatcgagggagcaggatgcgtatccttttatttacctcacgagtcaattggtgcaacccttgctggcttcattatccttacaatgttcctgatgtgctcaaaccccatgactatcacccctatgagataaagaaagcttagttgcagcttgccaagcaagttatagactgctacggcagcatttgcaccttcatctgttcgcatcgtgacggtaatgggcctcgcggaaatgagtgccccggtctctgatgaggacgcagcgtaagagatttgatccagaacagttagccttgaagagaaatcggagatccggtggcctttatcagatccataagtgcattgttcacctgcaattcgtagaaggttacatgagttcctactgaacttttcatgatagactgtgaccaagcgagagaagcaaacaccagaaagtattgtgctgagtgcgtgctaagccacatgcctagatacttgaggcaacttgatcccaaatacgacttttagtaacctattgtgtcgtataattccgttattctctgctagacctagtaatggggaacaactatctccaagagtaacatttggttaggtgaccaatgatgctttcagataactgcaacgtctgatgtcatctaagttcgctcagtatatatgacaaaagtgcagcagatttttctc

SEQ ID NO: 146131 - DNA, 1597 bp, Zea Mays
ctgcacggctgcacccgccttgtttggaccgcacgcgcggccacccttctcctcctctcctctcttcttcacctacctattctctctcgctcggcgcgcgtagaagagaagaggcacttcttcctcctcgccggcttcccctcgcgtgtcgcaagtgctttaccctacaccgtggcccgtggatcgtcgccggacgccaggcatcggcaagcggcagcgcagccgtccaccctgagtccctgattttgccaagcatcttcacgtttgcagcgtttcggccgcttaagcgcagtgtatgtctttgcaagaaagatgatgatgtcagctcgatcggaacagattaactgctgctgcaataacccactcagagcacctacatctgctactgcagaaaacagacagcggagcaagccacacggaaatgagcaacaaagaatggttttgaaatttcagtatggtacagaagcatggtggacagcaccagcacagcatgtggccgtgaaatagaagcagcaagttacagatactctttatacaggtacatgtgcatacaccaaccgtggcccagacacttctgtccaggcgggcactgtttgttcagtgttatccgtgtcggattattctgccactatgagcaggcctttcctccgaagagtttcacatgtgttggagatgctactctaaaatcatcatctccaggtatgggggagaagtgaaaaagtatcatctcgactcccacaacaaggtctcaaagaataatttacacgtattttggtcctgcagaatcagaggaagttcagtaggtgcgaagccacaaggcaaataataatttgtttggtattgcaatcgagggagcaggatgcgtatccttttatttacctcacgagtcaattggtgcaacccttgctggcttcattatccttacaatgttcctgatgtgctcaaaccccatgactatcacccctatgagataaagaaagcttagttgcagcttgccaagcaagttatagactgctacggcagcatttgcaccttcatctgttcgcatcgtgacggtaatgggcctcgcggaaatgagtgccccggtctctgatgaggacgcagcgtaagagatttgatccagaacagttagccttgaagagaaatcggaggtgtttagtcttcttaagcttacccgatgtgttctcaggctgggctgaccactcttcaggtttcatcgcagatccggtggcctttatcagatccataagtgcattgttcacctgcaattcgtagaaggttacatgagttcctactgaacttttcatgatagactgtgaccaagcgagagaagcaaacaccagaaagtattgtgctgagtgcgtgctaagccacatgcctagatacttgaggcaacttgatcccaaatacgacttttagtaacctattgtgtcgtataattccgttattctctgctagacctagtaatggggaacaactatctccaagagtaacatttggttaggtgaccaatgatgctttcagataactgcaacgtctgatgtcatctaagttcgctcagtatatatgacaaaagtgcagcagatttttctcactc

SEQ ID NO: 146132 - DNA, 1572 bp, Zea Mays
ctgcacggctgcacccgccttgtttggaccgcacgcgcggccacccttctcctcctctcctctcttcttcacctacctattctctctcgctcggcgcgcgtagaagagaagaggcacttcttcctcctcgccggcttcccctcgcgtgtcgcaagtgctttaccctacaccgtggcccgtggatcgtcgccggacgccaggcatcggcaagcggcagcgcagccgtccaccctgagtccctgattttgccaagcgtttcggccgcttaagcgcagtgtatgtctttgcaagaaagatgatgatgtcagctcgatcggaacagattaactgctgctgcaataacccactcagagcacctacatctgctactgcagaaaacagacagcggagcaagccacacggaaatgagcaacaaagaatggttttgaaatttcagtatggtacagaagcatggtggacagcaccagcacagcatgtggccgtgaaatagaagcagcaagttacagatactctttatacaggcctttcctccgaagagtttcacatgtgttggagatgctactctaaaatcatcatctccagaatcagaggaagttcagtaggtgcgaagccacaaggcaaataataatttgtttggtattgcaatcgagggagcaggatgcgtatccttttatttacctcacgagtcaattggtgcaacccttgctggcttcattatccttacaatgttcctgatgtgctcaaaccccatgactatcacccctatgagataaagaaagcttagttgcagcttgccaagcaagttatagactgctacggcagcatttgcaccttcatctgttcgcatcgtgacggtaatgggcctcgcggaaatgagtgccccggtctctgatgaggacgcagcgtaagagatttgatccagaacagttagccttgaagagaaatcggaggtgtttagtcttcttaagcttacccgatgtgttctcaggctgggctgaccactcttcaggtttcatcgcagatccggtggcctttatcagatccataagtgcattgttcacctgcaattcgtagaaggttacatgagttcctactgaacttttcatgatagactgtgaccaagcgagagaagcaaacaccagaaagtattgtgctgagtgcgtgctaagccacatgcctagatacttgaggcaacttgatcccaaatacgacttttagtaacctattgtgtcgtataattccgttattctctgctagacctagtaatggggaacaactatctccaagagtaacatttggttaggtgaccaatgatgctttcagataactgcaacgtctgatgtcatctaagttcgctcagtatatatgacaaaagtgcagcagatttttctcactcaattcttcttcctagtttggtagacaaaacttgagcattagaaagcttaaatttctcaggagaagcttgcagacagacactgtttttgatgttatcttcgttgttggccataatttttgggattttgcaccactatacaacagtttaagaaaataagcagatcgatagattctatc

SEQ ID NO: 146133 - DNA, 2267 bp, Zea Mays
gcgggtgtgggaggttggacaggagacgtttttttttccaccgtcgccgccgcccctgcttgccgctgcgcgcccccgcctcctacgcaggtcgtctgctccgaagccggtggccgaagctcgcgtcgccctctccctcaccggattcatcgtccgagccctcgctagagctcgtgacctcgccgtcgccggagccctcactctcactggattcgtgtcctcgccggagctcgcgctaacctgctcgaccacacctcgccgcccgcggccatctcacacccactccgcgcgaccgcggtcctctcctcacctatcggtcgttcctgccctcgcgaggaagacgacgcctcaagctatcctccctccctctcgatctgatccggagtggctcacgttttcctattcctcgccagcggcagaggcggcaaccctcgatccgtgtcaatcctctattagattggtatgagctgatcacccctggttgtgtagttccttctgcaatgatttactgcactcactgtgctgattactgcccctccataaaggaccctgacaaaggatacatatgttgtggtacatgtgggaaggttcttgatcaggaggtatacactgatgagcctacttttgttaaggataacacaggacagagtcgcttagctggaagtattcttgcaagcattgagtctggatattcgatttctcatcaaagaaccttagacaaaggtagggatgagattaggcagattgtcaataacttacatgtcagcggtggagaaactgtcgttagcaaggcttatcgcttctatgagctagctgtcgaccgtaattttaccaggggccgtagaacaagccatgttgcagctgcttgcctttacattgcctgcaggcaaagtaagaaggcttatcttcttattgatttctctgattatctccaaataagtgtttacgtgctaggtgctgtttttctccagctctgccaagttttgctactcgcggatcatccagttgttcagaaacttgtagatcccagccttttcatccatcgctttaccaaatgtttgctgggaagaagagataatgctgtctcagacacagctttttctcgagaagtctcagacacagctttacgcattgtagctagcatgaagagagattggatgcagactgggaggaaaccaagtggattatgtggtgcagcattatacattgctgcactctctcatgggtgtaattacaccaaggcagatattgtctctgttgtgcatgtgtgtgaggccactctaacgaagcgattgatagagtttgaaaatacggattctggcagcttaacgattgaagaatttctagcaacagctgatgaatataatgaagcgtctgtttcaaaatattcgcctaagtctggggaaatcctttgcaaacacaagggtaaagattttgagcattttgcccatggactttgtgaaaaatgcttcaataagttcactaaactgtcgggtggactagaaggtggtgctaaccctccagcattccaacgagctgaaaacaaaagacttgaagctgctaaaagggctgaagaagctgctgcagttaaggaggcagcgctggaagaatctctttgcgacacacagaattctgagattgagagtaccacaactcctaaaaaggctttaagcggggataaatcttcaacaattggatctgggggactcataaatgactctgtgccaccgaaggatcctgaagagggaggtgaaaattgtgaaggcaatgctgatccagaaagcctttctgacatcgacgatgtagaggttgattggtaccttcacaatgaggaagaaacacaatataaaaagattatctgggaggaaatgaacaaagagtaccttgaggaacaagcagccaaggaagctttggcagctgaattggcagctagagggattgttgtggaagagggaaagaaaaaacggaaacgtaacgaagacaccaagagctcgacgcctgctgacacaccggcagaagccacatacaacatgctgaaacggaagggacttggttccaagatcaatgagggagctgttggcgaattatacaagactaaagatgaagttgagagcgcgagtaggaaagaagagatggagttcgacgcactgtttgggccggacaacgctgatggcgagacggtcgatgatggtggttacggctatgggggctgcggcgatggtggcgcggaagcctacaatggcattgatgacgattttgatttctag

SEQ ID NO: 146134 - DNA, 2584 bp, Zea Mays
gcgggtgtgggaggttggacaggagacgtttttttttccaccgtcgccgccgcccctgcttgccgctgcgcgcccccgcctcctacgcaggtcgtctgctccgaagccggtggccgaagctcgcgtcgccctctccctcaccggattcatcgtccgagccctcgctagagctcgtgacctcgccgtcgccggagccctcactctcactggattcgtgtcctcgccggagctcgcgctaacctgctcgaccacacctcgccgcccgcggccatctcacacccactccgcgcgaccgcggtcctctcctcacctatcggtcgttcctgccctcgcgaggaagacgacgcctcaagctatcctccctccctctcgatctgatccggagtggctcacgttttcctattcctcgccagcggcagaggcggcaaccctcgatccgtgtcaatcctctattagtttcacagattggtatgagctgatcacccctggttgtgtagttccttctgcaatgatttactgcactcactgtgctgattactgcccctccataaaggaccctgacaaaggatacatatgttgtggtacatgtgggaaggttcttgatcaggaggtatacactgatgagcctacttttgttaaggataacacaggacagagtcgcttagctggaagtattcttgcaagcattgagtctggatattcgatttctcatcaaagaaccttagacaaaggtagggatgagattaggcagattgtcaataacttacatgtcagcggtggagaaactgtcgttagcaaggcttatcgcttctatgagctagctgtcgaccgtaattttaccaggggccgtagaacaagccatgttgcagctgcttgcctttacattgcctgcaggcaaagtaagaaggcttatcttcttattgatttctctgattatctccaaataagtgtttacgtgctaggtgctgtttttctccagctctgccaagttttgctactcgcggatcatccagttgttcagaaacttgtagatcccagccttttcatccatcgctttaccaaatgtttgctgggaagaagagataatgctgtctcagacacagctttttctcgagaagtctcagacacagctttacgcattgtagctagcatgaagagagattggatgcagactgggaggaaaccaagtggattatgtggtgcagcattatacattgctgcactctctcatgggtgtaattacaccaaggcagatattgtctctgttgtgcatgtgtgtgaggccactctaacgaagcgattgatagagtttgaaaatacggattctggcagcttaacgattgaagaatttctagcaacagctgatgaatataatgaagcgtctgtttcaaaatattcgcctaagtctggggaaatcctttgcaaacacaagggtaaagattttgagcattttgcccatggactttgtgaaaaatgcttcaataagttcactaaactgtcgggtggactagaaggtggtgctaaccctccagcattccaacgagctgaaaacaaaagacttgaagctgctaaaagggctgaagaagctgctgcagttaaggaggcagcgctggaagaatctctttgcgacacacagaattctgagattgagagtaccacaactcctaaaaaggctttaagcggggataaatcttcaacaattggatctgggggactcataaatgactctgtgccaccgaaggatcctgaagagggaggtgaaaattgtgaaggcaatgctgatccagaaagcctttctgacatcgacgatgtagaggttgattggtaccttcacaatgaggaagaaacacaatataaaaagattatctgggaggaaatgaacaaagagtaccttgaggaacaagcagccaaggaagctttggcagctgaattggcagctagagggattgttgtggaagagggaaagaaaaaacggaaacgtaacgaagacaccaagagctcgacgcctgctgacacaccggcagaagccacatacaacatgctgaaacggaagggacttggttccaagatcaatgagggagctgttggcgaattatacaagactaaagatgaagttgagagcgcgagtaggaaagaagagatggagttcgacgcactgtttgggccggacaacgctgatggcgagacggtcgatgatggtggttacggctatgggggctgcggcgatggtggcgcggaagcctacaatggcattgatgacgattttgatttctaggaggatgtgttatgtgtagcagcatttgcagctgaccagcacgggctagattcttcatctgtgcgttatagtttatagttagtttcatttttcttttgttaggggagtttgaccaaatcattatggagctattggatagtgcacttagttttggttgtataataatgttgggaactaggttctgcatgggcgtcgtaactgtcgcaagccctatgtggtcaagcgcctataccatgggcatttgttgtacatcccacctccaaaagattgcaagtggtgatgtaacattttgtattagcaataaaggac

SEQ ID NO: 146135 - DNA, 892 bp, Zea Mays
aactaaccaaatttggtctaatccttatctcttacctaactaatgtaatccaatttttatcaaccaaatctgatctaatccttatctcttccctaactaatctgatccaatccttatcttttgcctaacaaatcaactattttgatctgatatactctcggtactagttcacacgctatagtgtagcgcgcgagcagtgcctccctgacagtatgattatccgtgtctgtttgaaaacatagaaacggaaacgtaacgaagacaccaagagctcgacgcctgctgacacaccggcagaagccacatacaacatgctgaaacggaagggacttggttccaagatcaatgagggagctgttggcgaattatacaagactaaagatgaagttgagagcgcgagtaggaaagaagagatggagttcgacgcactgtttgggccggacaacgctgatggcgagacggtcgatgatggtggttacggctatgggggctgcggcgatggtggcgcggaagcctacaatggcattgatgacgattttgatttctaggaggatgtgttatgtgtagcagcatttgcagctgaccagcacgggctagattcttcatctgtgcgttatagtttatagttagtttcatttttcttttgttaggggagtttgaccaaatcattatggagctattggatagtgcacttagttttggttgtataataatgttgggaactaggttctgcatgggcgtcgtaactgtcgcaagccctatgtggtcaagcgcctataccatgggcatttgttgtacatcccacctccaaaagattgcaagtggtgatgtaacattttgtattagcaataaaggacacaagaatgcattcatttgaaactttgaaaatctc

SEQ ID NO: 146136 - DNA, 1964 bp, Zea Mays
gacataattcccgttttctcccgcacggccgcacccaccaccccaccgccgccggaaaccccagccgatcgacggtggcggagatgtcgttgtcctcggtgaagatcggcgaggaggtgtggctcacatgcctctcccacgccctcactaccgagaccgaggaggtcatggggctcctcctcggcgacatcgagctttccagcaaggtcgccacagccctggtatggggggcgtcgccgcagatgaggtgcgagcggaagaaggaccgcgtcgagctcaaccccgagcttctcgccgccgcatccgcgcaagccgagatatccttttctcagcttcattttttcttctctgagtttttgcttgttcctcttcctttggtgctgtgtgcggtggtatttggtattttggttttccgggagtagacttaactcctgttcgcacaaaatgacggccaccatcaagaggactacgagggtgatcggatggtaccactcgcacccacatatcaccgttctaccgtcccatgtagatgttcgtacccaagcaatgtttcagttgctggatacaggctttgtgggccttatattttcttgttttagtgaagatgctcaaaaggttggaaaaatccaagtgactgcctttcagtcagagggtggacaacagcatccccttcctcttgccatcgatccagtcattgaccttgattcatcctgtagttcatcagataatgtgtccgcttcacattctgcatcggttgaaggcatggaacaggacacaggggattccagggtctcaaagaataacaaggcctggagaagatctatggattctactcccatcatgacacaaatcattccacaaattatgaacccagagaaagcgtactcgttccgcacaatcctgataacacacaagaagcgtatgttgatccatatgattcagatatgactccaagcctcctggaggctttgcactggtcaactatggacataagtggtgcagagtatagagggaaggaggtaccacttcttgtggtccctacaaggtatctcctcaagctggacaccacgatgatctcttactgtgatatgcagcgagtcctctttgaagaggagaaatcagcatataatcaagctatgcaacaaaatatttgtgatgggaagattcaccctcttacatccattcaccatacatctacatacaactctctctgcaaactaatggagtactgtttgagtccagctgttactacgctccaggatcgcctgaaggaaaatgaacttcggctatcaatgttacaagaggaggctaagcaacttgaggctgatacccaaaacatgagaaacggttctcctcgtcgcctcatgaatcatggagctggtggcaagagttcacctacggctcagagcaggcatcctttctccaaccaagggagccctagaagcccgagcggtggcagccggaggagggcttgttgatgatcctgttccgcctgatccattggcttgtggcttaaccagatgctccctgaatccccagatatatgatggatggacgaagtgccccggcaatagcactgtacctgtacatacccattgccgtccagcgctgtgctgttgtcgaatcccaacggtctcactttgctttgtagtattggcctattggggttccttatcctgttgtcggagttgtgccattatcctttccatggttgacctgagctttagcctgtacactgtagactctactagaggtttacctgaggctgaattcccgctgctaagatgtgatgttcccggccataagcaaagatgcaggttgtctttgctttgtaaagatgaaggttgtctttgttttgtaatcgaaaaaaaaaccctccgacttcgatagcaatccatttcttgaaacgatatagctataagctgcagccacaccttgcgttgatgatgccaaagctttctttc

SEQ ID NO: 146137 - DNA, 1838 bp, Zea Mays
cataattcccgttttctcccgcacggccgcacccaccaccccaccgccgccggaaaccccagccgatcgacggtggcggagatgtcgttgtcctcggtgaagatcggcgaggaggtgtggctcacatgcctctcccacgccctcactaccgagaccgaggaggtcatggggctcctcctcggcgacatcgagctttccagcaaggtcgccacagccctggtatggggggcgtcgccgcagatgaggtgcgagcggaagaaggaccgcgtcgagctcaaccccgagcttctcgccgccgcatccgcgcaagccgagaaaatgacggccaccatcaagaggactacgagggtgatcggatggtaccactcgcacccacatatcaccgttctaccgtcccatgtagatgttcgtacccaagcaatgtttcagttgctggatacaggctttgtgggccttatattttcttgttttagtgaagatgctcaaaaggttggaaaaatccaagtgactgcctttcagtcagagggtggacaacagcatccccttcctcttgccatcgatccagtcattgaccttgattcatcctgtagttcatcagataatgtgtccgcttcacattctgcatcggttgaaggcatggaacaggacacaggggattccagggtctcaaagaataacaaggcctggagaagatctatggattctactcccatcatgacacaaatcattccacaaattatgaacccagagaaagcgtactcgttccgcacaatcctgataacacacaagaagcgtatgttgatccatatgattcagatatgactccaagcctcctggaggctttgcactggtcaactatggacataagtggtgcagagtatagagggaaggaggtaccacttcttgtggtccctacaaggtatctcctcaagctggacaccacgatgatctcttactgtgatatgcagcgagtcctctttgaagaggagaaatcagcatataatcaagctatgcaacaaaatatttgtgatgggaagattcaccctcttacatccattcaccatacatctacatacaactctctctgcaaactaatggagtactgtttgagtccagctgttactacgctccaggatcgcctgaaggaaaatgaacttcggctatcaatgttacaagaggaggctaagcaacttgaggctgatacccaaaacatgagaaacggttctcctcgtcgcctcatgaatcatggagctggtggcaagagttcacctacggctcagagcaggcatcctttctccaaccaagggagccctagaagcccgagcggtggcagccggaggagggcttgttgatgatcctgttccgcctgatccattggcttgtggcttaaccagatgctccctgaatccccagatatatgatggatggacgaagtgccccggcaatagcactgtacctgtacatacccattgccgtccagcgctgtgctgttgtcgaatcccaacggtctcactttgctttgtagtattggcctattggggttccttatcctgttgtcggagttgtgccattatcctttccatggttgacctgagctttagcctgtacactgtagactctactagaggtttacctgaggctgaattcccgctgctaagatgtgatgttcccggccataagcaaagatgcaggttgtctttgctttgtaaagatgaaggttgtctttgttttgtaatcgaaaaaaaaaccctccgacttcgatagcaatccatttcttgaaacgatatagctataagctgcagccacaccttgcgttgatgatgccaaagctttctttc

SEQ ID NO: 146138 - DNA, 1753 bp, Zea Mays
cctgaatacctgatcctttccgttctcccttcgcacgaatgcttgggtgtatgttttggttttctcctctgacgggatcgtgattggttttacttgcctacctgtagctttccagcaaggtcgccacagccctggtatggggggcgtcgccgcagatgaggtgcgagcggaagaaggaccgcgtcgagctcaaccccgagcttctcgccgccgcatccgcgcaagccgagaaaatgacggccaccatcaagaggactacgagggtgatcggatggtaccactcgcacccacatatcaccgttctaccgtcccatgtagatgttcgtacccaagcaatgtttcagttgctggatacaggctttgtgggccttatattttcttgttttagtgaagatgctcaaaaggttggaaaaatccaagtgactgcctttcagtcagagggtggacaacagcatccccttcctcttgccatcgatccagtcattgaccttgattcatcctgtagttcatcagataatgtgtccgcttcacattctgcatcggttgaaggcatggaacaggacacaggggattccagggtctcaaagaataacaaggcctggagaagatctatggattctactcccatcatgacacaaatcattccacaaattatgaacccagagaaagcgtactcgttccgcacaatcctgataacacacaagaagcgtatgttgatccatatgattcagatatgactccaagcctcctggaggctttgcactggtcaactatggacataagtggtgcagagtatagagggaaggaggtaccacttcttgtggtccctacaaggtatctcctcaagctggacaccacgatgatctcttactgtgatatgcagcgagtcctctttgaagaggagaaatcagcatataatcaagctatgcaacaaaatatttgtgatgggaagattcaccctcttacatccattcaccatacatctacatacaactctctctgcaaactaatggagtactgtttgagtccagctgttactacgctccaggatcgcctgaaggaaaatgaacttcggctatcaatgttacaagaggaggctaagcaacttgaggctgatacccaaaacatgagaaacggttctcctcgtcgcctcatgaatcatggagctggtggcaagagttcacctacggctcagagcaggcatcctttctccaaccaagggagccctagaagcccgagcggtggcagccggaggagggcttgttgatgatcctgttccgcctgatccattggcttgtggcttaaccagatgctccctgaatccccagatatatgatggatggacgaagtgccccggcaatagcactgtacctgtacatacccattgccgtccagcgctgtgctgttgtcgaatcccaacggtctcactttgctttgtagtattggcctattggggttccttatcctgttgtcggagttgtgccattatcctttccatggttgacctgagctttagcctgtacactgtagactctactagaggtttacctgaggctgaattcccgctgctaagatgtgatgttcccggccataagcaaagatgcaggttgtctttgctttgtaaagatgaaggttgtctttgttttgtaatcgaaaaaaaaaccctccgacttcgatagcaatccatttcttgaaacgatatagctataagctgcagccacaccttgcgttgatgatgccaaagctttctttc

SEQ ID NO: 146139 - DNA, 827 bp, Zea Mays
catttcagctaaattaatatactgcataatatcagttaatttatgtgattcacattttattcaatagtttgagtccagctgttactacgctccaggatcgcctgaaggaaaatgaacttcgggtgaatagactagcctgcatcttttgacgactcttggccttgtaagtcattagcattgaacctgcatgtgtcagctatcaatgttacaagaggaggctaagcaacttgaggctgatacccaaaacatgagaaacggttctcctcgtcgcctcatgaatcatggagctggtggcaagagttcacctacggctcagagcaggcatcctttctccaaccaagggagccctagaagcccgagcggtggcagccggaggagggcttgttgatgatcctgttccgcctgatccattggcttgtggcttaaccagatgctccctgaatccccagatatatgatggatggacgaagtgccccggcaatagcactgtacctgtacatacccattgccgtccagcgctgtgctgttgtcgaatcccaacggtctcactttgctttgtagtattggcctattggggttccttatcctgttgtcggagttgtgccattatcctttccatggttgacctgagctttagcctgtacactgtagactctactagaggtttacctgaggctgaattcccgctgctaagatgtgatgttcccggccataagcaaagatgcaggttgtctttgctttgtaaagatgaaggttgtctttgttttgtaatcgaaaaaaaaaccctccgacttcgatagcaatccatttcttgaaacgatatagct

SEQ ID NO: 146140 - DNA, 901 bp, Zea Mays
tttttgatcgcattcgcaaccgtccccggcgacgacggcgtgtacagttttgtacatctacctgcaccgtgtccgctgcacacaagttacaacgccgggtcgccggccctcgacgcgcgcgagctaggggcgctctctctctctggtctggtgcatgcatggcggggctgcagcggtccagcgagacgttccggcggccgggctcgtcggggctggtgtgggacgacaagaacttctcgggggagatcaagccggcggtggcgccggaggacggcgggggcacggcgcacagtcgctcggctgggcacaggcacgcggggtacaaggccacggggcgcgagccgcctgcgctcgccccgccgtcgccgcgcatcgccgtgtgcggcttctgcagaatcttccgcggcggcggcaaggccaagggcaggggcaggggcggcgacagcgccaaagtcaaggggaggctccactgataccgatctcgtacgtacctcctgctccgggagtcggagtccgggtatgtaccggcggcgatcgggagggagttcgggacacgatcagctcagcatcgatcacacatcacgcgccgagtttatttggtaggttcctgttagttttgagtgacgccctctatcttgtgatttgtgatgaattatgagctgtgtcatctcatgtcctggacttgaccctggctgcaatatatactgtctagacagaagtgcattcgagaagatgattgggtagagcacgcaaccgagctagctcccatgaatttcatcttgcaatatataatgtgggtgtttctcttcttcgaaactcgaggtctgaaactggaacgcagaatgctgaacatctcgattccggtggagctcaatgcatttttttttgttaaaaagaaaaa

SEQ ID NO: 146141 - DNA, 1363 bp, Zea Mays
ctccaactccaactgtcgcccgccggtagccgcgctcgcggcagtggacctcgcctcctgcgcggctgtgcccagactgctgtgctgtttcggtctcttcggttggcagcagccacgccgggaacaagatggcggcggcgttgccgcagctggacgacgagatcgtccacggcatggccatcggcgctgtcttcacggactataccgggaagatcaattgcctcgacttccaccgcacggaagatctcatgatcacctctagcgaggacgactccatccgcctatacaacatcaccagcgcgacgttgttaaagactacgtatcacaggaaacatggtgctgaccgtgtctgttttagtcatcatccaagttctatcttatgctcttcacggtacaacctagagtctatagagtcacttcgttatctgtcattgtatgacaaccgttgcttaagatacttcaaaggacacaaagacagggtcgtttcattatgtatgtcacctgtcaatgatagctttatgtcaggatcacttgatcacagtgtcagaatatgggatcttcgggtaaatgcttgtcagggcatactaaggctgcgtggtagaccttctgttgcatatgatcaacagggacttgtttttgctgtagcaatggaaggtggtgctattaatttatttgattcccgatcttatgacaagggtccattcgacactttcttggttggtggagatacagctgaagtttctgacatcaaatttagcaatgatggcaagtctatgcttttgacaacaactaacaaccatatatatgttctggatgcatatgttggggataagaggtgtggttttagtttagagccatctcccaatgtaacaaatgaagctgctttcactccagatggtcaatatgtaatttcaggatcaggtgatggaacactgcacgcttggaacatcaatacagtacaagaggttgcttgttggaacagtcgcattggtcctattacagcattgaagtgggcccctcgtcgagccatgtttgcaaccgcatcaactgccctaactttctggattcccaaccgatcgaattaggatcaggtgcctggaaaaacaaggggtggaatttcatatatgttaacttggcaaatgtttatgctctgttgttttctccaaaagatagatgccatgtatgaaatcacttcattaccatttacggaggcaatggcatagttccaggcagataccggttaaattgttgtgttagcactcataaaggtttttttggtgatttactctggacttgtgcttcgaaaaacaggcgcttgtaacttctggaaaccactgatttaatatggacatgttggagaatc

SEQ ID NO: 146142 - DNA, 849 bp, Zea Mays
atggtgttcatttacttggagcccctaagattacatatgtagaaaaagtatttgaaaagatggctgtacagaaaagagttggagaaggaacgaactcctgatgttgagaaaaccatcgagaaggaatttccttcatggttcaaggaccatgttgcaacactacaatatgtgaatggggaagacattagcactgatatttatgctttgtcatgtggaccagatctacgagtaaaattgttttcaggatgcattgttaatggcgttcgattccacaccatcgaccaaataattcaattgcagtacaatgcagactgtagcggacaccggtctgtagttctatttcgatgtgattggtttgataccgagagtaagaaggcaagaatgaaagatgatggttttttcaaaagcataaacagttcagtattatggtacaaagatgatccttttattttagccacacaggcaacaaagattttttacttggaagacaccaaatattgtggaagctggcgagttgttcaaaaatttacgcacaggcatttgtggaatgttgatgaaatttcaagtgacgaaatttcaaagggagtggcgttgtcataccaagacgatgagtgtggtgactttgaaattcaacgtgaaaattttagtttggacgatgagagaccagttgttgaaaattcttacactgttgctgccaccgtagttgaagagcttcgtcgacaaagggaagatgaagaggaagaaaattattttgaagatgaagtcgatgaaactgcgatgcaatatgcgagtgataatgatgaacaaacattccataatgtcgaagatgatgatagtgactatgagtag

SEQ ID NO: 146143 - DNA, 1077 bp, Zea Mays
atgcccccggggaagaaggggccgcgagtcccacggtgtcacgcggaagatacagaacctactcctacagactatgagaaacagagggcaattacaatcatgaagaataatcaaatgatgcaacggttagggattcgtcaattacaatcaatgatggctagtattccaagtggaaggatgaacgataatgctcctcacgaatctggatcgttgtatgatggtgatgatattgaggactctgaggatgagatggtcagtaaggaatccctagttgataagtctgtagccagccacatccccaacaatggtgctgaaatctcttcgaaaaatacaagagcctctaaaagggttgttgcacctggagtgcaagaacaaccaattagagtcactaggcgaaggagtgctaccataaaccaagagtccaaccaaaatataatggctggtatactgtctgattcttgtgatgccacaaaccaagattgcacccaacgcatatctactgttgacacatgtatgaagaacaaaattagtcgtgaacaagtaaagtttccacaaggcacaggctctcaatcctacgttgcaaaggcatactcattgaagcaagaaaaatttaaagataccgaacctagtgcaattgatcttttcaaggagatgcattgcagcaagaagaaagggtttagtgaaactgtccagaaagctattgttgacatggaatcaatggcagcaacaccagttgaagatggacatcattcaaagtcttcaacagaagtagtctcccaagtgctgcctaaatcaagtttattccttcagaatgtaggcttggccacctctaacagaagctcttcaggaaatgtttcagcaaaggtgcagcaacttgagtctcaattggagactgagcggcaagaaaaagacggactacgagatgaagtccaaagcttgaaggctaagacacaggcatctgacgagaccattgctaagcaatctgatgagattgcagatttgaagaagtccatagcagaaaacaatagcctccttcgccagattttaagcatcaatcgtagccaagtgtctccttaa

SEQ ID NO: 146144 - DNA, 1379 bp, Zea Mays
tggcgcgcgcgagcccgcactgcaccttgcttagaacccacttgatcgctgcctcaccttgttcgtttttcacctcacctagttcttggtacgcacgcttccccatatatacccccctgcgcacgcatagagctagccacaagcagacaccgaccgccgccgttgcaatgcaagtggccgcccgcggtcggtcaccggcgttgcattgccccgtctcttagtttgtcgccgtcgatcggggcagagaatgggacggctctcctgcggcggcgtgcagcccaagctccgcaaggggctgtggtcgcccgaggaggacgagaggctgtacggtcacatcattcgacacggcgtcggctgctggagctctgtccctaagctcgcagggctgcagcgctgcggcaagagctgccgcctgcggtggatcaactacctccgccccgacctcaagcgcggcggcttctcgcagcaggaggaggacctcatcgtcgcgctccacgagatcctggggaacaggtggtcgcagatcgcgtcgcacttgccggggcggacggacaacgagatcaagaacctgtggaacagctgcctcaagaagaagctccggcagcgcggcatcgacccggccacgcacaagccgatcgccgcggaggcgggctcggcgccgctgcaccgcgacgaccagagcaagccgcagcagcagcctgcggcggcggccgtgttcgacccgttcccggtgaccgacttcggcttcgacctgggcgcggcggcattgtacggcgacgacgtcggcggcgacgcgtcgtcggacgccgggttcttggccgactacagcagcgtgctggacgtgtcggagaacctgggctacggggagagctccagcaacagcagcggctggaactgcgcggagatgggcaatgccgtgctcgacagcgaggcgctgcactggacctcagccgccgccgctgccgccaccaagccggagccctgctcggagctggagcagcagcgcagcggaggattgagttcagaagtgttcaacatagaattcaatttggaatacttctgaatcccgatccttctttttttttccccggccctccattcatctttgcctttcctccctgaattatccatccatccattcccctacgcttttacagaagacgcaattggacgattagggattgtacgtatagtaaccaatctcttaattttgtctaggccatgatacacacacctttttttaaccctttttctgtatactcttgcgccaggggaacggaagacattggtaggtagatacgggattactgtgtactgcaatatacaaatgtatttatatttttgtaaagaataaattaaacctgcagttattttatttc

SEQ ID NO: 146145 - DNA, 416 bp, Zea Mays
atgtcaatattaatatcaactaatttcttggttatttacaataggatgggagagtgtcgaatgatttttcagatactatttcttggtccgtcaaatctatttgacctaaatgcaagtttttgctcaaatgtggcaaaaaatgattgtctcaccaattgtcagcacggctgcctccaacaaagttagaatgaaaagatggaataaaactttggtggtcgcacatgtgtggagacttgagtttatatatacttagttaggctcaatgttaacgcaaataggtgatgaccaaaattttcaattagtactttagtttgaatttagattacacttttgtatgagttatttgacaatgcttatttatgagatattgaatgatacttatctatgttatattaattataatgttattaaataca

SEQ ID NO: 146146 - DNA, 103 bp, Zea Mays
tcttggaattctctctcctgggtctcaaagtagatttttttatacaaattttgggccttacatgatgatattatgcaaaatgatgaggatatcgaagacacac

SEQ ID NO: 146147 - DNA, 258 bp, Zea Mays
atggcaggggagcagggaaagagtcccccggcgagcagagagggatgccgagcagggagctccgaccgactgggagaacgccggacagaggaaatggcgcatggtgaagggagcaagcaggaagatccggccagacgccgggaagaagaggccgccagggcgagccaggcgcgcgcgcggagggagatggatgagcggctgccatgggagagacgctcggttcagaggaaggagaaggagcgcgtggggaagagataa

SEQ ID NO: 146148 - DNA, 104 bp, Zea Mays
ctcaccgccgttgcctcgctcccatccgctcggccaccctggataaaaatcccaccacggtgttcatcttctgctctcagccgagcgccccttccctgctcgtc

SEQ ID NO: 146149 - DNA, 456 bp, Zea Mays
gtggagcctcaccgtcgcagctctagctcggatttcccttcccagccgaaattcctccctctgctcgagtccctctgcccatctccacggctgaccgcacggctcctccctgatgcgcacgtctctgccccagctcgctcggacctcgccgcggcctaccctttgcgccgtgcccctggtcccggcctcagttcgcccactccccatggcgtgcccgccttgcttctccagcgtcgcgtccctccccatctccgctgctccctcttccgtggtccctggctcgtctttggtgctcgcctggctgcgccccttagctctcgaccatggtggtcgcccatggccgtgttctgtttttctccccgcagcgctcgacgccttagaacctgcatagctctgttcgtctcgtcattaccttgctactgcctccggtgtggagcgatttgcgtgtgtcgatga

SEQ ID NO: 146150 - DNA, 113 bp, Zea Mays
catttttataggtcacgttgttggagatgctcttaaagatatatcatctcttaatttttgtgacatgttttattattattaacaaaaaggtctttaagcatggattaaactag

SEQ ID NO: 146151 - DNA, 465 bp, Zea Mays
ccagcatggatctccaaatcctaacacatattttgtaggatccatgagccatcatcagaagaacataaaaccacatgcagacaataaataaagtattaacacacccaagttatgttcagtccttagcacaacaaaaaactaacaaccaaaacaacagaggaacaacacaatatattttgcaatgacagaaggatgggtgataggtacatagaaatggtagaagcataccgagtagagatggccaaatgggcggcacggcacggcccggcccgggcacggccaggcacgacacggttagggcacggcccgtttggcccgtttaatagccgtgacgtgccggcacgacactagtgcctaacgccaggcccaagcacgacactaagcctgcttagccgtgccgtgccggcccgtttagcccgtttagcccatatagcccgtttagcactacaccacataattttagtc

SEQ ID NO: 146152 - DNA, 361 bp, Zea Mays
agctgcgaagaacgacgaaagcagagagagggaggaaaggggaagtccgccgccatcatcgaccaacgcgtatgcctccatgaaagtcttcctgccgtgatgcgaggctgctctagaaaaacatgtgggaggaggctggagctgaaaggatgtttctactggcagcctggtgtgaagacagagttgagcatatgtggcagaagcaagttgtatgtagcacatagttatattcatcattgataataaatcaaactattgacttgatccttgatgtatgttttcaacattttttttgtctacgtgtttagtatcaatatgtaattatattattacactttacagagtggtacacataactgat

SEQ ID NO: 146153 - DNA, 708 bp, Zea Mays
atgcaaggtaggctcctctcgctgactgtgctggccgtcaaggtggcaacgttccggctgccgctgccgtccgaggacaccgccgacttctccctatgggggctcgtgcccatctcacagaagtcctcgcccagcatggtctccggcggccacaccaccgccctgtccccaacgcgcagaaacggtagattgctcgtctggaaggctcgcgtggagaagcacaaatacagacatctggagaccgttcgtctttctaggcgtcgaggaggaggcgaggggcgaagggagtttgggatgaaggcgaggccgaggtgtggggccacggcggtcgttcgtcttcccgggtgtcgaggaggagagaagaggcgaaggagagggagtccgggatggaggccgggccgaggtgcgggcttacgtcgagcaacaaggccgcagccgtcgagtgaggaggaggcgagaggcgaaggtgatggaggccaggatggaggcggggccgcggcgagcagcgaggccacaaggcgagggaagcatacatggaagagaggtggagcacacgcaagagaggcggagcacaacgagagcgtcagtggagagtcacggaggcagggcgtgaaatttctagaatcttcgggacgcaggatgtgcgatccaacagcgaaaaagcgacgagcgacaaggtggagagaacgagagaggcagagacagtga

SEQ ID NO: 146154 - DNA, 137 bp, Zea Mays
tatttgcaaacactttacaaaatcattcacaaaagtactaactcttcaagtgtttcgcaaaagccttcacaaaagcactccaacttcttgtatcctcttgttttaaggcacaagcttgtaggggttgtgatgtcgcc

SEQ ID NO: 146155 - DNA, 556 bp, Zea Mays
gcattccttacatagaacaaacagaagtaaaaaaggatacatgccaacatttcgcggtacatcgttgccattgtcggacttgtgagtaaaaaagcaacgccacagcaaacacaaaactagtgtcaaaaaatgatggagatacagacacacacgtgagcaagaacaagaacaagaacatccaccaccaccaccaccaccctgtatgtacatacacgaggcacatcgagaaaaaaaaaagataaaggtagtcaatggccaggaagaaccgcaaagggcatcgtcagtgggatcagtcgtggtagaagaggagcatgatgacgcactcccggatgatgcagagcctggccacctgcttcctcagcgccgcgccgagcccaccgcctcctcctcccccgcgcttccccttcttctggccactcccactcctcggcctgttcatcgtcccggccggacggcggcgagtaaacggaggcacggagggtgaggaactgagcgccaaggctcccgccgccgccgcgctatcgctggatctgcatctcgcctgctgctgtgatgt

SEQ ID NO: 146156 - DNA, 436 bp, Zea Mays
ggaactccaggggaaaaatcaggagtttgtggactgctgctgctgattgttacatatgtggctggtacacttgattttggggtaaaatacaagaagggtacagcttcagatcatggcttagtcggctacacagattgtgactgtttagtagaccttgttcacagaaaaagcacatctaggatcttattcttcctaggaaacaacttagtgacttggtcttcacaaaaacagaaggttgtcgctttgttgtcatgtgaagcagaatatataggagctgcactaggaacatgtcagggtgtgtggctgagcatgctcattgttacagaacctgaagcttgtgattcttctagctctagctatggtgtttcaggagaatgaggcagtagtggtgatgctagaacaccccctgaatgcccaccaccagctccactgagac

SEQ ID NO: 146157 - DNA, 1168 bp, Zea Mays
gcacccgctctcgtactcgtaggcaaggcaacttcgcaaaacggcaaaaaggcagccacgccttgttcatttttatttttttaatctcctcccgtcggcgaaattttacacgccagcaaaaccgccctgaggatgaaatagaaaaaaccccaaacaagccctaacgcgtcccccggaaccagaacaagtccagtctgtccagaaatacattagaaaaaagagccaaagaggagaacaccggccggcgaggtggacgaagcggcccgccgaggaaatggcgtcgatgcagagctggcgcaaggcctacggcgccatcaaggacaccaccaccgttagcatcgccaatctcaactccgacttcaaggatctggatgtggcgatcgtgaaggcgactaaccacgtggagtgcccgcctaaggagcgacacctgcgcagtgcgttgatttgttcttataccccgtgtttccgcgtatctaggcttcggcctaatttagtgtttttctattgggggcgggcggaattagatcgtgcctataagtggcgaggggaggctctgaaggggggagggaagggcgtgcgtgcttttgggttcgtgcagtgtttaatgatggttgattgttgcgtggtggtatcacaggggttgttgcagcgacgtccatcaccaggcctcgggcagatgtcgcctactgcatccacgcgcttgcccgccgtcttgccaagacccgcaactggatcgttgctctaaaagcacttgtagtgatccatagacttcttcgcgagggtgatcctacatttcgagaagagcttctcaactttacacagaggggacggatcctgcaactttcaaactttaaggatgactccagtccaattgcttgggattgttctgcctgggtgcgcacatatggtttgtatttggaggaaaggttggaatgcttcagagttctgaaatatgatgtcgaagctgagcgcttgtccaaacaaggtcaaggtcctgaaaagggtcacagtagaacgagagagttggattcacaggatctgttagagcagctgccagcattgcagcagttactgtaccgacttgttggatgtcgggtgattatctcttttaacttttggctatctagtctgctagctccttctcatttgttttttcttttacttgaaa

SEQ ID NO: 146158 - DNA, 2307 bp, Zea Mays
gcacccgctctcgtactcgtaggcaaggcaacttcgcaaaacggcaaaaaggcagccacgccttgttcatttttatttttttaatctcctcccgtcggcgaaattttacacgccagcaaaaccgccctgaggatgaaatagaaaaaaccccaaacaagccctaacgcgtcccccggaaccagaacaagtccagtctgtccagaaatacattagaaaaaagagccaaagaggagaacaccggccggcgaggtggacgaagcggcccgccgaggaaatggcgtcgatgcagagctggcgcaaggcctacggcgccatcaaggacaccaccaccgttagcatcgccaatctcaactccgacttcaaggatctggatgtggcgatcgtgaaggcgactaaccacgtggagtgcccgcctaaggagcgacacctgcgcagggttgttgcagcgacgtccatcaccaggcctcgggcagatgtcgcctactgcatccacgcgcttgcccgccgtcttgccaagacccgcaactggatcgttgctctaaaagcacttgtagtgatccatagacttcttcgcgagggtgatcctacatttcgagaagagcttctcaactttacacagaggggacggatcctgcaactttcaaactttaaggatgactccagtccaattgggttatgtgcagcttgggattgttctgcctgggtgcgcacatatggtttgtatttggaggaaaggttggaatgcttcagagttctgaaatatgatgtcgaagctgagcgcttgtccaaacaaggtcaaggtcctgaaaagggtcacagtagaacgagagagttggattcacaggatctgttagagcagctgccagcattgcagcagttactgtaccgacttgttggatgtcggcctgaaggagctgcaaataataactacttggtgcaatatgctcttgctttggtgctaaaagaaagctttaaaatttattgtgcaataaatgatggaatcataaacctcgttgataagttttttgagatgccaagacatgatgcacttaaagctcttgaaatctacagaagggctggccaacaggctgggaatctatctgatttctacgagaattgccggggattagaacttgctaggaattttcagtttcccactctgagggagccaccacaaacatttcttgctactatggaggactatgtgaaggaggctccacgcatggtcccagttcgagaacccctggaacttcctgagaggctgcttcttacatacaaacctgaagaatcagaggaaattcttgagcctgctcctgttgaagaggaaaaagtaccagttgaagaacctgttcttgtaccacctgttactgaagttgtttcacctcctcccaaggctgaggtgcccgatactggtgacttactgggcttagatgatacaaatcctgctgtatcagctatagaggaaagcaatgctcttgccttggctattgttccaacagatggcgcttcaacaactggtaacactgcatttcaagataaggggtttgatcctacaggatgggaacttgcccttgttactgcaccaagcaatacaacttcatctacttctgttggtcaattgggtggtggactcgacaagctcattttggagagcctttatgatgatggggcctacaggcagaggcaacaacaacagctgtatggttcagcagctcctaatccattcatggcaaatgatcctttcgcgatgtcgaaccaagttgctcctccaccatcagttcaaatggctgccatgtctcagcagcatcagcaaatcccaacgatgatgcaaccaaatccctttggaccacctatgcatccacaggtgagcatggcccctgcaacaaacaatccctttctggatgctggcttcggggcattcccagcggcgaacaacggccatcagcaacacaacccatttggcagtgcccaacttctgtaggtcacttagtcacaagagcaaatttgtgccccagcagatgcgatttttgtgtgattatatcatgcattgtgctggacctttcttgcatgtgacgcgtgtattatgttatggcttcaccacacggagagctgtgcctatgtcgtgacccaactcttgttgtaaagaaattagtcacctgtgtaacatccaatatatgtcaataaacagtaggcagtgttattacatctataaacaaaagaacagtggtatgtaggaaattcttaatattgtttattccattgctttttatcttcttggaaagctgttccgttgttgtttgattgcca

SEQ ID NO: 146159 - DNA, 2295 bp, Zea Mays
gcacccgctctcgtactcgtaggcaaggcaacttcgcaaaacggcaaaaaggcagccacgccttgttcatttttatttttttaatctcctcccgtcggcgaaattttacacgccagcaaaaccgccctgaggatgaaatagaaaaaaccccaaacaagccctaacgcgtcccccggaaccagaacaagtccagtctgtccagaaatacattagaaaaaagagccaaagaggagaacaccggccggcgaggtggacgaagcggcccgccgaggaaatggcgtcgatgcagagctggcgcaaggcctacggcgccatcaaggacaccaccaccgttagcatcgccaatctcaactccgacttcaaggatctggatgtggcgatcgtgaaggcgactaaccacgtggagtgcccgcctaaggagcgacacctgcgcagggttgttgcagcgacgtccatcaccaggcctcgggcagatgtcgcctactgcatccacgcgcttgcccgccgtcttgccaagacccgcaactggatcgttgctctaaaagcacttgtagtgatccatagacttcttcgcgagggtgatcctacatttcgagaagagcttctcaactttacacagaggggacggatcctgcaactttcaaactttaaggatgactccagtccaattgcttgggattgttctgcctgggtgcgcacatatggtttgtatttggaggaaaggttggaatgcttcagagttctgaaatatgatgtcgaagctgagcgcttgtccaaacaaggtcaaggtcctgaaaagggtcacagtagaacgagagagttggattcacaggatctgttagagcagctgccagcattgcagcagttactgtaccgacttgttggatgtcggcctgaaggagctgcaaataataactacttggtgcaatatgctcttgctttggtgctaaaagaaagctttaaaatttattgtgcaataaatgatggaatcataaacctcgttgataagttttttgagatgccaagacatgatgcacttaaagctcttgaaatctacagaagggctggccaacaggctgggaatctatctgatttctacgagaattgccggggattagaacttgctaggaattttcagtttcccactctgagggagccaccacaaacatttcttgctactatggaggactatgtgaaggaggctccacgcatggtcccagttcgagaacccctggaacttcctgagaggctgcttcttacatacaaacctgaagaatcagaggaaattcttgagcctgctcctgttgaagaggaaaaagtaccagttgaagaacctgttcttgtaccacctgttactgaagttgtttcacctcctcccaaggctgaggtgcccgatactggtgacttactgggcttagatgatacaaatcctgctgtatcagctatagaggaaagcaatgctcttgccttggctattgttccaacagatggcgcttcaacaactggtaacactgcatttcaagataaggggtttgatcctacaggatgggaacttgcccttgttactgcaccaagcaatacaacttcatctacttctgttggtcaattgggtggtggactcgacaagctcattttggagagcctttatgatgatggggcctacaggcagaggcaacaacaacagctgtatggttcagcagctcctaatccattcatggcaaatgatcctttcgcgatgtcgaaccaagttgctcctccaccatcagttcaaatggctgccatgtctcagcagcatcagcaaatcccaacgatgatgcaaccaaatccctttggaccacctatgcatccacaggtgagcatggcccctgcaacaaacaatccctttctggatgctggcttcggggcattcccagcggcgaacaacggccatcagcaacacaacccatttggcagtgcccaacttctgtaggtcacttagtcacaagagcaaatttgtgccccagcagatgcgatttttgtgtgattatatcatgcattgtgctggacctttcttgcatgtgacgcgtgtattatgttatggcttcaccacacggagagctgtgcctatgtcgtgacccaactcttgttgtaaagaaattagtcacctgtgtaacatccaatatatgtcaataaacagtaggcagtgttattacatctataaacaaaagaacagtggtatgtaggaaattcttaatattgtttattccattgctttttatcttcttggaaagctgttccgttgttgtttgattgcca

SEQ ID NO: 146160 - DNA, 1583 bp, Zea Mays
acgagagtacgagacgaggcacggaacggagcgagccagactacccacctaggcccagcggcatgaggggcagcgagatgttgaccgccgcggggggcgccggcacggccccgtccacggtctcctcgggggcggccgcggccgcggacctggttgctggagccgggggcacgggcgctatcggcgcgggcggaggaggcggcaacttccccctcgccgtcgccctcctcgccttcgccttcgcaaacttcgttaacctcgtctccatctggttaaaagagaagaggtgggatgcaaggaaatttcttacttcagctggagtcatgtcatctctttctgcaactgtggggagcttggccgttgctgtgggtcaacaagaaggcgcagatagctctgcatttgcccttgcattgatttttgctgccgttgtatgtacttaaatcaatcaggtcccgttaatttcttttgtaagcatgtgtgtgttgcaacctttgaagcattcctttttctgaagatgttggcatctaattttgttcctacacagtagtttttatttatcatcttttgcttatggaaatagggttatttagtacaaattcaaccaatagttgatctcttagccttactgggcatgagcattattttttctttcttctttttttaaataattggagatagtgataatgttgacattgctccactctgtttatcatgaatatggacaccctttatggtagtgtgccagtgtctgacttgcactagtggccaacattcattttgtttcagttgtaaatttccatgcactttcatgtcaaaaccgttcttttgtcaatttgacaaagttatctatattatgtggataagagcttttgcattctggaaccatgccagccgatgtccaccggtgccatcactcatctgaaaccatgctaggatttgcattttaaagcagtttctgcactgatgactaatatattttcccctactttacttaagtattttatctttatttaagaaaaaagtgaatgtaaaaaacggctaggttttgttgcaagcatattcacatgaacccttttatatagataaattgatgttagctgcccttttttaaatatgtcctgaacatacgtttttgtcatataggtaatgtatgatgcatcaggaattagatggcacacaggtcgccaagctgcgttgttgaatcaaatagtctgtgatttcccaccagaacatccaatcatttcaacctttcggccactacgggaacctcttggacacagcccacttcaggtttttgcaggagcacttgttggttgtgcagctgcttatttcatgggaaaatctgtataaggaataggaatgtatagggtttggcttgtacacgaattccattgacttatttttgtaaaaaaatatcattgatcaaccgcttcattttcctctatctgcacttcagagtgaaccgcacggggcattatctagaaaatggttagtatattctgtttgctgacacagaaacagattaggttgtgcagcacagcagcagtattcttccactggtaattgatttttttttgtttcta

SEQ ID NO: 146161 - DNA, 868 bp, Zea Mays
acgagagtacgagacgaggcacggaacggagcgagccagactacccacctaggcccagcggcatgaggggcagcgagatgttgaccgccgcggggggcgccggcacggccccgtccacggtctcctcgggggcggccgcggccgcggacctggttgctggagccgggggcacgggcgctatcggcgcgggcggaggaggcggcaacttccccctcgccgtcgccctcctcgccttcgccttcgcaaacttcgttaacctcgtctccatctggttaaaagagaagaggtgggatgcaaggaaatttcttacttcagctggagtcatgtcatctctttctgcaactgtggggagcttggccgttgctgtgggtcaacaagaaggcgcagatagctctgcatttgcccttgcattgatttttgctgccgttgtaatgtatgatgcatcaggaattagatggcacacaggtcgccaagctgcgttgttgaatcaaatagtctgtgatttcccaccagaacatccaatcatttcaacctttcggccactacgggaacctcttggacacagcccacttcaggtttttgcaggagcacttgttggttgtgcagctgcttatttcatgggaaaatctgtataaggaataggaatgtatagggtttggcttgtacacgaattccattgacttatttttgtaaaaaaatatcattgatcaaccgcttcattttcctctatctgcacttcagagtgaaccgcacggggcattatctagaaaatggttagtatattctgtttgctgacacagaaacagattaggttgtgcagcacagcagcagtattcttccactggtaattgatttttttttgtttcta

SEQ ID NO: 146162 - DNA, 750 bp, Zea Mays
atgttgccattttatctatcggtgtctgtcttctaattgaatctaataacttttgctgcagttgttgaatcaaatagtctgtgatttcccaccagaacatccaatcatttcaacctttcggccactacgggaacctcttggacacagcccacttcaggtagctctactacatacttctatcttctattcatggatgcaagtgagtataaactataaaccccatttgcattcctatgtacatagttaatatggcacttgttgagttttcttgaaatgaaacatggtggaatgatccacctttttggtttggcgcctgtttgtattaatgtattatactgttgcctctgcataacaaatggcctaacgatactaaaatgttgtattgctgctcaaatgtgtctccttaactgtgtcttgcattccagaatctaatctggaatatttcatgctaacccaagaaaacaaaattttgggttcttagcctatggcttctatttttagctgcatgtgtatcttaatacgactgttgaattttcagttgctgaattatatttatatctttatatgtttccgtatttcttctacttttttacttagcttgtttcattctctttcttttgtcgctgcaggtttttgcaggagcacttgttggttgtgcagctgcttatttcatgggaaaatctgtataaggaataggaatgtatagggtttggcttgtacacgaattccattgacttatttttgtaaaaa

SEQ ID NO: 146163 - DNA, 1492 bp, Zea Mays
atttaacagctgcctcctaacgattatcaaaatcaaataatcaaatacaccagtacaacaatgtcagactacctatctccaacagactccatatcccactctatctcactccatctccatattttaaactccattttacaaatagtataaaaaataatttgcacgtttacacgaatgctggagatggcccactcgaactgagtatcaagacgacgacatcaggtgatcgacgagcttcatctcacttgcgctgatgctgctgcaaacgcatgcagcgacagactgccacccttgtgcatccagccgcatccccctctgccccatctgctccaagacgaagcaggcctcctccgccttgccgtcctcgccgagccctctcaccagccgcctgaacgtggggggcagagagcagtggccgcttgcaagcatcgcgttaaaaactcgcagacccaggtcgaagtcgcgcgcttcgcagcacccgtcgaggaggacgcggtaggtggcggcgctcggcgctgttccatccttgagctgcatctcgaccagcgccctatgtgcctcgtcgaccctgccggcgtcgcagaggcacctgatcaggacgttgtagctcgcgtcgtcgggcttcatcttccgcttgcgcatgtcggagatcagccccttaacgccgtcggcgtccccacacgccgcgcacgcgctcatcagcacgccgtagttcgccacatcgggctggcaatcccggtactccatgtcgaacaagagcttcttggcgtcgtcgtaccgcccggcgtcgcagagcccctgcattaacagggcgtaagtcacggcgttcggtgccacaccccggcgcgtcatctcgtccacgagccgctccgccgcggccagctccccttcccggcacgccgaccccaccagcgtgttgaacgtcaccaccgtggggcgcacgccgcgggcgagcatttcgtcgagcaccacacgggcgcccgagaacccgtcccggtggcaaacacccttgaggatgatgttgtaggagaccgcgttggtccggacgcctagcttaggagcctccgggagcatgtcccgcgcggcgtccacacggccgttgcagacaagggagtggaggagggcgtggaacgtggcgttggagtgcgagcagaaggctgggacggcgcggaagacgagtagcgcggcgtcgggccgggaggcggcgccgaggtggtcgatgagcgcggcgaacgcggtgggctgcagcgggacgcggagggaacggagcgcggcgaggagcggggggaggagcgggaagaggcgcgcgcgtgcgacgcggtacagtacacacgccgcgaaagggtggtcgtggaggtggcgcggcgcagagaggagcgaggccgcggcggccacgggcgaaggaagggacttgaggtggaggaggaaaggatgcggctccggcgggggctttggcctgtacggaaacttcttcgggcggcggagtcggcgc

SEQ ID NO: 146164 - DNA, 1015 bp, Zea Mays
aagggatgtcgatgttccgatcggacggcgtggagaagggacttcagatcggatggttgagataagacgttggggttcggcgttgcacacacgcggaaaagaagaagctcgattcgctgttttctgccagagcacaccgtggacgccgtccccgctcaagtgaggttcggagctcagagccttgcgatctctcggctgcgcgcgcgcaagatggctgacccagaattggaagctatcaggaagagaaggatggaagaactaatggcaaaacacggtggcggtggggcaaatcaacaaaatgcaagccaacaaaaagctcaggaagacgcgaaacaggaagctgaggaacgccgacagatgatgcttgctcagatattatcttctgaagccagagaaaggatctcccgcatagctttggtcaaacctgacaaagcaagaggggtggaggatgttctgctgagagctgctcaaactggtggaatatctgaaaaggtgtccgaagaaagacttatctcccttctagagcaaattaacacccacacaagcaagcaaaccaaagttacggtatgtgcattttaacaaccttttatgacactattgaacaagctgctgtgcctcgtacactgctataaaaactgatttagttttcagcagaaacatgcaagagatttgcttttgtcagaacaagctagtagtcctgttaactcttgtttgccttgcagattcagaggcgtcgaagtgtccttgacgacgacgattagacgcgacctgcaagctttgcctctgagtgcatgatgatgggctggtgattgattgattataagctgtaccgaacttgtttgcttaaagacaatgatctgatgcgactgcaaacagccatcaaaacttggttgtatatgatccgatgtcttgttggtgtacccccgttgaggacagtcgatgtattggctgtgattatccctgaaacactgttcttccttgagttatagtatttattaatgggtgttctatctcc

SEQ ID NO: 146165 - DNA, 918 bp, Zea Mays
aagggatgtcgatgttccgatcggacggcgtggagaagggacttcagatcggatggttgagataagacgttggggttcggcgttgcacacacgcggaaaagaagaagctcgattcgctgttttctgccagagcacaccgtggacgccgtccccgctcaagtgaggttcggagctcagagccttgcgatctctcggctgcgcgcgcgcaagatggctgacccagaattggaagctatcaggaagagaaggatggaagaactaatggcaaaacacggtggcggtggggcaaatcaacaaaatgcaagccaacaaaaagctcaggaagacgcgaaacaggaagctgaggaacgccgacagatgatgcttgctcagatattatcttctgaagccagagaaaggatctcccgcatagctttggtcaaacctgacaaagcaagaggggtggaggatgttctgctgagagctgctcaaactggtggaatatctgaaaaggtgtccgaagaaagacttatctcccttctagagcaaattaacacccacacaagcaagcaaaccaaagttacgattcagaggcgtcgaagtgtccttgacgacgacgattagacgcgacctgcaagctttgcctctgagtgcatgatgatgggctggtgattgattgattataagctgtaccgaacttgtttgcttaaagacaatgatctgatgcgactgcaaacagccatcaaaacttggttgtatatgatccgatgtcttgttggtgtacccccgttgaggacagtcgatgtattggctgtgattatccctgaaacactgttcttccttgagttatagtatttattaatgggtgttctatctccacgccggccctgtcaacccatttttcagctctggttgctttgcttgcgaaacaaaaaaaaa

SEQ ID NO: 146166 - DNA, 1806 bp, Zea Mays
agcctcaaatggaccgttgctaacaattaaccagttacccaattactggtacacgaaaaaatatatatatgtatttatgcatgcatgtatacgacgacagcagctcccggaccgtacggcttcattccctccctgctcgcttcgctgcgactgaccatggcatccttgtccttccacctccacgcaccgccgcatccacaccacctccagacgcgcgcaccgacttggagccccaagtctcgcggcggcgcttggcggtggtggacgccttggattggactacatcggtggcgagccagaaccaccgtggagttgcgacggcctggagtttgcattgcaggcggaaaataggaatttatgctagttagtaacatatatatatatatatatatatatatatatatatatatatatatatatatatatatactccctctgtcttaattcataattggtttgacttttaatcctacttttattttttaccaaaaaaataaaaactaaaagtattatataaaataaagggagaaagcatttaatttttttccaaaacataaaatagtgctggtcaaatatcacggccgaatggagtggggcgcctttgcaacgatacgatatgattgcattgcacggcgaaggaccaggcaggaaaggtccatatacataggacgtgcagatcgtgtaacagtggcgaaggcaaaggcaattggtttgccatcaaggccgaaatggcccacgcagacacagatcttggcacgcgtggtacatcatctgagtggatttatgggcgcgcactccgtacggcaggacgacggcatcaatgcgacacgcgcaaagaagcacggcagcgcgcggcagcagaggccagtgcatgcatgcatgctctactagctagaccagagtacagtgcactgctcttgtgtcttgtgcaatgttctacatctctttgaagctttagatcgtccctgctagctagctagctagcatccgaatagaaatgctactaaactgaacacgaagtatttccgacgcgacatgctgacacagcagggttaagtgcttagctgtttccttcgttaaatcatcaacactttgaactcagtgctagccaaaggcttcggaaaccaagaaccatcagcatctaatctagctagctatccatgagcgcttcttttgctatatagcagtaagatatgcttctgctaccttgtgcatgtgttgacacaatgcaggaaagaactatagttctagtatattcagcgctgttataaaaaagccattttttgtagaaagctagctagtacattcgatctacatgcgcatgcatctaataagtctttgctctaagtcaacaaaaacaataagaactcataactagccaaattatagattcatagtacattctacatgcgcattcaaacatttgttctagttagcaaaaaaaaaaaaacaagaagaacttgtgttctaaagaactcatagccaaatcatagatccctccacagtccacaccatgcatgatgagaagtaaacgaatatctgcaacagaacaggccggataacagaagcagggacgagtaagtacgtaactgacctgctggtctccccgccgagcccacggatgtccgggggcaactcggcggcctcgcctcccttgtctaccaccggcattgctggcgtcgtctctccttgcaggcgccctggcgggcttggggcttccaaaggagcagcgagagaggaagcaggctccaaaccgcggaggaggagaaatgagagcaattaagctgtggagtgagtgagtgagtg

SEQ ID NO: 146167 - DNA, 1414 bp, Zea Mays
acgcatctaattattaaaaaataaaaaaaaactgagacccccacttgggcactcgacgaaacggcgactcctgcgccgggggatccccataccatacgccgcgccgccgccacgaacagcgaccgccgcgagggcgacacgaccggcaaccggccgaggggagatacgataggcgagtgcggacggcctatcgccgtgcgacagcggcaccccggtgtggtcgcgtgcgccgccggcgccgggccaaggcgtcaagcgctgcccagtcccgattccgccctgcactgcctctcgccctgtcctgtctgactgtccgagactctgactccgccctggtgagcgttcttcactcctccgattcttcacctcgcactggtccgatggaatccgacgccgaggaggaagcggcggcgaccccagcagcggcggcgaccccaggcgctgggcgtctgaaggggaacccggaactgactgtggacgcggacatgcgagagatggcgaagacggccgcgtggagcgtcagttcctgcaaggccggcaacggcgtcgcggccctgcgcgacgacaacctcgacacctactggcagtctgatggggcgcagccgcacctggtgaacatccagttccagaagaaggtgcagctgcagctcgttgtgctctacgtggatttcaagctcgacgagagttacacgccgagcaagatctccatccgggccggggatggcttccacaacctaaaggagattagaacggtggagcttgcaaagccagttggatgggtccacatatcattatccgggattgatccacgagaaacattcattcacacatttatgctccaaattgctgttttatccaatcatctgaatgggagggatactcatgtccgacagatcaagatctacgggccaagaccgaatcctgttccccaccagccgtttcattttacttccagggagttcatcacatactctactattagatgacagtggatgagcaatcaagataggatcggcagctcatggctctggatgatcgcgccatattagtatatttgcctgcttgtgtgctgtctatcgggtcttggacgtgtatgtgtaatgaagttgttaagttagctcagcagcatccacatctcatattttaaaccccactacataaagagtgcagtgcaaaatagtgatttgcagggcacatgtacctgctggccatagccttaggtagcaataacatacttttgaatttgtttcgcggcctctgttggcttgcagtgtttgcttggttcattggttggtcccaatcattttgtgcccttgatgttcagtgccttaggttagcctatacagtttatggacggtcgtactgttaaacctttgaaactttgtagtttcatttaaaaaaaaacatttttatg

SEQ ID NO: 146168 - DNA, 1503 bp, Zea Mays
acgcatctaattattaaaaaataaaaaaaaactgagacccccacttgggcactcgacgaaacggcgactcctgcgccgggggatccccataccatacgccgcgccgccgccacgaacagcgaccgccgcgagggcgacacgaccggcaaccggccgaggggagatacgataggcgagtgcggacggcctatcgccgtgcgacagcggcaccccggtgtggtcgcgtgcgccgccggcgccgggccaaggcgtcaagcgctgcccagtcccgattccgccctgcactgcctctcgccctgtcctgtctgactgtccgagactctgactccgccctggtgagcgttcttcactcctccgattcttcacctcgcactggtccgatggaatccgacgccgaggaggaagcggcggcgaccccagcagcggcggcgaccccaggcgctgggcgtctgaaggggaacccggaactgactgtggacgcggacatgcgagagatggcgaagacggccgcgtggagcgtcagttcctgcaaggccggcaacggcgtcgcggccctgcgcgacgacaacctcgacacctactggcagtcagtggatcacctttttttttctttgtcgaattagttgaagctagaaggtcagagttggtgattcgggtcctgcgatttggtttcaggtctgatggggcgcagccgcacctggtgaacatccagttccagaagaaggtgcagctgcagctcgttgtgctctacgtggatttcaagctcgacgagagttacacgccgagcaagatctccatccgggccggggatggcttccacaacctaaaggagattagaacggtggagcttgcaaagccagttggatgggtccacatatcattatccgggattgatccacgagaaacattcattcacacatttatgctccaaattgctgttttatccaatcatctgaatgggagggatactcatgtccgacagatcaagatctacgggccaagaccgaatcctgttccccaccagccgtttcattttacttccagggagttcatcacatactctactattagatgacagtggatgagcaatcaagataggatcggcagctcatggctctggatgatcgcgccatattagtatatttgcctgcttgtgtgctgtctatcgggtcttggacgtgtatgtgtaatgaagttgttaagttagctcagcagcatccacatctcatattttaaaccccactacataaagagtgcagtgcaaaatagtgatttgcagggcacatgtacctgctggccatagccttaggtagcaataacatacttttgaatttgtttcgcggcctctgttggcttgcagtgtttgcttggttcattggttggtcccaatcattttgtgcccttgatgttcagtgccttaggttagcctatacagtttatggacggtcgtactgttaaacctttgaaactttgtagtttcatttaaaaaaaaacatttttatg

SEQ ID NO: 146169 - DNA, 867 bp, Zea Mays
acttgggcactcgacgaaacggcgactcctgcgccgggggatccccataccatacgccgcgccgccgccacgaacagcgaccgccgcgagggcgacacgaccggcaaccggccgaggggagatacgataggcgagtgcggacggcctatcgccgtgcgacagcggcaccccggtgtggtcgcgtgcgccgccggcgccgggccaaggcgtcaagcgctgcccagtcccgattccgccctgcactgcctctcgccctgtcctgtctgactgtccgagactctgactccgccctggtgagcgttcttcactcctccgattcttcacctcgcactggtccgatggaatccgacgccgaggaggaagcggcggcgaccccagcagcggcggcgaccccaggcgctgggcgtctgaaggggaacccggaactgactgtggacgcggacatgcgagagatggcgaagacggccgcgtggagcgtcagttcctgcaaggccggcaacggcgtcgcggccctgcgcgacgacaacctcgacacctactggcagtctgatggggcgcagccgcacctggtgaacatccagttccagaagaaggtgcagctgcagctcgttgtgctctacgtggatttcaagctcgacgagagttacacgccgagcaagatctccatccgggccggggatggcttccacaacctaaaggtacgctttttctccatgagatatcatttgaaggatgttcagaacctagtcggctgtaatagatttaaacaagattatacatgttgattcgtccgagttgagtatgacacagagtccgagttccgaaacctgcgaaataatcattctgagggtaaacttgaactgattt

SEQ ID NO: 146170 - DNA, 846 bp, Zea Mays
acttgggcactcgacgaaacggcgactcctgcgccgggggatccccataccatacgccgcgccgccgccacgaacagcgaccgccgcgagggcgacacgaccggcaaccggccgaggggagatacgataggcgagtgcggacggcctatcgccgtgcgacagcggcaccccggtgtggtcgcgtgcgccgccggcgccgggccaaggcgtcaagcgctgcccagtcccgattccgccctgcactgcctctcgccctgtcctgtctgactgtccgagactctgactccgccctggtgagcgttcttcactcctccgattcttcacctcgcactggtccgatggaatccgacgccgaggaggaagcggcggcgaccccagcagcggcggcgaccccaggcgctgggcgtctgaaggggaacccggaactgactgtggacgcggacatgcgagagatggcgaagacggccgcgtggagcgtcagttcctgcaaggccggcaacggcgtcgcggccctgcgcgacgacaacctcgacacctactggcagtctgatggggcgcagccgcacctggtgaacatccagttccagaagaaggtgcagctgcagctcgttgtgctctacgtggatttcaagctcgacgagagttacacgccgagcaagatctccatccgggccggggatggcttccacaacctaaaggagattagaacggtggagcttgcaaagccagttggatgggtccacatatcattatccgggattgatccacggtatgcattgtaatatgaagatgaataaccgttcctaaaattatgtgtatactccctttatacatgtaggaggacaa

SEQ ID NO: 146171 - DNA, 515 bp, Zea Mays
tttctttgtggaaatcagctcagcttccaatgcatccacacggcggacggctgcattgagcaattcttccttttcaaacggcatctcagacggcttcgtttcaagcacctgcaccttgtcctccaactcacccagccgtctcagcatcgatgaaatcacatcattttctgtgtaggatggggcaggagatggaggtcgaaactcctccttgcactcctgctcttgaggatactcaacatgatagtcgtcatgcttaccagattggttggagatccttctagccatcttgcttgggacagaacaaagcatggcaaaaagggtcatcatcaagaatgtcagccatgtgatagtttgagctctgagtccttcaaatgtgccatgcaaattcctcagggacaaagaacctgatctgggactaccccatccatcatcaacaatcttgtccacaacaggaatgttttctccaatagaagcatgaacaacagatgaagaaccatgtgccgacaattttgact

SEQ ID NO: 146172 - DNA, 1378 bp, Zea Mays
acacacacctttcacttgacctcccccaccccggcccatttccgctccttgaactgaatcttccccagaggccagactgccagagcatatatctctctttgggtcgttgggtgtagtagtgatcggatggacagcacaagctgcctgctggacgacgcgagcagcggcgcgtccacgggcaaaaataagccggccccggtcccggctccggctgcggtgaccggcaaaccgctacagcgcgtgggcagcagcggcgccagcgcggtgatggacgcggcggagccgggcgcggaggcggactcggacggcgccaggcgtgccccaggaggcgtcggcgggaagctgccgtcgtccaagtacaagggcgtggtgccgcagcccaacgggcggtggggcgcgcagatctacgagcgccaccagcgcgtgtggctcggcacgttcacgggcgaggccgaggccgcgcgcgcctacgacgtggccgcgcagcggttccgggggcgcgacgccgtcaccaacttccgcccgctcgcggagtcggacttggacccggacgccgccgccgagctccggttcctcgcgtcccggtccaaggccgaggtcgtcgacatgctccgcaagcacacctacggcgaggagctcgcgcagaacaggcgcgccttcgccgctgcggcggcgtccctggcctcgccgcagctgccgccggccaagaacactagcccggcggcggcgcgcgagcacctcttcgacaagacggtgacgccgagcgacgtggggaagctgaaccggctggtgataccgaagcagcacgcggagaggcacttcccgctgcggcgagtgcaaggcggtcgtgctccgatcctcagcttcgaggacgccgccgggaaggcgtggaggttccggtactcgtactggaacagcagccagagctacgtgctgaccaaggggtggagccgcttcgtcaaggagaagggcctccacgccggcgacgccgtcgggttctaccgctcggccgccgccggcaggcagctcttcatcgactgcaagctccggcccaaggcggtgaggcttttcggcgtggacttgctcactgagccgccgaggtcagcagcagcagtggcgcagccggagccggagcaggaggagatcgccgtgtcgaagaacaagagagctagggacgccatcgccgcgtctgctactccagtacacattgctttcaagaagcaacgcgtagacgtcgcgctgacgacgacctagctatagctgacgattttttttttgctctccacaaaccctcctcttggttaaattcgctcgctcgtattggatgatatacaagaatacaagatgcatggtggtcgctagctagctaagtagcttt

SEQ ID NO: 146173 - DNA, 1458 bp, Zea Mays
cacggacggtccccccaccacgtccaccccgctccgctcgccaccaccgcgttcgccgctgccgcacatcaacgcgtcgatgccacccgggcacccggccgagatagcctccttcctcccccgaaccgccacgtccgcttccaaagccgtcgccgtctccgcctcctccctggtgcccgcgcccgcaagatcccgccgttgtcgtctccgtctcctccccctgcccacaactcgcaggatcccaccgtcaccgtctttctgggattcaattctgctctcaatttcttaatatgttcgggcatgttttgtttcacctgatgcctgtgcctagttgagcgagtgcatggacctagacatcacagtggaattctggtcccttcaggcgctgcgcagtttcttctcctcctaccagacatctagcactggacctaaactagacgagcacttcgtcatgagcaacaaccacgccgcgcgcgcacaatattttttccagcaaatggaagtaaattttttgtgttgattcagtcacccatttgttgtgttttctccaaatactctaagttggactgattgatttcagatctgtttgtttaaagttcatctattccagctttataacctagtttgtataaactcatctggtcaacaaaaagaccaagttataatccagtcgcaagcacctacgcccgcccacccgcaacgctcaatattcctatgcctgcaggctgcaaatgaagaacgattacgtgaagagtttgtgagggaaagcagaaagcttcctccaaagcagcaatcacaaacatgtgattcaaatgttattactccaaggactgaatttatggctgttttatcagttgctttggagtgttacatccatcttagattgaattatgatcatgaatggaaacaaaacaaagttattttatccgatgccaatgttcctggtgaacgggatctgtctggttttaacccaaatccattgcctgtatggcctggacgtatatctgatcatgctagctttgcagacacatgaagtacgcttctcaatactgagagaggtattttatacacctggacaacaggataaatgtttcttatgtatttaggtgggacatctagcagcaaaatgtgaaggaaaggtgaaaatgaaagctggggagttttgatgagaaggctgatgctattgttcccaagaagccatatcaggttatttgtctattgtacaacatgtggtagtgtgtgtgtgtgttgggggggttcgcgccctcactcacgatcaatgacccgactctttccctctcttcccctcctctgccacgagccctaacccacttgaagcacaacatgatccatgtgagttgtgctttggcctgcattagggatcagcaacttcgcacgcgacgaaatgaaccgccacgactgcgttgggatcaacttcgcacgcggcgatattatttc

SEQ ID NO: 146174 - DNA, 2004 bp, Zea Mays
atggcggtgccggctcccctcgcctcgggcgccgccgtcctcctcctcctcgtctccctcgcgcccgtagtcgccgacgaggccgcgcgctacaaccccggcgcgtgccggggcgtcctcctcccgctgcggcgacaccgtcgacgcggcacggcgtacgccaagtcctactgcgggtaccccggcatgggggtggcctgcgagggcggccgcgcaacactgaggctcggggccgacaactacaccgtgctggccatcgactacagcaaccacaccgtgacggtggccggcgcggcgagcggggacgaccactgcccgagggtggcgcgcaacgtcaccgtgccgccggggacgtggctcagcctgtcggacaccgccaacgaggacctcgtcttctggttcgactgcgtcttcacagcggagacccctccgccgcgggcggacgtcccgcccccgatcagttgcagcggcttccggagtccgagcggggcgacgtctttcgtggtggtggcgcggccgggcgtggacgagtgggagtggccgcgggcgtgcaagaagccggtcgtcgtgccggtgctcaaggaccagctcctgaaccctgatgcggactacctctcgcgtctcaacggcgacgggtacgggcagctgctgaagctgggtttccagctgacgtgggaccccagcgccgggccctgctacttctgcgagaactccggcgggcagtgcagctacaaccaggtcggagagttcatcggctgcctgtgctccgacggccgcgtgcgcagcacagactgcggatcgaagaagaacaaaaaagcgattgcaatagggacctccatagctgccggcgttctgtccttgcttcttgtggtcatggcgtgcttgtacatccgcaagagaaggcagtacaaggtgacctcgtcctcgaggctcctcaagcccactgcctccggcgggacgccgcgttccagaggtagcactgacatggagtccggcagcgtccgcagcctgcagacgcaccacttcacatacgaggagctggaggaggcaactgacagcttcagcggcacaatggagatcggcgatggcggcttcggcaccgtgtacaaagggcacctccgagacgggcgcgtggtggccgtcaagcgcctgtacaacaacagctggcggcgcgtggagcagtttctgaacgaggcggccatcctgtcccgcctgcgccacccgaacctggtgccgttctacggctgcacctccagccgcagccgcgagctcctgctggtgtacgagttcgtgcccaacggcacggttgcggaccacctgcacggccaccgcgcggcggagcgcgcgctcacctggcccctccgcctcagcgtcgccgtcgaggcggccgcggcgctcgcgtacctgcacgccgtcgagccgcccatcgtgcaccgcgacgtcaagaccagcaacatcctcctcgacgccagcttccacgtcaaggtcgccgacttcggactgtcccgcctcttcccgctcgacgtcacgcacgtctccaccgccccgcagggcaccccggggtacgtggatccagagtaccaccagtgctaccagctgacggacaggagcgacgtgtacagcttcggcgtcgtgctcgtggagctcatctcgtccaagcccgccgtggacatgacccgcgaccgcagcgagatcaacctggccggcatggccatcaacaagatccagcagcgccagctggagcaattggtggacctcgacctcgggtacggctccgacgaggcgacgaagaaggccatgacggtggtcgccgagctggcgttccggtgcctgcagcagaacggcgagatgcggccggcgatcaaggaggtgttcgacgccctcaggagcatccgggatgacgggttcgggaagaagggagccgcgctcatcgcgccgcgctcgcccgacaccgtgcacgctccgtgggatagcatcagtacaacccctagtgttagccaatga

SEQ ID NO: 146175 - DNA, 1725 bp, Zea Mays
atggtggctgctggatctgaggacgacgacaatctgtcatcacctagaccacaaattctttgtatggagtttcaagtgcatgttggagtgaaatttgatggtagtgtagatggttattctggtggaagggaaaatcttgtgtataatggctacgaaggaaatgccaccttatactatttaaaacctggccatacggcaccacaaggtcttgttttgatggatagtgcagaacatgtacaacagttgatgaaggaccatgagggccttaaggtgtgcaaattgttcattttgggaactgaagaagaagatggtgatgtatgtgaaggtgaagaaagggatgtatgggaagatgatgaagaatatgtcgcatgggaaactgaagaagatgatggagatttatatgttatcaagaataacagtgatttgaaacaaattcaaaaggatcatacaggacaattgataaatgaaattgataaaagggtttatttgtcagatgaggttaatgaaggtgttcacagtcctgtaaattttgatggtgagggtatatatgtgcatcggtctctcggggtagattatgtgaggtttgacaattcaaccatgagacacccaattatggatgttggaacagtgtttaccgatgtgaagcaatttagagcagcactaaagaatttgatcatttgtgagggtagagaagttatgagacctaagaatgatcctatgaaagtttcagcaaagtgcaaaattgtagactatgtttggtatatatatgcctctagacttccagatggtcgttccttcaagatcaagaagtatgtaaaggaccacacttgtgggaaaagtcacacggtgaagcaaatggatgctaaatggattggcacagagtatgagcatttttttagaagtgagaaagattggcgagttaagtcccttggggacactgtccttagggacacactagtggggatctcacttaccaaagcctatagagcgaagagatacgcggtgcagaagattggtggtgagtaccatgaacaatacaggagaatacaagattatgctcacacagtgttatctgctaatcctggaagttgcataggtctaaaagacggtattagggccattttcccacatgcagagcatagatattatttgaggcacttatatgctaacttttcaaaggctgggttcaaaggtccccgactaaaagagctaatggatatggctgcctatgcgtacaaggagtttgatttcaaacaagctagggatgatattaagaaagaaaacactagagcatggaaatggttgtttgacattgataatggtgcaaagaaggacacatggttcatagctccaaattatcagaaaaagcttgagtttgagaagaaaaatgcttcatattgcagggccgtctgtgctgggcatgggatatggcaagtcacaagtggagacaatcaatatgttgttgatctcaacaatcacaaatgtggatgctacaagtgggatgttactggagtgccatgctcacatgcagtggttgctattcatgagttcaaacacaagccagaaaactatatgtcattgttcttcactagggagaaatatgtagccacatatgagggtatgattatacttgtgccagacaagagacaatggttaagcacatacttgcctgatgtggatcctccattttatcatgcccagcctggaagaccaaagaagaagtga

SEQ ID NO: 146176 - DNA, 1473 bp, Zea Mays
ataaaggcctggtctcccgctttgccccatttccctcgccatcctacgcctcgcgccgccgccacagcaacccttgcagccccaatcccccacggcgaccatggccggcgcgcaggagtccctctccctggtgggcacgatgcgcggccataacggcgaggtgacggcgatcgcgaccccgatcgacaactcgcctttcatcgtctcctcctcccgggacaagtccgtgctggtgtgggacctgaccaacccggtccactccaccccggaatccggcgtcaccgccgactacggcgtccccttccgccgcctcaccggccactcccacttcgtccaggacgtcgtccttagttccgacggccagttcgcactctctggctcctgggacggcgagctccgcctttgggacctctccaccggcctcaccacccgccgcttcgtcggccacgagaaggacgtcatctccgtcgccttctccgtcgacaaccgccagatcgtctccgcgtcccgcgacaagaccatcaagctctggaacactctcggcgagtgcaagtacaccatcggcggcgacctcggcggcggcgagggccacaacgggtgggtctcctgcgttaggttctccccaaacaccttccagcccaccattgtctccggatcctgggaccgcaccgtcaaggtctggaaccttaccaactgcaagctgcgctgcactctggatgggcacggtggctatgttaacgccgtcgctgtgagccccgacgggtcgctgtgcgcctccggcgggaaggacggtgttactctgctgtgggatttggctgaggggaagaggctgtactcgctggacgcgggctccatcatccactctctctgcttctcacccaaccgctactggctctgcgctgcgacgcaggactctgtcaagatctgggacctcgagtcgaagcacgttgtgcaggacctcaagcccgacatccaggtctccaagaaccagatcctgtactgtacaagcttgagctggagtgcggacggaagcaccctctacactggctacaccgatgggtctatcagggtttggaagatctccgggtacggctacgcaggctagatgttgaaatcagcttggtctaggcagtctttcgggggaaaacattgtaatgtttgtcaagtttttgatgtcgtgagctatattgtctcttcgctactttccggtcgcccaaccattttaatcttactatggaagaatcttgttttgcactatgattcggttttattacttgtactttatattatgttatgtgcttcggccatgcaaccaattgaacgactgcggcggaaagacgttctggtttggctagatttccctgcactggtttgtgttaagtagagtctcccaggtatgccagtcaaatttcccatcctgaccaagactttcccttggatttcatccatgcaaattccatttcccaaatggcc

SEQ ID NO: 146177 - DNA, 2661 bp, Zea Mays
cggccgcggctgctttgatcccttgccgcctgcctggcctgggctctcgtaccgcaaccgcaatttggcggcgtgcgtgttccttgcctagattggcgtgatccagctctgctccaaccgtagaagtgcgcgcacttgctgctagctaagaagcatctgcagtgatcgttccaggctcgtgaggaaactcatttgctcgaatcatgtccgactttgtcgggagcagatataccaagcaagaagatttccatgttttgttgagcaagaaagatcctggagaaccacctgaacataagcacgtcctgtggatggcacactggaccaaagcaagcagcaacaatggcagcagcaatcctttggagggtaccaccaagggcactactacgaaagatagcgagaccttgccttatgaattcacggaatctacggttgctaaaaggctcatggtaggagtaagccatggaagcgcctccatgcagcatgaccgacaattcaattctagtgtgtggggtatggcacgccatatttccaacgaattgggaccgaagaatagtgaacatgttgatgggtcttttgaaaaatttgtgaagaaggatgctgtgaacttgagagcaagggcagttgtgtcagaaacatactctgttcacaagctttcagagttaccgttggattttcagcaccttgggaactccgacgatccaagtccagattggagccactttccaatgttcgaaattaatcgaaagattgacagtattctcaaccgcaaacgaaggtctgcacctctgaatctaaatgcgtctgcatcccatgtattggccctatcgtcacaagaatacatgatgcactcacatcaaatagctgacgagaacttggatatgtgcagacctgcagaaggctttgcatctcacttagaagatcctgctggcctcaattcagatccttcagggccaaagttaaaaggacagttattggataccgtgtcatgttcttgcagcaaggacgacaccaattcagcagattgtctaatagacgagcagcatacaagccactattttgcaaactcaaagcatgaactgccctctgtatctaacgaaaagaagttcaagtttgcaggaaacaaccacaatcgaattcttgcaagtgcgtcccataaacatgaaagtgttgcagaggcaatgttctgtgcaccagtacttggtagtgagcttcagaatgaacctataactatttccaacatcggcaagaaggatggtgaaaacttccatgagatgtataattgtaatagcaaggctgttccttgttctttgttagctcatgagcaccatcgtcatctgaaaacacagagaacggaatctgcaggaaatttgaaagtctgcacgttacctgatcaacaaactgcaaatgaattggcagacaagagtaatggtgacctgctgacatatggaccaaagccaaagaagggctcttgcaaccgaagaagcctctatttattcgaaaagttaacgattccttccaaatcacaaagtgcatatcctaaaaattctgcgtcttcaggaaaatctagcggctttggagtttgtatgtacggcaccaatattggaagccagttattcggagcacagaatcaatcttcatctaagactgaaacattgcacagcgatgctcttattgggtccaaatcctcagcaggcattgcttcattatcggcacaaaaggacaacggttgcccagccccagccccagccccagccccagacgaagcgaaaagcgagcagctagcagctccgtcgtccaacaccaagcagggaggagaatcagcatacagtaaagaagatggatctcataatctcaacgaaggccacgatgtttcgtccaaagcagctatcggtagcaagcaaccatgcatgcctggagcaggaatcacgaacctggatctcatactctcccagatgagcaggatgagaaaccagattcccagtggcggtgtaactcagccaccaataggcgccgagccaagtgatagatggctcaagcgcctgcagctcggcgtaccagaccctgacgtccttggttccaagaccaagaggccaaaagtcggagacagtcctccgccacccaggcaaataaaccggtcctttgacgtggcactcccttgcaacccaggaaaacaggaggagcagagcttgaatggaggggggaaagtgcagggaagagcccccccgattccagagaagagcgtcaatcgctggatagggagatggtgccagggcggcactcctgttttccgtgaaggcccaggccagggaaggcaggcaacgaaacctgctggccggttgtccgaggagcttgaaggacagttctttccaagcactgcggcgatggcgatgatggggcgcgcgatgcacaagctccggccgtgcgagcagcagcagaaggggccattcgtggtgtggaagatagattgacctttttgggtgtgatatacttgtttctttaaaaaaaataaaatgtaaggcaactatgcattttgcctggctgtggctcatggtttattgctttctggtagtggaagtagctaggtgtagtgcctactgattgtgtaatgctttgctgtaccaaaagtgtaatactatactgtttactgtgtcgttcgttatg

SEQ ID NO: 146178 - DNA, 216 bp, Zea Mays
tgttgcccactgcccagtcatcacactcacgttatcgcgcgtctgtgcgaccataccctccacgtgatcatcgttcgccatctagccaatccaatcctccaggattccagggcgctgggcgccactgctccatcccccaggcacgcacagtcaaacaatcaagattcatgttattttgtggccgtcgttcttatttctcaccttgcaaagtgctaa

SEQ ID NO: 146179 - DNA, 2290 bp, Zea Mays
cccatccttcccggtccccgtggacgaggtccacttgccgatgcctctctgagatccccacccacttattcccctccagtgcggacaggcctcactcctctctccgcccccctcgctagcctcgcggagccgccgcacccagcgaccctcccgaagtctaaccctagatccggaccggccatggcgtcccgccgggtcgtctcctcgctccttcgctccgcctcccgcctccgtgccgcctcgcccgccgcgccgcgcccgcgcggggcgccgcaccgcccgtccccggccgggtacctcttcaaccgcgccgccgcctacgcctccgccgccgcggcccaggtggcgcccgccaccccgccgccagccaccgggaagaccggcggcggcaagatcaccgacgagttcaccggcgccggcgccatcggccaggtgtgccaggtgatcggcgccgtcgtcgacgtgcgctacgatgagggcctcccgcccatcctcacggcgctcgaggtgctcgacaacgacatccgcctcgtgctcgaggtggcgcagcaccttggcgagaacatggtgcgcaccatcgctatggacggcacggaggggctcgtccgcggccagcgcgtcctcaacactggctcccccatcaccgtgcctgttggcagggctacccttggacgcatcattaatgttatcggtgagccgattgatgagaagggtgatataacgacaaaccacttcctccctatccatcgtgaagcccctgctttcgttgagcaggccactgagcagcaaattcttgttactggaatcaaggtcgtggatcttcttgcaccctaccaaagaggtggaaaaattggtctcttcggtggtgcaggagtgggtaaaactgtgctcattatggagctgatcaacaatgttgctaaggcccatggtggtttctctgtgtttgctggtgttggagaacgtacccgtgaagggaatgacctgtacagagaaatgattgaaagtggtgtcattaagctaggtgacaagcagagtgaaagcaagtgtgctcttgtctacgggcagatgaatgagcccccgggtgctcgtgctcgtgttgggttgactggtttgactgttgctgaacatttccgtgatgctgaaggacaagatgtgcttctgtttattgacaacattttccgtttcacccaggcaaattctgaggtgtctgctcttcttggacgtatcccatctgctgtgggataccagccaacccttgccactgatcttggaggactgcaagagcgtattacgacaacaaagaaggattctattacgtctgtccaggctatatatgtgcctgctgatgacttgacagatcctgctcctgctactacctttgcccatcttgatgctacaactgtgttgtcacggcagatctctgagcttggtatttatcctgctgtcgatccactggattccacatcaagaatgctttctccccacgtgctgggtgaggatcattacaatactgctcgtggtgttcagaaggttcttcagaactacaaaaatcttcaggatattattgctatcttgggtatggatgagctcagtgaggatgacaagttgacggtcgctcgtgcaagaaagattcagcgtttcctgagccagcctttccatgtcgctgaagttttcacaggtgctccagggaagtatgtggagctgaaggaaagtgtgaagagtttccagggtgttttggatggcaagtatgatgacctccctgagcagtcattctacatggttggaggcattgaggaagtcattgctaaggccgagaaaatcgccaaggagtctgcttcataaggcggcttcttgcttgttgaatcctgtacaatcaagttccatttttggatttaagcgattgtttatgcttttcgcagttaggcagcacgagttggaggtccatctcctgctgagatgcttgtttttctctttgttgttcaaacactttacacccaaataagcaactgcagtgacattaattttggctgcaccaaagttacatgaactgaagaaacttgtggcctgtgtgacgcggatcaatcagaacataaagttacggcttctggttggtaaattatgctactcttcagagtctgttcccgcattgtggaggtatcttgttctggactggctctgccgaaactagtttccgtggttttccatgtagtttttttatggttgtgcaacttctcgccgggaccagtttaatgtttatcgactttgattggagatgacccgatgctttatt

SEQ ID NO: 146180 - DNA, 1060 bp, Zea Mays
atcatcatcgcaccccgaccccaagtggatgtggaaggggcttgcgctgacaccgcccgtccgcaccctgccaccaaaccacacgcatcctttcctttccctcttcacttggagtttgccatcgccgtcgccttcgcccacacgcgttttcattccatagcgcttcctccgccccgcggcttgcccgcgctatattaaaccggcgacctccccgcccaggcaagctcacctcacgcgggggtcatacccagctagccaccgccactacacgtgtacgagctcactgatctcatctcatctcaattctcacagcccgggaggacggactccgactctccgagtgcgcgcgttgatcgcccatgggcaactacctgtcgtgcacgctggccaaggcgccggggccgaggcccggcggcaagcgcgcgagggtgatactcccggacggcggcgtcaggcaggtggcgctgccggcgacggcggcggagctgatgatggacgcgccgggccacttcctcgtccacgtccacgcgcgcggcgcgggcctcggcctcggcgcgcgactcgccgcgctgcccgcggacgaggagctccagctcggcgccgtctacgccaccttccccatgaagcgcctgggcacgccgctggcggcgcccgacctggcgcgcctcgccgccgccgccgcccgggaggcgcaccggtccgccaaggtggccagcgccgccgtcgtcgccgcgcaaccgccggaggacgcgcccaggctgcggctggaggagatggtggacgacgcggccgccgcggagatcgccgtcaccaagcactgggccagcggtgcccggtccaggaggcccacgctggagaccatagacgaggagagttacctgtcgtccagatagatagtggcctacttgcgatgcgcttttcttctccgtttggttttttttaagcattcggttcaaactggatgaacctcaaaacatatgtgatggaaagtaagtagaacgtacagccatttttgtaaaaaaataaaataaaacaaaatatgcactcctatgttttcgaa

SEQ ID NO: 146181 - DNA, 259 bp, Zea Mays
ctccccgcaaagctcatttccacttctgtctttctcattcccctctccccataaatctcattcacattctcacgtgcatctcacgcctagctaaaattaaattaaaaaaacacaaatggccccaatgggattcgaacctgcaagtcccctccccgcaaagctcatttccacttctgtctttctcattcctctctccccataaatctcattcacattctcacgtgcatctcacgcctagctaaaattaaattaaaaaaac

SEQ ID NO: 146182 - DNA, 727 bp, Zea Mays
ctccaaacctgcagctccgagccgtctcccgccaacccaatttcgcttcccgccgctccccatctcatcccacaccgtcaccattacaccgcccgaaaggccgctagaaatccgatcccgagccgccgcgtcttgctcgcgtcttttcccctctgctcgagcacgcgcgggcgcgcggctgctcccggcggcggcgatgagcgcggtgaacatcaccaacgtggcggtgctggacaaccccaccgccttcatcaaccccttccagttcgagatatcctacgagtgcctcgtgcccctcgacgacgatctggagtggaagcttatatatgttggatcagctgaagatgaaaactacgaccaacagcttgagagtgtgcttgttggccctgtcaatgttgggacctaccgttttgtcctccaggagttcatgagagtaggctactacgtgaacaatgattacggcgatgagcagttgagagaggagcctccagcaaaggtgctaatcgatcgggtgcagagaaatatcctggccgacaagccccgggttaccaagttccctatcaacttccatcctgaaccaagtacaggcacggggcggcagcagcagcagcaggagcctcagacggcctcaccagagaagcacgcaggcagcggtgagggcaatggaagcaagcctgaggctgaccaatgaacacagtcgacttcaagtatttttgaagcgcgtccc

SEQ ID NO: 146183 - DNA, 1112 bp, Zea Mays
ctccaaacctgcagctccgagccgtctcccgccaacccaatttcgcttcccgccgctccccatctcatcccacaccgtcaccattacaccgcccgaaaggccgctagaaatccgatcccgagccgccgcgtcttgctcgcgtcttttcccctctgctcgagcacgcgcgggcgcgcggctgctcccggcggcggcgatgagcgcggtgaacatcaccaacgtggcggtgctggacaaccccaccgccttcatcaaccccttccagttcgagatatcctacgagtgcctcgtgcccctcgacgacgatctggagtggaagcttatatatgttggatcagctgaagatgaaaactacgaccaacagcttgagagtgtgcttgttggccctgtcaatgttgggacctaccgttttgtcctccaggctgatccaccggatccctcaaagatccgtgaggaagacataattggtgtgactgtgctgctattgacttgctcttacatgggccaggagttcatgagagtaggctactacgtgaacaatgattacggcgatgagcagttgagagaggagcctccagcaaaggtgctaatcgatcgggtgcagagaaatatcctggccgacaagccccgggttaccaagttccctatcaacttccatcctgaaccaagtacaggcacggggcggcagcagcagcagcaggagcctcagacggcctcaccagagaagcacgcaggcagcggtgagggcaatggaagcaagcctgaggctgaccaatgaacacagtcgacttcaagtatttttgaagcgcgtccctacaggttgtgctgtaaggttacgaacgggattagcggttatacattgccctgggatcctgtttctagcacatggtggctgtttagaactctttgttctgtacacattgagatgcaaatgctgggtagtgggtagctgggtgtttccttggcaaagagtattttaagcctgttctcctgcaattgctttatgcttctttagagtttagagtagcggtttacctcaaaactaactggctagtcttggtcaccagctttggcctttgcggtatagcttgtaacgggaatccttctgttca

SEQ ID NO: 146184 - DNA, 891 bp, Zea Mays
atggaggtgagggtgccgcttcttccgcagcacatattgcggaacggcgacggacgggagaagaagtgcggcgtgaggcggtggagggagctgctagcgcgggaggccgggaaggtcggctgcgtggccctgccgatggcggccgtgagcgtgtcgcagtacgcggtgcaggtggcgtccaacatgatggtcggccccctccccggcgtcctcccgctctccgcctccgccatcgccacctccctcaccaccgtatccggtttcagcctcctcattggtatggcaagtggactggaaactctatgcggtcaagcctatggagcaaaacagtatgataaactggggatgcacacctacagagctatagtcacactcattgctggcaaactcctgatcctcataggtcaggaccccttgatctcaagggaagctgggagatacatagtctggttgattccaggtctctatgcatatgccatcagccagcctctcacaaaatttctacagtctcagagcctgataattcctatgctttggtcctccattgcaactctgctcttgcacattcctctttgttggttactagtgttcaagaccagtatggggtacattggagcttctttggcaataagcttgtcgtattggttaaacgtgatgatgcttgccgcttacatcagatactcggattcttgtaaggagacccgctcacctccaaccgttgaggccttcaaaggagtcagtgtgtttctacgcctggctctgccgtctgcactgatgttgtggaattttaccaaatccagagctgcaaacttcagttctttcaatctgtttgacgactatcacattaatgtatactataccttatgggcttggagcggctgcaagcactag

SEQ ID NO: 146185 - DNA, 170 bp, Zea Mays
aaaataacaaaccagtcaagtatattcaacatgagaggtcctaataatacattagaagggaaagttgaggggtgtgtcatcacacacacacaaaaaaatcttcatactttatggccaggcacaacactaaaaatatgaaactctttgcacataaacacgcctagcggatc

SEQ ID NO: 146186 - DNA, 2292 bp, Zea Mays
gcagcagagcccagtccgcccgggacgtgtcgcgcttacgtggacacgctgccagacgggcacaaaccacgaaacggaacccattgatcgagccgaagccgattgacggcaggcagcccatcgtctcccctctccggctctccccacctcctcttttaaagacgacgccaccgccaccgccacccggccctccctcgtccccagcctcgccgtccggcgctgccctgtcccatctcaccgcagctcgctcccacctcgagccgcgagcgcgcccgtagcagtctcaacgcgggcactcgcttgcgtaccccaggccgatcgacgagtccgcccggcccgcgtctcacgcgtgagcctgttgcgcgcggtggcttgttgttcgatcatattcgtgtacgggcaccccgcacggccggagaatcacttgccagccccagccccgttttccggggctcctcatccctcgcctcgccggtacgtacggtgttgcttcccggaggtttccgctgccgctgcgtgccggtgccgcgggcaggcgcaggaggctctcggctgtttccttagcgtgccatcgtccatggaggcgaagcagcgcccgcggcacggcgaggagaggaggccgccggcgacggacaacggcggcggcggcggcgaggagtacgacccatggacggcgtggctctacaagccgcacaccatctcggtgctcctcgtcggcgcctgccttctcatctgggcaagtggagcactcgatcctgaaggcgctgctgctcacagtagcttgacatcaatcaagaggggtgtctgggctatgattgcagccttccttgcctactgcacgcttcaggcaccttcaacgatacttattaggccccatcctgctgtctggcgcctggtacatggactggctgtcgtttacctcgttgctcttaccttcctccttttccagaatcgtgacgatgctcgccagttcatgaaacaccttcaccctgatcttggagttgaattgccagagagatcttatggagctgattgccgtttgtatgttccagaaaaccctaaaaacaagttcataaatatttatgtatgatttttctgtatgaaccttcctactctatgaagacgcacatgctctgcttctcatcattgctattgctctattaaatctagactgtctgatctatgtgtaggagacattgtttgatgaatttgttgttgcccatatccttgggtggtttggcaaagctgtgatgatacgaaatcaacttctactttgggtattgtcgatcggctttgagctaatggagctaactttcagacatatgttgccaaactttaatgagtgctggtgggatagcattattttggatatcttgatctgcaattggtttggtatttgggcaggaatgcacacagtccgttactttgatggcaaaacatatgaatgggtcggactgagccgccaacgaagcatcatgggtaaggtgaaaagatcgctgagccagttcacccctgctcaatgggacaaggatcagtggcatcctttcatggggccactgcggttcatccaagttctgttcctctgtgttgtcttcatgaccgtggagcttaacacattcttccttaagttttgcctgtggatccctccaaggaatcccttagtcgtgtacagattgatcctctggtggctgattgccatcccaaccatccgcgagtacaactcctacttacaagacagcaaaccggcgaagaaggttggagccttctgttggctctctctggctatatgcatagtggagctgcttatctgcatgaagtttgggcatgggctatttcatgacccaatgcctacctggctgatcatcttttggagcttggttgggattgcacttgtggttttcttgctttcatggtcatggaggagtcacagaagattcaggagaaaacggctgtgatagatttcaataactcaccttagattctttcaattcgcttcttttcttttccctttctctttctttttcatttttatatacgatatggtatgatatgatatgtgatgtaacctacgttttagaggagccccatttttctgctgctcctggcaggggactcggtttgtcaggataggtcattgttgtcaacatgagattgatgaataatcaaggtagctgcagcatcagcaccaagtgtaattaaacagtaaagcaagatcactgtgcgtgaattgggcttaccaaacttcttctgggccagtaatgcacagttgtgtaataccacctatcgctatct

SEQ ID NO: 146187 - DNA, 2200 bp, Zea Mays
gcagcagagcccagtccgcccgggacgtgtcgcgcttacgtggacacgctgccagacgggcacaaaccacgaaacggaacccattgatcgagccgaagccgattgacggcaggcagcccatcgtctcccctctccggctctccccacctcctcttttaaagacgacgccaccgccaccgccacccggccctccctcgtccccagcctcgccgtccggcgctgccctgtcccatctcaccgcagctcgctcccacctcgagccgcgagcgcgcccgtagcagtctcaacgcgggcactcgcttgcgtaccccaggccgatcgacgagtccgcccggcccgcgtctcacgcgtgagcctgttgcgcgcggtggcttgttgttcgatcatattcgtgtacgggcaccccgcacggccggagaatcacttgccagccccagccccgttttccggggctcctcatccctcgcctcgccggtgttgcttcccggaggtttccgctgccgctgcgtgccggtgccgcgggcaggcgcaggaggctctcggctgtttccttagcgtgccatcgtccatggaggcgaagcagcgcccgcggcacggcgaggagaggaggccgccggcgacggacaacggcggcggcggcggcgaggagtacgacccatggacggcgtggctctacaagccgcacaccatctcggtgctcctcgtcggcgcctgccttctcatctgggcaagtggagcactcgatcctgaaggcgctgctgctcacagtagcttgacatcaatcaagaggggtgtctgggctatgattgcagccttccttgcctactgcacgcttcaggcaccttcaacgatacttattaggccccatcctgctgtctggcgcctggtacatggactggctgtcgtttacctcgttgctcttaccttcctccttttccagaatcgtgacgatgctcgccagttcatgaaacaccttcaccctgatcttggagttgaattgccagagagatcttatggagctgattgccgtttgtatgttccagaaaaccctaaaaacaagttcataaatatttatgagacattgtttgatgaatttgttgttgcccatatccttgggtggtttggcaaagctgtgatgatacgaaatcaacttctactttgggtattgtcgatcggctttgagctaatggagacatatgttgccaaactttaatgagtgctggtgggatagcattattttggatatcttgatctgcaattggtttggtatttgggcaggaatgcacacagtccgttactttgatggcaaaacatatgaatgggtcggactgagccgccaacgaagcatcatgggtgaaaagatcgctgagccagttcacccctgctcaatgggacaaggatcagtggcatcctttcatggggccactgcggttcatccaagttctgttcctctgtgttgtcttcatgaccgtggagcttaacacattcttccttaagttttgcctgtggatccctccaaggaatcccttagtcgtgtacagattgatcctctggtggctgattgccatcccaaccatccgcgagtacaactcctacttacaagacagcaaaccggcgaagaaggttggagccttctgttggctctctctggctatatgcatagtggagctgcttatctgcatgaagtttgggcatgggctatttcatgacccaatgcctacctggctgatcatcttttggagcttggttgggattgcacttgtggttttcttgctttcatggtcatggaggagtcacagaagattcaggagaaaacggctgtgatagatttcaataactcaccttagattctttcaattcgcttcttttcttttccctttctctttctttttcatttttatatacgatatggtatgatatgatatgtgatgtaacctacgttttagaggagccccatttttctgctgctcctggcaggggactcggtttgtcaggataggtcattgttgtcaacatgagattgatgaataatcaaggtagctgcagcatcagcaccaagtgtaattaaacagtaaagcaagatcactgtgcgtgaattgggcttaccaaacttcttctgggccagtaatgcacagttgtgtaataccacctatcgctatcttggatggtgcatcatttattcagtttgtctcaccggtcc

SEQ ID NO: 146188 - DNA, 1775 bp, Zea Mays
gcgggcgatccatgcatgctcgtcgtttggttcgatttgttggcttggcagtttcggactttcggtgctgccgcggcgcggcctgctaatttggcggcttgcatacctccctccccctctgctctggacaggtgttgcttcccggaggtttccgctgccgctgcgtgccggtgccgcgggcaggcgcaggaggctctcggctgtttccttagcgtgccatcgtccatggaggcgaagcagcgcccgcggcacggcgaggagaggaggccgccggcgacggacaacggcggcggcggcggcgaggagtacgacccatggacggcgtggctctacaagccgcacaccatctcggtgctcctcgtcggcgcctgccttctcatctgggcaagtggagcactcgatcctgaaggcgctgctgctcacagtagcttgacatcaatcaagaggggtgtctgggctatgattgcagccttccttgcctactgcacgcttcaggcaccttcaacgatacttattaggccccatcctgctgtctggcgcctggtacatggactggctgtcgtttacctcgttgctcttaccttcctccttttccagaatcgtgacgatgctcgccagttcatgaaacaccttcaccctgatcttggagttgaattgccagagagatcttatggagctgattgccgtttgtatgttccagaaaaccctaaaaacaagttcataaatatttatgagacattgtttgatgaatttgttgttgcccatatccttgggtggtttggcaaagctgtgatgatacgaaatcaacttctactttgggtattgtcgatcggctttgagctaatggagctaactttcagacatatgttgccaaactttaatgagtgctggtgggatagcattattttggatatcttgatctgcaattggtttggtatttgggcaggaatgcacacagtccgttactttgatggcaaaacatatgaatgggtcggactgagccgccaacgaagcatcatgggtaaggtgaaaagatcgctgagccagttcacccctgctcaatgggacaaggatcagtggcatcctttcatggggccactgcggttcatccaagttctgttcctctgtgttgtcttcatgaccgtggagcttaacacattcttccttaagttttgcctgtggatccctccaaggaatcccttagtcgtgtacagattgatcctctggtggctgattgccatcccaaccatccgcgagtacaactcctacttacaagacagcaaaccggcgaagaaggttggagccttctgttggctctctctggctatatgcatagtggagctgcttatctgcatgaagtttgggcatgggctatttcatgacccaatgcctacctggctgatcatcttttggagcttggttgggattgcacttgtggttttcttgctttcatggtcatggaggagtcacagaagattcaggagaaaacggctgtgatagatttcaataactcaccttagattctttcaattcgcttcttttcttttccctttctctttctttttcatttttatatacgatatggtatgatatgatatgtgatgtaacctacgttttagaggagccccatttttctgctgctcctggcaggggactcggtttgtcaggataggtcattgttgtcaacatgagattgatgaataatcaaggtagctgcagcatcagcaccaagtgtaattaaacagtaaagcaagatcactgtgcgtgaattgggc

SEQ ID NO: 146189 - DNA, 1272 bp, Zea Mays
atcgttttccttccttcccctctctgcccttgcagcagccatgtgagtgggggacttggggggggggggggggggggggggggctttgttgtatataagcaaccactcgtgctcttcagtctctgcttgcttcctcgactactctcctccctcttggctcttgcagtgcaggcctctcctccgatccctcccacggtctcaccccaccgcctcgaccacacagctagcttaattagcttgcccctcctcacgctctcctcgcccgaatggggttcacggcgagctataggcggagtagctggccaatgtgcggcggcgacagaggaaaggtgcggctgcggctcgatggaaggcagcacacgcacaggtaggagaagggcgggcgtgcgaccgagcgtgcaccattggctcccactgcctgtcggctgaaactcttctgctcgctcgacccatgagctgagcgcgagggaggaaagacgacgacgcagatggttcgagctagcttccgtggggaattgaggcttgatggtccgagatatatatataaatatctcttaggtatcttaactagcatgcagctgcttgtactaatctagattttcctagctagctacatcattttcatcttcttctcccccctttcttctcttctcgttctcccctgcgcttctttgttactgccattctgagaggacgcgcgtccaaacgggatgctcttgtctggctacctcctcctgctgctgctgcagtggcagtgccaaggcatctccgagttgtcctctaagtgatgtaataacaattaatattgttagaggcactatattaagtttggaatgctacattctgcaatgcctgtagtctctctgaactttgcagtttgccctctctgttccctgttgttagagaacttaattctcagctggacgcgccagcacgtactactagactagcacatgttggtttcttctcttcgtcgaacgggctgtagtcgtctgccatgttcttggtcgatggtatctcgttcgttcatgtgtcggtcggctctcagattcattcagatacagaggtgtgttctggatgcaggcatttcctcaagaaaatggtttggcattcacgttcagttggagctgcagacttgcagagcggctgtgaaagactgagatctttcgcagctacagaggtgttttctagcgagcgtcgtcgttttagaaagactctctttttcaagaagtaatagaagaggaagaaaaggaaaagggaaacaaaaaaaaa

SEQ ID NO: 146190 - DNA, 2505 bp, Zea Mays
aaacaggcacaggctccctcctccactgtccagtgtccactcctcgtcccgagaagcagacaaagcgcggcgctgcagatttcggtacggttcccaatgcctcccatgcccgccgtcgtcccgtgctagcacccggcgccgctcctccacctgccgcgtcgcgccgcctggatccggcgggcacgtggctaggagcctcagatccgggcgaaacccagccttccgtgcggacgtcttcactctacctccagactggcggctgccatttccccccctcttcttgctgttttttttggtgggggtggggggtggaatctgcggtggagtcttgccgtcgctcgctgtaaacgtagagctctctctctctctcttggcgagtaatcttggttcttgctccatttccgtgttagtgctggcgtgtgagtggcaaggtttacgtgtaagatgtggaaacagttcctgagcaagctgccccggaggtcgtcggcctccggggactcgggacattgcagcagtggcgccggcatacagcgcacgagcagctgcggcagcatcccgccgggccgccccccggcctccgccattcggcgcatgtcatccgccgtcttcccctcgagcgtcgtggctggcatcgagccgctggtctcgttcaaggacgtgcccagctcggagaagcagagcctgttcgtgagcaagctgagcctgtgctgcgtcgtgttcgatttctcggacccggacaggagttcggtggagaaggatatcaagcggcaggcactgctggatcttatagagttcgtcgagtcgaccaacgctcgcttctcggaggcggcggtcgtggcctgctctaggatgtgcgccgtcaacctgttccgggcgttccctgcaagttgcaggtctggcggctcatcaggcgtcggtgagtgcgacgaggacgagccaatgttcgatactgggtggtgccatctgcaccttgtttatgagctgctactgaagtttatcggatcctcgtccttggatgcaaagatagggaagaagcactttgatcactcgttcattgtgaagctccttgatcttcttcactccgaggatccaagggaaagggattgcgtgaaaaacattctgcacagggtgtatgggaagttcatggtgcaccgtcctttcattcgcagagcggcgagcaacgtattctaccagttcgtcttcgagactgatcgacataatgggatcgcagagctgctggaggtctttggcagtgtcattagtgggtttgcactgcctctgaaagaagagcacaagacctttctttggagagttttggttcctttgcacaaaccaaaatctcttggtgcgtaccttcagcagttgacctactgtgtgacacagtttatagaaaaggatccagagctcgcaagcccagtgataattggtttgttaaggtactggccaataacaaattgtcagaaggaagtgatgtttctcagcgagatcgaagagatcttggaggctaccagccaggcagaattccagaaatgtatggcaccattgtttcggcgaattgctcattgtatcaccagtgctcacttccaggttgctgaaagagcgcttttcatgtggaacaatgatcacattgtcagcttgatagcacaaaaccgccaagtgatcatgtctcttgttgttccagcgctagagcagaacattcagaatcactggaaccaagcggtcctgaatctggctgtgaatgtcaagaaaatgttttctgagatggatggtgaccatttctcgtcgtgcctggccaggtacaaggaggaagaagaaagacttgtgtcgctagaagcgaagcgtaaacttacctgggagaagcttgagtcagctgcagccttccagccagtgactggccaaacagccgtcctagtaggccaccagccgtcagcaaatatgatcgccaacctgatcttctagcccatgcatgccgaacaagcaaatgtgctcttccccccttttggtgaagcgcagcaagtgtaggtgttccctaattttctcatgcttttttttttgcatttgttggtgcgagtaatcagtgtagtaagctgtaactatttctggatggttatgttcatcaggcaagaatacctgtaatgtgagactgctgagtgctggcactccttacatgtatctttgccaatttgtggatgaacaaattgtcctacagttgaatttcacctcagcttgcctattatgattggctgacgcagaatcatcaagtgctatttttatttccaaaatgtctgaagctttggtttgaattcaatccattctcacagcttaccactgcgattcaattttgaaatggacatgttgttagactgtttgtgtgttctgggcctagagtccacttagggcttgttcgtttccgtcggattgcacccggaatcgttccagctaatcaaagtttatataaattagagaagcaatccgattaggaatcgttccgacccaccaatccgg

SEQ ID NO: 146191 - DNA, 865 bp, Zea Mays
agggtttcattcgccgcgccgtcacttccctcccctacccccaagggcacctttggtagccgaggatctcaggagaataccgacccattccctgccttccaaacccacgcgctaaattatcccagagcgaaaaaaaattatgtttggtgacccaactccccggcccaatccgtgggagagaacagggctttcgcccccggcctaacaaggtcgggaagggtttccccgagctcaccctctccactcgtgcacccgccgccacttcctttctctcgcgcacccgacgtcgcatcctctctcgtgcagttggggccagctgttgggccgaggtcgacgacggggtcgacctctccgtggagacagccaaggcggccgtgagccacgccgccacgagccaccacgagcacggcggcgagctcagcgatctggagtcggatctggtggggcggcagaagactggctgctcgtcgtcgccggcggcaacaacgccggctgcagagctgatcgtgccgccagcacagcagatctagcaattccaggtgaagagaagagagccgatttgtgcttgctaatcactggcggagacctacagtgctacttgcatgtgtgcgttgcgtgcagatccagcaattccaggatttttgccacaccatgtgtgcgttgcgtgcttcgaatggattgaaatccaaatccatttcgtcttgccactgcactacacctgcacgcctgcacctgcacgcccggccgagctcttgaccggtggggaactttagttttgttatggtgcacaaccaatagttctctgtgttggtctgcttgtgggtcttttcattattcagcaagttgctattttcagttttgttcg

SEQ ID NO: 146192 - DNA, 1058 bp, Zea Mays
agggtttcattcgccgcgccgtcacttccctcccctacccccaagggcacctttggtagccgaggatctcaggagaataccgacccattccctgccttccaaacccacgcgctaaattatcccagagcgaaaaaaaattatgtttggtgacccaactccccggcccaatccgtgggagagaacagggctttcgcccccggcctaacaaggtcgggaagggtttccccgagctcaccctctccactcgtgcacccgccgccacttcctttctctcgcgcacccgacgtcgcatcctctctcgtgcagttggggccagctgttgggccgaggtcgacgacggggtcgacctctccgtggagacagccaaggcggccgtgagccacgccgccacgagccaccacgagcacggcggcgagctcagcgatctggagtcggatctggtggggcggcagaagactggctgctcgtcgtcgccggcggcaacaacgccggctgcagagctgatcgtgccgccagcacagcagatctagcaattccaggtgaagagaagagagccgatttgtgcttgctaatcactggcggagacctacagtgctacttgcatgtgtgcgttgcgtgcagatccagcaattccaggatttttgccacaccatgtgtgcgttgcgtgcttcgaatggattgaaatccaaatccatttcgtcttgccactgcactacacctgcacgcctgcacctgcacgcccggccgagctcttgaccggtggtacaaaagggtttttcatcaacaagtggtcaccaaaagaagaactgaaacatcaagatggtgtttgcttctacattttaccattgaggatatgatgctaaactgaagtcatgtattatgctatgcattcagaagatgatgctaaactgaataagcacatcaatctgatttttctatgcactgagactatgtttgtattattgttatgcaatgcaatctatgcactaaaacgttcaactctgtttgatctggctgacatattcagaattataatacgctgctgccaatttgcaaaa

SEQ ID NO: 146193 - DNA, 838 bp, Zea Mays
agggtttcattcgccgcgccgtcacttccctcccctacccccaagggcacctttggtagccgaggatctcaggagaataccgacccattccctgccttccaaacccacgcgctaaattatcccagagcgaaaaaaaattatgtttggtgacccaactccccggcccaatccgtgggagagaacagggctttcgcccccggcctaacaaggtcgggaagggtttccccgagctcaccctctccactcgtgcacccgccgccacttcctttctctcgcgcacccgacgtcgcatcctctctcgtgcagttggggccagctgttgggccgaggtcgacgacggggtcgacctctccgtggagacagccaaggcggccgtgagccacgccgccacgagccaccacgagcacggcggcgagctcagcgatctggagtcggatctggtggggcggcagaagactggctgctcgtcgtcgccggcggcaacaacgccggctgcagagctgatcgtgccgccagcacagcagatctagcaattccaggtggtacaaaagggtttttcatcaacaagtggtcaccaaaagaagaactgaaacatcaagatggtgtttgcttctacattttaccattgaggatatgatgctaaactgaagtcatgtattatgctatgcattcagaagatgatgctaaactgaataagcacatcaatctgatttttctatgcactgagactatgtttgtattattgttatgcaatgcaatctatgcactaaaacgttcaactctgtttgatctggctgacatattcagaattataatacgctgctgccaatttgcaaaa

SEQ ID NO: 146194 - DNA, 121 bp, Zea Mays
agtattatttttttatacaatttttgggctttacacatataaatatgtcactacatcttcattatttggttgacaaaaagtgtaactcccttcttgaatcactgtgatttcttttctcttt

SEQ ID NO: 146195 - DNA, 1628 bp, Zea Mays
acaaccggatcgtggatggacggagacagtgagacacgtgggacacggtggtcgttggatttgcagcggacggtgccgatcgcgtggctggagggacgagtcgcttatcgcttgcgaagaagcctaaacgatggcctggctgttctgtcctgtcctgtccatgtccatgtcggtgtctttccccgcacaggagccgcgctgcgccacaccacgccattgccatgccagtatgccagttgccaccgaggtaaacagcatagcgacggctcagcatagagacaagtccagcgctcaagagagagagagcaagcctttcggcctcgcgtgatgcagcagcagcagccgtccgtccgcgccgtcaccatccccttcgccgaccttaaggatcggggcaaggacctgggcggcttcatcgaggaaggcttcgggcctcaggggctcggcatcgtctccatcgccggcgtacccggttacccagagctcaggaaaaggctgctgcgcttggcgccaaggatcgtcagccttcctgatgatgtgaagaaacaactggaggacccagatagcagataccactttggttggagtcgtgtagaagagaaattcgagtctgaaagatgggacacagccaaaggctcctacttcgccaacccagtttttgatgtcccaacaactgatgatgagcttgtaactagatacccatcatactgccgaccaaacatatggccaaaggatcatcttcctgagcttgaaatagcattcaaaggtcttggaaaactgatgttggaagttggcttgatgttggctcatcattgtgatcgctatgtaatacagcgaggggtgggacagtacattggtgaaagccttgagaagacacttgctaggtcaaggtgtcccaagggtcgtctgctgtactacttccccaaatcgtttagcaaacaggacgaagtttcgtcatggtgtggatggcatactgactatggatttttgacaggacttacatgtggcttgttcacgagaaaatcagaggaggtcccctgtcctgatattggaactgggctgtatgttcggactcgtgataatcaagtcgtcaaggtcacacttgtggatgatgagttggtctaccaaattggggagactgctgaaatactatcaagagggcatctatgtgcaaccccacactgtgtgaaggctcccagcagcgaagatgcttctgacgttggtcgctcaactttcgttctgtttattcagccaaactgggatgagccgctgaagcttcctagtgaaatacgctatcaccaggagtgcattccaccaaccaggacacttgcgtacggcgagtactccgaaagagtcttggcgagttttagcggcaagagcgtggaacaaaccttgatgccacagtaagaggctccagccagatgaatactccctctgtttctttttatttgtcgctggatagttcaattttatactatccagcgacaattaaaacgaaacggagggagtatatcatatgtatgataccataccattcaagctacagataagtggacagaagcatatgctgttgtgggatggatgaatcgcacgcagcttaaaataatgcaacaataagactttgtttgcat

SEQ ID NO: 146196 - DNA, 1688 bp, Zea Mays
atggcctggctgttctgtcctgtcctgtccatgtccatgtcggtgtctttccccgcacaggagccgcgctgcgccacaccacgccattgccatgccagtatgccagttgccaccgaggtaaacagcatagcgacggctcagcatagagacaagtccagcgctcaagagagagagagcaagcctttcggcctcgcgtgatgcagcagcagcagccgtccgtccgcgccgtcaccatccccttcgccgaccttaaggatcggggcaaggacctgggcggcttcatcgaggaaggcttcgggcctcaggggctcggcatcgtctccatcgccggcgtacccggttacccagagctcaggaaaaggctgctgcgcttggcgccaaggatcgtcagccttcctgatgatgtgaagaaacaactggaggacccagatagcaggtcataatttaggaatttacagaatggtcttcaccagggagcttttgtcatggttgcttagtgtctacttgaatattcctcttctttcttcattttctttcagaacaataagagctcctaagctaggatttgtatataacttgcacttcagttcatacaaagcttatgtatttcttatgcattattggccttgcttcacagataccactttggttggagtcgtgtagaagagaaattcgagtctgaaagatgggacacagccaaaggctcctacttcgccaacccagtttttgatgtcccaacaactgatgatgagcttgtaactagatacccatcatactgccgaccaaacatatggccaaaggatcatcttcctgagcttgaaatagcattcaaaggtcttggaaaactgatgttggaagttggcttgatgttggctcatcattgtgatcgctatgtaatacagcgaggggtgggacagtacattggtgaaagccttgagaagacacttgctaggtcaaggtgtcccaagggtcgtctgctgtactacttccccaaatcgtttagcaaacaggacgaagtttcgtcatggtgtggatggcatactgactatggatttttgacaggacttacatgtggcttgttcacgagaaaatcagaggaggtcccctgtcctgatattggaactgggctgtatgttcggactcgtgataatcaagtcgtcaaggtcacacttgtggatgatgagttggtctaccaaattggggagactgctgaaatactatcaagagggcatctatgtgcaaccccacactgtgtgaaggctcccagcagcgaagatgcttctgacgttggtcgctcaactttcgttctgtttattcagccaaactgggatgagccgctgaagcttcctagtgaaatacgctatcaccaggagtgcattccaccaaccaggacacttgcgtacggcgagtactccgaaagagtcttggcgagttttagcggcaagagcgtggaacaaaccttgatgccacagtaagaggctccagccagatgaatactccctctgtttctttttatttgtcgctggatagttcaattttatactatccagcgacaattaaaacgaaacggagggagtatatcatatgtatgataccataccattcaagctacagataagtggacagaagcatatgctgttgtgggatggatgaatcgcacgcagcttaaaataatgcaacaataagac

SEQ ID NO: 146197 - DNA, 1267 bp, Zea Mays
gccagctcagcggtgtttcatcactcctttggaggcgggcggcttggcttggagctcagctgctgtaactctgtcggcgggtacggtgcgcgcaggatcggggcaaggacctgggcggcttcatcgaggaaggcttcgggcctcaggggctcggcatcgtctccatcgccggcgtacccggttacccagagctcaggaaaaggctgctgcgcttggcgccaaggatcgtcagccttcctgatgatgtgaagaaacaactggaggacccagatagcagataccactttggttggagtcgtgtagaagagaaattcgagtctgaaagatgggatacccatcatactgccgaccaaacatatggccaaaggatcatcttcctgagcttgaaatagcattcaaaggtcttggaaaactgatgttggaagttggcttgatgttggctcatcattgtgatcgctatgtaatacagcgaggggtgggacagtacattggtgaaagccttgagaagacacttgctaggtcaaggtgtcccaagggtcgtctgctgtactacttccccaaatcgtttagcaaacaggacgaagtttcgtcatggtgtggatggcatactgactatggatttttgacaggacttacatgtggcttgttcacgagaaaatcagaggaggtcccctgtcctgatattggaactgggctgtatgttcggactcgtgataatcaagtcgtcaaggtcacacttgtggatgatgagttggtctaccaaattggggagactgctgaaatactatcaagagggcatctatgtgcaaccccacactgtgtgaaggctcccagcagcgaagatgcttctgacgttggtcgctcaactttcgttctgtttattcagccaaactgggatgagccgctgaagcttcctagtgaaatacgctatcaccaggagtgcattccaccaaccaggacacttgcgtacggcgagtactccgaaagagtcttggcgagttttagcggcaagagcgtggaacaaaccttgatgccacagtaagaggctccagccagatgaatactccctctgtttctttttatttgtcgctggatagttcaattttatactatccagcgacaattaaaacgaaacggagggagtatatcatatgtatgataccataccattcaagctacagataagtggacagaagcatatgctgttgtgggatggatgaatcgcacgcagcttaaaataatgcaacaataagactttgtttgcata

SEQ ID NO: 146198 - DNA, 1348 bp, Zea Mays
ctttggaggcgggcggcttggcttggagctcagctgctgtaactctgtcggcgggtacggtgcgcgcaggatcggggcaaggacctgggcggcttcatcgaggaaggcttcgggcctcaggggctcggcatcgtctccatcgccggcgtacccggttacccagagctcaggaaaaggctgctgcgcttggcgccaaggatcgtcagccttcctgatgatgtgaagaaacaactggaggacccagatagcagataccactttggttggagtcgtgtagaagagaaattcgagtctgaaagatgggacacagccaaaggctcctacttcgccaacccagtttttgatgtcccaacaactgatgatgagcttgtaactagatacccatcatactgccgaccaaacatatggccaaaggatcatcttcctgagcttgaaatagcattcaaaggtcttggaaaactgatgttggaagttggcttgatgttggctcatcattgtgatcgctatgtaatacagcgaggggtgggacagtacattggtgaaagccttgagaagacacttgctaggtcaaggtgtcccaagggtcgtctgctgtactacttccccaaatcgtttagcaaacaggacgaagtttcgtcatggtgtggatggcatactgactatggatttttgacaggacttacatgtggcttgttcacgagaaaatcagaggaggtcccctgtcctgatattggaactgggctgtatgttcggactcgtgataatcaagtcgtcaaggtcacacttgtggatgatgagttggtctaccaaattggggagactgctgaaatactatcaagagggcatctatgtgcaaccccacactgtgtgaaggctcccagcagcgaagatgcttctgacgttggtcgctcaactttcgttctgtttattcagccaaactgggatgagccgctgaagcttcctagtgaaatacgctatcaccaggagtgcattccaccaaccaggacacttgcgtacggcgagtactccgaaagagtcttggcgagttttagcggcaagagcgtggaacaaaccttgatgccacagtaagaggctccagccagatgaatactccctctgtttctttttatttgtcgctggatagttcaattttatactatccagcgacaattaaaacgaaacggagggagtatatcatatgtatgataccataccattcaagctacagataagtggacagaagcatatgctgttgtgggatggatgaatcgcacgcagcttaaaataatgcaacaataagactttgtttgcatacctaccatcgtagtgacacatgtgaattgagacg

SEQ ID NO: 146199 - DNA, 2342 bp, Zea Mays
gtggaaatgataaagcctcggcccttcaggctggctctgctcctcctcctcctcgccattgctgtgcgttctccgcctcaccagatttcgcaacagaaccttcgttccctgccgtctcttgtcggtctggccggccgaggtgggtgatctgtagagcgaaacgccgagccgggagaggagggaggccgcaccggcgattgtagaagcagaaccggtggaggagtagaggagggcgccgaatcgatgcgcggctccgcggacgccgtcgtggttgctcgggacgtggtggcctcgtcgagcccgtccaaggccgcgtcggcgttggacatgacgaggtacgcgaatccaccaccaatcccgttcgcctgccgctgcagctgcagctgcagcgttgtgttcgtcggtgttctttcctgagaccaaagccgcgaatttgcgctctcgtttccgcagtcagtggttgttgccggctcctgcggggctgattcgaacaagtttctccctttcgtgccgtgttcgcggcccttctctgctgttctcttcgcaagctcttcgaggcgccgtttgatctgcgggcaggccagttgttctcgcgtctcgcagcctgtgtctcacccgcccacctgtgctggttggttcttcgctggtctcggttcggttctccatagattgcaggttttcgttctgaattatccgctcggctttctgggatgattatttctctgcacagatctctgaaccgttcgtttaacgtggagtcctgctgcggtttgcgagcgttctggttttctgcggttgcaaattcacgcaggaagacgagattttgcacatcttttcatccatgactccagatacccgaggctcagcccagatggcctcccgctgcccaatggcagcggcagcggcgcgagcaagaagcctgcagcgccggtgtcgccggcccccagatcgagcaaggatgacgtggcaccggccgtcgccaccgacagctcccgcatcgcggcgttcctagcctcgacgtcgctcgagcccaagccgcgcgctcgcgcaccgcagccacagccgacggctcctaactcggcgcccaccgcagccgtcgccgcgaacaggagccccgcgcgcgaccacggccacggccactgctccgaccactccgatcccgcctccccgagctccaccggggcccgcgaattgctgctccggtggggacagaacaagcgcatgcgctgccgccgcgactgcgcgtccgcgtcgccgcagcggcggcaggcgggcggcaagataccgcgccgctcatcgtcgccggcggcggacaatctgatgccgccgccgagcgcagcgccctacgcccgcgggtccaacctccgctacgccacgcctcgcccgccgcgctccggcgccagcgacgcgcaccacggccgcggggccctccccaacccgctcagatcggcggaggactgtgccggtgcctgtgccggtgccggggagaagttcttggcggttgctgaggcagcggcgagggcccagaagcagcgggcggtgtcgccgcataaggtgggcctgggcgtcccggacccgaagcagcagcagaaccagtggggcagcagcggcagtggccatcagcagcaggccggcgcggcggcgggggcgtcgtcgaagccggcggcgaagctggaggtgccgcggatctacaccacgctgtcccgaaaggagaaggaggaggacttcatggccatgaaaggcaccaagctgccgcagcgccccaagcggcggccaaagatcatcgagaagaccgtcagtgcgatctgtcccggggtgtggctgacggatgcgaccaggagcaggtacgaggtgcgcgagaagaagtgccccaagaagcaacagaagcaccggggcctcaagggcatggagagcatcgacagcgactccgactgaccaccgaccgacggcagcaggccgaagggcgtgcggtggcagcaacgcggcgagacgaagaagaaggaggaggttcggcgacagcgaagggtgcgtgtcaacagccacgcgctctcggagactcacattgtcgcgctgggttaagggatgccaaaaagaacaagaggagggtggattcagtaggaaaaagacaattctttttcgtgttaaccatagcggcgccgtgctatatagccggcgttttgtatatctgggtagcgacgagacgatgtcgtagccggcgtctttttctttttcgtttcgttcgcgacactgggtgggttgcccgccgcgtttatttgtggttgggtttgtgcatactactagactgtctcagcaagaggaagcaactagacttttagacccta

SEQ ID NO: 146200 - DNA, 1826 bp, Zea Mays
gtggaaatgataaagcctcggcccttcaggctggctctgctcctcctcctcctcgccattgctgtgcgttctccgcctcaccagatttcgcaacagaaccttcgttccctgccgtctcttgtcggtctggccggccgaggtgggtgatctgtagagcgaaacgccgagccgggagaggagggaggccgcaccggcgattgtagaagcagaaccggtggaggagtagaggagggcgccgaatcgatgcgcggctccgcggacgccgtcgtggttgctcgggacgtggtggcctcgtcgagcccgtccaaggccgcgtcggcgttggacatgacgagatacccgaggctcagcccagatggcctcccgctgcccaatggcagcggcagcggcgcgagcaagaagcctgcagcgccggtgtcgccggcccccagatcgagcaaggatgacgtggcaccggccgtcgccaccgacagctcccgcatcgcggcgttcctagcctcgacgtcgctcgagcccaagccgcgcgctcgcgcaccgcagccacagccgacggctcctaactcggcgcccaccgcagccgtcgccgcgaacaggagccccgcgcgcgaccacggccacggccactgctccgaccactccgatcccgcctccccgagctccaccggggcccgcgaattgctgctccggtggggacagaacaagcgcatgcgctgccgccgcgactgcgcgtccgcgtcgccgcagcggcggcaggcgggcggcaagataccgcgccgctcatcgtcgccggcggcggacaatctgatgccgccgccgagcgcagcgccctacgcccgcgggtccaacctccgctacgccacgcctcgcccgccgcgctccggcgccagcgacgcgcaccacggccgcggggccctccccaacccgctcagatcggcggaggactgtgccggtgcctgtgccggtgccggggagaagttcttggcggttgctgaggcagcggcgagggcccagaagcagcgggcggtgtcgccgcataaggtgggcctgggcgtcccggacccgaagcagcagcagaaccagtggggcagcagcggcagtggccatcagcagcaggccggcgcggcggcgggggcgtcgtcgaagccggcggcgaagctggaggtgccgcggatctacaccacgctgtcccgaaaggagaaggaggaggacttcatggccatgaaaggcaccaagctgccgcagcgccccaagcggcggccaaagatcatcgagaagaccgtcagtgcgatctgtcccggggtgtggctgacggatgcgaccaggagcaggtacgaggtgcgcgagaagaagtgccccaagaagcaacagaagcaccggggcctcaagggcatggagagcatcgacagcgactccgactgaccaccgaccgacggcagcaggccgaagggcgtgcggtggcagcaacgcggcgagacgaagaagaaggaggaggttcggcgacagcgaagggtgcgtgtcaacagccacgcgctctcggagactcacattgtcgcgctgggttaagggatgccaaaaagaacaagaggagggtggattcagtaggaaaaagacaattctttttcgtgttaaccatagcggcgccgtgctatatagccggcgttttgtatatctgggtagcgacgagacgatgtcgtagccggcgtctttttctttttcgtttcgttcgcgacactgggtgggttgcccgccgcgtttatttgtggttgggtttgtgcatactactagactgtctcagcaagaggaagcaactagacttttagacccta

SEQ ID NO: 146201 - DNA, 1743 bp, Zea Mays
tttttctttgttttcttctcatttgacactatataaatgatccgaaaaaattgtatttattaattttgaaaggaataaattcgaaatatcaataataattatattgattgttttgttgttgtgtaattgttgtcggtaacgcgccacatagtataatatcgttgccaaaataagttttcaaatggacaagcttgcaccgtaagccagtactcttcttcgagaagccatagccttgcttcccttgcacgacaagcgcacgtcttctatccgaagcgtacttcctctataaataccaaaaatggaagaggaagaagaagagttgcagttggcgaggcacatggtcaataggaggcgacgtgcacgcaatgagcgtcgtcatggtggttcgattccagggcgtgttaggattcatcgtgatcacatgagcggcgatgcaagaatccgagcggactactttggagccaacccggtgtacacggatgctcaatttcgtaggaggttccgcatgcgtcgccatgtctttgagcgccttgttgatgttgtgcaacaagtggatccttattttattcagcgtccaaattgtgcgggtgagattggtctttctgctctacagaaagttgttgctgctgttcgaatccttgcttacggtattccagctgatgccgttgacgaatacgtacgtattggggaatctactgctcatgaggcattgaaacacttttgcacggccgtccaaaccgcgtttgctccatattatctccgtgcaccaaatgcagaagatatcgcacgccttctccaagttggcgagtcacgtgggtttcctggtatgcttggtagtgttgattgcatgcattgggagtggcgtaactgcccaagttcatggaaggggatgtttacagggcgtggtaaacatcctaccatgatcttggaagctgttgcgtcgtatgacctgtggatatggcatgcatattttggtctgccaggtagttgcaacgacataaatgttcttcaccattcaaaccttttcgaaaggcatctgagcggtgacacacctccagtttcattcactgttaatggtcacacgtacaatatgggatattacctagcagacgggatttaccctgactggcccgcatttgtcaagacaatccgtaacccctacgacgttagaacccaacactttgcaacaattcaagagtctgctcgaaaagatatagaacgagcttttggtgtactccagaagagatggggtgtggtctgtggacctgcatacggttggagtcctgaacacattggggacatcatgaaaacatgcataatattgcacaacatgatagtagaagacgaaggtccattgtctttgaacacaacctttgaaaacatcggagtgctggcagacacaactcaaggttcaatggaagagcgcaacgacttcgtcaatcaaaggtacaaccaactgaaagaccgcaacaaatatactcagcttcaggtagatctgatacaccatcattgggcgcgacatggatccggcgttgcataggacgcaatgaaacaagttctgtcatggctgttcttatctactgtcgaactgtctttgtttactttacattgttctactatctgtgttagtgtcatgtctgttctacttcatgtgtcaagtgtgtgtactgtgtgtcttagtgtccaagtgtcgtagtgtctcatgctgctgtttgaattgaataagaaggagtactactgtca

SEQ ID NO: 146202 - DNA, 2107 bp, Zea Mays
ctctgctccgctccggccacctccctcttcttcgactgagtaaacacgagcagccgagcacgcgacccgacaacgctcgcgcggaggccgaaatgcccgctgctgctcctcttcccagtacgtagcagcggaacatcgtcgtgggtcgtccgccgttgccatcgtgtgacggcgtgaagggatcggatcgaaggaggccgcaagccaagcaaggatcaagaaatggcgtcgcgcggccacctgctgctactagcgctgctcgtgctggccgcggcggcagcggcagcgtcgggcggcgggcgacagcaccagcagcggcagcgcggcgggaggaagccgaagccggcgcggccgcggctggacctcgtccccgccgcgccgggcgcgtccctgggcgagcgcgcgagggacgacgcgcgccgccacgcgtacatccggtcgcagctggcgtcccgccggcgccgcgccgccgacgtgggcgcgtccgccttcgccatgccgctctcgtcgggggcctacaccggcacgggccagtacttcgtgcgcttccgcgtgggcacccccgcgcagccgttcgtgctggtggcggacaccggcagcgacctcacctgggtcaagtgccgcggcgctgctggaccaccggcttcggacccgccggcgcgcgagttccgcgcctccgagtccaggtcgtgggcgcccctcgcgtgctcctccgacacctgcacctcctacgtgcccttctctctcgccaactgctcgtcgccggctagtccctgcgcctacgactaccggtacaaggacggctccgcggcgcgcggcgtggtgggcaccgacgcggccaccatcgcgctgtcggggagcgggagcgaggacggcagcggcggcggcggcaggcgcgcgaagctgcagggcgtggttctgggctgcaccgccacgtacgacgggcagagcttccagtcctcggacggggtgctgagcctgggcaacagcaacatctcgttcgcgtcccgcgccgccgcgcgcttcgggggccgcttctcctactgcctcgtggaccacctggccccgcgcaacgccagcagctacctcaccttcggcccggggcccgagggcggcggcgcccccgccgcgcggacgccgctggtgctcgaccgccgggtgagcccgttctacgccgtggcggtggacgccgtgtacgtggccggcgaggcgctcgacatccccgcggacgtgtgggacgtgggccggggcggcggcgcgatcctcgactccgggaccagcctcaccgtcctcgccaccccggcgtaccgggccgtggtcgccgcgctcggcgggcgcctcgccgcgctgcccagggtcgccatggacccgttcgagtactgctacaactggaccgccggcgcgccggagatccccaagctggaggtaagcttcgccgggtcggcgcggctggagccccccgccaagagctacgtcatcgacgcggcgccaggggtgaagtgcatcggcgtgcaggagggcgcgtggccaggggtgtcggtcatcggcaacatcctgcagcaggagcacctctgggagttcgacctcagggaccgctggctccggttcaagcacacgcgctgcgccctatgatgatttgctgacggacgccgcgaatgcatgattgattcctctatcgcatcgcattgataaaatttgtgacgaggtttttttctgaatgaaatgaaaagatgattcttagcgcaacgggaaatcgttcacctgaaattaaacagcagtctgcacgtacgcatgtggtcggttttttttttggcaaagccggccacacaactgagcccatacgcaacacagattctgaaacaagaacggactgaactttgcaaacccagcttacacaacatgccacaaattaatgtcataactaataatacttacatgttgtttggttcacataatacttagagcaactccaatagttatgtaaattttagctctctaaatcacatatttaagaagttgctaaatgccttttggagtaaaaaaaaaatgtgagttctctgatagttctctaaatataggttgtaattttgttttttatttatccaca

SEQ ID NO: 146203 - DNA, 303 bp, Zea Mays
ccagtgggagaattcagcctaaaatcttgcctgcactggattttctctacagaagtacaacacacttaagtcaggttagtgttcaagaattattgataccactgaactacaatatatttagcctgataaatgagatggttgtcctttacataaactttcagataaccaaaagtaagataaaataacacacaactcaaccatgtttccatatcagatattaacatggaccttcacaaatataaacacaaagttattgcgattcattgttatattcaagtcaccaatagatgagcacgtacagag

SEQ ID NO: 146204 - DNA, 1212 bp, Zea Mays
gtcgcagtctccaagcccgccgggttccccgaccacccccacagaggattcgagaccctcacctacatgctcgagggggcattcacccaccaggacttcgtcgggcacaagggcatcatcaggacatgggacgtgcagtggataacgacggagcgaggcatcgtgcacttggagatgccggcgggggacggcgtgcacaagggcttgtagctctggatcaacctctcctccaaatacaagatgatcgagccgcggtaccaggagcttgagcgcaaggacatcagccgcggggagagcgagaacgtcgacatggaggcccgcgtcatcgccggggaggccctcggcgtggcgtcccccgtgtacacgctcacccccaccatgtatgtggacttcaccatgcgccccgggtctcgcctgcaccagtctgtcctggagggctggaacgccttcatctacgtcatcgacggcgatggcgtgttcgggcgggcgacggccacggcgcactactgcctcgtcctcggccccggcgacggcgtcagcgtgtggaacaggtccaccaggccgctgaggttcgtcctcgtcgccggtcagccgctgggcgtgcccgtggtgcagcacaggcccttcgtcatgaactcgcgcgccgagattcagaaggccatggaagactactattatggcaagaacggctttgagagggccggacagtggagctcctccgccggatcggcgaggcgggaagctgatggggatcagtcatcaaattttagcatctatttgtcatgcagtcctaaatggactgatggcagcattcctttggatgtactttctgataaactcacaaaaataagcaagatcgctgctagccagaccaagatttacatggtgcttcagcttgtcaatgggggcaaactgttcgatggtattacacacaatgttaccaaggaattaatgaagtatcactcgcagactcttggatatgtaattggtggcaataacatgagaagcgacgccaaccatctcacagaagggatcaatatcttaattgccacactggacaggcttttggaccatctgcaaaataccggtagtttcaaatacaaagagctaaagagtgtgaaaaccactaggatctatgatgaggagtttgctgatttgggatggggaagaggcgaaaatgagattgaggatgtgtttatcgttgttttgtag

SEQ ID NO: 146205 - DNA, 1134 bp, Zea Mays
atgagcaaggcgcccctctcagtcttgtgcagggcgagttgctgccatggtggctgtttttttgcgggcgcgagctctgcccgcctccgatcttggacgccatggccagatcaaggattgaagcagtttacacatggccctgagattgcattaactctttcccagaatgatattgtggcgcccgacgaggtgggggcgtcgtttgagagggccgatgaggtgatcttcgaggaggaggaagatgatggacagacaacgaggacacgccccgaggacccctcacctatcactagcggcgtggagagtggcaggaatcctcatcgttgtactgacggtatgatatacaacagtcttagaaacttccgcatttgtttggtttatgaactagtttccaagatcagagatgcaatttcatactgtgcaaaagcaatttcgctatgcaagtcacgcatacagaacctaaaaagttccaaggatgctttgttggctggtatagatggtggtgatgcatctgctgctgaaggaggctcagaaaaatctactgttgaaaaagagctagagcagcttactagcatattgcctgatcttgagaagaagcttgaggacctgtctgaagcaaacccaagcgctgacatggatgagatggtgaaggcaattgcgtccagggtaactgaagtgatgccaaaagctgcatcttttacttcttcccagatagcaacctcaagcaatggattcgactcctcggttatgtctacggcagcgacaactggaagccctggaagcactgtgactgaccttggggttgtaggcagaggcgtcaaacgagctagcatcaagccgatctctgtcgaacctgctgctaagaaacctgcacttgattcaccatctctccaaggtgacaacatcaactctgtggttgtccctgcaacacagactgatgaatccagctaaagctctacatttgaaacgaacgctttctgacgggggcacgacgataacacgccttctattctagtatgcttagatagattcaatgttagcgtaaacgactgatgataagtttttcagttagtattttaatttggatttagagtacacttatgtatgatttatttgacaatgcttatttatgag

SEQ ID NO: 146206 - DNA, 560 bp, Zea Mays
aacataagcatattcttagaagatcaacacacaatcgttgtgagtcaagcgaagtacatagctttagcaagaaacaattctgccatacttctataaccaataggtttgagctaccaagctcgcaaaacctgaagaaacaaattcagaagaaacctaagggaccaagttttgaggtatatctgattgatggaaaatcttggaactttaacagatgatatagttcttccagctgataacaattgactaactcaattcatcgatgatttggatatccagcctacaaatacgcagaactgaatattttaagaggcacctccaacagtgatatcaactgcaaccttatactcttatcctggtcctcaacttcttgatcttgacatctgatttctccaccttgatcttcttatctccctgcatttcctcagtaccgacttcaccatcaccgttcatgctcttcttcttcctctgctcagtcttccccatcttaaccttcttgttgtccaaactggcttcgttcaccttattttccaaaccacgtttgcccttcttttcacccttct

SEQ ID NO: 146207 - DNA, 126 bp, Zea Mays
tctattttccatagatttgagttcaaatttgctttgaaattcaaacaccagttaaatgcagcaaacaaagaacctcaacatgaatttatgatgtattttatttatttattggttaattattcccct

SEQ ID NO: 146208 - DNA, 1364 bp, Zea Mays
cctccgatgtctatagtacccaataaatctaggtcacaaaccttgctttactattaaatattgatggagacagaatgtcagccattcagagatgaaatcaccgagaacaagtcacgaaaccaacatatgtggaatgaacatgctctagactctaacctgcccccagttccaaaatcatttatttgctacatggatttccaattgtcaacatcctgcaacacatgcaaaagcgagagcgcaaaaacatagataagccagatgaagcacctaaaagcatagataagccagacgaaccatccacagatagaaatcccaaaccaaacattatgacagttgaactaccaattacttgagctaaatgatctgcagaacacagaaataccagcaacacaagaattaaagcttcagtcagagcatagcaagataaagcagaaacaagcttgattaaatgaaagttgtagtgttgtagttctagcgatctctggttgaatctccgaagttaaaacatgatcattaccttctacaactgcagattaaattagaaatatctgaatattatagtaaaagtatcatggttcatatacaagaatttgtaaattggataagttagtacccccaacacataatccacgatgccaagcccaagcaaaaaatagcagtaagacctgcaataatgaccctaatcattaactacttcaaggtagaagacactgaacaaacgcaatgcaagttgaaggttgtaggtctgaatagatgcaaactggttccttcatgcccagttatcacctagagatctgcagtcaatgagaccaccctcggataactacctatttgatagtgacaactgagaacacaaacaacatgaacattcatcaaataacataggaataggataaagcgtgatcaatgggcaacaatttcagttggaagtcctatctctgtagcaatgcctcccaaaactgcacatccagtaccaaaatatcaaaagcctatgagggaagtaaatttttaaagaccattgacagcaaaagtttcgaacaacattgatagcaaaccaagggaatcctgaacaatttataacttattgctcatgcagaaacagaatctaagtcaggctcctccgtccatacaatccagttgttgtacaagtagagaatcaccatcccaaatgtgtaaggaccaagaaatttaagagtaccaataaaagagaggtagagccaaacgatgttctccagatgcaataaacttcagtccagtcaaagattcaatccacctccaaaatgtttaaatctacctccaaagcaccacctgatcccgctaataacatttttctaattaaggacgatcaagcttcaaattaatcc

SEQ ID NO: 146209 - DNA, 2146 bp, Zea Mays
actggtaatccttgtcaagtgtcaacccaaccgtccacggtccgccctcctccttcgttcacgtcttcctcctcgcgttcctctcgtcagtacggcgacgccgcaaggctcgcaccgctgacagtcccccttcccggatcgagcctctcttttcccagatcggattctaatttggctatcgccgccgccctacgccaggtgccgagtccttagctgatcttcgccggcgaggagcgcccaccaggagttacagattgaatgacaagaatgttctctatatcatcctcagtatgtgtgaagaaatagtctgtaactacacatacctttcattgcaattaccaagaactggaaatggacgatgataatgggcttgagcttagtttgggcctatctttgggcgggtcatcagggaaggccaaggctagagatgcacctctagaaccaaaagcagaaccccaagtggaagaaagcagtagcaaaggtggtttacaaactcctgatgctccttctgggaaattttatcaaaagagcgctgataaccatgaacaaaatagtaaacagaggcacagccctgttgcaccacaatttgggaacttctggggacaaccagggaattcctccggtccagtggtagatggttctgttgaaccggtgagtcatcagcctcagctttccagttatcaagatggaaggatgccaattaacagtggaaataattctgaggagcagaagccagtttctggtaaccacaagttgccttctgaagagatgaactttcagaagaaacatcagacagctagtgaccagcctgatgcattcagtaagagctctgacggaggtgcaaagaatgcacctatctcgattagtacggatgatggttcaactggtgaaaatgaggatgttgcagagtcagaagcagaaggctcaaattcttggttggttgcacagcgtgaagacagtgctaagggctctgttgttaacaaaggaactgataggaaaaggtccgccgatgctgctgcagatggttttaaaggaaagagacaaccaagtttctcaggaagcgagtccagctctggaaagttgacacctggaaatcttatatcgatgcaggcatcaaatgtagtggctttgccatatcaagtcccaggtcaagtttctggacctcctgtcttaactaatgcaccaaattttcacccggtatgtactgtgcagttgaggccgcccacaaatggtggactagctgtccagacaatgggtagtgcctctcaagttgcttttggttacccagcagtccagctaccaacacttgaaacgggctcttcatgggcatttggtgctccacctcaggctctgtcttcttttactgcaaaagacaaagctgatcaaacaggaaccaagcaagttgacgatggcaagaagccccaggaggcaggtgcttcctcgtctgctcatgctgaagatgagaaaaaggctgatagaggactctctcttatgggttctgccataaggccaggcatcgcaccaaatgtcaaatttggagggtctggatcatatccggatcttccctgggtttctaccatcggcgccggaccaaatggcagaaccatatcaggtgtgacatacaagtttggtagaaatgaggtaaagatagtatgtgcttgccatggcactcacatgtctccggaggagttcatgcggcatgcaagtgcagatgctccggcccaagataatagtgcaaccctgccagcattccctgctggtaaccaagccacgtctgcagaaaattaggttagcggttcagagaatgcttgactaataatccttgcccctcttgtgtctatatcagccattcactgtaatactcagtgttcatctcgtgttaactttttatcatgcaagtttagattcttgtattttgagctttgtttgaggataaaatctgtgtatttttagcgctatgtaacacatggactgccaattgctgtggttggattttgatctatagacgatgtgttcattgctattagaaacagggacttggtcttcttcgtaagttcctcgcgaagggtgagagcatctcatgagagtgtatttctataactcgttctctctaaattatatttgaagagtcattaaaataaaaaaa

SEQ ID NO: 146210 - DNA, 1945 bp, Zea Mays
actggtaatccttgtcaagtgtcaacccaaccgtccacggtccgccctcctccttcgttcacgtcttcctcctcgcgttcctctcgtcagtacggcgacgccgcaaggctcgcaccgctgacagtcccccttcccggatcgagcctctcttttcccagatcggattctaatttggctatcgccgccgccctacgccaggtgccgagtccttagctgatcttcgccggcgaggagcgcccaccagaggcaggtgcttcctcgtctgctcatgctgaagatgagaaaaaggctgatagaggactctctcttatgggttctgccataaggccaggcatcgcaccaaatgtcaaatttggagggtctggatcatatccggatcttccctgggtttctaccatcggcgccggaccaaatggcagaaccatatcaggtgtgacatacaagtttggtagaaatgaggtaaagatagtatgtgcttgccatggcactcacatgtctccggaggagttcatgcggcatgcaagtgcagatgctccggcccaagataatagtgcaaccctgccagcattccctgctggtaaccaagccacgtctgcagaaaattaggttagcggttcagagaatgcttgactaataatccttgcccctcttgtgtctatatcagccattcactgtaatactcagtgttcatctcgtgttaactttttatcatgcaagtttagattcttgtattttgagctttgtttgaggataaaatctgtgtatttttagcgctatgtaacacatggactgccaattgctgtggttggattttgatctatagacgatgtgttcattgctattagaaacagggacttggtcttcttcgtaagttcctcgcgaagggtgagagcatctcatgagagtgtatttctataactcgttctctctaaattatatttgaagagtcattaaaataaaaaaaacgttttaatatcttattagtctaatagtttttatatcttttttttactctaatagttttgcttagccttgtccggacacggcgtcgttcggggccacgcctgaccttgctcctctggttctgaggctggctctatcttcttgaccatatcgacctgagcagtgccaatctcgccgcgggcttccactgctttgccctatgcactttacgccgccccccggactggaaaattgcttccccgcggacctccactccaacggtgcccgtatctcctttgtcctggctggatccgtataatctcctttgtcctccccctcccctcgttcccgtctccctcgcgttcctctcgaccgtacgccgccgcctggctcgcaccgtcgacagtacctcagtccagatcgaccctccctctacccagatcgggttccagttggcctaccgcccccgccgccctactacaggtgccgaggccttcaccggcgaagagcgcccgccagacaaatggaactgggtgataaggcggtcggttttctgctgactctgacaagcttaaccttatttacatactacacattctgggtcatcattttgccatttgtcgacagcgaccactttgtgcacaagtacttcctgcctcaagagtatgcgattttgataccggtactggccggcgtggttctcctttcgttcttgagcgtgtttgtgggccttgtgatgctcaaatcgaagaagaagaagacggcttaatcgggtttgccatgtacactgctgtgtcattcacttagtgtgatgaaatgcatgagttcgcagtatctaattgctagaagctcggttctgtaatcagttccgtcatactttaaaggtctttactttgtcatctggatgtgtgttttttttattctggtggtcaattaaaagcagtgttcatcaaaactctagttagaggtcacatatcgttagccattattcggaccgaacagc

SEQ ID NO: 146211 - DNA, 553 bp, Zea Mays
tgcaattgctttgcacccttctattgcaagtcccattacattttcaaatgtatcaattggtaattttgcatccatctgaaaaaggcatttttttaagctgcttccttctgatgctaacaaaagaataatactatgcagaaatcaaacacaaaggaagtatttcacaagagagcaaaactgaagcatataatacgattgcgcctagagacagagaattgaggcggcaagaatgtgattcatgatctttctacctgaagcaaagtcactttgtccatctttgcaagaatgccaacagtgacatcagaacccccagcactgtcttcgaggaaggtgtcttaccgagcaaaggagtagaacacagataaccagcactacatgatgtggcaatgtctcgcattggaatcccagcatctgcaagagctagtgttgcagcatttatgcaagctgaccttgttcctgttgtacacatggtcatggtcaacatgacaataatcttgaagcacaaattatggttaaattatttccaagaagcgaaagaataatatgctatagc

SEQ ID NO: 146212 - DNA, 99 bp, Zea Mays
atgattatgatgccaggtagcttgccggtcaagcattcattccaggaagcttcagtgggtctccatacgccaacaaatgctcttaaaagtgtacgctat

SEQ ID NO: 146213 - DNA, 1061 bp, Zea Mays
ccatttcttggtcgacttcttctaggtctagctaggtctagagagacgtctgcgtgtgtgtgtgggatccatgagcgcgagcaattccgggtccggggacagcatggagtggggacggggaaggtccaccaccaggacgaagggcaagagaggcggcggcggctccgacaagccgaggcagccgcagcgagggctcggcgttgcgcagctggagaagatcaggatccagagcgagatggcggagtacttgcaccaccctcttgcccagcagccgcctcatccgatccacagaactggtagcttcaactcggaagagttgcggctgtctcactcggtgccttcttcgtctccgtcctccaccttccatgccaacaacatgggtgtttcgtcgtcgtcctacccaatccatcgtccgactcatcatcgtcttgcgatggcatatggagagagatctgctggaggagacgacatgagatatggtgaatttcaaacaaatcccatcgtcagcaggtcaccaaataattactatggcgctacctttggttcggaagcacattatccacatccaagcaatgccacattgcctctcttcaaacctcgggaatcaatttgcttgaacaggccgtattattacgatctaaatcaaaccgcagactcgtcgtcgagcttagacgacgatcaggaggtagaccttgagctcaagctatgatgatacatgcatgctgctggccctctcttctaccataccctcccagttaagctacacatatatatatactacctgattgtttctgccacaagagaactaaacgggcttgcagtagtcttgtgtgaactgcatgagatgcatgcatatatatacaagaaaaagatatatatatgcacacacatgtgcaaattctttgattgatcacgtacggtgtgtgacgttgtgtaaccgacttgcggaaacgatcaagcacgtacaagctgggtttatttggttgatatatgctggctacctaattattatctgtacaatatatataatatactcacatactgtgtataagtttgatata

SEQ ID NO: 146214 - DNA, 835 bp, Zea Mays
cgagcgtgactgacgagctaaggctgatggcgaagcttgacgacgagatcgaataggggatggtgagcgtgaggatttcacagcgaggatgagcgacatcgtggattcttggtccgatatttaatcgaacacaatggaagcgaggcacagcagaaatgacagtattaaccatgagcacgataagggacgtgctgctgcacggcgcgaaggcgaacgatgacaatttatgacggcaggaacggaagacttggtcgaggcggggtccgagcgtccagagtttttgtcgaggccgaacttggcaagctacacgcaggcacgcgtcgaccacggcaagggagcagagaaaattgtgcggatggctgaaatagagacggcgagcacgcgcgcacaaaaagcaaagcgcgcagaggagcgtcgactgcggcggcttgggagctctacgacgaggagacgcaggggcaagctatggaaagggacgccgcgacaaaatccccggagcgatgcagggaactcgacaacggcgacatggacgagatccgcgcacggcgagatgggcacgaccaagcgcgacgcaggaagcagtcgggcgcggcagcaggagcttacaccaggacggcaagcgacgctgggggaagggagctctgcgagcggaattcgagcagggagtttcggtcggcagaggaagcagggaggagatgagagaggctctctcggccagacgccatagctaggagttggggcgagcagcaaacagagaaaggcgtacgcaggagagatggagggagctggacactggccagcagggagcgagggcgagcgccaggaagggaatggg

SEQ ID NO: 146215 - DNA, 1694 bp, Zea Mays
atggatgtgaggtggatgagtggtggtcggagcgatcgggatcgtgcggccgtacacccgcgcaggcacggatcgctatcagcgggggcgtccgggacgaggcgccggacagaggagcacccacccacccacccactccgactcgactcgactccctctgctctctggcgtccccatctggctttaaaggccaccgccgccgtacacgtgctgtgctacctacttaaacgagccacagggagggcggcagctgggcttgagtggctgactgcgcatgcggatccgctcggctgcgcgcgcgggcaatcagagccgcggcacagagcattcaattcactcggggtcggtggatcagctcagcgtggcggcgaccttgagatgagtcgcgcggcgcagacaggaggagccggggccgggggcggaggcgcggcgaggctcaaggcgtcgccgcgtgcgctcttctcctgcggcatcttcagcacctgcacgcaccctgcgctgagcccgacggcgacgcccaacaacaatgtggtgtcggggagcggtggcggcggctcgggcacgccctgcgccgaggcgtcgaccgcgttgccggtgacggtggaggctgcggcggcggcgtcgtccacgccaccgcctccgcagcggcagccgcaccaccagcgggcgcagcggaacgtcgggccgtcgtcgtcctcctcctcgtcgtcctcgtccgcgtcgcagagcttcacgcagtggaggctgccggtgcaccacccgcagcagtcgcaggcgccggcgtcggcgtcctcgagcgggggggacgcgctgctgggcgcggaggagaagttcgcggcgggggaggtggtggcggcgctgcgggcggtggagcgggagatggaggccgcggcgaggccggtgccggcgggggtggtggccggggtggtcgcggcggtgcgggagccgttgacggcgccggcgcggctggccgccaaggcgctgctcgccgtgctgctggaggaggggaaccgggaggcggcggtggaggccggcgcggcgtcggctgccgtggaggcggtggcggcgtccgggccggcgggggccacggccgagcgggcgctggccgcgctcgagctgctgtgcacggcccccggcggcgcccccgcggtgcgcagggaggccctggccgcgccggtgctggcgcgcgcggtggagggcatggccggccgcggccgggagtgcgccatcggcgtcctggccgccatctacggcgctggcggtgaggatgatcggggggcctcgtcctcgccgcctccgccgccggaggtggtgaaggcggttgtggcggcgatgcagggcgagtgcagcgcgcgtgggcggcgcaagggcgcgcagctgctgcgcgcgctgcagcaggccggccgcctcgggctcgcgtgggacggcgtcggcgaccagtgagcctcagcgtggcgtgggaccctggtcgcagtgaccagtgcgatggattaggtagttgctgtgggacctaggctactgaagcgtgggcccgagtgaggacgggcggggagcagtgtattttggctttgcaaacggtggatgggctgatttgattggtatgttgtggtggtcaccttttgtagcctgtgatttgtactatcttcctcgtggaaatttatcgcgcggcgcgtctgccctcttgccctctgacc

SEQ ID NO: 146216 - DNA, 652 bp, Zea Mays
gtcggcgaccacgttctccatgattaactcgacgccgtagcagtagccgtaggtgagcgcgagcacccacgcgcggtagttgccgacccctccgcgtaccaccttccacaagctcttgccggtcttggctccgccgccgacgccggcgccgcgcgggaagtcgtaggggaaggcgaggacagcgaggcccatggtgatgaggagcgcgcaggggaggaggtaggtgacgcgccaggctacggtgatgggcatgccgaggcggaggacgagctcgtacgcgagcggcatgacgagctgcgccgcggcgctgccgacgttggcccagccggccgtgacggcgttggcgagccccacggcggagggcgcgaagatgcccgacatctagtgctggttggcgacgaagttggcgaaggagaggcccgccacgaagcgcagcgcgacgaaccccgcgggcgacgacgcggtgaccacgacggcgagcacggacaggaggctggcgaaccccaacgtgcggcgtgggccgaggctgtccgccggcgggggatgcgaccgatctgctgcgcggtgaaggctggcaagcggcgggggcactggaggccgcgggtggaggcgagcaagcagcgggagcgctggaggccgcgagggcgctgga

SEQ ID NO: 146217 - DNA, 321 bp, Zea Mays
aagatggcgaggatactgtctctgaagagcctcaatgcgtttccacatgcggaggaacacttgtcgaagaagacttactctggtgctgttgtgacaattcttgggctacttataatgattacactgtttgtacatgagctacagttttatctcaccatatacacagtgcatcagatgtctgtagatctaaaacgaggagagactctgccaattcatgtcaacatgtcattttcttcttagccgtgtgaagtattgagtgtggatgcaattgacatgtctgggaaacatgaagttgatttgcatacaaatatttggaaggta

SEQ ID NO: 146218 - DNA, 1151 bp, Zea Mays
atccccatgcccgcagcgcctcgcctcggctgctctacctctatcccgcgacccgcgagattggaatcgcggagccccgccgccctcctccaaaacggcatcgtctctgctcggggtcacctttcctccctctcacttcctcttcttcatttaggtgtgttagttaagcagaggaggtggctttgcttgttgctcgtgtttctgcgtggatgcgtccaggggtttagcaagtcgctggccatgacggtgctcttcgagatcagggacaagaccttcttcgccgtcgcgattctggctatgcgccatcctaggaaactcgtattggcaggctgtttaactgcactaagaaggctgtttaactacactaagagtcatgacagctctatcgacttatctaggttgggttgcaccaaatctgagctgtcatgacaaaaatcatgatgcaatacaagcagaatatgcttcctgaaagacaaagtaatcacaaagttgaggcagataaaatggttgagcaaaccaatcaatctgaagttagctttgtgaaggctgagcatctgaatggaagtaaaattcggcagacaggcattgaggattactcctatgacaaggatgttgtagagatcaaactgccagacacagatctttcttctgattatggtgttcattttgtcaaggatgtctgcattgatgaaggagttcttcctgatcaaaagatttcatcagaaaagcaagtagaccaaaaagtgtctataagctttgattccagggaagagataagtgctgactctacaaaaactgcacatgagttgaaatcgaaaatagttgtcctacctgtcaagtgtgatactcatgacaatattgtggaacagaactcctcatgcaaaaagcgtgatcttgaagataacaatactacagatgtatctaccgagtctaatgatgagggattaaatcccaaacaattaccatttcatgaagttgcacaagattaccaggaggttgatagtgtcatttcggagagcaatgaaaatcaggaccgacttttcactggagatgcaacccatcagggacttgagaaatatgttatgacaaagctgtttaatcgggtattcgcatcagtcccagaagatgtgaagagtgatgaagaacttttt

SEQ ID NO: 146219 - DNA, 914 bp, Zea Mays
cctttgtttcgagcactggatttactcatgctctgtagttatatttgctagattctggctatgcgccatcctaggaaactcgtattggcaggctgtttaactgcactaagaaggctgtttaactacactaagagtcatgacagctctatcgacttatctaggttgggttgcaccaaatctgagctgtcatgacaaaaatcatgatgcaatacaagcagaatatgcttcctgaaagacaaagtaatcacaaagttgaggcagataaaatggttgagcaaaccaatcaatctgaagttagctttgtgaaggctgagcatctgaatggaagtaaaattcggcagacaggcattgaggattactcctatgacaaggatgttgtagagatcaaactgccagacacagatctttcttctgattatggtgttcattttgtcaaggatgtctgcattgatgaaggagttcttcctgatcaaaagatttcatcagaaaagcaagtagaccaaaaagtgtctataagctttgattccagggaagagataagtgctgactctacaaaaactgcacatgagttgaaatcgaaaatagttgtcctacctgtcaagtgtgatactcatgacaatattgtggaacagaactcctcatgcaaaaagcgtgatcttgaagataacaatactacagatgtatctaccgagtctaatgatgagggattaaatcccaaacaattaccatttcatgaagttgcacaagattaccaggaggttgatagtgtcatttcggagagcaatgaaaatcaggaccgacttttcactggagatgcaacccatcagggacttgagaaatatgttatgacaaagctgtttaatcgggtattcgcatcagtcccagaagatgtgaagagtgatgaagaacttttt

SEQ ID NO: 146220 - DNA, 1101 bp, Zea Mays
tgatttttgggtgtcactatgtcatgaaggcaaagtagttatttcttttgtgtgtgtctgtttgcttcctgcaatgcatagagctgtcatgacaaaaatcatgatgcaatacaagcagaatatgcttcctgaaagacaaagtaatcacaaagttgaggcagataaaatggttgagcaaaccaatcaatctgaagttagctttgtgaaggctgagcatctgaatggaagatgtctgcattgatgaaggagttcttcctgatcaaaagatttcatcagaaaagcaagtagaccaaaaagtgtctataagctttgattccagggaagagataagtgctgactctacaaaaactgcacatgagttgaaatcgaaaatagttgtcctacctgtcaagtgtgatactcatgacaatattgtggaacagaactcctcatgcaaaaagcgtgatcttgaagataacaatactacagatgtatctaccgagtctaatgatgagggattaaatcccaaacaattaccatttcatgaagttgcacaagattaccaggaggttgatagtgtcatttcggagagcaatgaaaatcaggaccgacttttcactggagatgcaacccatcagggacttgagaaatatgttatgacaaagctgtttaatcgggtattcgcatcagtcccagaagatgtgaagagtgatgaagaactttttgagaattaacttgtacgagaatgaaacatcatggctggtatgagaattaacttccctcgttttttggcatttttttgcttgatgtattgcatctctggcaagctgcacacatgaataggtttctggcagaaactgaaccaggattgaattgtacttgtgtcttgcgttgggttggtcttttggatctttctatgtattatgtctatactttgtagactactggccagccactacattcgcgtattactcttccattgtgagtttttgctcttcactatccgatgcccaccaatctaagcagccaaggcatgcatacctaaccttctcgaggacaattcaggaggtttgcttttttcctccctgttttatactggcatactactatatacttcattga

SEQ ID NO: 146221 - DNA, 2638 bp, Zea Mays
tgatttttgggtgtcactatgtcatgaaggcaaagtagttatttcttttgtgtgtgtctgtttgcttcctgcaatgcatagagctgtcatgacaaaaatcatgatgcaatacaagcagaatatgcttcctgaaagacaaagtaatcacaaagttgaggcagataaaatggttgagcaaaccaatcaatctgaagttagctttgtgaaggctgagcatctgaatggaagatgtctgcattgatgaaggagttcttcctgatcaaaagatttcatcagaaaagcaagtagaccaaaaagtgtctataagctttgattccagggaagagataagtgctgactctacaaaaactgcacatgagttgaaatcgaaaatagttgtcctacctgtcaagtgtgatactcatgacaatattgtggaacagaactcctcatgcaaaaagcgtgatcttgaagataacaatactacagatgtatctaccgagtctaatgatgagggattaaatcccaaacaattaccatttcatgaagttgcacaagattaccaggaggttgatagtgtcatttcggagagcaatgaaaatcaggaccgacttttcactggagatgcaacccatcagggacttgagaaatatgttatgacaaagctgtttaatcgggtattcgcatcagtcccagaagatgtgaagagtgatgaagaactttttgagaattaacttgtacgagaatgaaacatcatggctggtatgagaattaacttccctcgttttttggcatttttttgcttgatgtattgcatctctggcaagctgcacacatgaataggtttctggcagaaactgaaccaggattgaattgtacttgtgtcttgcgttgggttggtcttttggatctttctatgtattatgtctatactttgtagactactggccagccactacattcgcgtattactcttccattgtgagtttttgctcttcactatccgatgcccaccaatctaagcagccaaggcatgcatacctaaccttctcgaggacaattcaggaggtatggtgcataaaaaagtaggaaccacaatgagattgtgatgctgctcagggcacatgccttttgtgtgatgtctgaatgttcatagcccttgtgctcctcatccacccattttaagaatatgctcacgtctcatgattgtgtctttcttcagaatctcagctgttcctcatgtggagaacctccagaggctcacatgtattcctacactcaccgcaacgagaatctgattgttcttgtgaggcacttgctgcctaaatattgtttacctggtgaatcagaaggaaagatttggatgtggacttgatgcttaaggtgtgaacgtgaaagtggggtccccagatcatcacgaagggtgataatgtcagctgaagcacactacctttcatttgggaagttccttgaacttagtttttcaagccactcaaccgctagaaggctgccaatatgcgggcattcactcaatacggattgtctgcgctttttttgggttgggctccaaagttgcaatgttcccgtattcctcagtcgaaatttacaatgcctgcaaaccacagcctactcttgagattcacaaccccgatatgcacaaagatgccccaaggttgctgccctcgtgtttcgtgctctgattgttgagtcttcaatgagagctgattccagttatatagagctacaatgcttccgagagaagggaaaccggcaaaggggaaaagagacgaatagaagggcattggtgccctctcacacacaggccaagtatacatccacatgccacaaggctgaagcttccacatgaacaagagaatggatcgtgatagctattgcaagatgatgcacaagtacataggatcagatgttacataacttgtgacacttccagtcataatttttgagccaatgacaatgcttcagaaaatggctgagctttgttaggtgttccattttagttatctgtctacttcctttaaactggttctggttatatgcgcgcgtatctattattatgtataagcattgttgctactggtccttatcgagaatcgcataaggagacaacttcatgggtatgttcagatagtttatcttttgttgcttattgtccgtgtaaatacacaaggcgcctttgatagcacttggtttccctgttgggatttttagcttgtcttagtatccaacttacaccaccatctgatatctgatcctgacaacaggctaggaggcttaactgacggtttcgaccttgggatgaacatgctgttgggaggagacaaggaagatgatggcggttcaagcaagtcgcatggcaagagcggaaaccgaaagaagcacctgaagaacaacaagaggaagaggcattagccctggactcacactcctgtatcacttcaacatacttgagtgtgtgacatgtcagttattttacagatatgttagttttaccatagtattgttcgatgtgatcctagcatgcccgtgaatgctttggttccctatagagctgttgatgtcttacacaaatgtattacaaaacttttttcataacaatataacacacatttgtacataaattaccgtggtattatacgtt

SEQ ID NO: 146222 - DNA, 2207 bp, Zea Mays
gttagttaggcccgcctcagaaatgtctggtttccttggtgatcttctaagttcttagagtctgtacctttaggctttagctttggatcttgctctccttcaatttggatcgctgctccgggagaatgtttcagtttagcctgctctatgggttagcgtgagcatgtattgattgatcttgagctgagctgacgcacgcctcgcatcacgttgttttgcaggtacaattcgattgatgacctcatcagggaagaatgttttgcagtcttacatgagttaaagggatagaaagtgcaacaaccgtggaataaaggactcgtgcttttgagtaattcaggaggagtacatgcatcacgaagccttgattctggaatggtgtccagtcgaaggaacagtgggattatcctacgggaagggtcggttagggactggtccgagttcaacaatccctcgccgtccccaaaactgctgtactcacagtcctatgtcgcaatgagggggttgctggcctcagtgatctccttggactttttcctgctgtcgagcaagctaaaatctgtgtgcgcggctatgacttcccagaggcatggccgatcacaggagaggtcaaaatcaaaggggttgacctgcaggagagttgcagtccatctgctgttctttttcatggttggcattttcattgggttcatgcctttgttctctgtcgatgtttacaagaaaatagtatccgaaaacgagaggcttccgttccatgatggtgtgattgaggcggaaatgatgggcaccaaagttaaggagttggagacagttgtagtagagaaagaggtcgaactgattgacgagcctcaggttcaagagagccctccagttcctgcaatgttggatgatgaggcagattttgctgaatcttcacctgcattacctgctattgaagaatctgacattcctgtgaagaagctgctgataatcgtgacgatcacttctgttcggccacaacaggcatattacttgaatcggctagcccatgttttgaaagctgtacaggcacctcttttatggttggtggtggaatggcctgaacagtcctatgaaacagcagaaattctgaggtcttctggggttatgtacaggcatcttatatgtagaaagaataccacgagtgtacgaaagattgctgtatgtcaaaggaataatgcaatctatcatgtcaaaaggcatcaccttgatggtataatgcattttgctgatgaagagcggtcatactcagctgatgtatttgaagaaatgcagaagatcaggcgctttggctcatggcctgtagcaatccatgttggaacgaagtatagggcagttttggaaggccctatttgcaaaggaaaccgagtcatgggatggcacacagtccagacggttcagaagaagagttcgactcgtcgattcccaattggcttctctgcatttgctttcaacagcacaatgttgtgggaccctcaaagatggaaccgcccacctatggattctgttatggtccactcaggtggaagaggtggtttgcaggaatcacgatttatagaaaagctcgttaagaacgagcgccaggtagagggtcttccggacaattgcagtcgggttatggtctggaatttcaacctggaacctcctcgagtcaactaccccacaggctgggcactatataagaacctagaaccggacatgcctgtgacatagtttcctgccgctgccactgtgcctgcttctagaggtgatttctcccagcaaggcagagaagtttggagcacacgtctccagcgtattggtagttctaaatttcaactccctgctgttaccaggtggtccagaactccacataggctgctcgtccatgccatcctgagcgagttgcgccaaagattacatggatactgcacgctgagatcttactcccttcccccgcgcgccttttagttttgtgtattcctgttatgccctttattttgtgtttctccttatattcaccagcagctagatacgccgtgtagactttcttttcatgtaggctcttctgttcttttcatactgtgtgtgttaccttactacagatgtataaaggctctcatacattgcagctgtttttaagaggaaaggcaaaaataccttcttgatagttgatacgtgaagagattcaagcaaaaccgatcagcttttca

SEQ ID NO: 146223 - DNA, 903 bp, Zea Mays
accaaacgatacccaagttcctttcaagctcaagttcgcaacccacaaaagaggaaaagaggatgagaaagagcgcggcctaaacagtaaacaatatagtacaaaacagtgttttgcactcctatatacacactattattactggagatgatcttaaatgatatatgaccgtatataactctctccgttacaaattataagttgctacagcttttctagatgcatagattttacaacatatttagatacaatatatagttaattacgcaacaaaatcaaaataatctacaatgttagaacggatggagtaaattttttgacgtgtgggaactgggaggctgcaagttcgcttgctgagaacttccggccgacactcgccaccgtgggaagcataccaaaacgctcaatgcatgcaacaacgaaacgaagggatcccagacctaatgcaagggcacgattcctctccttatcacgacagccgtctccccgcggccgcctttggtggctcgcgagcacgcgatggcgcaccacctcggcctcctcatcgtcgcgctcctctacgcctgcgccttctccggcgggctcctcgtcgccgcctcgctggcgctgctggcctccctcgcgggcgcgctgctcgtgacgctcgcgctcgccgcgtccgacgcgcgcaggctggcgggcctggccgcgcgcgtcgccggtttggccgcggccgacctgaggctggcgcgcgcggtcgcggcgtacgccgtggtcaaggccgcggtacgcgtggcgctcgtggtccggcccaggattggcgcgctcgcgtcgcgcctccggagccacgggtcggaccgccggcagttctacagcgtggcttcgctttgttcttctgcagagctgcgcactgaactgctgtag

SEQ ID NO: 146224 - DNA, 696 bp, Zea Mays
ccaccatcccacacaaatcccaaatcccccaccgaattaagtttgtaacctccagcatccaccagccagtgcgcgcgccaaatctagtttagttagccgccatggcctctctcctcgccgccgccgtctccgtgcagcccgccgccgtaaagggcctcgccagcactccatctccggcaggaagctcaccgtcgccaggccgtcggcccgcgccgccgccgtggtggccaagtacggcgacaagagcgtctacttcgacctcaacgacatcggcaacaccaccgggtagtaggacctctacagcttcgacgcgccctcgccctacaacaacccgctcgagagcaagttcttcgagattttcgcggcttcgttcaccaagagaggcctgctgctcaagttcttactgcttggcggcggctccctattggcctacgtggctacgtcagtgcgtcggcgtcgccggacctcctgctgatcaagaagggaccccaggagccgacgcagccaggccctcgcggtaagatctaagttcctcacctcctccatttgcacggtctagctagtagcttgcttgtactgctagctcctgacggtcgcccgagaccgacatggatggatcgtccttgcctgttatgctgatgttgtctactcgtccttggcatacaactaaaatggatggtgttgcgcacgtgcctc

SEQ ID NO: 146225 - DNA, 1386 bp, Zea Mays
acacgcatgtctctagaagaaaaaaaaatctccatccgcgctctacatcgccagtcgtactccccgcgtcggattccctgtgtgctcccctgcgtgctccatcgcgccgccacccagagtccttccccaacgccgccctctccctctcggcgccctgctggccggcgctccctccagcccctccccatggccgagcgcatctccatggtggtcaggagcttgtcccatggctgagctccctctccatggtcgcgctcctcccctgctccatccatggctgccgtcgagtctccctggacgggctcaagtgccatacgccgtcggctctagtctccagctcgcctaggtcggtgttcctctccctctcctaatctccatggccgctggcgctcttgctcgggtccatggtcgcgactcgagtcacccctttgtgctggccgaccatccagccatggtggcgcgcacccttgcttcctactccactcggcgccccctgctcttcccctggtcgcccatggcgcccggccgccccttctctctctgctccagcgtgtgacggcgtcgagctcccttcgtcacgcccttccttgctcctcccaggcccaaccatggagctcacccacgacgcccgtcgtcctacctactcgagctcgccctctcctcatcttccagccgcctctgctcacctccctcatctccctcgggtccagcgcgctctctccctggctcgggtgccggtcgccgtcatggagttttgtttggtcggctcatcgttgacctcgccagtgccgtcgaaccccatcctcccctgctcgacctcgtcgtcgttcctcagcttcacgccgacctctagcccgccatagagcttccctgcgacgcgcctccatgtccaaggccagcttggcctcctccctagcgctcttggacccgacgtccccagtctatcacgccatactcagatctcgccgactgacttccaccatccaccatgctgtgtgctggcattccctcgcggcagaccacaccgtcgtctaaccttgttcacttcgctgcagcaccatcgtcatctgccagctccatcatcggtcgttcctagtattttccccaacaccgagcctctctgacctcgctgctcgtcggtgcaatttatctgtgttcatgaagaaagtgaagcccgtgtacatagctcgcaaggtgttctgttgaaagcttcacctgatgcttgtcgtcattcttgcggattcaagtatgattagtatggtaagccgattcactactcctgctatcgattcgatgtccggattggttataatatttgttgatgattatcttgtttgcaacgtatgcattgtgacggcattagacatttgttaaaatgcttcatat

SEQ ID NO: 146226 - DNA, 1202 bp, Zea Mays
acacgcatgtctctagaagaaaaaaaaatctccatccgcgctctacatcgccagtcgtactccccgcgtcggattccctgtgtgctcccctgcgtgctccatcgcgccgccacccagagtccttccccaacgccgccctctccctctcggcgccctgctggccggcgctccctccagcccctccccatggccgagcgcatctccatggtggtcaggagcttgtcccatggctgagctccctctccatggtcgcgctcctcccctgctccatccatggctgccgtcgagtctccctggacgggctcaagtgccatacgccgtcggctctagtctccagctcgcctagcaccatcgtcatctgccagctccatcatcggtcgttcctagtattttccccaacaccgagcctctctgacctcgctgctcgtcggtgcaatttatctgtgttcatgaagaaagtgaagcccgtgtacatagctcgcaaggtgttctgttgaaagcttcacctgatgcttgtcgtcattcttgcggattcaagtatgattagtatggtaagccgattcactactcctgctatcgattcgatgtccggattggttataatatttgttgatgattatcttgtttgcaacgtatgcattgtgacggcattagacatttgttaaaatgcttcatatatatggtgtgtggtttagttaaaattgcaagtataaatttggtagtggtgagtgttggggccttcgtctttcgaaggtcctcaaaaacatgatttaacaatgtttctagagtataatacatgaacaggtacctttggactcggatcagaaccacagtgtgaagaaccacaaagaatacgaaggttggcgcagagccgaagctatgcacaggggagcttcggtatgatagcaaaaaagggaaccgacttaaaagggaaaaggctatttagacctcgatggatcactatagagtcattagcaaatgtaaagggcatgagtgtaattttacatgggttgcgtcccgtgcctataaatagatgaacagtgctcccgtactgttcacgctaacttgacatttgcttttgcatcacgttcgtacctttgctgtctatcaagtcgaaggtgccaagtgtaattcaatattgtttttattttctcatgataatataatgaagacgagttgataatgctatatgactgtttata

SEQ ID NO: 146227 - DNA, 495 bp, Zea Mays
aaaaatctccatccgcgctctacatcgccagtcgtactccccgcgtcggattccctgtgtgctcccctgcgtgctccatcgcgccgccacccagagtccttccccaacgccgccctctccctctcggcgccctgctggccggcgctccctccagcccctccccatggccgagcgcatctccatggtggtcaggagcttgtcccatggctgagctccctctccatggtcgcgctcctcccctgctccatccatggctgccgtcgagtctccctggacgggctcaagtgccatacgccgtcggctctagtctccagctcgcctagcaccatcgtcatctgccagctccatcatcggtcgttcctagtattttccccaacaccgagcctctctgacctcgctgctcgtcggtgcaatttatctgtgttcatgaagaaagtgaagcccgtgtacatagctcgcaaggtgttctgttgaaagcttcacctgatgcttgtc

SEQ ID NO: 146228 - DNA, 693 bp, Zea Mays
tcactctcactctccctttctctcgtggagacgactgggcgaccgccggcgccgacctacaccaggtgcccaggccttcgtcgggaccatcgccggcgacgaacacccaccagctggatctgatccaattacagtcagaaatgtcttcagttgggagaagcaatggcaccagggcggcgaatggtgcagctgccatcagtacttccacgacggaagcaggctcagccgacgccagatttcactcccaactactacatcaggacagggtacatacactacacggctcgttgttccctgggcggatgcaatcggacttgtgctttagctgcagcttttgccttacacgctttagatacgtgcacgacaggatcggtaccggaatttttagtaggccttgacgacctagattggcaatttggcccagcctttgtttactcagtacgaattgtactgccctgcagtcgttactcgttacaccttgaaactgggcatctttaccagcaataatttggcttctgaagtactatatatatatgctccgttgcttctatcagataacttgttcagttggattttgcttttgctagttgtaatgcacacgttttgcactcctcacatttttttccagtgccagagcacggttttgcttttgcaataccattcctccagagcatatatgtactaataggttct

SEQ ID NO: 146229 - DNA, 1591 bp, Zea Mays
gaatcctgcggatagcctgacggctcgtttgaccttcgtctgtcgtctcgtctcgtccacctccccagcggcgcgtgaagcttgaggcaatccccgccctctctagccctgcgcaaccagttcggttccatggccaacagcaatctcccgcgccgaatcatcaaggagacgcagcggcttctcagcgaaccagcaccggggattagcgcgtcgccgtcggaggagaatatgcggtacttcaatgtcatgatccttggccccgcgcagtcaccctatgaaggtgttcccctcatttatggttggctttacttggcgtatttttgtatggatagtctgtgagcttctaatgctgtaatgtttacactgttgcatgtgcattcgatattgtgagccccgtttgtagtgttgatgtgttttgtagacaatcatcattgctgttacttgttagtgtgttctcttatccttatgcagccatacgcctcgttgtttcatggagaattcatgaatgaacagtgaattagcatagatggattaccaacatggtctagtagcagagtacaagtggttcatcgcgtcatcggtatggatataaggcactaaacaggaaccttcatatattcatatccattcatctgtgccaagtgccagttcaagactctagagtctacacctcttagtggacctggttttatcagtctgctttcgggtatctaaagaagtatgtccaaccagaagtacctactcacttatacatatgattaggggcaaaagttttgactcttgttaggttcatactggtggcatattgactaatctgcccatgacagaatcccattaaatctagctatcattcaatttattgatattcttataatgcaaaagattcttcaccgtcttctctgttcaatacaaaataggtgaaataagaggtgtgtagatagttattagggatgcaaatagcgacaagttcccatataatgatttcgtgttaccttcttgtgcttattcatttgttcctggacgcctgatatagtttagtctgtttatatgttgaacaggtggagttttcaagcttgaactattcttgcctgaggaatatccaatggctgccccaaaagttagatttctcacaaaaatttaccatcctaatattgacaagcttggtaggatatgcctcgacattcttaaggacaaatggagtccagctcttcagatacgtacagttctactgagcattcaggcacttctgagcgccccaaacccagatgatcctctctcagacaacattgcgaaacactggaaatccaacgaagctgaagctgttgagacagcgaaggagtggactcgcctgtacacaagtggggcatgacagccaagtgttgttccagatgtaacaacacttccatagtttggggtcgattgaacacccctcttgcttggtgtgcgcaaatttgtgaaatgttgcaatggggtaaaaaacaaaaagctccaatcatgctttgtacttgtggctgtagctccgttcgctgcagtgcccatgaacatcaaagcaggtgttgctttgtccgttcctatccgaccatcagttgct

SEQ ID NO: 146230 - DNA, 865 bp, Zea Mays
gaatcctgcggatagcctgacggctcgtttgaccttcgtctgtcgtctcgtctcgtccacctccccagcggcgcgtgaagcttgaggcaatccccgccctctctagccctgcgcaaccagttcggttccatggccaacagcaatctcccgcgccgaatcatcaaggagacgcagcggcttctcagcgaaccagcaccggggattagcgcgtcgccgtcggaggagaatatgcggtacttcaatgtcatgatccttggccccgcgcagtcaccctatgaaggtggagttttcaagcttgaactattcttgcctgaggaatatccaatggctgccccaaaagttagatttctcacaaaaatttaccatcctaatattgacaagcttggtaggatatgcctcgacattcttaaggacaaatggagtccagctcttcagatacgtacagttctactgagcattcaggcacttctgagcgccccaaacccagatgatcctctctcagacaacattgcgaaacactggaaatccaacgaagctgaagctgttgagacagcgaaggagtggactcgcctgtacacaagtggggcatgacagccaagtgttgttccagatgtaacaacacttccatagtttggggtcgattgaacacccctcttgcttggtgtgcgcaaatttgtgaaatgttgcaatggggtaaaaaacaaaaagctccaatcatgctttgtacttgtggctgtagctccgttcgctgcagtgcccatgaacatcaaagcaggtgttgctttgtccgttcctatccgaccatcagttgcttatcccccctgttccatgtgttgtggctatgaggattcagattcatgctgcc

SEQ ID NO: 146231 - DNA, 258 bp, Zea Mays
atgaggaggccccgccgcgttcacctgctggcctgccttgtcgtgctcgccgtgatcctaacctcggggcctttcgtggaaacgtcaatggcgcgcatgatgatccgcggcgtagacccgccgcgcgagctgctaccggcgctggccgtggtcgtagctgctgaggctgatgacgggcgccggagcgcggtgaaggcgacggcggagggccgaggcaagagagaagttccaggcggggctgatccgcagcaccactga

SEQ ID NO: 146232 - DNA, 2088 bp, Zea Mays
gggggtggtggctctttgcaccgcttttttcgaacgctactttagcttttactcttcttttctcttggcttccgctcctcgcccacgcctcctcctccagtcctccctttcgtcgtcgcttccctccccttcccgttcgaatcctctgaccaccgcagagcctcccccctgaggaaaccctagcgcagccgccgaccgccgccgacccgtagcatggcgtccccggcccggcccgtcgccgcgtccgtctccggcgccttcggcctctcgcccgaccccaagcgctgctccttcgaccaggcgctccggcacaaggatttccaggagaacaggctgttgatgtcatttgttaatttccatgagcaagagaagatctctaaagaaatcgtaacacacgctatagaaagctgcatgaagaaacaagcagataacctgttgaattcactggacgttatcagcggtaggttgtcacagttggagttatactgctatagactggaaaggtccattggagaattacgaagtgacgtgatggattatcataacgaagcaaatctgaacttccggtgcgttgaaaagcaagtgaaagaggttcagaaatctgtgcaggctgttcaggaaaagcaggagcttgctgaaactcagaaagaaatgaccaaacttcagatagtacatgaggattctgcacaaaagagtgaaggtactgctccatcagttttcatgaatagggaaaatgaggttgcccttgtgccattgcaccaagtaaatgctgttcagtcacctcctgtgcaattccaaagttgcagtggccttattctacagcaactgatgccagtccaagaccagcagcgctcgaaccaaaccgctgtgtactgtatgcgaggccaaagccatctggagcacagacaggcccaaatgttcgaagctgctggtcaatctctgcagacacacactcggaaaactcagccaccgacagtagttgaggtatctcaggtaaccagtcaggcaccagagttctaccctcatccgcagcaccaatggcaacatcagaccggccagcaggttttctcacaggcaaggcaaccacaaccacatgtactacagcagcagtacagcaacatccagcaaggtccagcacagatggttcagctgcaaacgtcctctccacatgctcatagtacaccacaggtcacagtagtatatcctccatacgggcctcatcagtctgcctgtggtaatgctgaggcacgcagtgggggcatagttgtgccaccttcatactctacaatttcttcatcccaccggaagcatcatgaagctgctcctgtttatgtacaaagcaacacagtttctgttccactggcggagcagcatcagcagcttcattcactcggcaatggctcatttgtacctcagccaagcaaagttagtccatgcggtctagcgtcatatacggtacaagggaatgcacagacctatagccctgcttatggaagcccttccagcaatcctgctactattgttgctgtccttaatcaacaagcacatggcagttctcccatggtgcttcatcacttgggaccccagtcagtgctgaaccatccgatagacattgctgaaaaggttactcggatgggttactcgaaggatcaggttgagggtcttgcactccgtatggtggctgcaggccagcctgcagaccataaccccctgcatgataggttgagctctgttagccatggtgtagctcctcatgcatggtctggataggtaagaacgacaaatgcagccgtcacgcttacttattactcatgaggtgtttgtgtgatatatctcggtatgtgctttattatcgtcggaaatcttcaggtatttcctctggcgtctttttttatcagccaggattgcatatccaccagcttatttttaccagttggaggatcgagatgaaataagtctgtttagattagttaaagtgatcctggcatatgtcctgccttttaatggacacatgcttgtaattttctcgtggacttgcacacgcatgattggaatataaaacgatacgataatttgttggttgctact

SEQ ID NO: 146233 - DNA, 1368 bp, Zea Mays
gaagagagagcaggcacttacccactggcgtcagcaatttccctggaaatcttcatcttcttggtggtgcccttgtacagctcctccaggctgcacggcagcttccgctcgatggccggcgccttcacggcacgtccgccggtgtgcatgccgtgcccgtccgggccgccgccgccgaacgcagagccgaacatatcgtccccgaaaatggacgaggagaacctcgacccgccggcccgcatgccgggcatcccactcccgcccatgccgccgaaggggctggagccgccgaagaactcggcgaagatgtcatccgcgttgcgcgggttaaaccggaacaccgtcggcccgtcgccgccggtggagaagaaggttgagcccgccccgccggcgcccggcggcggcacctgccccttgagcccctcctcgccgtactggtcgtacaccgcgcgcttctgcgggtcgctgaggacctgcacggcgacaacatagagcaagagcgggtcacgacattcgctcgattgggcagtgagtccggcatggatttctccggacgcacgcacacttacatcgtatgcctccgagatctgcttgaacttgttctcggcctccttcttgttattggggttcttgtcggggtgccacttcatggcgagcttgcggtaggccttcttgaggtcgtcgtcggtggcgcccttgtcgacgcccaggatcttgtagtagtcaagccccatggctgctgctttgcttgcttccttccttccttccttcgcgcttcgccgctttggttggcgtgcccgcgctcgtttgggcgttttcactgtccttgcgagttgcgactcggtgaggtttgtttggtacgggggaggagacgggaggagacaaaaggggaagtgagaagcgtctggatagaggaggcctggaggcgacgagcccggtctggcgacgagtgcggaagcttctggaaggggcaggagctcccacgactcttcaagtgacgtgagacggatgtgcacactgcacagacagcttcggcgccgtttggatccaatgggatactgaaaatccagttcaaaatatctcatacagattcaatagattttaactgctacagtagtactactagtgtatggcgcccgcccatgcctgggtatcgatccgtttagcagcatagtataatgtataatgattgtatatatgtttgagagtaaataaacatataagagcaaagcaaaggaaaccaggttccagtgtttgaagtagttgtaagataaaagggtgtattataagttgtaacaatattatattgtttcaagcaagttgtacatatacatacacatttcataatataagagatagttcagtaaa

SEQ ID NO: 146234 - DNA, 125 bp, Zea Mays
atttaatttactgcccttaaaaatagggtttttaattaattacagtgaactatgtgactcccttggaacggtatttgtattgaccaaggatgatgataatgatgatggcagaaatgcaaaatcac

SEQ ID NO: 146235 - DNA, 899 bp, Zea Mays
gcaaaggctaattaactggccgcgccatcggttacatgcgcgcgccattatcgccggtcgatcaccgaggaggcgaagacgatctggtgcggacgggtcgatggcggcggcgacaacgacacagcggcatgacgacgacaacaacgacgtggagtctcagcgggagcacgatgacgacggtagtagcagccgccgtgagcagcaagagcagcggcggcctctgctggtgaagcggcgctccctggcggacgacggcggcgggatgagcccggtgcagcgggccatcagccagacgtaccagagcacggcgcacctggcgaagctgctgccgacgggcaccgtgctggcgttccagctgctgtccccggtggtgacggcgcagggccactgcgtgcgcgctaaccgcgccatggccggcgctctcctggcgctctgcgcgctgtcctgcttcgcgctcagcttcaccgacagcttccgggacgccgccacgggggccgtccgctacggcttcgccaccccgtgggggatctgggccatcgacggcggcgcgccgccggacgacccgcgcgccgcggccgcgtaccgggtccggttcctcgacctggtgcacgccgtggtgtccgtcttgatcttcgccgccgtcgcgctgctcgaccagaacctcgtggcgtgcttctaccccgtgccgtcggaggacgcgaagcaggtgctcaccgtgctgcccgtcgccatcggcgtcgtcgggagcatgctgttcgtcaccttcccgaccacccgccacggcatcgggtttccgctatcacagcgctaattcagtaacttactgccaggaggatggattcatggctaacgctacctgattgtaacttatattatcaacagatggttgttttcgtata

SEQ ID NO: 146236 - DNA, 973 bp, Zea Mays
gcctccatggctgagctcctctggtgcaggcacccagcctctccaactcggcacccctcaagcacacgggaccgcggtgcctctgctctcccatccaggcgccctttcccctaagcggatccatggtgctaggaggatctcctcctcggcaggcgctccaacctggcgtccatggtgccaatgtcctgcacagcatccccctcccccaggctcctagcgcgcagagcatttctctaggtccgggctcgagcagccgctcccctcaacaactccctcaacgccggcctcctctgccccaagtccggcagccctccccaaccaagcttctcccatggcgctgctacctccaggatggggctcgacaccccaaagaaattccccctgggcactggaggagccaagctcgcgctggagcacggcaaggcttgaccgacgccctttccatggctggctttaagcagtgggtcgagcccctcttcttgccatggcacttgacccctgctcttctctgccccacgacacccagcctttctacaggagcaagcgccctctgcatctccctagcgcaggaaatccccaagtgcaggcgcccaggactcccatggccgctagcctctccatgcaaccgagctcccttacttcccagccatggactagcctccggtgtgcatcgagctcccccacggtcgagctcccctctgttgctgtggccagtgactccttcaggcgggtcttcatcctgtcacgttggacgccgctccttttccccggccaccgtcgaaccagcgtggacccgatctgcgctatgcagcagcgccggtccacagcagcagcctcgacatcccctctgcatcgtgccctcggcgtgctcgatgtaatgccgcagcgacgcccttcgctgtgtcacgctcgccaagtcgggcctcacgccgtcacactgcgcagcgtttctgcgtcgtcgttaaaacccatg

SEQ ID NO: 146237 - DNA, 986 bp, Zea Mays
gcctccatggccgagctcctctggtgcgggcgcccagcctccccaactcggcacccctcaagcacacgggaccacggcgcctctgctctcccatccaggcgccccttcccctaagcggatccatggtgctaggaggatctcctcctcggcaggtgctccaacctggtgtccatggcgccagtgccctgcacagcgtccccctcccccaggctcctagcacgtagagcatttctctgggtccaggctcgagcagccgctcccctcaacaactccctcaacgccggcctcctctgccccaggtccggtagccctccccaaccaaggttctcccatggtgctgctacctccaagatggggctcgacaccccaaagaaattccccctgggcgctggaggcgccaagctcgcgctggagcacggcaaggcttgaccgacgccctttccatggctggctttgaggagtgggtcgagcccctcttcttgccatggcacttgacccctgttcttctctgccccacgacgcccagcctttctacaggagcaggcgccctctgcatctccctggcgcaggaaatccccaagtgcaggcgcccaggactcccatggccgctagcctctccatgcaaccgagctcccttacttcccagccatggacgagcctccggtgtgcatcgagctcccccacggtcgagctcccctctgttgctgtggccagcgactcctttaggtgggtcttcatcctgtcacgttggacaccgctccttttcctcagccaccgtcgaaccagcatggacccgatctgcgctgtgcagcagcgccggtccacagcagtagcctcgacatcccctctacgtcacgccctcggcgtgctcgatgtaatgccacagcaagcagcagcagtgacgcccttcgctgtgtcaagctcgccaagtcgggcctcacgccgtcgctctgcgcagcgtttctgcgttgtcgtcaaaacccatg

SEQ ID NO: 146238 - DNA, 453 bp, Zea Mays
atggcgaagaagtcggtgtggttgaagttggagccctgcgggctgtgctgccgcgacgagctcatcgagtatatctccgcgcccgtcaggttggacggcagcggcgtcgccatcagcagcaaccgatgcgacgccgacaacaagcgcaccgtgacgtggagcctgccgtcctccgccacctcggcctccatctcggcgcgcccgccctacagcggcaactcgttcgggtccacgtgcagcgacgcgatggccgccatggtgtctaggaactggtccgcgatgagcgtccgtgcggcgcggaacttgaagaggaacaacagcagtgtgtaccagatgatgcactggagggcaggcgcgagcacgcggccagccccgcgaggacgactagcttctacagcgtgtccgctgccaggaaccgaaggttcatggcgtacgggtcattggtggagatga

SEQ ID NO: 146239 - DNA, 6126 bp, Zea Mays
caggcggaggaggagttgcatccgtggcctcccgtgttgctcctcctcgcgcccgcgtccctattacttctccgcgtccgtgctggggcgcggcgcgcccaccgatcctgttctacctcgcgtctgcgctgcgacgttacctgctgctgtcgcccgtcggtggtggaattcgtcgcgcggatcgagccgcgggctcgattcgggcttggcgcctctgtatatatgtcggaattcgccgtagcgtgtgattaggttttgttgttcttctgtgtcggcctggtcttcgcgtgttgtgttttgttgtctggcggaggcgaatctagggtaacggtcagtcgggaatggagtcctccgacgacgggggctccgggccggcggcagggagtcccggccctccgtcggcccccgcagccgttggcggtgcgagtagcgctcctggcgcgtctggatccggcgggaagccgccggtgaagcgcgtcatgaagacgccctaccagctggaggtcctcgagaggacgtacgcagaggactcgtatcccaacgagacgaagcgggcggagctgtcggtgcagttgaacctcacagacaggcagcttcagatgtggttctgccaccgccggctcaaggaccggaaaccgccggccaagaggcagctaagggacgaggaggttagcgtcccagtcatagggccgccgccacctgtgcttccgcctccattgcctcccagcgagatgatggtggggactgtcggaacctatggtgagcagctgctgccctattccaggagagggtctggccggttatcggctgcacctaggttatctgtgccggagattgggaggaggtactatgaaccgccacaagtcatgctgcctcatatggcaccagtgcaccttatgcaagcagagcaccgggtgatcgattctgtggaagcacttataggggaacctttgagggacgatggaccagtgcttggtattgaatttgatccacttcctcctggtgcatttggagcacctatcgtccctgagcaaccgaggcagccctttcgatcatatgagaccaagatgttttctggtcccaaaaccatgaaggcttcggcaatcttgcctaccacagaccctttacttcaaaatacagggaaacggaaatccttcattggctcttctcatcttggctcacaggcagtacatgaataccagtttcttcctgagcagccaagtgatacatatgagagggcaagccagtcacacttctatgattcttcagcagaagcgtcaaacttgagggtagctccgctgtctacaggatcacgctttctccatggagttgagcaggcacctagctatacatttcacagtcaatcatctggttctagccatttgactcaacgtggcagtggcaggtcacctattgcatcggcattgacagatcatgagggggctttgtcaaatattaatgctagcacaactccaatccacggccaacttggcatccctcaagttgccggattcgaaagccccctggcatcccctgaaagattgggttatcatgatgaagatacatatcacatggacagaaagcgcaagcataatgaggaagctaagattgctagggaggttgaggctcatgaaaagagaatcagaaaggagcttgagaagcaagatctgctgaacagaaagagagaagaacaaatgcggagagaaatggagagacatgatcgtgagagacgtaaggaagaggagaggttgatgcgtgaaaggcagagggaagaagagaaattccaaagggaacaaagacgcgaacacaagcgcatggagaagtttatgcagaaacaatctatacgagctgaaaaactgagacaaagagaggagcttcgacgagagaaagaagctgcgaggcagaaggctgctaatgagagggctacagctcgtagaattgcgcgagagagtatggaactgatggaagatgagcgcttggaactattagagttggcctctcgtagtaaagggctgccctcaatggtttctcttgatagtgacacattacagcagcttgattcattcagaggaatgctggggaagttccctcctgaaactgtgagactgaaggtgcctttttcaataaaaccatgggcagcttccgaggatattattggaaaccttttgatggcttggaagttttttgttaccttcggtgatgttcttgggcttccgtcatttacgttggatgaatttgtgcaggctcttcatgattatgattcaaggcttttaggtgaattgcatgtttctctgctgaaatctgttataaaagatattgaggatgttgcccggactccttcagttgctttaggtgtaaatcagagcagttctgctaatcctggaggtggtcacccacaaattgttgaaggggcctatgcttggggcatcaacatactcaactggcagagacacttgaactttcttacatggcctgaaatattgcgccaatttggtttatgtgctggttttgggcctcagttaaagaaaagtgatgctgaaattgtccatcaccgcgatgataacgagggtcgtaatggtgtagatgtcatttccattctgcgaaatggttcagccgctgtgaaggctgctgctttaatgaaagaaagagggtatactaatcgtcgtaggtctcgacaccgtctgacacctggaacagtaaagtttgctgctttccatgtactgtcacttgaagggagcaaaggtctcacaatattggaagttgcagaaaagatccagaaatctggacttagagaccttacaacaagtaagacaccagaggcatctatatctgcggcattgtcgagagacactaagctttttgaaagaacggcaccttcgacatattgtgttaaaactccttacagaaaggacccagatgattctgaggctgtgttggcagcggcacgtgaaaaaatcagggcgtttcagaatgcgcttccggagtgtgaagaagtcgagaaggatgtggatgaggctgagagggatgatgattctgaatgtgatgatgccgatgatgatgctgatggtgatgatgtgaatattgaagacaaggatgccaagtcgccccttgttggagctcaatatggtgcacaaattacagtagttggtgacataaagaaagaatcaaacatcgtgatgaacacatcagtgccaccaagcattcagattaaatctagtgcaagtgtaccatttcatactttagacagtaaagcaagtagttcaactgatccagaggttggagatgatgctaaagacattgagatagacgaaagtaatcaaggggagtcctgggtacaggggctagctgagggtgactactgtgatcttagtgtagacgaacgcctcaatgctttggttgcacttattgccgttgctaacgagggaaattctatccgtgcaattctggaggaacgcctagaagcagcgagtgctttgaaaaaacaattgtgggctgaggcacaacttgataagaggcgtataagggatgactttactagtaagatgcagtatgattcttatgtgagtatgaaggttgatacagatcaagaaaataatgctgctgaaattacccttacaccagtgcatgaccctattaaaaacaataacggaaatgccaatttgatgaacaatggtttgcttgttgataagcagaaccagcttactactggtgatgtatatcatcagcggaatggtgcaagccgagaatcgagtactaacgcagaaagcttgtctgttcagcaatatgcttcatctgagaaaactcgatctcagttgaaatccttcataggtcacaaggcagaacagctttatgtgtacaggtctctaccacttggacaagaccggagacggaaccggtattggcagttctctgcatcttcatcatcctatgaccctggttcgggaagaatcttttttgaatctagagatggatactggagggtcattgatacatcagaggcatttgaagctttggtagcttcccttgatactcgtggcatccgcgagtcacatttgcactcaattttgcaaagtatcgagccaaccttcaaggaagctgttgagaggaaaaggtgtgctaatttagaacacccaactggacggacttcggaaaatggaagtaatgaaagtccaaattgcaacaatgaatttggaagtccatgcagtaccctttctggtgttgcttctgataatcttatggcacattcagatattttcaagatagaggttgggcgcaatgaagctgagaagaattctatctcgaaaagggcttccgtgtttctgaaatggatctggagagagtgctacagtcaccaatctacatacgccatgagatatggaaagaagcggtgtcctgagttgattcactcttgtgattattgctaccagatatacttagctgaagaaaggcactgttcttgccacaaaacattcaaacacattcacaatttcttggaacactcatcacaatgtgaagaaaaacaaagaacagatcccaattggaagatgcaaactgtggacctttctgtacccgtaggattgagattgctaaggctgctcttagctaccattgaggccttagtaccggcagaagctcttctacctttttggacggatgggtatcggaaatcttggggtgcgaagttgtattctgcatcatctgccgaagaagtcttgcagatgcttagtgtgctggaaagtgcaataaagcgagactacttatcatctaactttgaaacgacaactgagttgcttaattcaagcacacaagattttgctactcagaattcggctggaggttctggatctgccactgcacttccatgggttcctgacactactgctgctgtagccttgagattgttagacttggatgcttccatctcatacacccttcatccaaagttgggttcaaataaggagcaagaatctggagatttcatgaaacttccaccgagatatccttctatgaataagggcaaacaagaaatagaacagttcaggcctattggttttgatcaacaggatggaacgttgctacctaacagcaatggtcgtagaggtcggggaaggggaggtagaggaggcagcaggggaggtagatctcgtggtcatggtggtagggttcccagaggtattggcagctcttccaggattcagttcagggatgacaatagtatgctctatgggagagccccacgaaagaatgcacgtggtggccgcggccgtggacgtggacgtggacgtggacttcgaactgttagacctcggcaaccatccgagctcagtgccagatcaattccaaaggcaaacctattgggcagttttagcatgttaagtaagacaaatcacactggcactacgcattctcccgagagctcaggtgcagaagagtgggcctttgagaggagggaatatgtgaaggatgatgagaacaatttggtctctcaatccgatgagtctgaggaaaatgtcgaacctatgaatgaggaatatggtgagcatatttcaggctatccaagagacaattccgactccagacccgtacagatgatgggtgatgggagcgacgataatgatgaggatgctgaaggagatgagggtgaggaagatggagaggactatgaagctgaagatcctggtgatgaggatgatgacgttgagatggatggggatgatgatgtcgaggtggatgaggatgatgacattgagatggatggggatgatgacattgaagatgatgatgacgacgacggtggagatggagcagccaacggagatgaggatggaggtggtacatcatcatattcttcagagtatagtgaatgatgagtgattgaagttgtgcaggcttgtggtaaatgatgtaacagaggctttggtgggctcaccaacgctaatgctgacttgaaaaactatttaggaggttgccagttctaaactgtcttgtgtggcttgttattagatagaagccactcaacattagaagatcggccttgtgtgtatacatacataccaattatcaaaagttgaaaatgagggtcgatcagctgtctgttttatgttcagctacttttttcattgttat

SEQ ID NO: 146240 - DNA, 5128 bp, Zea Mays
tgagttttattatatttctcttcttgtccactgccttttattctggacgagattattgttttcttaaatcaatcaatcattgatcggtttaaactttaaaatctgtttcccctttaggcttcggcaatcttgcctaccacagaccctttacttcaaaatacagggaaacggaaatccttcattggctcttctcatcttggctcacaggcagtacatgaataccagtttcttcctgagcagccaagtgatacatatgagagggcaagccagtcacacttctatgattcttcagcagaagcgtcaaacttgagggtagctccgctgtctacaggatcacgctttctccatggagttgagcaggcacctagctatacatttcacagtcaatcatctggttctagccatttgactcaacgtggcagtggcaggtcacctattgcatcggcattgacagatcatgagggggctttgtcaaatattaatgctagcacaactccaatccacggccaacttggcatccctcaagttgccggattcgaaagccccctggcatcccctgaaagattgggttatcatgatgaagatacatatcacatggacagaaagcgcaagcataatgaggaagctaagattgctagggaggttgaggctcatgaaaagagaatcagaaaggagcttgagaagcaagatctgctgaacagaaagagagaagaacaaatgcggagagaaatggagagacatgatcgtgagagacgtaaggaagaggagaggttgatgcgtgaaaggcagagggaagaagagaaattccaaagggaacaaagacgcgaacacaagcgcatggagaagtttatgcagaaacaatctatacgagctgaaaaactgagacaaagagaggagcttcgacgagagaaagaagctgcgaggcagaaggctgctaatgagagggctacagctcgtagaattgcgcgagagagtatggaactgatggaagatgagcgcttggaactattagagttggcctctcgtagtaaagggctgccctcaatggtttctcttgatagtgacacattacagcagcttgattcattcagaggaatgctggggaagttccctcctgaaactgtgagactgaaggtgcctttttcaataaaaccatgggcagcttccgaggatattattggaaaccttttgatggcttggaagttttttgttaccttcggtgatgttcttgggcttccgtcatttacgttggatgaatttgtgcaggctcttcatgattatgattcaaggcttttaggtgaattgcatgtttctctgctgaaatctgttataaaagatattgaggatgttgcccggactccttcagttgctttaggtgtaaatcagagcagttctgctaatcctggaggtggtcacccacaaattgttgaaggggcctatgcttggggcatcaacatactcaactggcagagacacttgaactttcttacatggcctgaaatattgcgccaatttggtttatgtgctggttttgggcctcagttaaagaaaagtgatgctgaaattgtccatcaccgcgatgataacgagggtcgtaatggtgtagatgtcatttccattctgcgaaatggttcagccgctgtgaaggctgctgctttaatgaaagaaagagggtatactaatcgtcgtaggtctcgacaccgtctgacacctggaacagtaaagtttgctgctttccatgtactgtcacttgaagggagcaaaggtctcacaatattggaagttgcagaaaagatccagaaatctggacttagagaccttacaacaagtaagacaccagaggcatctatatctgcggcattgtcgagagacactaagctttttgaaagaacggcaccttcgacatattgtgttaaaactccttacagaaaggacccagatgattctgaggctgtgttggcagcggcacgtgaaaaaatcagggcgtttcagaatgcgcttccggagtgtgaagaagtcgagaaggatgtggatgaggctgagagggatgatgattctgaatgtgatgatgccgatgatgatgctgatggtgatgatgtgaatattgaagacaaggatgccaagtcgccccttgttggagctcaatatggtgcacaaattacagtagttggtgacataaagaaagaatcaaacatcgtgatgaacacatcagtgccaccaagcattcagattaaatctagtgcaagtgtaccatttcatactttagacagtaaagcaagtagttcaactgatccagaggttggagatgatgctaaagacattgagatagacgaaagtaatcaaggggagtcctgggtacaggggctagctgagggtgactactgtgatcttagtgtagacgaacgcctcaatgctttggttgcacttattgccgttgctaacgagggaaattctatccgtgcaattctggaggaacgcctagaagcagcgagtgctttgaaaaaacaattgtgggctgaggcacaacttgataagaggcgtataagggatgactttactagtaagatgcagtatgattcttatgtgagtatgaaggttgatacagatcaagaaaataatgctgctgaaattacccttacaccagtgcatgaccctattaaaaacaataacggaaatgccaatttgatgaacaatggtttgcttgttgataagcagaaccagcttactactggtgatgtatatcatcagcggaatggtgcaagccgagaatcgagtactaacgcagaaagcttgtctgttcagcaatatgcttcatctgagaaaactcgatctcagttgaaatccttcataggtcacaaggcagaacagctttatgtgtacaggtctctaccacttggacaagaccggagacggaaccggtattggcagttctctgcatcttcatcatcctatgaccctggttcgggaagaatcttttttgaatctagagatggatactggagggtcattgatacatcagaggcatttgaagctttggtagcttcccttgatactcgtggcatccgcgagtcacatttgcactcaattttgcaaagtatcgagccaaccttcaaggaagctgttgagaggaaaaggtgtgctaatttagaacacccaactggacggacttcggaaaatggaagtaatgaaagtccaaattgcaacaatgaatttggaagtccatgcagtaccctttctggtgttgcttctgataatcttatggcacattcagatattttcaagatagaggttgggcgcaatgaagctgagaagaattctatctcgaaaagggcttccgtgtttctgaaatggatctggagagagtgctacagtcaccaatctacatacgccatgagatatggaaagaagcggtgtcctgagttgattcactcttgtgattattgctaccagatatacttagctgaagaaaggcactgttcttgccacaaaacattcaaacacattcacaatttcttggaacactcatcacaatgtgaagaaaaacaaagaacagatcccaattggaagatgcaaactgtggacctttctgtacccgtaggattgagattgctaaggctgctcttagctaccattgaggccttagtaccggcagaagctcttctacctttttggacggatgggtatcggaaatcttggggtgcgaagttgtattctgcatcatctgccgaagaagtcttgcagatgcttagtgtgctggaaagtgcaataaagcgagactacttatcatctaactttgaaacgacaactgagttgcttaattcaagcacacaagattttgctactcagaattcggctggaggttctggatctgccactgcacttccatgggttcctgacactactgctgctgtagccttgagattgttagacttggatgcttccatctcatacacccttcatccaaagttgggttcaaataaggagcaagaatctggagatttcatgaaacttccaccgagatatccttctatgaataagggcaaacaagaaatagaacagttcaggcctattggttttgatcaacaggatggaacgttgctacctaacagcaatggtcgtagaggtcggggaaggggaggtagaggaggcagcaggggaggtagatctcgtggtcatggtggtagggttcccagaggtattggcagctcttccaggattcagttcagggatgacaatagtatgctctatgggagagccccacgaaagaatgcacgtggtggccgcggccgtggacgtggacgtggacgtggacttcgaactgttagacctcggcaaccatccgagctcagtgccagatcaattccaaaggcaaacctattgggcagttttagcatgttaagtaagacaaatcacactggcactacgcattctcccgagagctcaggtgcagaagagtgggcctttgagaggagggaatatgtgaaggatgatgagaacaatttggtctctcaatccgatgagtctgaggaaaatgtcgaacctatgaatgaggaatatggtgagcatatttcaggctatccaagagacaattccgactccagacccgtacagatgatgggtgatgggagcgacgataatgatgaggatgctgaaggagatgagggtgaggaagatggagaggactatgaagctgaagatcctggtgatgaggatgatgacgttgagatggatggggatgatgatgtcgaggtggatgaggatgatgacattgagatggatggggatgatgacattgaagatgatgatgacgacgacggtggagatggagcagccaacggagatgaggatggaggtggtacatcatcatattcttcagagtatagtgaatgatgagtgattgaagttgtgcaggcttgtggtaaatgatgtaacagaggctttggtgggctcaccaacgctaatgctgacttgaaaaactatttaggaggttgccagttctaaactgtcttgtgtggcttgttattagatagaagccactcaacattagaagatcggccttgtgtgtatacatacataccaattatcaaaagttgaaaatgagggtcgatcagctgtctgttttatgttc

SEQ ID NO: 146241 - DNA, 281 bp, Zea Mays
acctttcctttacctgttagtgtgacaaatcattgttgctacatccaattcagcaacctcaaacactatggagtccattacgccaatgtggtctcagaaacgacctaatgcttgcaagatccaagaacacaagagacgagcaccctttggtagtgcccgcatggatctctaaatcctaatacatattttgcaggacccatgagccattatcagaagaacataaaccatgtgcagacaataaataaagtattaacacacccaaattatgttcagtccttagc

SEQ ID NO: 146242 - DNA, 359 bp, Zea Mays
atggccggtcttccttttctcccctgccgaactcaaggtctgttgcaactatctcctgcgcatctggcggggattccgggagcaacaagaacaccgcaacaaccgcgaggaatccatcctttctccccccgtgatataaaaaccgggcgtcgtgtttcccctgcccgccaaaaccaaatccagaactctccctgggaatttggtggccgatttgccgccacgtgggtgtggtggggcatgcgccgaatgacttctgcgttagagctccagcgccaggggggaaactgtcgcgccatcgctgggccgcggctcggattgctgggtggccggagtcaccggatcggaattcagaacactag

SEQ ID NO: 146243 - DNA, 481 bp, Zea Mays
cgaacaagcccatatatcgccgtcagagccatcaccccgatggatccctgcgtttcgtgctcaggttcagcggaaactgagccgtgagcaccgccgccgccaccacctttgcgtttgcggtgacgacacgacaccaataatggcggcggcaaggacaaggagcctgctcgcggcggcgttcctggcgctggcggcggtgccggcggtgctctgccaggcgccaggccccgcggcggcggcgccgcccaacaagggcccgccgaacgttacggcgatcctggagaagggcgggcagtacacgacgttcatgcggctgatgaagtcgactcagcaggacacgcagctgaacggccagctgaacaactcgttcggcagcggttacacggtgttcgcgcccaccgacagcgcctttctccagcctctagcccggcactctttaacatttctgtcgctacaagattatgtgtctttggtgtagtat

SEQ ID NO: 146244 - DNA, 499 bp, Zea Mays
gtttatttcgttgaccaggtgttgctggccaacgactttttcggcgtcaagcccctggtgtccgcgccgcccgccgccaggaagccggccaagggcgggtccgtcgccgaggcgcccgccgccggctcggctgacgcgccgccctccggcgcggccgcgcgcggcgccagcaggaccgccggatggagctcgctgcccgctctgctgttcctggccgccgcggcctccttcctgtccctgttgtgagaatgtaaacatggttcgtgcttgtcgagcacaaaagagctcgtcttcttgcggtttgtttctcttctggagttctagtaacctggatctgtccctgaatgttgatgaagccagctgttaatttctccatgcatcttttcttctcatgagtggtctcgagtctgaccgtgcatggctagaattagtaattttttctcttcttttgttagcagaatcagtagtgctccgtttgcttcagcgttgtttcagttca

SEQ ID NO: 146245 - DNA, 2114 bp, Zea Mays
ggacatcactctctggcaagttggcaagcctgactcgacgccacatgcggcagcccgcaagtacgtacgtgcaatcgtgcatacgcatacgagcagagtacaggcacgcctacctgtatggcgctaccaacgtgctgtcatggtagcttgctgagctgaagctccggtccggtggttggaggatcacatcgcggcgcacgtaaagagagaagagcgctggttggggtgccgtgacacctgacttgccacggtcgcaaagttcgccctataagggccagccaggctcgaacgtgccggtgccggtgctccccgcgcaaacacgcacgcacactctggacgcgcgctggctggctgcaactgcaaggcgtcgccaccaaccgcagctataataggtgtattgaacaggcaggcagagcagggcaggcagtgtaggctccatcagatccaacgccaccagctagcagcagcagcagcagcatggccaccaccagcacgcctcgcctcgccaccctcctggtgctcctggcggcggcgtcaccgctgctgagcgcagctcaaaaggccgccccgaaggctccggcggcggcgaaggcggcgccagggccggcggcgtcgtcgtcgtccggcgcgggcgcggcggacgcggcccctcccacagacgtgaacaaggcgctcaaggacgaccagttcagcgagttcaagcagctgctgcacgacacgcgcgtggacacgcagatcaacgcgcagctgacggacagctacaacgggctgaccatcatggcgcccaccaacgccgccttcgacaagatgaaggccggcgtgctcaacgggctgtcgccgcaggaccagatccagctcgtcctctactgcgtgctgccccgcttctacagcctctccatgctcggcaccctcgacggcaaggtcaacacgcagggctccggccacgacgggccctacaggtacgacatcaagcggtcgggcaacaacgtcaacgtgtccacgggcgtcaactggatgctgctgggcagccccgtcagcaaggacttcccgctcgccatctaccccgtcgacaaggtgccgctcccctacgagctgttcgggcccaagccgcccaccccggcgcccgcgccggccccggcacccgccaagtccaagaccaagaagaagaagaaggccgccggcatcgccgagccgcccacggccgacgacgacacctccgcctccgacgaccagaaggcggccgccacgcccggcgccgccggcagctgggccgccgccgcgctctcggcgctcgccgctgctgccctcggcgccggcctcttctgatggggagagggaggatagagtcagtcaccatcgttcagatttgagatcacacggcgcggcgctactgcggtggcgatcgatcgctcctgcgccgcgcgccgtgcattgccatacaatgtcgcacggtcgatacgatcatagagttggtgtgccccatccatccatgtacccatccatgcatttgtggctttattaattctttcttccccttcctttctctccccttttcctttcggcggatttctattggtgatttgtatttgtaacctaatgtgatgtacacaagtagtgcttcctctttcactggatggatctttggcctccgagatctggacctgcttttgtttgtttaatccgagcgtactatacgcttaacatactagctggttgcttgctgtagccgtgtcgcagtcgcttgtgttccaagcattttcttgcagtgaaaagagaacagggaagtgcagacagtgcaagagatcggacagacatgtgtggtagcagtgcgttggacaccacacatcttcccttttgctgcatcatgtcttttgcctgaaacacgcacatagcaatagcagcagttccctcctttgagatggctggctgggtctgtcagccagcgaggtaaaccgtgctcatcagcagagacgcattatattattggtggttgcaacgtgatcctggacccttttgcgctgcctcaccacagtcacgtgcagcctaccaactctggatctggtagccgtggcctcccgttgttctcgcggtggattcaaaccggccggtcggtg

SEQ ID NO: 146246 - DNA, 955 bp, Zea Mays
ttttttttcgttcttcagaagttcagagcgtccctatctccttccctctgctctgatttttccagcagccggtttcccctgatattcttccacgctgcgccgattagcacctggatatgttctccagcgcacaaccttatcctgcagccaccctcgcctgattctttcccagccgccgctctgggcgattaaaaatcctgctcgccggccggatctccggcgtcgtctgcccctgctttcctcggtgtcctccccacagtcgtctccttcctctgctcgtcgctgaaattcgccggccgcgaacgcccatggcgcacccccagtccctgctttctctttgcctctctctcttatccatggccgccggtcgctcctttctgtcccgcctggtgctctgcactgctccgtcgcttggtctccggctcgccgcgtgcgcaaggtttctctggttcagccgttcttcttcctccccctgcgtccctgctctgctctgtctgccgcgcgctgagtgccgaggctcctgctcgaccgctcctctctggcttctctctctccctccatctctctctgctcaccgcggctcttccccaagtctggtgccatggcgcttgtcagccgcgaccttgccaggctcggtccctgctgctgctcgcccatctccttcatctccctcctctccatcgtggtgttcctctccctggtgcttttctgtgccggccgccctcacctctgctcctcctggttggccgagcagctcgccatctcttgtcgtgcgtcctgctcgccctcagcttttcacggagctcgccccggccttagctccttgctcgtcatggctactgtgcgctccctgctcttgtgccgcatgcaggcttccctgccggagttccgccatccgcggcctctgccctgcttccttggctgcgtgtccttctgccggccaagctcggctctg

SEQ ID NO: 146247 - DNA, 417 bp, Zea Mays
tccaagatggccacaccaccggagggctggcgtcgctagaatccagggtgcaagcacacgagttgactcccgccacgagataaccacacggttgacgtggtccaacagcaggagggagttcgagcgcgcgaaggagtcggtgaaggggagcgccgtggcagcccagaagaagtggtttgtgtcgatgacgagcatgacgaggctgtcatccccggagtagagcttggagtgcgcagaggcctcgcccaaacggcggcatgttgttccacggttaagctctaattccggcgagaaatggaaggaacacagtggagcagcgaccgtcaatggggacaacgggtttctctttcttaccaggaatcactcgatttccccctgctctcagtattgtctcatggcgctattgagtccgtaatc

SEQ ID NO: 146248 - DNA, 838 bp, Zea Mays
ccatcacacgacgccacaaatcgcaactcccaaccgaaacgagaacaaggacgccgtgtaaaaactcgcgcgcgccccaggaaggagaggaagagggagtaatgtaccaggccatcccgtacagcgccggccggccgtggccgcggcccgcgccggcgatgggcgtcgaggccgcggcggcggtggcggaggaggagaggctgctcgcggctgcacagcagcagcagccgtcggcgggggcggaggcggcggcgaggggggaggaggtgcgacgggcggtggcggagtgccccgtgctcgtggtggggaagcgcgggtgctgcctcagccacgtggtgaagcggctgctgcagggtctcggggtcaaccccgccgtgcacgaggtcgccgacggcgccgaggcgaagcttattgccggggtcgtcgacggcggcggcgacgttgccctcccggccgtgttcgtcgggggcaggctcctcggcggcctcgaccggctcatggccgtgcacatctccggcgacctcgtgcccatactcaaggacgccggcgcgctgtggctctgatgagaggaccaaggcgttcgtagtctcgctcccccgtccatccttccttggcctctccatcgtcgtcagctccccttgtccatgttatttttaacttgttatttttactctattaaatagaccagataggcatgcatataggacttttaactctttcggtagaaacagaatattaggtagttagaacaatggagtacgtgtgttaagcgatttacagtatatatttatcttggtttcccgtcatgtgaatatgaaagagtgctgaaattacctga

SEQ ID NO: 146249 - DNA, 524 bp, Zea Mays
cgattaggttgaataataacatatgacagaagcccctctttgctttagttgaggttcaggagaggacactatatagagccaagtcgaaaggaaaaaaatgacaccaaaaatgtatgtacctgaaaacgcccctgcgaaattctagagttggtgcacaacaggaattagagacatattccaatgttcagctgctttaacatgtcgatgattgttgaatggattaaaataaatgtcagaaaagaatggcaagtgtgcgcatcaaaagccttctttaagcatctggatcaatgttacatttagcagcaaaaagtatggcacaaaaaattaatcccctacttttactaaaagattaatataccaaagtcgtggagggtgacaaagagaattcaccttcaacaccagaaatgcctcaaccatgaatcatttacagtaatgtaaaattgtacccttttattataccacattctacattgccaaaatggaccaacaaaattttacatatggtgaagaaatattatatgctg

SEQ ID NO: 146250 - DNA, 416 bp, Zea Mays
ggcttgccagtttcgccatcctcccctaacagaacaggcgaacttcacgcgttggcttcatgaaattcacgagcccctgttcaacgccggccaagcctcggggcccatacaaatcgccccgtcttcttgttccatagaccaagagtgcaccgccatgccatgtgaggtcgagataggagagaaaaagtggccgggaaatccaccaaatccgtcgcgcgggcaatttcgttgtgtgcccgatagaatcggggtggattggccttggggcatcgcttggccatcgtggatccattggtggcgattggatgcgcagtggagctcgggcgaattgggaattcgtcaccggacttggatagcggcttggcgaccgcggtgtcgcgtgggcggggccctgttacttcaattcgaggtaagct

SEQ ID NO: 146251 - DNA, 1514 bp, Zea Mays
acggtggtcgtcatctcctcgcagcctcggggacgcggcgaaaccatccagggcacaccgagctgtcgtttcgcggaccaatcgccccgctagggtttctctcccgggctcccgagctctccctccccgtctcctctcgccctcgagctctctgtcccctgtctcctctcgccctcgagctctcccaccccgtctcctatcgccctcgagctctcactcccccgtctcttgtcgccctcgagctctcgcaccctccactcccgtcgctggtgaggatctggatccttcggggtgcgtcaaaaggttgtcagtctgcaagttgaatcatggcggagcacttggcttcgatctttggtaccgagaaggacagggtcaactgccctttttacttcaagattggggcttgtcgtcatggggatcgctgttctcgtctgcacaacaggccaactatatcgccaactcttgtgcttgctaacatgtatcagcgccctgatatgataactcctggagttgatgctcaaggccaacctattgatcctgagaagatgcaggagcattttgaggacttctatgaggacatctatgaggagttgggcaagtttggtgagattgagaatctgaatgtttgtgataaccttgctgaccacatgattgggaatgtctatgttcagttcagagaggaagaacaggcagctgcagcatacaatgctcttcaggggcgcttttactctgggcgccctataattgttgagtattctcctgtgaccgacttccgtgaagcaacctgtaggcagtttgaggagaacagctgcaaccgtggtggctactgtaatttcatgcatgtgaagcaaattggcagggatctcaggaggaagctgtatgggcgttctgcttccaggaggtaccatgcgagaagccgaagccctccaccgcaaaggaggggctatcgtgaggactatcaccaccgtgatcgtgacgagtaccgtggcggcggcggcggcggtggacggggaagaggtagcaggcatgacaggtatgatgatggagcaggtagaggcggcaggcatgacaggtacgatgatggagcgggtagaggcggcaggtatgagaggtatgatgatggaggaaggcgtaggcatggtagccccccgaggcgtggaaggagcccggtcagggaaagcagcgaggagcgaagggccaagattgagcagtggaaccgtgagcgggagtcaaaacagtgagctctctgtggcaactgttctgagacgtgttattcggtggacttgttgcttagctcgtctttcactgctatattctaagtatgcttgtgtggctgatatgcttgagtgcaggactcagttcaattttgtggttaaatcggacatgtaaactctatttatttccttgtggattgtgttgaatcatttgccattatgttatgctgacaattggtatcaaatcttttgtgatgagctattaagttatgatgatgatgtcagttgcagttggtcatt

SEQ ID NO: 146252 - DNA, 547 bp, Zea Mays
atctcctcgcagcctcggggacgcggcgaaaccatccagggcacaccgagctgtcgtttcgcggaccaatcgccccgctagggtttctctcccgggctcccgagctctccctccccgtctcctctcgccctcgagcaggtagaggcggcaggcatgacaggtacgatgatggagcgggtagaggcggcaggtatgagaggtatgatgatggaggaaggcgtaggcatggtagccccccgaggcgtggaaggagcccggtcagggaaagcagcgaggagcgaagggccaagattgagcagtggaaccgtgagcgggagtcaaaacagtgagctctctgtggcaactgttctgagacgtgttattcggtggacttgttgcttagctcgtctttcactgctatattctaagtatgcttgtgtggctgatatgcttgagtgcaggactcagttcaattttgtggttaaatcggacatgtaaactctatttatttccttgtggattgtgttgaatcatttgccattatgttatgctgacaattggtatcaaa

SEQ ID NO: 146253 - DNA, 1494 bp, Zea Mays
atctcctcgcagcctcggggacgcggcgaaaccatccagggcacaccgagctgtcgtttcgcggaccaatcgccccgctagggtttctctcccgggctcccgagctctccctccccgtctcctctcgccctcgagctctctgtcccctgtctcctctcgccctcgagctctcccaccccgtctcctatcgccctcgagctctcactcccccgtctcttgtcgccctcgagctctcgcaccctccactcccgtcgctggtgaggatctggatccttcggggtgcgtcaaaagtctgcaagttgaatcatggcggagcacttggcttcgatctttggtaccgagaaggacagggtcaactgccctttttacttcaagattggggcttgtcgtcatggggatcgctgttctcgtctgcacaacaggccaactatatcgccaactcttgtgcttgctaacatgtatcagcgccctgatatgataactcctggagttgatgctcaaggccaacctattgatcctgagaagatgcaggagcattttgaggacttctatgaggacatctatgaggagttgggcaagtttggtgagattgagaatctgaatgtttgtgataaccttgctgaccacatgattgggaatgtctatgttcagttcagagaggaagaacaggcagctgcagcatacaatgctcttcaggggcgcttttactctgggcgccctataattgttgagtattctcctgtgaccgacttccgtgaagcaacctgtaggcagtttgaggagaacagctgcaaccgtggtggctactgtaatttcatgcatgtgaagcaaattggcagggatctcaggaggaagctgtatgggcgttctgcttccaggaggtaccatgcgagaagccgaagccctccaccgcaaaggaggggctatcgtgaggactatcaccaccgtgatcgtgacgagtaccgtggcggcggcggcggcggtggacggggaagaggtagcaggcatgacaggtatgatgatggagcaggtagaggcggcaggcatgacaggtacgatgatggagcgggtagaggcggcaggtatgagaggtatgatgatggaggaaggcgtaggcatggtagccccccgaggcgtggaaggagcccggtcagggaaagcagcgaggagcgaagggccaagattgagcagtggaaccgtgagcgggagtcaaaacagtgagctctctgtggcaactgttctgagacgtgttattcggtggacttgttgcttagctcgtctttcactgctatattctaagtatgcttgtgtggctgatatgcttgagtgcaggactcagttcaattttgtggttaaatcggacatgtaaactctatttatttccttgtggattgtgttgaatcatttgccattatgttatgctgacaattggtatcaaatcttttgtgatgagctattaagttatgatgatgatgtcagttgcagttggtcatt

SEQ ID NO: 146254 - DNA, 2007 bp, Zea Mays
tctctcctggcggcgacgatagggcgactaccgccgccaccgccttacgccaggtgcccaggtcgtctggcccttcggcgaagagcgccgaacagcttaggttaaaatcaaataatattttgtcggacggataattcaaggcctacaccagaaggaataacctaccccttgtgcggcaggccaacagctctctccatctctctctgcagtgttatttggtttactatatgcaattgcaggggagaaaactaaagaaccgttcactgcagttagaagcagcaactgctgtagccgcagcaggcttcttctacagtattttcggtttggaagttgcatgcggagagagacttttgtgtttacatctagttgacctttaaatctgcagctatgttataggtcaaaaaatcatcagttaacaggggcaaggacttgccttgatgacacaattattttggtctatctttcacttctcctgatatttaacttttttgagtaagtgtgcagattaggtcttaaaaagggattgggattaatattttattgccagagcttgagctgtataattatccatttacacagtgggctgtacagggggtaaattgacaggaatattacttggtgatcctataagataatgtgctgtgaaccctgatttgttttagctgcttgtgttcgttttgtctacttagtcttgcacactgaggacctttatcgaggtattccttgatccccatggttcttgataacaggccatgagtttataccccctccatttcaccttatattgaagatgatactattcttgcttatgcttgaaggttgtcagtctgcaagttgaatcatggcggagcacttggcttcgatctttggtaccgagaaggacagggtcaactgccctttttacttcaagattggggcttgtcgtcatggggatcgctgttctcgtctgcacaacaggccaactatatcgccaactcttgtgcttgctaacatgtatcagcgccctgatatgataactcctggagttgatgctcaaggccaacctattgatcctgagaagatgcaggagcattttgaggacttctatgaggacatctatgaggagttgggcaagtttggtgagattgagaatctgaatgtttgtgataaccttgctgaccacatgattgggaatgtctatgttcagttcagagaggaagaacaggcagctgcagcatacaatgctcttcaggggcgcttttactctgggcgccctataattgttgagtattctcctgtgaccgacttccgtgaagcaacctgtaggcagtttgaggagaacagctgcaaccgtggtggctactgtaatttcatgcatgtgaagcaaattggcagggatctcaggaggaagctgtatgggcgttctgcttccaggaggtaccatgcgagaagccgaagccctccaccgcaaaggaggggctatcgtgaggactatcaccaccgtgatcgtgacgagtaccgtggcggcggcggcggcggtggacggggaagaggtagcaggcatgacaggtatgatgatggagcaggtagaggcggcaggcatgacaggtacgatgatggagcgggtagaggcggcaggtatgagaggtatgatgatggaggaaggcgtaggcatggtagccccccgaggcgtggaaggagcccggtcagggaaagcagcgaggagcgaagggccaagattgagcagtggaaccgtgagcgggagtcaaaacagtgagctctctgtggcaactgttctgagacgtgttattcggtggacttgttgcttagctcgtctttcactgctatattctaagtatgcttgtgtggctgatatgcttgagtgcaggactcagttcaattttgtggttaaatcggacatgtaaactctatttatttccttgtggattgtgttgaatcatttgccattatgttatgctgacaattggtatcaaatcttttgtgatgagctattaagttatgatgatg

SEQ ID NO: 146255 - DNA, 1289 bp, Zea Mays
cagcttaggttaaaatcaaataatattttgtcggacggataattcaaggcctacaccagaaggaataacctaccccttgttgtcagtctgcaagttgaatcatggcggagcacttggcttcgatctttggtaccgagaaggacagggtcaactgccctttttacttcaagattggggcttgtcgtcatggggatcgctgttctcgtctgcacaacaggccaactatatcgccaactcttgtgcttgctaacatgtatcagcgccctgatatgataactcctggagttgatgctcaaggccaacctattgatcctgagaagatgcaggagcattttgaggacttctatgaggacatctatgaggagttgggcaagtttggtgagattgagaatctgaatgtttgtgataaccttgctgaccacatgattgggaatgtctatgttcagttcagagaggaagaacaggcagctgcagcatacaatgctcttcaggggcgcttttactctgggcgccctataattgttgagtattctcctgtgaccgacttccgtgaagcaacctgtaggcagtttgaggagaacagctgcaaccgtggtggctactgtaatttcatgcatgtgaagcaaattggcagggatctcaggaggaagctgtatgggcgttctgcttccaggaggtaccatgcgagaagccgaagccctccaccgcaaaggaggggctatcgtgaggactatcaccaccgtgatcgtgacgagtaccgtggcggcggcggcggcggtggacggggaagaggtagcaggcatgacaggtatgatgatggagcaggtagaggcggcaggcatgacaggtacgatgatggagcgggtagaggcggcaggtatgagaggtatgatgatggaggaaggcgtaggcatggtagccccccgaggcgtggaaggagcccggtcagggaaagcagcgaggagcgaagggccaagattgagcagtggaaccgtgagcgggagtcaaaacagtgagctctctgtggcaactgttctgagacgtgttattcggtggacttgttgcttagctcgtctttcactgctatattctaagtatgcttgtgtggctgatatgcttgagtgcaggactcagttcaattttgtggttaaatcggacatgtaaactctatttatttccttgtggattgtgttgaatcatttgccattatgttatgctgacaattggtatcaaatcttttgtgatgagctattaagttatgatgatgatgtcagttgcagttggtcatt

SEQ ID NO: 146256 - DNA, 1284 bp, Zea Mays
gaaccctgatttgttttagctgcttgtgttcgttttgtctacttagtcttgcacactgaggacctttatcgaggttgtcagtctgcaagttgaatcatggcggagcacttggcttcgatctttggtaccgagaaggacagggtcaactgccctttttacttcaagattggggcttgtcgtcatggggatcgctgttctcgtctgcacaacaggccaactatatcgccaactcttgtgcttgctaacatgtatcagcgccctgatatgataactcctggagttgatgctcaaggccaacctattgatcctgagaagatgcaggagcattttgaggacttctatgaggacatctatgaggagttgggcaagtttggtgagattgagaatctgaatgtttgtgataaccttgctgaccacatgattgggaatgtctatgttcagttcagagaggaagaacaggcagctgcagcatacaatgctcttcaggggcgcttttactctgggcgccctataattgttgagtattctcctgtgaccgacttccgtgaagcaacctgtaggcagtttgaggagaacagctgcaaccgtggtggctactgtaatttcatgcatgtgaagcaaattggcagggatctcaggaggaagctgtatgggcgttctgcttccaggaggtaccatgcgagaagccgaagccctccaccgcaaaggaggggctatcgtgaggactatcaccaccgtgatcgtgacgagtaccgtggcggcggcggcggcggtggacggggaagaggtagcaggcatgacaggtatgatgatggagcaggtagaggcggcaggcatgacaggtacgatgatggagcgggtagaggcggcaggtatgagaggtatgatgatggaggaaggcgtaggcatggtagccccccgaggcgtggaaggagcccggtcagggaaagcagcgaggagcgaagggccaagattgagcagtggaaccgtgagcgggagtcaaaacagtgagctctctgtggcaactgttctgagacgtgttattcggtggacttgttgcttagctcgtctttcactgctatattctaagtatgcttgtgtggctgatatgcttgagtgcaggactcagttcaattttgtggttaaatcggacatgtaaactctatttatttccttgtggattgtgttgaatcatttgccattatgttatgctgacaattggtatcaaatcttttgtgatgagctattaagttatgatgatgatgtcagttgcagttggtcatt

SEQ ID NO: 146257 - DNA, 2139 bp, Zea Mays
tcgagctccagcccccaccggataccaccgcctccaccaaccgattccgttccgtccccccggccccgacctcgtcaccaccggtcacgctcgagcgggaggcttctctcgccacccaccagcggattcctacagctcccgcgccgatcgcgtcgcggacccgtccggagggagaggtgatgataaaggatatttgctgaccaaacttgcagtatttctccttaaggaaatagaaattggcgtcatgtcatatagaaatatgctctggacacatcagtccgttaatcctgaatgggagcaaggacatgtccaagtccaaccaagaagttcctattatgcaggcactgtaagtgattcatccaacctgggcatgcaagttgctgttggtgttccagtaaatactgttaatgttggtatatgtgatctgtggaatcatgagcgcctgcctgttcataattcatacccacatgccagtgttacatcgagatttgtcctcccaactagtatgtacaacccttgcatgccagcagcagctgtcaacatatatattcctcagactcaaagctttggactgggcaatgtgctaccaccatctttacatagtcaagtttccacaggaactattgatgagaataacagcagtttcaattttggtgatagtgccattggatccatgaaaaggaaaaccgcagtagttgccggaaaccatcacattcttcatggatttgctggctcaagttcatctgttcatgtccctcagaatcctgtgtatgggccatggaatgcttcatctcaatcaaattgtttacccagttctgcagcttcaaacctaccagaataccacaatagtaatgggtggccgttcttagaagaatcttctgcaaatgcttcaaacagtttcacttcagtggatgcttgtccagagttggtacctcatggtaacaatttatatccagcttgtcacataatacagtgcaatacatgggttccacagactgcaagtcatggagtaccacagtggggatatggtaatgtcatggtcaatcctccaggaaccgtagacatgccgaatggaaatattcaggattatcaagctgggcattcttctattcatgggccactacctcatttctgccagattcctttgcgtagtatgcaagtacctcaaatacaagtaccccatcaacagttcatcggtaacaatgtggtgcatggtttaaatccttcagccgcaggccttccgttagatccaagaatgctggctttcccattcaatgatgagcacacttttgggcatcaagtgcatccacctctgataaaccaagccaacaatggggctttaagaattctgccatatcagaatgctacagtgatggatcattcaaggatttatgaagcaggacatgttattgatgaacatagagatatgcgtttagatgtggataacatgacttatgaggagcttgtagcattgcaagagcagataggtgatgtcaatactggtttgacagaaagctatatccaagaaaacttgaggtccacttttcatgttccaggagcagctagcatttctgatcagttctgtgagctttcgttagagaacgatgcttgcataatatgccaggaggagtatgaagctagagaacttataggagcccttgaatgtggtcacaagtaccatgaggattgcataaagcaatggttgatggtgaaaaacgtgtgccccatctgcaagacaacagctttgtcatcagatagaaggaatggatgatcttcgccagtaacattattggttatttaccgcgtggcaagttagcgcgattttgtatatagacagggttgcctttatttgccgtcccccttcgctgtggacataaactgtacagatattattttgtaggatattttagacgttaaatggcaccatggtgtgtaaggctcccatggttgccttggtagatcctcccttcctttacattgtatttatctttactcttcaaaaaagaagcccgaaaacatgtatattttggaagtgaaagaaccgattttttttcttcaattctggagcttttttgctagagctgcatgagatttgccgctgaaatagggacttggttatgtttttttttcgctttctac

SEQ ID NO: 146258 - DNA, 2073 bp, Zea Mays
ttctgctagctaggcccactcatgtgcaagtttcttttgtcaatattttgctcccacttacaaacttcagcatgtactgggaattatcttgtctgctaacatcatttacttaaacgtgacttgctttacattttacatctctgttatccatattagattgaatgctgatcgtgtttggtctatctcgtatgcagggagaggtgatgataaaggatatttgctgaccaaacttgcagtatttctccttaaggaaatagaaattggcgtcatgtcatatagaaatatgctctggacacatcagtccgttaatcctgaatgggagcaaggacatgtccaagtccaaccaagaagttcctattatgcaggcactgtaagtgattcatccaacctgggcatgcaagttgctgttggtgttccagtaaatactgttaatgttggtatatgtgatctgtggaatcatgagcgcctgcctgttcataattcatacccacatgccagtgttacatcgagatttgtcctcccaactagtatgtacaacccttgcatgccagcagcagctgtcaacatatatattcctcagactcaaagctttggactgggcaatgtgctaccaccatctttacatagtcaagtttccacaggaactattgatgagaataacagcagtttcaattttggtgatagtgccattggatccatgaaaaggaaaaccgcagtagttgccggaaaccatcacattcttcatggatttgctggctcaagttcatctgttcatgtccctcagaatcctgtgtatgggccatggaatgcttcatctcaatcaaattgtttacccagttctgcagcttcaaacctaccagaataccacaatagtaatgggtggccgttcttagaagaatcttctgcaaatgcttcaaacagtttcacttcagtggatgcttgtccagagttggtacctcatggtaacaatttatatccagcttgtcacataatacagtgcaatacatgggttccacagactgcaagtcatggagtaccacagtggggatatggtaatgtcatggtcaatcctccaggaaccgtagacatgccgaatggaaatattcaggattatcaagctgggcattcttctattcatgggccactacctcatttctgccagattcctttgcgtagtatgcaagtacctcaaatacaagtaccccatcaacagttcatcggtaacaatgtggtgcatggtttaaatccttcagccgcaggccttccgttagatccaagaatgctggctttcccattcaatgatgagcacacttttgggcatcaagtgcatccacctctgataaaccaagccaacaatggggctttaagaattctgccatatcagaatgctacagtgatggatcattcaaggatttatgaagcaggacatgttattgatgaacatagagatatgcgtttagatgtggataacatgacttatgaggagcttgtagcattgcaagagcagataggtgatgtcaatactggtttgacagaaagctatatccaagaaaacttgaggtccacttttcatgttccaggagcagctagcatttctgatcagttctgtgagctttcgttagagaacgatgcttgcataatatgccaggaggagtatgaagctagagaacttataggagcccttgaatgtggtcacaagtaccatgaggattgcataaagcaatggttgatggtgaaaaacgtgtgccccatctgcaagacaacagctttgtcatcagatagaaggaatggatgatcttcgccagtaacattattggttatttaccgcgtggcaagttagcgcgattttgtatatagacagggttgcctttatttgccgtcccccttcgctgtggacataaactgtacagatattattttgtaggatattttagacgttaaatggcaccatggtgtgtaaggctcccatggttgccttggtagatcctcccttcctttacattgtatttatctttactcttcaaaaaagaagcccgaaaacatgtatattttggaagtgaaagaaccgatttt

SEQ ID NO: 146259 - DNA, 803 bp, Zea Mays
agtcatcatgactcactaagcactgtccttcctgatcccaccgcggtctccttccgcgacacgcgcacacgccacagcgcattcgcgtacgtcaacggacgtcgaacccatcgcccatgggaggagggcacgaggagcaggagggtggcggcgcaaaggccgggggctactcctccggtctcccgccgtcggagccgccgcaggagtacgggtacggcacgttccagggccctcggcatcctcccgtcgggttcccgcagcctgccccgcctcccgggttcggcggcggcggcggctaccacaaccagcaacagccgtacgcgcacgcggagacgtactacgcccaggggtaccaggccgtgccaggctatggtcctgttgctgaaggaagacctgtgagaatgaggcgtctcccatgttgtggcctcggcttaggctggtgcctgttcattgctgggtttttccttgctgccattccatggtacattggggctttcgttctgatatgcgtgcgggtacatgaccaccgagagaaaccaggatatgttgcttgcacaattgctgccgttgttgctgccgttgccatattcctgggggtaactaagggaacacacgtgtggtgaattgcttccagagaaggcaatggatttatacttgtatagtatctgtgtgtattaaaagtgtggagcgacatcgagatgctcttatgacttatgttcatacatattctactttgtaatgaaattttagatgtagtaatgcaccgtctgcttcatataataagataagataccttgtgtcgt

SEQ ID NO: 146260 - DNA, 1430 bp, Zea Mays
gaaagtaatcaagcattcaggcccacgatacacggcccgctagggtttctctccccagcacataaatactcctcggcctccaaattctccatagtcagccgccatcaccgctgttaggttctaccaggagaccttcggcgtccctccggccacgcgagctcgccgaaatggtcgcccacaggttccatcagtaccaggtggtgggtcgcgcgctgccgaccccaaccgatgagcaccccaagatctaccgcatgaagctctgggccaccaacgaggttcgcgccaagtccaagttctggtacttcctgagaaagctcaagaaggtgaagaagagcaatggccagatgcttgccatcaacgagatctttgagcgcaacccgaccaccatcaagaactatggcatctggctgcgctaccagagcaggactggttaccacaacatgtacaaggagtaccgcgacaccaccctgaacggcgcagtggagcagatgtacaacgagatggcctcccgccaccgcgtgaggtccccctgcatacagatcatcaagacagcgacggtccacttcaagctgtgcaagagggacaacaccaagcagttccacaactccgagatcaagttcccgcttgtgtaccgcaaggtcaggccgcctaccaggaagctccggaccactttcaaggcttccaggcccaaccttttcatgtgagaggtatatcgtacccgtgttctgtgtcttgagcgcccgagagataaggattcttcctgtgcaagtttttggtgccctgttcattgagcactttgtttgattccagttaaggatttgaatgatgctgtgtaaaacaatgacttgtctgcaattagttatcaactactgctatttacctgccctgacttttggtggtggcactgctggttctcgaggtgcttactctgtctaaattgcaggatagttgttggggggaaaaaattttgtgctgcggcctgctgattgcctgtagtattttcgtctaagacacaggattgtatgccgcgggtttggaacccttgctatatcacccagaagaaacagcagtaaggggccttgacaagagttggcggggggcaaaatttactgctgtgatggtttcatgttgcttgcacatcgccaatgcattcacagcacatggacgggtggggaggacacagcgcacgctcgcggctgccttgctggatctagatgtcactagctccctccaaggatcgaggtgatggtatctgtagcccttgcactaccagcccgctgttcaagctgtctcgactgagatcctgggctgttctcaaagtatttgcagccacggctgttcaggagctctgttttagctgttgcttgccaccttttgacattcgtgtctgccgaggagtaatgttcaagagaagaagaaaaaaaaaagaa

SEQ ID NO: 146261 - DNA, 1417 bp, Zea Mays
atcttcagactagtctagcaagctagctcctcacggaacctgcgctccgatccgccacctctcttatctgaaaacctccagagtccagcctcccttccgattccacctccaagctcccagtcccagccatggcgtctcatgatcatcaccactcccactcccacgacgaccaccaccaccattcccacggggacggcggtggccatgcggctgggggatcgtgggtaggggaggacggacgcgtgtggcactcccacgacggcctcgcgccccactcccacgagcccatctactcccccggcgacttcaccaagcgcgcgccgccgctcgcctcgcgcgacttcgctgaccgcgccttcaccgtcggcattggcggccccgtaggcaccgggaaaactgccctcatgctagcattgtgcagatttctacgcgacaagtatagtcttgcagctgtcacaaatgatatattcacaaaagaagatggagaattcttaattaaacatggagcgctccctgaagaacgtatacgtgcagtggaaactggaggctgccctcatgcggctattcgcgaagacatcagcataaatcttggtcctctggaggagctatcgaacttgtacaaagctgatttgctactctgtgaatctggaggagataacttggcagctaacttcagcagagaattagcagactacataatctacattatcgatgtctctggtggggacaagataccaagaaaaggtggccctgggataacccaggccgatctgttggtaataaacaagacagacctagcacctgctgttggagctgatctgtctgtaatggagcgagacgcacttcgcatgcgcgaaggagggccctttgtgtttgcacaggtgaaacatggagtgggcgtggaggggatcgtgaaccatattctgcaggcgtgggagatcgcgactggtaataagcggcgataagatctcacgacttggggccatatgttggatgcagatttgattcagtcggcacttccacatgcatgtgtcatctgttcgtttctcaataaattctgcgtcatttgctgctgattgtacttgacaagtagagacatggatggactcttaaaattccatccatgtgttaaatgacatattcgagacatccttttctcaataaactctgcatcatttggtgaattgcacttgagaagtaaagacatggagccttaaaattccatacttgagtttaatggcacatttgagatatcctttttctccttaaaattccatagcttcgtggattcggtattaacgctctggactacgagtgggaggttaatagtctgcaagcccgctcagtgaatgcatgaacgctggcatgttgtgaagccgttcagtgaaagttctgaatatggaaaagaaaaaaaaaa

SEQ ID NO: 146262 - DNA, 2186 bp, Zea Mays
tagcaagctagctcctcacggaacctgcgctccgatccgccacctctcttatctgaaaacctccagagtccagcctcccttccgattccacctccaagctcccagtcccagccatggcgtctcatgatcatcaccactcccactcccacgacgaccaccaccaccattcccacggggacggcggtggccatgcggctgggggatcgtgggtaggggaggacggacgcgtgtggcactcccacgacggcctcgcgccccactcccacgagcccatctactcccccggcgacttcaccaagcgcgcgccgccgctcgcctcgcgcgacttcgctgaccgcgccttcaccgtcggcattggcggccccgtaggcaccgggaaaactgccctcatgctagcattgtgcagatttctacgcgacaagtatagtcttgcagctgtcacaaatgatatattcacaaaagaagatggagaattcttaattaaacatggagcgctccctgaagaacgtatacgtgcagtggaaactggaggctgccctcatgcggctattcgcgaagacatcagcataaatcttggtcctctggaggagctatcgaacttgtacaaagctgatttgctactctgtgaatctggaggaggtatatttttttacttgatccaaaataaatgtaggtcatttctattgttatgcatgttagaatctacgccggagagacaaccctgcaggttgccggcgagctcctacctcccaggtaagtttctccaggtatgagaaacctcactggtactcacacgcacgcgaacactttagagagaaacacagcagatttggtggcgtcctattgacgccttttcttagcctctaaggccatatatttatagactatcataaggaaacaaactagctattacaagggaataatccagactgctatcagtcctgatcttgctgattggatccgtcaatataagactgatccactaccatacttgctatttcctaaaacagaataagtaaactagcaccaatcaaggattactttcctaacaatgcatatatccgtatcaacctacagaatgtttttactggatctaaactcaatctaggtcattcctattgtcattgatatatctgtgcaaagtgcaaacctacatacccatctaaacattatttcagagtaatagtttctacatggatcatgttgcttctatggctgtctcatgtttgatactggacattagaatatgctcctttcaagttcttgcgtaaaagaaaattttgcattctgattctactgttttttttggagcatcatgttagctgaaacctcaggtgtcctgaatatgtcaagcatccctctggttctgaaaaatttcaacaatccagcattaaagagtgccatttgtgccttttccatgcagataacttggcagctaacttcagcagagaattagcagactacataatctacattatcgatgtctctggtggggacaagataccaagaaaaggtggccctgggataacccaggccgatctgttggtaataaacaagacagacctagcacctgctgttggagctgatctgtctgtaatggagcgagacgcacttcgcatgcgcgaaggagggccctttgtgtttgcacaggtgaaacatggagtgggcgtggaggggatcgtgaaccatattctgcaggcgtgggagatcgcgactggtaataagcggcgataagatctcacgacttggggccatatgttggatgcagatttgattcagtcggcacttccacatgcatgtgtcatctgttcgtttctcaataaattctgcgtcatttgctgctgattgtacttgacaagtagagacatggatggactcttaaaattccatccatgtgttaaatgacatattcgagacatccttttctcaataaactctgcatcatttggtgaattgcacttgagaagtaaagacatggagccttaaaattccatacttgagtttaatggcacatttgagatatcctttttctccttaaaattccatagcttcgtggattcggtattaacgctctggactacgagtgggaggttaatagtctgcaagcccgctcagtgaatgcatgaacgctggcatgttgtgaagccgttcagtgaaagttctgaatatggaaaagaaaaaaaaaa

SEQ ID NO: 146263 - DNA, 1262 bp, Zea Mays
aaacctccagagtccagcctcccttccgattccacctccaagctcccagtcccagccatggcgtctcatgatcatcaccactcccactcccacgacgaccaccaccaccattcccacggggacggcggtggccatgcggctgggggatcgtgggtaggggaggacggacgcgtgtggcactcccacgacggcctcgcgccccactcccacgagcccatctactcccccggcgacttcaccaagcgcgcgccgccgctcgcctcgcgcgacttcgctgaccgcgccttcaccgtcggcattggcggccccgtaggcaccgggaaaactgccctcatgctagcattgtgcagatttctacgcgacaagtatagtcttgcagctgtcacaaatgatatattcacaaaagaagatggagaattcttaattaaacatggagcgctccctgaagaacgtatacgtgcagtggaaactggaggctgccctcatgcggctattcgcgaagacatcagcataaatcttggtcctctggaggagctatcgaacttgtacaaagctgatttgctactctgtgaatctggaggaggtatatttttttacttgatccaaaataaatgtaggtcatttctattgttatgcatgttagaatctacgccggagagacaaccctgcaggttgccggcgagctcctacctcccagataacttggcagctaacttcagcagagaattagcagactacataatctacattatcgatgtctctggtggggacaagataccaagaaaaggtggccctgggataacccaggccgatctgttggtaataaacaagacagacctagcacctgctgttggagctgatctgtctgtaatggagcgagacgcacttcgcatgcgcgaaggagggccctttgtgtttgcacaggtgaaacatggagtgggcgtggaggggatcgtgaaccatattctgcaggcgtgggagatcgcgactggtaataagcggcgataagatctcacgacttggggccatatgttggatgcagatttgattcagtcggcacttccacatgcatgtgtcatctgttcgtttctcaataaattctgcgtcatttgctgctgattgtacttgacaagtagagacatggatggactcttaaaattccatccatgtgttaaatgacatattcgagacatccttttctcaataaactctgcatcatttggtgaattgcacttgagaagtaaagacatggagccttaaaa

SEQ ID NO: 146264 - DNA, 1691 bp, Zea Mays
aaacctccagagtccagcctcccttccgattccacctccaagctcccagtcccagccatggcgtctcatgatcatcaccactcccactcccacgacgaccaccaccaccattcccacggggacggcggtggccatgcggctgggggatcgtgggtaggggaggacggacgcgtgtggcactcccacgacggcctcgcgccccactcccacgagcccatctactcccccggcgacttcaccaagcgcgcgccgccgctcgcctcgcgcgacttcgctgaccgcgccttcaccgtcggcattggcggccccgtaggcaccgggtgagctcggatgctttctactacttgcttttactccttccaaattccaatctctggtaggctggtagcctacatttacatctcataattccggtgcggttacttggcggaagatgtgaaattgtggcggccggagagagacgcgcctccacgacatctgtgtgaagtttctttcgtaattcctacttgcaccggtgcaaattgcagcttaatctggggttaggtttgttcttgatggaggcttctggacatcgatgggatctttgtcgataaagcgcttgcttgtgctgattcataccctttcgttggttttgttcctgaagctccgtcctgacatttggagtggaaaactgccctcatgctagcattgtgcagatttctacgcgacaagtatagtcttgcagctgtcacaaatgatatattcacaaaagaagatggagaattcttaattaaacatggagcgctccctgaagaacgtatacgtgcagtggaaactggaggctgccctcatgcggctattcgcgaagacatcagcataaatcttggtcctctggaggagctatcgaacttgtacaaagctgatttgctactctgtgaatctggaggagataacttggcagctaacttcagcagagaattagcagactacataatctacattatcgatgtctctggtggggacaagataccaagaaaaggtggccctgggataacccaggccgatctgttggtaataaacaagacagacctagcacctgctgttggagctgatctgtctgtaatggagcgagacgcacttcgcatgcgcgaaggagggccctttgtgtttgcacaggtgaaacatggagtgggcgtggaggggatcgtgaaccatattctgcaggcgtgggagatcgcgactggtaataagcggcgataagatctcacgacttggggccatatgttggatgcagatttgattcagtcggcacttccacatgcatgtgtcatctgttcgtttctcaataaattctgcgtcatttgctgctgattgtacttgacaagtagagacatggatggactcttaaaattccatccatgtgttaaatgacatattcgagacatccttttctcaataaactctgcatcatttggtgaattgcacttgagaagtaaagacatggagccttaaaattccatacttgagtttaatggcacatttgagatatcctttttctccttaaaattccatagcttcgtggattcggtattaacgctctggactacgagtgggaggttaatagtctgcaagcccgctcagtgaatgcatgaacgctggcatgttgtgaagccgttcagtgaaagttctgaatatggaaaagaaaaaaaaaa

SEQ ID NO: 146265 - DNA, 1453 bp, Zea Mays
aaacctccagagtccagcctcccttccgattccacctccaagctcccagtcccagccatggcgtctcatgatcatcaccactcccactcccacgacgaccaccaccaccattcccacgggtgcgcgcgcgcgtgccatcgctcctagaattccgcgatctcggtcgctgtctgcacatctgactcgacgcgctcttggtgtggcatttaatttgctgcgctttcagggacggcggtggccatgcggctgggggatcgtgggtaggggaggacggacgcgtgtggcactcccacgacggcctcgcgccccactcccacgagcccatctactcccccggcgacttcaccaagcgcgcgccgccgctcgcctcgcgcgacttcgctgaccgcgccttcaccgtcggcattggcggccccgtaggcaccgggaaaactgccctcatgctagcattgtgcagatttctacgcgacaagtatagtcttgcagctgtcacaaatgatatattcacaaaagaagatggagaattcttaattaaacatggagcgctccctgaagaacgtatacgtgcagtggaaactggaggctgccctcatgcggctattcgcgaagacatcagcataaatcttggtcctctggaggagctatcgaacttgtacaaagctgatttgctactctgtgaatctggaggagataacttggcagctaacttcagcagagaattagcagactacataatctacattatcgatgtctctggtggggacaagataccaagaaaaggtggccctgggataacccaggccgatctgttggtaataaacaagacagacctagcacctgctgttggagctgatctgtctgtaatggagcgagacgcacttcgcatgcgcgaaggagggccctttgtgtttgcacaggtgaaacatggagtgggcgtggaggggatcgtgaaccatattctgcaggcgtgggagatcgcgactggtaataagcggcgataagatctcacgacttggggccatatgttggatgcagatttgattcagtcggcacttccacatgcatgtgtcatctgttcgtttctcaataaattctgcgtcatttgctgctgattgtacttgacaagtagagacatggatggactcttaaaattccatccatgtgttaaatgacatattcgagacatccttttctcaataaactctgcatcatttggtgaattgcacttgagaagtaaagacatggagccttaaaattccatacttgagtttaatggcacatttgagatatcctttttctccttaaaattccatagcttcgtggattcggtattaacgctctggactacgagtgggaggttaatagtctgcaagcccgctcagtgaatgcatgaacgctggcatgttgtgaagccgttcagtgaaagttctgaatatggaaaagaaaaaaaaaa

SEQ ID NO: 146266 - DNA, 414 bp, Zea Mays
atgcggggcggccacgggcgccccgggacggaggaggccgaagcagggggcgtgaaggctgggggcggggcgggtggtgggggcggtggcccgaagccggggcgtgggccgcgcaggggcggcggaccggggcgggttgggggcggcacggtgcccagggggcggccgggcacgaccgcgatcggggaggacgaggtggcccggtgccggaccgtgggccacgcgggggcggcagaccgggggcggggtgggggcggcgcggtgcccagggggcggggcggccgggcacgaccgcagcccgaggaggatgaggcggcggtgtaccgggcggcagtggaggcggcgacgcggggaagaagagaagaagcggtgcagggaagaagagaagaagcggcgcaggaagatagtaattga

SEQ ID NO: 146267 - DNA, 409 bp, Zea Mays
ttaacgagctacaatcctccctagattcctcgatgtctaaaaaccagctacttgaacaagaagtcaaggagctgactgataaatgttcagagcatcaagaacaagcacatttagttcagcaaagaagtctggagctggaagatctgcttcacacatcaaagactcatgctgaaggtgcatactctcggacacaggaactggagcaggagctgaacagcacatatgaaaagctcaagggggttgaagaagaacgtgagcagtacagaagcaaggcttcgcagctctctaatgatctagaagcttatcagacaaaagcagctagtcttgaagctgtggtggaagcagcaagtgagaaagagaaggagcttatggagtcattgagccaaataactgaagaaaagaagaaaaa

SEQ ID NO: 146268 - DNA, 537 bp, Zea Mays
atgtctaaaaaccagctacttgaacaagaagtcaaggagctgactgataaatgttcagagcatcaagaacaagcacatttagttcagcaaagaagtctggagctggaagatctgcttcacacatcaaagactcatgctgaaggtgcatactctcggacacaggaactggagcaggagctgaacagcacatatgaaaagctcaagggggttgaagaagaacgtgagcagtacagaagcaaggcttcgcagctctctaatgatctagaagcttatcagacaaaagcagctagtcttgaagctgtggtggaagcagcaaaatacgaagctaaacttgaagagagcttgaaggaaaagcaatctcttgaagagaacttgaaggaaaagcgatctcttgaagagagtctgcaacaagagctggtgaaattaagagaagaaaacgaacaccatcaaaacaacattgttgatctgaaccttcaactctccactaataatgacatgcacagtcaactggagacccagctaaaggagatcaattaa

SEQ ID NO: 146269 - DNA, 2668 bp, Zea Mays
cttccccaccccgcgtgagccgccgcctccccgcctcccccttcagtccgccgctctcccgcggatcgttcaccttcactccattctgaggatctcatcagcacgctctccggcgcggcggcggcccttccttcgagactaggagctcgccgtcggagtcatccccttccccaatccctgcgacgcgttcggccggtccgtgcgggaggaggacgacgatgaggcgctgcgctgggcggccatcgagcagctgcccatctacgaccgcatgcgcaagggcatcctcacgggggccgcggccggcgtcgaggaggtggacatccaggggctcggcatgcaggagcgcaagaacctcatcgagcgcctcgtgcgcaccgccgaggaggacaacgagcgcttcctgctcaagctccgcgaccgcatggagcgggttgggatcgataatccgacgatagaggtgcgttttgagaacctgaacatcgacgccgaggcctacgtcggcaaccgaggtgtccccacgatgaccaacttcttctccaacaaagtcatggatgtactaagtgctatgcacatcgtctctagcgggaagaggcctgtctccatcgttcacgatatcagtggggtcataagacccggcagaatgtgaacgtccttgctgcttggacctcctggatctgggaaaacaagtctacttctggctttggcagggaaacttgactccaatctgaaggtgtcaggaagagtgacttacaatggtcatgacatggatgaatttgtccctcagaggacatcggcatacatcaggcggcacgatgttcacgtcggcgaaatgacgacatgcttactgagctttcaagaagggagaaagaagccaacattaaaaccagatcctgatgtcgatgtttacatgaaggctatctccgtggaaggtcaggagagcgtggttacagattacatcctcaagattgcagattctgggtctggagatctgtgcggatacaatggttggagactctatgatcagaggtatctcaggaggacaaaagaagcgtgtcacaaccgacataacttgacgaaaagaatagagcacatagaaaacgttctcaatgatttgaagaaatcacatctgttgaaccagcaaagcagcagcagcagcagtaagaaagaaaggagtagcaggcatgaggatattgagtacctgtacagaagcattgagcggaaggtaattggtcgagataaggagcgtgagaagcttatcaggtctgggaagagtaccctggcacaatatgtctgtgattatgagaaggccgaaggccaacattttgaccctgtcatgttcattcatgtgtctcagacatttagggtggataagatatttcgtgacatgctgagggagatcaggaaggacaggcaatctgacagcaacagtgttaaatgcctacacgatgagctgaaggaaaatgcttcttgttggtactggatgatctctgggtcactcagtggaagtcgggttctggtgacagctcagaagaaagatgtagctgcagcgataggcgctgaggagcagatcccgattccggatatggaagagaagcagtacttttcgatgttcatgcactacgccctagaaggcaagcgtgttggtgacggaaggtttatagcaatagggagaaaaatcgcgaaaaagctcggcagatcacccattgcagcagtcacagtggcagcacggcttcggagcaacagcagcatcgatttctgggagacaacagcgaaccttgacatgttggacgaaacaatgggagctctgtggtggagctatcagcagataggtgtagacgtccggcgatgctttgcatactgcagcacttttcccagaggatacaggttagtacgaggcgagttggttcacatctggatagtgcaagggttcataaacaccagggttaatgcaactgagcaaccagaagatataggcctgcactacattaacgaactgcggaccttctcatttctgcagatagaaagaacagtttttggcactgaaacggaggcgttcacgattcatgacctgctacacgagttggcagagagggtcagcggaagcgaatgcttcagagttgtttcaaatagctcaccaaaacatattccgcaggaggttcgccatctctttgttggcactgggactgacagtagagcagctatcgcaaagaaaattctaggtctggtaaatctacgcactctcatcatcgtcgaagagtacagcgaaaacaagaggaaaacatttgcagctgaagatgatgaggaacgtgtggagcttattttcccaagcacatttagcaaactttaccatatgcagagcatatatagtgagaaaatttcctgcgccaaagacgtgacacaaaatctcacttccttgcggcacagctcttcgtcgtggatgggatttgcaaacgttggcaggctgacgtcgctccaatcgctacggtacttccaagtgaagagagaacaggggcacgaactgaagcagctgaagcacctgaacaaccttcgaggcactctggcgattgacggtctgggggtcgtcagaagcaaagaggaagctcttgaagcacacctagccagcaaggaacaactaaggaaactggagctgacattctctgtccgttag

SEQ ID NO: 146270 - DNA, 3138 bp, Zea Mays
ggggaagggttttggaattaggccgccggacgccgttgcgtgggagagagcaaagtgaaccaggccgaaaccgaagctaccgccacgaccaccacccgcgcccactgcagcaacgccggaccctcgtctccctgtccccgactaccaggaggagatcccggcggcgaggatgagcggcggcggtgccggagggaagggggcggcggcgcccgtcccggccgggtcgaggaaactggtgcagtgtctcaaggagatcgtgaaccgacccgaggcggagatctactccgcactgcgcgagtgcggcatggaccccgacgaggcggtcagccgcctcctctcccaagatactttccaagaggtaaagagcaagcgcgacaagaagaaagagattaaagaggttcctgagacaagatatcgatcggcaaatagttctactaatcgaagccttagaagtggtgcagatcgtggtggacgtagcaattctgtgcactccagctctactgataacatgacctcaaggccaccagtctcagggtcttgtacggcatcagttaattccaatcaaatgcagacaattgcaagttcctctgcaaacaaacatatggttactgatggactagctgtatcattgcaatcatcgtgtgggtttcagcatggtggttggtctgggacacctggtcagttgtcgatggttgacattgtgaaaatgggccgccctcagggaaaggcttctagcaaacctgtggtcacagctgacagaggttatgctggacagtacccatctttgccaagcacaaaccagaacctcaaacaatctggaagcatggtttccccagcagagcttgacaaggggttacaacctgcccacaatttggttcaggttaagaatcatggtcattttactgctgatagcaagctcccatatggtactgattggtctccacaagacgacccaacatctgagaaccaatcttcccagcctgagacgtctggtgatccatctttgtatgaatcatcatttcagtcatctacattggttactgatgtagttaattcacatgaaaattcacacttggagttggatgaaaacagcacctttgcaatgagatcaacacctgcctctgagagacacttggaacctagtgacagtattcctgaatacaatgatggaatattaaacaactcaagttcatatcagcctcataattactcttacacagaacaagatgttgaggattccagtgctgatgtatcagcagcagcagaaaatttccagagtttaagcctacataatgatgagttagctgcaaaaaagactgctgaagataaccctgcagtgataattcctgatcatttgcaagttaccaatacagaatgtgttagtttgagctttggcagttttggatctggtgcattttctgggctactcccacaaaagaccactgatagcaatgtggaattccttgttcaagaggattctgcaacagtagatccaatagatgccaggaatcaagattactatgaaagtggtgcagtaacttcaccagcagaagaaaatcttgaggccatgctaggaactaacatggagaatgtcgatgcaccttctgtttcacaggctaatgagctcagtcaggacgtacttgatccttctgtacttaaatatgacgtgtcatcagtttcaagtcatgcttattcgaacatgaacactccacaacctagcacaatagaggacccacaaggaaacaaccaagcacatacgctttcccatttgtcaaacatgatgcaagcaaatcctttgagcactagcagcctattggcgtcaaatcaaaatcatccatctcttcatggcttagagtttgatttgccttatcttgaagcaaaatataacgcaggcacgactacaaatcctagaccagccatatccatgcaggaggccctgaaagcaggggttttctccaacgctcggtctacgcagtctcttccaagtactagcattccgacggggcatcctctccctcagcaattagcacatcacccttactctcagccgactttagcacccatcacacatttcccaaatatcgttggctatccgccgtatttgccacaaaactatgctgcttacctatcttcgggcaccttccagcaagcatacccgagcaatggagcattccatcagtctgctgccgctttgctcggatctggtatgaagtactcggcccccgagtataagaacaacctgtctgccacaggcttacaacagcaacatcagccacaaccgcaaccaccttcatcagtcatctctggttatggaggccttggaagctcaagcaatatacaaggaaattttacccttaatcagagtactggcactggatcaactcttgtgtttgatgatgcattgggcagacagtacaaagacaccagtcaacacatagctctccagcagcccgacaactctggaatgtggcttcatggctctggttcaagagcggcggcgcttccgcctaaccacttttatggttaccagggacagagtcagctgggtggctttggtcaggcgcagcagcaacagccttcccaattcggaggccacgggtacccgactttctaccagtctcagggtgggctgacacaggagcaccacccccagaaccttgctgagggcagcctgaatggcttccaggtcgcaccgtctcagccgtctcatccgagctggcagcatcagcacacctactgagcattgttctcccttgttatggtctgtctctttcgccgtcacaagccaagtttcgcgtgcttgtgcccttactcgatgcagagtaagctgctcggattttagctgagcttgtaccttcagcgctgagaagggtcccaggacccaggcatacaacagttagagcgttttaacatgctgcgtgcgtgcgtgtgtgtgtgttgccagaccgatgccttgtggtttttcgatagcgagttatatgtgcggaggcgcagtcatgtataactgagacatgataacataacaaccaatcgtttcgcttgcatttttttggtcatgcacacatgcggttatcgcttcaggaagaaaaaaaggagcacctctgactcagcttatggattataaatattttcaatctc

SEQ ID NO: 146271 - DNA, 670 bp, Zea Mays
ctaaccaaggtccctagacccccgcgtcgacggcgcgcgcagcgacgcgacgggggtccttgttgcgggtcgcgctggaaggaagcagcccgtcgaaccagaacgcccgcgtcgccgcgcgcctctccgctgaggagaggcagcgcctcctcctccgcggcgccaacgccctgggctcggccggcggcgacgacgactccgacgtcatcgcgctcaataactacatgaacgcgcagtactttggggagatcggcgtcgggacgccgccgcagaagttcaccgtcatcttcgacaccggcagctccaacctctgggtgccgtcctccaagtgctatttctcgatcgcttgctacttccactcgcgctacaagtcagggcagtcaagtacttataagaagaacggtttgactcttcctttttcttgataccgtattttctctatttgctcactgtggattgagatctgccattctgcctgacttattctcatatgttttttttttctttcccatctatagtgctcccatgttatatgatcatgccatattaaaattcgtgttcttgtgaagggaacacacacaaatgacaatatatgttgaaagcatgacaagatgtgaaaaaactaaacttatatatcgggcatcattctatgaccatacatagaatgacg

SEQ ID NO: 146272 - DNA, 1515 bp, Zea Mays
ctaaccaaggtccctagacccccgcgtcgacggcgcgcgcagcgacgcgacgggggtccttgttgcgggtcgcgctggaaggaagcagcccgtcgaaccagaacgcccgcgtcgccgcgcgcctctccgctgaggagaggcagcgcctcctcctccgcggcgccaacgccctgggctcggccggcggcgacgacgactccgacgtcatcgcgctcaataactacatgaacgcgcagtactttggggagatcggcgtcgggacgccgccgcagaagttcaccgtcatcttcgacaccggcagctccaacctctgggtgccgtcctccaagtgctatttctcgatcgcttgctacttccactcgcgctacaagtcagggcagtcaagtacttataagaagaacggtttgactcttcctttttcttgataccgtattttctctatttgctcactgtggattgagatctgccattctgcctgacttattctcatatgttttttttttctttcccatctatagtgctcccatgttatatgatcatgccatattaaaattcgtgttcttgtgaagggaacacacacaaatgacaatatatgttgaaagcatgacaagatgtgaaaaaactaaacttatatatcgggcatcattctatgaccatacatagaatgacgcatggtcatgaattgaatgctaaatttactccgtttgagcagagacacattttcttcccagttctaacatcacaaattccctttttattttttgctcatgtaatgctgacagtttacaaaatcctactttctttggtctgcctgctgcatgccctactttgtatttctagaatatttacggtaaaacagaaatttcatcattcatggttggcaacatcaaaacaaaatctgtggtagcttggtaatcggaacatctatgaaaaggacattaaaagcacctgatgtagatgcagtgcaaatttgtgtagatgtagcgatgtggagccagcattcaggaatgatgacgacattttgcagtagctttcttttttgggcttgattatgactccttgaattcaatggaaacactagaagttggtataataataacttcagcgtgtgactctagcacaccttactctggaaatagtcagccttatttttcttgtagcatggatattgaaaggtttgccccttcttggaatgtatatgaccttgttttatcatactagttatttttttaaaaataatctttttagtccaagcaaattgaggtatgctatgtttcaaaggcgtctcctaggtgtccaggagtacccagctcgccttgggaaaccgtggcgccttgtctcctaggcatccaggtggacacaacactcgcctggatgcctaattaccttttaaacactatgctagatatgaaacccaacacgagccaccaggaatgtacaataaaaaagaagataaaaatcataaaacctccagctcttcgtattgggctttatgtatgatatttgtttgttctg

SEQ ID NO: 146273 - DNA, 1232 bp, Zea Mays
tatgggtgatgtcctggttgatggaaagtccactgggttttgtgctggtggttgtgcagcaatagcagattctggaacttccttgcttgctggccccacagccattattactgaaatcaacgaaaagatcggtgctgctggtgtagtcagccaggagtgcaagactgttgtttctcaatacggacaacagatcctagatcttctgctagctgagacgcaaccagcgaagatctgttctcaggttggcctgtgcacttttgatggcactcacggtgttagcactggaattcgtagcgtagtggatgacaaagctgggaaatcaaatggtggtctcaagagtgatccaatgtgcaatgcctgtgagatggctgtggtatggatgcagaaccaactggcccagaacaagacacaggagctcatcctgacctacattaatcagctttgtgagcgtcttccttctcccatgggagaatcagccgtggactgtgccagtcttgggtccatgcccgacattgcgttcaccattggaggcaagaagttcaagctgaaaccggagcagtacattctgaaggtcggtgaaggacaagctgcccagtgcatcagtggattcacagctatggacatcccaccacctcgtggccccctctggatcctgggcgatgttttcatgggagtctaccacaccgtcttcgattacggcaagctgagggttggcttcgcggagtcggcctaaggaacgtatggtttggcgcctcctccagaggaggcaaaacgcatgcgccgagagaaaagcttcgcttgtttttaacttgtgtatttatgcggccggcggtgtgtgtatatatgctacatgtttagtgatgctttccgagacctgagacaatgcccgtctgttttaacctggcacaaggaaatttctcgatgtgtttgccaagccaatcttgtacccaattgtcaccgtgcatcctggcaacgtgtactcaaagtatttttccttgtgttatgcgtgagatctggctgatcttcctctagtccatatcgacgggaaggtgtcggctcttcgccatctagattcacgtcaggtctccgtttcggcctgatccggccgttccaggagtcttttcggctggaaaaaatattcagtttggaatccactcctttttggctggaaaaaatattcagtttggaattcgctttgagctgttcgtttcaactcgaaataaaaatgaaaa

SEQ ID NO: 146274 - DNA, 1833 bp, Zea Mays
atggactcctcctacctgggaaagcgcaagctggacggcggcgagagggagccgcccgcggctgcgttcctcccggccgtcgcgctcgggtacgagtacgagtacggcgacgcggaggcggtggaccaccggccctgtcgcgcggcggcgggcgagatggacttcttcaagaaggaggagaagagggagaggaaggctgccgccgccctggtgccgtcggacgaccttggcatcaaggaagatgaagtcacaatcaacatgggtctgcaccacgtcgacaggaggaagagcagtagcgaggagtccatcgtcatcgacgacggcgtatcctccaacgatgtcgatcacagggaggccaaagctgagctggcactagcaaaatccgagcttggacgcctgaacaacgagaacaagcagctcaacgaagagaacaagcagctcaacgaagagaacaagcagctgaggagtatgctcagcaggctgaccaccagcttcaaccccatccagaagccgtcgatgcagatgcagttactctcactgatgcagcagcaagcgacccgtacccatcgaggccttcgtggagctccaggccatgagccgatgtacgccgatccggagaagaaggacgaccagaaggcgagccgcggtggcgcccacacgctcccgcagcagttcatcagcgtcggcaccgcgcccgacgacctcctgcgctccgtgggctcgcacgcactgcgcggcgacgactgctcggcgtcgaccagcaacgcggagccgcctccaccgcccatggactactgctctgctggctatggcaaagggctcatggccagtggtaaggacatgatgccgctgccggcgttcgagctcggcaaccagcagcacctcgctcacgagaggggcagcagcccggatgagccgccgccgcaccacttggcggcgcagcagggctggctctccaacaaggcacccaagttcctccccggcaagggcctcgagcctgtcgtccccgaggccgccaccatgcgcaaggcccgcgtctccgtccgaacccgctccgaggcagccatgatcagtgacgggtgccaatggaggaagtacgggcagaagatggccaagggcaacccgtacccccgcgcgtactaccgctgcaccatggccgccgcctgcccggtccgcaagcaggtccagagatgcgccgaggacacgacggtggtggtcacgacgtacgaggggaaccacaaccacccgctgccgccggcggcgatgccgatggcgtcgacgacggcggcggcggcggccatgctgctgtccgggccgatgccgagcgcggacggaggcagcctgatggcggggtccaacttcctggcgcgcgcagtgctgccgtgctcctccaacgtcgccaccatctcggcgtcggcgccattccccactgtgacgctggacctcacgcagccgcagccgccgcctgcggcacggacgatgggaacggagccctcactgcagccccaggccgcgctcaccgacgatgcgggccggccggtttcgctggcgacgcagctgttcgggcagaaggtgttcggcccctcctccaatacccccgccgccgcgcagccgcagccgcaggcggacgcggcgggcgacaccgtcagtgcggcggccgtgatcgcgtccgacccgaacttccccgcggtgctcgctgcggctatcaagtcgtacataggcggcagcggcggtgccggcgtgatcagcgggacgatcgtgctgccgcctgcgccgtcgagcagcgccggcgatagcaccagagaggacagggtgggcgagcaggggagatga

SEQ ID NO: 146275 - DNA, 2978 bp, Zea Mays
aaaaccatctccaaaaccctagcccccatcccctcgctggaaagtctcgtcggcggccgcggagatgggcaaggcgaaggggaagcagcgtcaggacaagttctaccacctagccaaggagcaagggtatcggagtcgcgcggcgttcaagctgctccagctcgacgcgcggttccgcttcctcctgacggcgcactcggtgctcgacctctgcgccgcgccgggagggtgggttcaggtggccgtcaaccatgccccagtcggagccttcgtcgtcggcgtcgacctcgttcccatccgccccattcgcggggcccactcgctcaccgaggacatcaccaccaccaagtgccgcgccgcggtgcggaggctcatggactccaatggcgtctccgccttcgacgtcgtgctccacgatgggtcgcccaacgtcggtggtgcctgggcgcaggaggccacatcgcagtcggcgctagttattgacgcactgcgcctcgctaccatgttcctcgcccccaagggcgccttcatcacgaaggtttttaggtctcaagattacaacgctattatgtactgtcttaaacagttgtttgagaaggttgaggcaactaaacctacggcaagtcggtctacatctgctgaaatttatatcatctgtctgaaatataaggctcccgcaaagattcaaccagaacttcttgatataaagcacttgttcagtgtggttccagaacagaccaaatctagggatgttatggatggtaggaaaaagagacaccgtgatgggtatgaagaagggaatacgacattacggaaagttggtttggcatctgattttatatggtctgatgcccaggcgccactggagtttttgggctcttacaatgcaatttcatttgataatccagaatccctgcccataaagaatcatgagcttacaacagatgatataaaaaatttctgtgaggacttacttctgttggataaaaatagtttcaagcatatcttgaaatggcgtattcgcttacgaaaagcactgtcagtgtcttcacaagtcaccctaaaggccaatgatgctgtggagaacacaaaggtcatggatgatgatgtacttctacaggaaatggaagaattgaccagtgttattgatagaaagaaaaaaagagagaaaaagcgtttgtcaaagcgtcgagcaaaggataaagcacgcaaggccacaggaatgcagattgatgctacaggagatgattatggtgatcctgacttgttttctattagtgtaatcaagggtggaaaagaacttgaagctgttgaatcagcagaggttgatgtgcaaaatgaaattggagacagtgagaatgaggatactcaagctcgtgaacactctgatgaggaaatggattctgatgaggaacagcagaggtatgatgcccagcttgaggagatgcttgatgaagcttatgagcgctttgtaactagaaagggtggtgaaattaaacaagaacgcaagcgtgcgaaacgaatcaatcctgacgctgatgcagacttgttagagggaggtgaagatgatggtgttgctgaaatggatcaagattttgatgaagaccaagatcttgatgaacatcaagatcaggagaccaatccccttctgttagctctagatgaacagaggccaactaaagagcagattgtaaagcaaatgagtgacactgaagatgaaagggagagtttgcaaaggaatatgaagaagatggttactggcaaaacggaaaaagtggctaaagcacagcgtttgcaacgagatgatattgagattgtaccagcagaacctgtccgagatgaagaggatacgtcttcatcttctggtgaatcagatgtttcggaggatgaactcgatgattacagaaaggctgaagtactagcctatgctaagaagatgctgaggaagaaacagagagagcagatacttgatgatgcttacaacaagtacatgtttgatgatgaagggttacccaactggtttgttgaggatgaaaaaaggcataggcagcccatgaagcctgttacacgtgaggaagtagctgcaatgagggctcagtttaaggagatcgatgcccgcccatccaagaaggttgcagaggccaaggcccggaagaagcgtgttgccatgaagaaactggacaaggctcgccaaaaggcagatgctatagctgaccagaatgacataaacgagctatcgaagaggaagatgattgaccggatttacaggaaggcgatgccaacgaagcctcagaaggagtatgtcgttgcaaagaagggggttcagttgaggactggcaaagggaaggtgttggtggatccacgtatgaagaaggacaagcgggccagcggaacttgtaagaaagggaagaagggcggcaaaggcggcaaggggaagggtggtcagaaaggcatgagagggaaaactgggaagaaggccgggaaagccccgagttaaggaagatgaggagctaagcacggctgggatgctggatgccttcctcccagctaattttttgtctcgtcctactacagctactctcagtaggcagatgctttgaagtcgtgtgatgataaaatttatgtgttaagttttgtagcgtgagttatcatggctacaatttgttctgaaactagtggtcactaatcttaatttacacagttcagtcaattatcaaaactttttaacccctttggcgacaccagagtataagaaatacagatgcctgcatttctactaatatttgtgtggcgcacccttgtggagacttcttttttacaggtgaggaatccgcttgcatttccttatcagatgaaatgaaggcagcactttgagggcgtgttcggctggctacaagccgacactgttgcagctgtttggactgctgcagctgcaatccatagagagaaaaatactgtagaagccgcagccgcagccg

SEQ ID NO: 146276 - DNA, 658 bp, Zea Mays
aaaccataagagcttctgaagagcgaaatacttcagtctagacactagatacagtaagccttagcgcaccaacagaggatacttcaaatatgtctgcctcgcggagctcctctcccaactccatgtcacagtggagccagaaagagaacaagatgtttgaagaggcactcgcctactatggcgagggcacacccaaccggtgggacaaggtgtccagcgccatgggaggcatcaagtctgccgaggaggtgcgctgccactatgaaaatcttgattacgacgtcaagatgattgagtcaggcaatgtgccgtaccccaagtacaagacacagggattctggacccgaggttaaaaaatgttggaggctcaaagaggcagaaaacaaagctctacggatccaagaaggaaccaaaggaaatccagctctggttggagaataaaatgatgaaccagtgtgtatatgtcaatatgtgtatagtatagtttatgatcaagtttatgtctgtctacctgtggttgtaggatcctagtgtacataagattgataaccacatgtattcattgtccccttgaactaaagttatggagggtgtaaagtctaaaagtcatgtatttatgcaaattaaaaaaacaatgcctcgtagcattcgttgcctc

SEQ ID NO: 146277 - DNA, 1915 bp, Zea Mays
ttcaatggaggtggtgggtctcccccgtttcgtctcctgccattcgtcctcctcctcccctgtctctctctccatccatccaatcccacctggagaaaaacgagacaaatcaaatctcgccgcgagttgggcgctgagcgcgggcgccatggcgagcaacagcgcgcccggcgccggctacgagtgcggcagcgacaacgacggcgggctgcacaagccgctgctgcccaacagcgggagctgccaacggacggggtcgcgccagcccagcctcaacgccgccggcacctcctccagggccgtcctgcgcgagtcccacgtctccgccttcctctgcacgctcatcgtcgcgctcggccccatccagtgcggcttcacaagcggctactcctcgccgacgcaggacggcatcatccgggacctcaacctctccatctccgagttctcggcgttcggttcgctgtccaacgtgggcgccatggtcggggcgatcgccagcggccagatggccaagtacattggccggagagggtcattgattattgcagcggttccgaacatcatgggctggcttgcaatctccttcgcgaaacacacttcgtttctgtacatgggacgattgcttgaaggatttggtgtcggtgtcatttcctatgtggtaccggtatacatagcagagatatctcctcagaacatgagaggagctcttggcgctgtgaacccgttgtctgcaacatttggtgtcatgtttgtctatgtgcttggcttgttttttccttggaggcttcttgcattaataggaacgttgccctgcttatttttgatacctggcctattcttcattccggaatctccaagatggctggcaaggatgaataggatggatgattgcgagacttctctacaagttctcaggggattcaatgctgacatcactgcagaagctaatgatataaagatagctgtgacatcagcaaacaaaagtggtacaataagttttcaagagttgaaccaaaagaaaaaccgcacgcccctaattctaggaattggcctacttgtgttgcaacagctaagtggaataaactgtatagtattttattcaggtagcatcttcaaagctgcagggctcaagaacagcaacttggacgcatgtgtacttggagctctcgaggttcttgccactggtgttacaatcacgttcttggacagagctggccggagaatcctccttattatatcttcttgtgggatgaccctaagccttcttgcggttgctgttgtattttacatcaaggataatatttcacatgattctgacatgcataacatcttaagtatggtgtcgttggttggtgtcgtggcttatgtcattgccttctgcttcggcatgggtgccattccatggatcattatgtctgaggtatagtacctcaacacatgagatgcttgagacacatgctgaaagctctctgaacgaagggattattctcgaaactttgcatatcgacagatccttccggttagcatcaagagtgtggcaggaagctttgcgaccctagccaactggttgacatcctttgggataacaatgacagcaaatttgctcttgagctggagtgctgcaggcacatttgcctcctacatggtcgtgagtgcgttcactctaatgttcgtcatcctctgggtgccagagacgaagggaagaacccttgaggagatacagtggtccttccagtagtgagctgcagcagcattcatcagtaaatgcagtcatcagcaaggtctggtctgagctgctgtatgtggtgtggcggcatttcttcttctttttgtactgcaatctcttctgtggcatcatttggtgtgtaagtttcctgcatgacattgatagtagggattaacttgcatttgtgac

SEQ ID NO: 146278 - DNA, 2126 bp, Zea Mays
ttcaatggaggtggtgggtctcccccgtttcgtctcctgccattcgtcctcctcctcccctgtctctctctccatccatccaatcccacctggagaaaaacgagacaaatcaaatctcgccgcgagttgggcgctgagcgcgggcgccatggcgagcaacagcgcgcccggcgccggctacgagtgcggcagcgacaacgacggcgggctgcacaagccgctgctgcccaacagcgggagctgccaacggacggggtcgcgccagcccagcctcaacgccgccggcacctcctccagggccgtcctgcgcgagtcccacgtctccgccttcctctgcacgctcatcgtcgcgctcggccccatccagtgcggcttcacaagcggctactcctcgccgacgcaggacggcatcatccgggacctcaacctctccatctccgagttctcggcgttcggttcgctgtccaacgtgggcgccatggtcggggcgatcgccagcggccagatggccaagtacattggccggagagggtcattgattattgcagcggttccgaacatcatgggctggcttgcaatctccttcgcgaaacacacttcgtttctgtacatgggacgattgcttgaaggatttggtgtcggtgtcatttcctatgtggtaccggtatacatagcagagatatctcctcagaacatgagaggagctcttggcgctgtgaacccgttgtctgcaacatttggtgtcatgtttgtctatgtgcttggcttgttttttccttggaggcttcttgcattaataggaacgttgccctgcttatttttgatacctggcctattcttcattccggaatctccaagatggctggcaaggatgaataggatggatgattgcgagacttctctacaagttctcaggggattcaatgctgacatcactgcagaagctaatgatataaagatagctgtgacatcagcaaacaaaagtggtacaataagttttcaagagttgaaccaaaagaaaaaccgcacgcccctaattctaggaattggcctacttgtgttgcaacagctaagtggaataaactgtatagtattttattcaggtagcatcttcaaagctgcagggctcaagaacagcaacttggacgcatgtgtacttggagctctcgaggttcttgccactggtgttacaatcacgttcttggacagagctggccggagaatcctccttattatatcttcttgtgggatgaccctaagccttcttgcggttgctgttgtattttacatcaaggataatatttcacatgattctgacatgcataacatcttaagtatggtgtcgttggttggtgtcgtggcttatgtcattgccttctgcttcggcatgggtgccattccatggatcattatgtctgagatccttccggttagcatcaagagtgtggcaggaagctttgcgaccctagccaactggttgacatcctttgggataacaatgacagcaaatttgctcttgagctggagtgctgcaggcacatttgcctcctacatggtcgtgagtgcgttcactctaatgttcgtcatcctctgggtgccagagacgaagggaagaacccttgaggagatacagtggtccttccagtagtgagctgcagcagcattcatcagtaaatgcagtcatcagcaaggtctggtctgagctgctgtatgtggtgtggcggcatttcttcttctttttgtactgcaatctcttctgtggcatcatttggtgtgtaagtttcctgcatgacattgatagtagggattaacttgcatttgtgacaaattagttgatagtgataggatccctttttgacgtccccatatcctccgtgtggcggcatgggatgtcaaaaggaaagggatggagttttctcgcttttggtgtagcaggcctccctttggtcaagtagtcacagacccattttttttttgtcattggattggatacgttacagggttcgctcaccacccacactcgagactgttcattaagtttactcttatggagatgatcgagtggaagttggataaggattggagtcggatgtatcaggtgccaaggaatccttgtattcggtaaa

SEQ ID NO: 146279 - DNA, 2207 bp, Zea Mays
tctgcgctctgacattcgcctcggcctctctcggccggcctcttcgtttcctcctcccagccgaccggccagccagccagacccacccaccgccgatccccacgcaaggggaacaggagaggaaacaaacccagcctcgtacgcggaaggcctgcctggtgatcgacgatcgtcgtgctcgtggtggcgggtccggcgtgcgagcgagcgagcgcggcgcgcatggcgagcgacggcgaccacggcggcgcgctgcagaagccgctcttgccgaaggcgcccaggagcgggggctggttccggaaaggtacgagcacggcgcgcctcggcgccgccgctgccggcacctcgtccaaggccgcagcgctgcggccgccgcaccacgtgcccgcgctactctgcacgctcgtcgtcgcgctcggcaccgtccagttcggcttcaccagcgggtactcgtcgccggcgcaggacggcgtcacgcgggacctcgacctctccatctccgagttctcggtgttcggctcgctgtccaacgtgggcgccatggtcggggcgatcgccagcggccagatggccaagtacgttggccgcagagggtcactgatgattgcggcggttccgaacgtcatgggctggctcgcgatctccctggcaagggacacttcgtttctgtacgtggggaggttgctggaaggattcggtgtcggcgtcatctcctacgtggtgccggtatacgtagcagagatatctcctcagaacatgagaggagctcttggcgccgtgaacccgttgtctgcaacctttggtgtcgtgtttgccgatgtgcttggcttgttttttccttggaggcttcttgcgttaataggaaccttgccctgcctactgttgatacctggactgttcttcattccggaatctccaagatggctggcaaggatgaatatgatggatgagtgcgaggcttctctacaagttctgaggggggtggacgctgacatcactgtagaagcgaatgatataaagatagctgtagcatcggcaaacaaaagtggtgcaatgagctttcaagagttgaaccagaagaaataccgcacgcccctaattctaggaatgggcctacttgtgttgcagcagctgagtggaataaacggtataatcttttatgcaggtagcatcttcaaagctgcagggctcaagaacagtaacctggacacatgtatacttggagtgattgcggttcttgccactgctgttacgaccaagatcttggacagggctggacggagaatcctccttatcatttcttcttttgggatgaccctaagccttcttgtggttgctgttgtattttacatcaaggacaatatttcacatgactctgacttgggtaacaccttaagtatggtgtccttggttggtgtcttggcttatgtcactgcctactcctttggtatgggtgccattccatggatcataatggctgagatccttccagttagcatcaagagtgtggcaggaagctttgcgaccctagccaactggttgacatcctttggaataacaatgacagcaaatttgcttctgtcctggagtgctgcaggtacatttgccttctacatgatggtgagtgctttcactctcgtctttgtcatcctttgggtgccggagacaaagggaagaactctcgaggagatacaatggtccttccagtgagctccagtatttcatctatatatatgcaaatagcgtggcaaatcctccaggatctataaaaagatatagtgaaatatagcagaagctatttcatttagcaattttatagtttaaatgaaattggctattgattctgcatgaaaacatgtaaacaaggaaatttgatgaacataatactcaaatatatgtacagggatgtaaatgaagatgtctctcgatccattacttgacattcgttaaatcaatcgacataccgaagaaccaaaacatgtgaccatagaaggtgaataagagtcaataaaaaaatctttacacaagacaatcagcttgctttctaaatcttcacacaatctcccaaaacacaaaaacttacaaactgtatgctctcaaaccaacaagtgattagatatactcggtgatgaccgacaaacacagcaaaataatagaaccaaccaaaaccaagtacatgggtgaaacttaataaaaataaaaaa

SEQ ID NO: 146280 - DNA, 2961 bp, Zea Mays
tctgcgctctgacattcgcctcggcctctctcggccggcctcttcgtttcctcctcccagccgaccggccagccagccagacccacccaccgccgatccccacgcaaggggaacaggagaggaaacaaacccagcctcgtacgcggaaggcctgcctggtgatcgacgatcgtcgtgctcgtggtggcgggtccggcgtgcgagcgagcgagcgcggcgcgcatggcgagcgacggcgaccacggcggcgcgctgcagaagccgctcttgccgaaggcgcccaggagcgggggctggttccggaaaggtacgagcacggcgcgcctcggcgccgccgctgccggcacctcgtccaaggccgcagcgctgcggccgccgcaccacgtgcccgcgctactctgcacgctcgtcgtcgcgctcggcaccgtccagttcggcttcaccagcgggtactcgtcgccggcgcaggacggcgtcacgcgggacctcgacctctccatctccgagttctcggtgttcggctcgctgtccaacgtgggcgccatggtcggggcgatcgccagcggccagatggccaagtacgttggccgcagagggtcactgatgattgcggcggttccgaacgtcatgggctggctcgcgatctccctggcaagggacacttcgtttctgtacgtggggaggttgctggaaggattcggtgtcggcgtcatctcctacgtggtgccggtatacgtagcagagatatctcctcagaacatgagaggagctcttggcgccgtgaacccgttgtctgcaacctttggtgtcgtgtttgccgatgtgcttggcttgttttttccttggaggcttcttgcgttaataggaaccttgccctgcctactgttgatacctggactgttcttcattccggaatctccaagatggctggcaaggatgaatatgatggatgagtgcgaggcttctctacaagttctgaggggggtggacgctgacatcactgtagaagcgaatgatataaagatagctgtagcatcggcaaacaaaagtggtgcaatgagctttcaagagttgaaccagaagaaataccgcacgcccctaattctaggaatgggcctacttgtgttgcagcagctgagtggaataaacggtataatcttttatgcaggtagcatcttcaaagctgcaggtaagctgtgcacttgtttactggcttgtggttttcgtctactagttgagcatcataactttagcaatggattttttactccttccaaatttgactggagcagtagggtattacggaactgtttagctgtttactgaataaaaagcgtcagtctctgtttggcaatatgcattttttacacatataggaatagtgtagtagattacaaatatcaaaagagttaaaatggagtaaagtgatcttacttttctcaaggcctagcgcattatagtatgtttttttaaaaaactaatgtattagtccccttgtaagttgtaacatggtttatcattctctgctttgatgaatgttgccattttattgtttgttccaagttctcctctgcatttgtctacaacagtgccggttaaccttgttttgactgtgagttctaacaatcaaagctctccagggctcaagaacagtaacctggacacatgtatacttggagtgattgcggcaagtacctaatgactaaatagacctgatctagtctcccaatgttttttcattaatcttctgacaacattccatcaggttcttgccactgctgttacgaccaagatcttggacagggctggacggagaatcctccttatcgtaacgtctgcttccctctaaagccactaatctgtggttcttctgtagcttaacttaactatcacttcaaattacagatttcttcttttgggatgaccctaagccttcttgtggttgctgttgtattttacatcaaggtaagttcaactttctttgcaaaattgtaatctagtatactgatgcaatacatggtttatgaacattttgacacgaagtgttgttgcagggtctcacaacacatttcactgaatattcttcttttttgtcatgggctattcgtttcaggacaatatttcacatgactctgacttgggtaacaccttaagtatggtgtccttggttggtgtcttggcttatgtcactgcctactcctttggtatgggtgccattccatggatcataatggctgagatccttccagttagcatcaagagtgtggcaggaagctttgcgaccctagccaactggttgacatcctttggaataacaatgacagcaaatttgcttctgtcctggagtgctgcaggtacatttgccttctacatgatggtgagtgctttcactctcgtctttgtcatcctttgggtgccggagacaaagggaagaactctcgaggagatacaatggtccttccagtgagctccagtatttcatctatatatatgcaaatagcgtggcaaatcctccaggatctataaaaagatatagtgaaatatagcagaagctatttcatttagcaattttatagtttaaatgaaattggctattgattctgcatgaaaacatgtaaacaaggaaatttgatgaacataatactcaaatatatgtacagggatgtaaatgaagatgtctctcgatccattacttgacattcgttaaatcaatcgacataccgaagaaccaaaacatgtgaccatagaaggtgaataagagtcaataaaaaaatctttacacaagacaatcagcttgctttctaaatcttcacacaatctcccaaaacacaaaaacttacaaactgtatgctctcaaaccaacaagtgattagatatactcggtgatgaccgacaaacacagcaaaataatagaaccaaccaaaaccaagtacatgggtgaaacttaataaaaataaaaaa

SEQ ID NO: 146281 - DNA, 261 bp, Zea Mays
atgacggaggagccgctggcgctggatttggtggcgcggcacgggaagcgaagcgatgcggtttggcgcgtgtgcccgcgcgcatgtctgcctccgtgtctgccgcaacctccaccggcgaccggccactgggctctgcaggctgcatgcggcagtgccggcgcggtcaagggtcaaaaggccggcgagggcggccacgtgaaacgggagcagtctcccaggcgttcgcgctccgacggccggctgctggccgcaaaataa

SEQ ID NO: 146282 - DNA, 1464 bp, Zea Mays
aaaaacttctcggcggggtttctgcgctcgcctctagctcagccggccggcctctccgattcctcttcctccgtgcctcccactcagccggccggccagacccacccactgcctggtgatcgtcgtgctcgtggtggcgggtccggcgagcgagcgcggcgcccatggcgagcgacggcgaccacggcggcgcgctgcagaagccgctgctgccgaaggcggccaggggcgggggctggttccggaaaggtacgagcacggcgcacccgtccggcctcagcgccgccgctgccggcacctcgtccaaggccgccgcgctgcggccgacccaccacgtgcccgcgctgctctgcacgctggtcgtcgcgctcggccccatccagttcggcttcaccaccgggtactcctcgccagcgcaggacggcgtcacccgggaccttaacctctccatctccgagttctcggcgttcggctcgctgtccaacgtgggcgccatggtcggggcgatcgccagcggccagatggccaagtacgtcggccgcagagggtcactgatgattgcggcggttccgaacattatgggctggctcgcaatctccctggccagagacacttcgtttctgtacatggggaggctgctggaaggattcggtgtcggtgtcatttcctatgtggtaccagtatacatagcagagatatctccacaaaacatgagaggagctcttggcgtcgtaaacccgatttcttcgtctgggatgactctaagcttgctcacggttgctgttgtattttacatcaagggcaacatttcacatgactctgacttgggtaacaccttaagtatggtgtctttgattggtgtcttggcttgtgtcactgcttactcctttggtatgggtgccattccatggatcataatggctgagatccttcctgttagcatcaatagcgtggcaggaagctttgccacccttgccaactggctgacatcctttggaataacaatgacagcaaatttgcttctaagttggagtgctgcaggtacatttgccttgtacatgatggtgagtgctttcacggtcgtcttcgtcatcctttgggtgccagagacaaagggaaaaaccctcgaggagatacaatggttcttccagtgagctctagcatttcatctttatatgcaaatagcgtggcacatcctctaggatctataagaaaatatagtgaaatatagcataatcaatgtcatttagcaattttagtgtttaaatggaatttgctattgttttcgtaagaaaaactataaatattgaaattttataaaaatattactcaaatatatgtacgaggatgtaaaagaagatgtccctagatccattacttaacatttgttgaatcaatcgaggatcgaaatagtcgaccaacgaatgtgtatagaagccaataaataatttttgcacaaggtaa

SEQ ID NO: 146283 - DNA, 2148 bp, Zea Mays
atggagacatacttccataaggaccatgaccaagaagtcgtggaactcattccagctctgcgcaaacatatcgccagccgtcacccaggcatccaatctcttcgtcagagattatacagcactggaaaacctaggcgtactgttcattcgagcagtttctaccagccgtcgtttcttgcgtctagaacatacgccgacgttctcaagatgggcgttatttctggggacaatacatcgtcctcaagtcggtccggcattatggctaatgatggtttcaatgctgctggctggcgagtggtggatcatcggcgtcaacaagttcatggacgtccctcgggtcctagcagtgggtctttctgtggacgaggtagctgggagatacgtggtcgcgatgcatggtggggacgtggtggatgttttcttgagcccactatgtcacttggttcagtggacagggcggttatgaataatagtagaggcgttcagtctgagaaggctagaaaacaggttgtcatggtagcacccggtgttttagacatggggaagaaaagatgggaagatctttgttgcgaaatttgtgaagataatcatgtccctcaggtgtgcctggtgtttaatgttccaaagccacaggcagccctatgcggttttgcgggcggtgagtctggtttcttccaaattctaacttggggatctaagggtgcaattccgaggtcggatggtgttacgacattcattacattgaaggaaggtattgtttctgctgatctcattaagtcagagctctcaagacttataccgttgaagtggaattggtcggttcagaagcatccagatggctttctagtaccatttacgtgtagtgttgagcttcagcgcatgattgctatgaaatatgttcatacgttgggaggagaaggcactattttgggtgcaactcagaaagttgatatgcgctacaccaggaaaatgggggtggttcatattttggtggcagtgaccaatgtgaatcatatttcggagtccgcagaaatagtagttgatgaagggttatatgagattttcttcaaagttgataaggttctcatagaggggaagtggatggataacgataacatgagtaatcgagacaaagatgatttctctgagaaacatgaaaatgattcttttcagttgaaggagctagctaaagatactgtcatggaagataactctttgcatggtgattctaagaagcctgaagatgggacttgtgccatggggatggtgtctcagctagagaatcagattgttaatgggtcagtggcaagaacgggtattgaaccagaaggtctatctctaggcatgccgacagacttgatggcacttacttctccttttgttgatcagtatgttgtcactcacacacatggtgctcttgatcagtcaccaggctgtggtagcggtgatgggaagtccaattcctggctcgagcagtatcctagttgctcttcccttgcgggcatgtcacagggtgaggttgggtggaccttgtcagggcctgccaccggtcatttgttcctgaatgagactgcatctcttgctggagcggcagccggtatggttgttgaagatgtctatgctcagccaaaggttgtgatcgaattggatgatggtcatattaaatctgttgatactcaggagagagacagtcatctaggacatgttaattcctttgtaggggtccctcgctcagttctcaggtattatgacgcactggtggctaattctcttactaagagagtgaagactgaaaagattaatcatggtgatctcataataagtgcgaagaggactaatactgttgaagatattttgaccaaagcacaacgattggcagcaaagcgtaatctggaattaagtgagtcttccttcatctccttttacccggaagtaatcacttctaattgcgaaaatattgggattactcttggcagtatggaaaatcaagtgttacaattggtggttgctattaaaaatattgagatcgataggctcgtggtagctccatcttcctatagcagaaatcctttaattgatgatgaggaagcggagttagatgctgaattatcctacatttcgataggtgggatgatgggtcggatttga

SEQ ID NO: 146284 - DNA, 751 bp, Zea Mays
attctttctgtcacacgctcagggattaccatgacctttgctcgttcgttaccagcacctcttcttcctccctctcaccgtgctcctcagccgaggtggcgaggaccctccctgtacatcgtctcctccatgtcgacatcttccctcatctctccaacgtcgtccagccattgagcagctcatcggagcagcaacgctcgacactgagtagcccaccgtggagtcacctcatcagcgtctcctcgctcctcgtccgttcgtcgagctcggcaagcccctcctcagccgtgccgagtctccaagccggctgtcgacgctcgcctttgtttctgtgttactggtatccattcttgctcgccaatcgagcaccccacccaccgttccagttccgattccgctagttgtcgttcgcctcgccatcgtctcttgggtgcgtaccgaactgtattatttattttcttagcacgtcgcttcttgcacttgtgattttgatgtcgtaagttcgtgctggtgcgtaagtgttcagaggagattggtctacgagtgattatggcccgacttgtgaaccacaccattggattggattctttaattgagcttgtgtgtcgcggtcatacggttagtgaaagaaaggaagtaaatcgtgtagagtaataaagtacggtgtgtcgcacatcagatgctcagtaatagtctcagtcagattcgtcgtagttttcgcgaatctcgactcgcctttaattttgcatag

SEQ ID NO: 146285 - DNA, 576 bp, Zea Mays
tattgatattgctcccatttcaattccacggctctcaatatcgacatccaaacagagacctagtagatggcgcccactgtccttttcaactggtactaatactgattttactgcttctgacagagtcagctaattactcacccttccaaaaaaaaaaatgcagccactaaccaaacggatgtcgcttcgcttggcagcattagcaattgtcctgcacccattgtttgctttggcacggtgctcgcttctcttaccactggctggttattatatgagtattacttcgatcaataacaaccgcacaagaagaggaggaacggacaggaacgaccgagcgggccttgaggaagatgacgccggtgggtgctcggagggaggccgcctcgcggaggatggggcatgcgtaccgcggcctccttcgcctcgatgctcagatcctccatggcagtcagcctccattgatgccgcagtagcaacctgcgcaccactcccatgaatcgcctctgaatccggtgggaggagggtgcggtggcgactgacgatgggagacggagaaatcgcgaggatggctggtgc

SEQ ID NO: 146286 - DNA, 666 bp, Zea Mays
atggcggttgtcttggtctctgattttatttttctatgtttgtgggttgagcatgatcctatggagattatagagactgttaagattgaggaagccaattttttggtacattattttggtgtatctagggcagaaagcttttttatcttcctacttatcaattctagacgtgtcgctatcaacggggagagcaacgtgggtctggaggatgacgatgtttcagtcacgccacgggggaagaagcgtggtcgccggtcggccatggcacaggtggtcaccagttatagcgaggatgatgtggaatcaacggtgtactattttatgcaagtagcatcttcaaagctgcagttgtttcgaaaaaacccactaggatgcacaaacttaaatttcctcctagatctggtccttcagagccaacaatgcctagcattttcgatgtttttcctcccaataatggagtcctcgcaacagatgatccagccaactacttggacccagccatgcagttccctttctcatgattggtcaccatttgtcatggagctcgctgttgctacaactctatccaccctgaacgtcaaggacgtcattgatgtcatgcctgggctcatgaaatcgtctgttgctcttctgaaccaagccgaccttggctggtatttcttgtaa

SEQ ID NO: 146287 - DNA, 291 bp, Zea Mays
ggggcatgtcgaacctgagaaatgcagcaacaaagcgcacatgaggccacaatcaagcaataaaacaagagcaaatgagcaacaaagtgctcaagaaaaagcaaatgcaaagctgacatctgctgatagcggagaagcgactaaactcataagtctcactcgtccacagggtctagcttttatcttgttaaataccaacttatcccatgctggtgatggatttttccctaatagcacaaagtacagaagtgacattttattacgcatacacgcaacgatgaaaactggatt

SEQ ID NO: 146288 - DNA, 1681 bp, Zea Mays
gtccgatgccgcgaccagcgattcagcggcctggattatgcgtgccatcagccgatggcatccggcgcctcgacgcgatcgagcgccatgccgccatccgccgcgtataaaaacaagccccggccggcgccgaggagcgtcccagccaccgcaccctcacgactatgcatggggaccaaacgctgctgcgtcgtcggcgtccgagcacggggaccggacgcgagcagtagcgacgacatgcgggagcccaggagcgctacgatgttggacgacggcgacgacgacttcaccttcgccgccgcccatccgcctccccgtctactacctgcaggcgccggcggcggattcgtggggccgccgctgctgtacccagtcttcgggcgcccgaggtccccgccgcgggttgctgatccagcggagccggagccggagccggacacggccaccgcgcgggtgccgctaggacggcatctggcggtggacaggaggagggatccggcaccggcaccgctgccagctcccgcggacgacgacgacgactcggtgccggcggagacgttctgcccgtggtcgcccgggtggtcggcggcggcggcgtcgccggcgcggtgcaagaagagcggctccacggggtccgtgctccggtggcggccccggctcgccgtcgggcggagccagagcgacggcaaggagaagttcgtcttcttgagtgccggcggtggctcttctgggcgccggagccagaatgggcgaggcgtcgccgcgcccggaggtggtgccactgccggtgccccccacgcctggagctgctacgtcaacgacaataagtccggtggcggcgcgcgccgcaggtcgttcctgccgtacaagcgggacctcgtcgggctgttcgccaacgccgccgtgttccgccggagctacctcccgttctgatatgatatatgcactattgtactgtacacccagaggtaatggtttgaccatcatcagtttactggcgtactgcagtgggctcgatggcagcttatacttgtcatagccggtcagccgtgcagtccatccattacccagcacatttccctcctaggttttgcttcatgcatgttttgcttgtagaggaaggtgtggtacatgcatatgtgtgtatatacatttggattatgcatgccagtaggctgttcagaaggaatggaaaaggccgtgtcagacaatgctcttggacttgtttgttttgattgatccgagttggtagctagctgctagcgtagcgatgctctctacctgtctgctccatgactacatacatactcgtcgtgtgtcctagcttgacctgctgttagttgcctgacgacgtattgcagtacgaaaatctcagaggtgactagactgcttaaccaccactgagaaaaatggcgcataaatagccgacggcgccccaacttataagcgactctatccggtctcagtttcctcggcatactactctctttgtttttttttttaatatgaagctagttggagtcgttttccatggtggcccgtgcagcgtgctacaccaaacaagcaattaaccctcgttggtcgctcatgtcgcaagctggttagccggcgatgccgatgagtcgatcgtctccggccggccgtccctcgatcggtggcctcagctacgctacgcaggcgg

SEQ ID NO: 146289 - DNA, 2079 bp, Zea Mays
cacaacataatacagtggtcgtgtctaaaacgtgtgtcttaccatattcattgtaccaatcagagcattcaataaattaaagtgaccaatcagctagcctcctatctcgaacatagagctaagacactgtgtcttcgtcaagatacatgtcttgagtttttttacattcacccccctagacacactctaaaacacaacttaagacactcattgtacatgcccttagcagacacgagagggaaaccagcaaccggtccggcccataacatggacctcaaggaaggcccaagtacttcaaaggccgagcccacatcctcaacgaaatatcgccaatcgccacccagaactgaacccaccaaaaaaaaaaacaaaaatatccaaacccatcaagcggagcagcagaggtttatccctaccagcctaccactcccccccaacgcggcgacggcggaaatggacgccaagctgctgctccccttccccttcgcgccggccgcggccaccaggtcccccaagtcgctcttccttggcgccccgctcccgccgccgccgcggccgccgccgttcccgctgcgcctccgcccgcggcccgcggcggtggtggcgcaggccgccgtgaagcgccgcaaggaggcccccttcgacaccgtgatccagcgggacaagaagctcaagctggtgctcaagctgcgcaacatcctggtggcgcagcccgaccgcgtgatgagcctccgcgagctcggccgcttccgccgcgacctcggcctcacccgcaagcgccgcctcatcgcgctcctcaggcgcttcccgggcgtcttcgacgtcgtcgaggagggcgtctactccctccgcttccgcctcacgccggccgccgagcgcctctacctcgacgagctccgcctcaggaacgagtccgagggcctcgccgtcgccaagctccgcaagctgctcatgatgtcgcaggagaagcgcatcctcatcgagaaggtcgcgcacctcaagcacgacctcggcctcccgcccgagttccgcgacaccgtctgcctcaggtacccgcagtacttccgcgtcgtccggatggaccggggcccggcgctggagctcacgcactgggaccccgagctcgccgtctccgcggcggagctcgccgaggaggagagccgggcgagggaagctgaggagaggaacctcatcatcgaccgcccactcaagttcaaccgtgtcaggctccccaagggcctcaaattgacgcggggggaggccaggaggattgcgcggttcaaggagatgccctacatttccccatatgccgacttctcgcacctgcgctccggatcagacgagaaggaaaagcacgcttgtggagtggttcatgaaattcttagcttaacggtggagaagcgcacgttggtggaccacctcacgcacttcagggaggagttcaggttctcgcagtccctgcgcggcatgatcattcgtcacccggacatgttttacgtatcgttcaaaggggatagggactcggtcttcctccgtgaggcgtacaaggactcgcagctggtcgagaagaaccagctggtgctacttaaggagaaaatgagggctcttgtggccgtaccacgcttccccagaagggccgcagttgggactggcgaggaggctgagggaatgaatggatcattgcagtcgcgggaccaagtgagtgacgaggaatacgacgatgaagatgaggggctctctgatatggaagatctgattagtgagctttctggtggcaaatcggatgctgactacgagtggggtgatggctggtttggtgagaacgatgactcaccgccagactttggagacgacgaagtcaaggtcgccatgaaaattgctgatggttctgccaacggcagcgcacctgttcctgtatttcctgatggcagaccaagggaacggtggtaaattgaggtgtttttgaacttctgattgatagaatcgttaatctataatcttagttcttttatcatagtatctagttgcaaagccctttgtcttttgagtcgccctgctgattcctgtcaccaagcacat

SEQ ID NO: 146290 - DNA, 789 bp, Zea Mays
atgggcgccaaggagcgcggcggtggtgcggtgcgggctgttgcacgtggagccgtgggcgccgacaatggactcccagagcgtggcctctcagttcttcgccgtttcgctcttcccctacctcggcttcctctacttcatgaccaggccttttgtgtgcacgattcagagaagttatatgaaactgtgactgtgagggcaattatgtgtctatcagagatttctctgctggtctttcttcctcgcgggggtaacgccgcggtccttgcccaggcgcttgacctggggctgaactgggagggattcggcatggaggacggcgtgttcgacgggcacggccgctgcgggcagctggtcagcaagctggcgagggaccacctccccttcatgatcctgagccagcggaacgcgctgctcctaggctccgacggcgacggcgacagggacggcccggccttcagcgacgcgtcgcccacggcgttgtcgtccacggacggcagccgcagcgggcggtcgtcgctggcgccggcgcagatgctggaggtgtggcgggaggcctgcgccaacgcgttcgagaccatggacagggagctcggggtccaagccagggtggactgtgacttcagcggcaccatgtccgtgtgcgccaccaagcagggggaggacctcatcgtcgccaacctcggtgactccagggccgtgctggcgaccgtgtcggagacgtgctacctgaaggccgtgcagctcaccatcgaccagaagcccaacgtgcctcgtgagtcctcctga

SEQ ID NO: 146291 - DNA, 1817 bp, Zea Mays
gcatggatgctcacaccactcacattgttgcaagaaagaacacttcgctttcattcacctcaaatgagctcatggatcattttcccttcgcttggttacccatggaccccttcacagccatggcgctcagcggtaccctctcaccctcattctctaccacatctaccaatgataccatgtacaaccttaacccagcgttgtatgcatccctcgtgccaccaataaggaaacctgcaaccccgaccacactagaggtagggaggcaatgcaaggaggaggaggatgcatccattcgtctggtgcacctgcttatcacttgcaccagtgccattgagactggtgactactcgatcgcacaaggaaacttgtctgaggcacgcaagattcttggggaaatcccaacttcgaccgggattggccgtgttgggaaacacttcatcgacgcactagttcaacgcctcttcccggcatatccgcacgcagcaccaccttctccatctccttctacatcgatcgatctgcacaacaatttttatgatgcaggtccctacctaaagttcgcctactccactgccaaccaagcaatcctcaaagcaatcaaaggatacaaccatgtacacataattgacttttccctgatgcaaggtctccagtggccggcactcatggatgtcttctccgcccgtgagggtgggccaccaaagctccgaatcacaggcattggcccgaacccaataggtggccgtgacgagctccatgaagtgggaattcgcctcgccaagtatgcacactcggtgggtatcgacttcactttccagggagtctgtgtcgatcagcttgataggttgtgcgattggatgcttctcaaaccaatcaaaggagaggcagttgccataaactccatcctacagctccatcgcctcctcgttgacccagatgcaaacccagtggtgcccgcaccaatagatatcctcctcaaattggtcatcaagataaaccccatgatcttcacggtggttgagcatgaggcagatcacaacagaccaccactactagagaggttcactaatgccctcttccactatgcgaccatgtttgactctttggaggccatgcatcgttgtaccagtggtagagacatcaccgactcactcacagaggtgtaccttcgaggtgagatttttgacattgtctgcggcgagggcagtgcacgcaccgaacgtcatgagttgtttggtcactggagggagaggctcacctatgctgggctaactcaagtgtggttcgaccccgatgaggttgacacgctaaaagaccagttgatccatgtgacatccttatctggctctgggttcaacatcctagtgtgtgatggcagccttgcactagcgtggcataatcgcccgttatatgtggcaacagcttggtgtgtgacaggaggaaatgctgccagttccatggttggcaacatctgtaagggtacaaatgatagtagaagaaaggaaaaccgtaatggacccatggagtagcaggaagaataaccatgtcatgagcaaatcgatcaagtaataaaatgcactgatgacatgcatggtgatctaaagtttttttgcgtgaatgtgcaatgacgaattgttcaatttgaataacctaatcatgagactcaaaaggaaaatatttgtttgttgttaattcaatgagttttttttttaaatgtttgccctcactactataaaacatacatatgttgtttttaaggaagtattggtgcctaatatcatcctcaacaagtaccgctatttttacatgtgaacata

SEQ ID NO: 146292 - DNA, 1001 bp, Zea Mays
caacaaaaacatgcccaagtgattcattttctggagctgcctgtttacagttacagcctttaaaatgaaaaggtatacacttgagctaaaactgttatatgcatgaacataacctgtcctgcccttactttcataaaaaataaatgaacataacctgatgacttgtattctcttagcatatacaacttgcttgacaccacactggaatttaaacttctcttttgtacacaactaaaaatcagtatccagcaagtaagaccagatgtgtgttgaatcctgtgttcaactcatgcttcagccttcagatatctgtggagcagatttatgtgtactcatcttgcttcttagctcttcaaaagctttcatgctttctgcatcaaatcccccagcaaactgcagaagagaacctcacaccctgccaccctggagaagcaaaaactctctattgggctctttctcagtgccttccaacgcatcaagttctgatgcaaccctcttcatatacttgttcgcaagctgaacagatgccaatttgatcttgccaactactccggaatcagacaaccagtcaactgggatcccatactccttgtagcgtgagggacatgtctcttgtacggagtagtgcatagacacactgctccactttttcaagcaaagaatacatcttcttgagagcttattcacatgcaagttgtggatcatcggtaaaggatgaaaccttgttctgtaactttatcagatcctggtattcaaaagctgcttctcttattgcatctgttttgctctctggccaatcaaaatgctttaacactgctcgctcatcaacctaaaatgtgaaaatgtgtcataagtacaataactggtactttgtaacaaaggtgtagtatggagggcctgttcgggctgcttaccaagaaagataactcctcatccaaccaatttacaaatgcaacaacatcatcaatatttacaaagcttgctgctcggacctcatttgc

SEQ ID NO: 146293 - DNA, 971 bp, Zea Mays
agtgaagacaatatgccccactgaagcccagaagctacctaaactcccagccgtctcctccgcatgcgaaaaccctagcagctccgcagtccctctcctctcgagatattcgcagttgaccgggtcctcggagcacgatgaagtttgttgctgcctacttgcttgctgtcctcgctgggaacgccagcccctccgctgaggatttgactgccattctggagtcagttggctgtgaagttgacaatgaaaggatggaactcctgctgtcccaactgagcggtaaggacatcaccgagctcattgccgcgggcagggagaagtttgcttcagtcccatgtggtggcggtggtgtcgctgttgcggcagcttcacctgctgctggcggagctgctcctacagctgaggcaaagaaagaagagaaggtggaagagaaggaagaaagcgatgatgtaagatcgttgttctccaattctggctgcacatttttccctatcagagcagcagtaataaattactctgttctggtattatgaatatactactttcaattcatcttgatatcatggccaccgattcttttatactgttgtttcctttgctgtcgacacatccagagattttatcatgttaattatcttttatgcaggatatgggcttcagcctcttcgactaggctgcacagtcatcacagtattgtttcgggcagtgaaaccagaggaaaaccagagtcatgtttagattttaaccttgttttatgttggaaagtactgctacttgtctttatatttggtaattcagccgtaggttgctatgctggttgggatttactcgtgaaccagagtttttctatcttatatcctgaatttgttatcccaaagtttcctggctttttaactattttgttgttacatgttgatattgctttgttcatccttattcacctactatagctatttgcaatcacaaaatca

SEQ ID NO: 146294 - DNA, 790 bp, Zea Mays
agtgaagacaatatgccccactgaagcccagaagctacctaaactcccagccgtctcctccgcatgcgaaaaccctagcagctccgcagtccctctcctctcgagatattcgcagttgaccgggtcctcggagcacgatgaagtttgttgctgcctacttgcttgctgtcctcgctgggaacgccagcccctccgctgaggatttgactgccattctggagtcagttggctgtgaagttgacaatgaaaggatggaactcctgctgtcccaactgagcggtaaggacatcaccgagctcattgccgcgggcagggagaagtttgcttcagtcccatgtggtggcggtggtgtcgctgttgcggcagcttcacctgctgctggcggagctgctcctacagctgaggcaaagaaagaagagaaggtggaagagaaggaagaaagcgatgatgatatgggcttcagcctcttcgactaggctgcacagtcatcacagtattgtttcgggcagtgaaaccagaggaaaaccagagtcatgtttagattttaaccttgttttatgttggaaagtactgctacttgtctttatatttggtaattcagccgtaggttgctatgctggttgggatttactcgtgaaccagagtttttctatcttatatcctgaatttgttatcccaaagtttcctggctttttaactattttgttgttacatgttgatattgctttgttcatccttattcacctactatagctatttgcaatcacaaaatcacttgatggcggtgagc

SEQ ID NO: 146295 - DNA, 1480 bp, Zea Mays
agtgaagacaatatgccccactgaagcccagaagctacctaaactcccagccgtctcctccgcatgcgaaaaccctagcagctccgcagtccctctcctctcgaggtggcggcgctccctcctgttttcctcttcttcttcctgtactatatagcctcccctcgcaaatcgtcactgacgagtgatgtcattccgcttgcttgattgttccagatattcgcagttgaccgggtcctcggagcacgatgaagtttgttgctgcctacttgcttgctgtcctcgctgggaacgccagcccctccgctgaggatttgactgccattctggagtcagttggctgtgaagttgacaatgaaaggatggaactcctgctgtcccaactgagcggtaaggacatcaccgagctcattgccgcgggcagggagaagtttgcttcagtcccatgtggtggcggtggtgtcgctgttgcggcagcttcacctgctgctggcggagctgctcctacagctgaggcaaagaaagaagagaaggtggaagagaaggaagaaagcgatgatgatatgggcttcagcctcttcgactaggctgcacagtcatcacagtattgtttcgggcagtgaaaccagaggaaaaccagagtcatgtttagattttaaccttgttttatgttggaaagtactgctacttgtctttatatttggtaattcagccgtaggttgctatgctggttgggatttactcgtgaaccagagtttttctatcttatatcctgaatttgttatcccaaagtttcctggctttttaactattttgttgttacatgttgatattgctttgttcatccttattcacctactatagctatttgcaatcacaaaatcacttgatggcggtgagcctagagttatcaagctgatattaatgcttcatactaggtcggccgtggcatacctcgccacgtcctcgtccaggagcgcgcctacctcctccgttcacggatctggatctgaaggaggccaaggagctcgtagagaaggcgtccgccgtgttgaaggatggagttgaaggatggagtttggaaggaagtggtagagagtattgccgagaagatgtgggcggtcggcacgagattgttctcgagtgagacgatgagagaaattccatgggagggaggagcttcatgggcgacgctacgcacaagctggggccggacggtgggcgtttagctggaggtgatggagcatctggaaacttctcgttgcgtagcggattggagagctgcacgggaccgtcgaagcgcgatcgaacggctgcaagcgcgatcgaacggctgcacaaccaaaggatgacgtggcttactgaggagcgagctttgtgtacgcgtttgttatatagaaatgtgttttatattttatttttatacatatattccaaattttaagacttggctgccaaaatattaatatccatttaatttcca

SEQ ID NO: 146296 - DNA, 908 bp, Zea Mays
agtgaagacaatatgccccgctgaagcccagaagctacctaaactcccagccgtctcctccgcacgcgaaaaccctagcagttcggtagtccctctcctctcgaggtattagcagtcgaccggttcctcggagcacgatgaagtttgttgctgcctacctgcttgctgtcctcgctgggaacgccagcccctccgctgacgatttgactgccattctggagtcagttggctgtgaagttgacaatgaaaagatggaactcctgctgtcccaactgagcggtaaggacatcaccgagctcattgccgcgggcagggagaagtttgcttcagtcccatgtggtggcggcggtgtcgctgttgcggcagctgcacctgctgctggcggagctgcttctgcagctgaggcaaagaaagaagagaaggtggaagagaaggaagaaagcgatgatgtaagatcgttgttctccaattctggctgcacattttttccctatcagagcagcagtaacaaactactctgttctggtattatcaatatactactttcaattcatcttgatatcatggccaccgattcttttatactgttgtttcctttgctgtcgacacatctagagactttatattgttgattatcttttatgcaggatatgggcttcagcctcttcgactaggctgcacagtcatcacagtattgttttgggcagtgaaaccagaggaaaaccagagtcatgtttagattttaagcttgttttatgttggaaagtactggaaagactgctacttgtctttatatttggtaattcagccgtagattgctatgctggttgggatttactcgtgaaccagagtttttctgtcttatatatcctgaattggttatcccaaagtttcttggctttttaact

SEQ ID NO: 146297 - DNA, 933 bp, Zea Mays
agtgaagacaatatgccccgctgaagcccagaagctacctaaactcccagccgtctcctccgcacgcgaaaaccctagcagttcggtagtccctctcctctcgaggtggcggcgctccccccgtcttcttcttcttcttcttcctgtactatatagcctcccctcgcaaatcgtcactgacgttcattccgcttgcttgattgttccaggtattagcagtcgaccggttcctcggagcacgatgaagtttgttgctgcctacctgcttgctgtcctcgctgggaacgccagcccctccgctgacgatttgactgccattctggagtcagttggctgtgaagttgacaatgaaaagatggaactcctgctgtcccaactgagcggtaaggacatcaccgagctcattgccgcgggcagggagaagtttgcttcagtcccatgtggtggcggcggtgtcgctgttgcggcagctgcacctgctgctggcggagctgcttctgcagctgaggcaaagaaagaagagaaggtggaagagaaggaagaaagcgatgatgatatgggcttcagcctcttcgactaggctgcacagtcatcacagtattgttttgggcagtgaaaccagaggaaaaccagagtcatgtttagattttaagcttgttttatgttggaaagtactggaaagactgctacttgtctttatatttggtaattcagccgtagattgctatgctggttgggatttactcgtgaaccagagtttttctgtcttatatatcctgaattggttatcccaaagtttcttggctttttaactattttgttgttacatgttaatattgctttgttcatccttatccacctactatagctatttgcaatcacaaaatcacttgatggcggtcagcctagagttatcaagctgatattaatgct

SEQ ID NO: 146298 - DNA, 829 bp, Zea Mays
agtgaagacaatatgccccgctgaagcccagaagctacctaaactcccagccgtctcctccgcacgcgaaaaccctagcagttcggtagtccctctcctctcgaggtattagcagtcgaccggttcctcggagcacgatgaagtttgttgctgcctacctgcttgctgtcctcgctgggaacgccagcccctccgctgacgatttgactgccattctggagtcagttggctgtgaagttgacaatgaaaagatggaactcctgctgtcccaactgagcggtaaggacatcaccgagctcattgccgcgggcagggagaagtttgcttcagtcccatgtggtggcggcggtgtcgctgttgcggcagctgcacctgctgctggcggagctgcttctgcagctgaggcaaagaaagaagagaaggtggaagagaaggaagaaagcgatgatgatatgggcttcagcctcttcgactaggctgcacagtcatcacagtattgttttgggcagtgaaaccagaggaaaaccagagtcatgtttagattttaagcttgttttatgttggaaagtactggaaagactgctacttgtctttatatttggtaattcagccgtagattgctatgctggttgggatttactcgtgaaccagagtttttctgtcttatatatcctgaattggttatcccaaagtttcttggctttttaactattttgttgttacatgttaatattgctttgttcatccttatccacctactatagctatttgcaatcacaaaatcacttgatggcggtcagcctagagttatcaagctgatattaatgct

SEQ ID NO: 146299 - DNA, 714 bp, Zea Mays
gaaaaccctagcagttcggtattagcagtcgaccggttcctcggagcacgatgaagtttgttgctgcctacctgcttgctgtcctcgctgggaacgccagcccctccgctgacgatttgactgccattctggagtcagttggctgtgaagttgacaatgaaaagatggaactcctgctgtcccaactgagcggtaaggacatcaccgagctcattgccgcgggcagggagaagtttgcttcagtcccatgtggtggcggcggtgtcgctgttgcggcagctgcacctgctgctggcggagctgcttctgcagctgaggcaaagaaagaagagaaggtggaagagaaggaagaaagcgatgatgatatgggcttcagcctcttcgactaggctgcacagtcatcacagtattgttttgggcagtgaaaccagaggaaaaccagagtcatgtttagattttaagcttgttttatgttggaaagtactggaaagactgctacttgtctttatatttggtaattcagccgtagattgctatgctggttgggatttactcgtgaaccagagtttttctgtcttatatatcctgaattggttatcccaaagtttcttggctttttaactattttgttgttacatgttaatattgctttgttcatccttatccacctactatagctatttgcaatcacaaaatcacttgatggcggtcagc

SEQ ID NO: 146300 - DNA, 724 bp, Zea Mays
ccccccgccgccgcgcaggttgcccatctcgaggccggtgagatccgccgcccgcgacctcaggccggcgcaccacccaccgttgcccgtcggcatccacacgctgcaggggttgaccgccggtaaccttccttgacaggcgatgggtggggcggatcaatgtcgtggcaaccttctagggcagcaagtactatacaatgtcgacacgcgccttgagaagctcctacgagccctcggtgaagatggggtactcgatctactgttgcttctcctcgacgatgtgtgcggcctgatcgtcctcctgcgcatggaggagacggtcgacctagccatcagcctcgagccaaaccttagggatcggaggcggttgcggcaccactggaggagctccagcatcgttaccgaatcccgcacgtcgacgcctgggggacaagggcgggtgcggagcgggtgggtcgagcactcgagctggaccatgagggctcggaggcggttgcggcgccgctggaggagctcctgcaccgcacccgtgcggcgtagtggttgccttgccgctggagtcccggatcccgacacacgatgtcgggggcacgacgtggatgggcgacatcgacgagcaaggaccttgcgtgattcagggggagggggacaacacggatgggcgacatcgatgggtggggaccttgcgtgattcacggggggagggggctgttgcgcgcggtgg

SEQ ID NO: 146301 - DNA, 1152 bp, Zea Mays
atgagggctcctccacgtttacaggccgacggaggcatccggtatcatagcgcaccgtttacccatcgctgctgtagggaaaaaggagccaaagaaacggtaaatttagagtaccggaccttttaccgggccttgctggagagagtctaataacatgcgatgtccggaccggcccagtgaaggcaatatgccccactgaagcccagaagctacctaaacttccagccgtctcctccgcacgcgaaaaccctagcagctccgtagtccctctcctctggaggtggcggcgctcctcccgtcttcttcttcttcttcctgtactatatatatatagcttcccctcgcaaattgtcactgacgttcattcggcttgcttgattgttccaggtattcgcagtcgaccgtgtcctcggagcacgtaagatgaaggttgttgctgcctacctgcttgctgtcctcgctgggaatgccagcccctccgctgaggatttgactggcattctggagtcagttggctgtgaagttgacaatgaaaggatggaactgctgctgtcccaactgagcggtaaggacatcaccgagctcattgccgcgggcagagagaagtttgcttcagtcccatgtggcggcggcggtgtggctgttgcggcaggtgcacctgctgctggcggagctgctcctgcagctgaggcaaagaaagaagagaaggtggaagagaaggaagaaagcgatgatgatatgggcttcagcctcttcgactaggttgcacagtcatcacagtattgtttcgggcagtgaaatcaaagggaaaccagagtcatgtttagattttaaccttattttatgttggaaagtactgcaaagactgctaattgtctctgtatttggtaattcagctgtagattgctatgatggttgggatttactcgtgaaccagagtttttctatcttatatcctgaattggttatcccaaagttttctggctttttaactattttgttgttacatgttgatattgctttgttcatccttatccacctactatggctatttgcaatcacaaaatcacttgatggcggtcagcctagaattatcaagctgatattaatgggtcataagatcttgtggaaccttttatttaaaaaaataaa

SEQ ID NO: 146302 - DNA, 1148 bp, Zea Mays
atgagggctcctccacgtttacaggccgacggaggcatccggtatcatagcgcaccgtttacccatcgctgctgtagggaaaaaggagccaaagaaacggtaaatttagagtaccggaccttttaccgggccttgctggagagagtctaataacatgcgatgtccggaccggcccagtgaaggcaatatgccccactgaagcccagaagctacctaaacttccagccgtctcctccgcacgcgaaaaccctagcagctccgtagtccctctcctctggaggtggcggcgctcctcccgtcttcttcttcttcttcctgtactatatatatatagcttcccctcgcaaattgtcactgacgttcattcggcttgcttgattgttccaggtattcgcagtcgaccgtgtcctcggagcacgatgaaggttgttgctgcctacctgcttgctgtcctcgctgggaatgccagcccctccgctgaggatttgactggcattctggagtcagttggctgtgaagttgacaatgaaaggatggaactgctgctgtcccaactgagcggtaaggacatcaccgagctcattgccgcgggcagagagaagtttgcttcagtcccatgtggcggcggcggtgtggctgttgcggcaggtgcacctgctgctggcggagctgctcctgcagctgaggcaaagaaagaagagaaggtggaagagaaggaagaaagcgatgatgatatgggcttcagcctcttcgactaggttgcacagtcatcacagtattgtttcgggcagtgaaatcaaagggaaaccagagtcatgtttagattttaaccttattttatgttggaaagtactgcaaagactgctaattgtctctgtatttggtaattcagctgtagattgctatgatggttgggatttactcgtgaaccagagtttttctatcttatatcctgaattggttatcccaaagttttctggctttttaactattttgttgttacatgttgatattgctttgttcatccttatccacctactatggctatttgcaatcacaaaatcacttgatggcggtcagcctagaattatcaagctgatattaatgggtcataagatcttgtggaaccttttatttaaaaaaataaa

SEQ ID NO: 146303 - DNA, 1045 bp, Zea Mays
atgagggctcctccacgtttacaggccgacggaggcatccggtatcatagcgcaccgtttacccatcgctgctgtagggaaaaaggagccaaagaaacggtaaatttagagtaccggaccttttaccgggccttgctggagagagtctaataacatgcgatgtccggaccggcccagtgaaggcaatatgccccactgaagcccagaagctacctaaacttccagccgtctcctccgcacgcgaaaaccctagcagctccgtagtccctctcctctggaggtattcgcagtcgaccgtgtcctcggagcacgtaagatgaaggttgttgctgcctacctgcttgctgtcctcgctgggaatgccagcccctccgctgaggatttgactggcattctggagtcagttggctgtgaagttgacaatgaaaggatggaactgctgctgtcccaactgagcggtaaggacatcaccgagctcattgccgcgggcagagagaagtttgcttcagtcccatgtggcggcggcggtgtggctgttgcggcaggtgcacctgctgctggcggagctgctcctgcagctgaggcaaagaaagaagagaaggtggaagagaaggaagaaagcgatgatgatatgggcttcagcctcttcgactaggttgcacagtcatcacagtattgtttcgggcagtgaaatcaaagggaaaccagagtcatgtttagattttaaccttattttatgttggaaagtactgcaaagactgctaattgtctctgtatttggtaattcagctgtagattgctatgatggttgggatttactcgtgaaccagagtttttctatcttatatcctgaattggttatcccaaagttttctggctttttaactattttgttgttacatgttgatattgctttgttcatccttatccacctactatggctatttgcaatcacaaaatcacttgatggcggtcagcctagaattatcaagctgatattaatgggtcataagatcttgtggaaccttttatttaaaaaaataaa

SEQ ID NO: 146304 - DNA, 1041 bp, Zea Mays
atgagggctcctccacgtttacaggccgacggaggcatccggtatcatagcgcaccgtttacccatcgctgctgtagggaaaaaggagccaaagaaacggtaaatttagagtaccggaccttttaccgggccttgctggagagagtctaataacatgcgatgtccggaccggcccagtgaaggcaatatgccccactgaagcccagaagctacctaaacttccagccgtctcctccgcacgcgaaaaccctagcagctccgtagtccctctcctctggaggtattcgcagtcgaccgtgtcctcggagcacgatgaaggttgttgctgcctacctgcttgctgtcctcgctgggaatgccagcccctccgctgaggatttgactggcattctggagtcagttggctgtgaagttgacaatgaaaggatggaactgctgctgtcccaactgagcggtaaggacatcaccgagctcattgccgcgggcagagagaagtttgcttcagtcccatgtggcggcggcggtgtggctgttgcggcaggtgcacctgctgctggcggagctgctcctgcagctgaggcaaagaaagaagagaaggtggaagagaaggaagaaagcgatgatgatatgggcttcagcctcttcgactaggttgcacagtcatcacagtattgtttcgggcagtgaaatcaaagggaaaccagagtcatgtttagattttaaccttattttatgttggaaagtactgcaaagactgctaattgtctctgtatttggtaattcagctgtagattgctatgatggttgggatttactcgtgaaccagagtttttctatcttatatcctgaattggttatcccaaagttttctggctttttaactattttgttgttacatgttgatattgctttgttcatccttatccacctactatggctatttgcaatcacaaaatcacttgatggcggtcagcctagaattatcaagctgatattaatgggtcataagatcttgtggaaccttttatttaaaaaaataaa

SEQ ID NO: 146305 - DNA, 2098 bp, Zea Mays
atgagggctcctccacgtttacaggccgacggaggcatccggtatcatagcgcaccgtttacccatcgctgctgtagggaaaaaggagccaaagaaacggtaaatttagagtaccggaccttttaccgggccttgctggagagagtctaataacatgcgatgtccggaccggcccagtgaaggcaatatgccccactgaagcccagaagctacctaaacttccagccgtctcctccgcacgcgaaaaccctagcagctccgtagtccctctcctctggaggtggcggcgctcctcccgtcttcttcttcttcttcctgtactatatatatatagcttcccctcgcaaattgtcactgacgttcattcggcttgcttgattgttccaggtattcgcagtcgaccgtgtcctcggagcacgtaagttacgaatcttcgcttcttcttgtgatagtgtttcgagttgcctcatgtttaccttgagtcgtctgccggctcgccacatggtcaaggcgcatcgccgtcgatgcccgctcgattccaccgtcagccagatttttctggctcgatgtacctgcgacgtagtgtggagatgagacgcgcaggtgacgccggatgctagggaaccggaactagatccggtccctgctactgtggtggctgcgctggtttctgaattctcatattgggatttgaatgaatccttgaaacatttataacatgccttgaccgcttgtttacttaggtctctagttgaggagggcattgttaagatttgctctggtccatgagcgtgtatgtttacttgttgtggtctgtagtacgtattcaccaagtaatttttggtgttttcaccgtagatactggtctctaattctctatgctcttctgtttggttgtccgttaagcctgttggtattttttctgatgcttcagtatgtcctgctgtctgacaccttcaacataactcttgttatcatacattagtgcttgagcttttctttggattctaacagacaatagattcaaggtactctggtaatttgatttttaggttgatttgctttagttccttggttcagttgctttaccattttattacctgacatcactgtcatgtggctaaagagttaacttaactgatacgatgatttctgatggcttgagcaggatgaaggttgttgctgcctacctgcttgctgtcctcgctgggaatgccagcccctccgctgaggatttgactggcattctggagtcagttggctgtgaagttgacaatgaaaggatggaactgctgctgtcccaactgagcggtaaggacatcaccgagctcattgccgcgggcagagagaagtttgcttcagtcccatgtggcggcggcggtgtggctgttgcggcaggtgcacctgctgctggcggagctgctcctgcagctgaggcaaagaaagaagagaaggtggaagagaaggaagaaagcgatgatgtaagatcgttgttctccaattctggctgcactttttccccctatcagaacagcagtaataaagtactctgttctggtattatcaatatactactttcaattcatcttgatatcaatggccacatattcttttatactgttgtttcctttgctgtcgacaacatccagagactttatcatgttcattatcttttatgcaggatatgggcttcagcctcttcgactaggttgcacagtcatcacagtattgtttcgggcagtgaaatcaaagggaaaccagagtcatgtttagattttaaccttattttatgttggaaagtactgcaaagactgctaattgtctctgtatttggtaattcagctgtagattgctatgatggttgggatttactcgtgaaccagagtttttctatcttatatcctgaattggttatcccaaagttttctggctttttaactattttgttgttacatgttgatattgctttgttcatccttatccacctactatggctatttgcaatcacaaaatcacttgatggcggtcagcctagaattatcaagctgatattaatgggtcataagatcttgtggaaccttttatttaaaaaaataaa

SEQ ID NO: 146306 - DNA, 1564 bp, Zea Mays
tccagccgtctcctccgcacgcgaaaaccctagcagctccgtagtccctctcctctggaggtggcggcgctcctcccgtcttcttcttcttcttcctgtactatatatatatagcttcccctcgcaaattgtcactgacgttcattcggcttgcttgattgttccaggtattcgcagtcgaccgtgtcctcggagcacgtaagttacgaatcttcgcttcttcttgtgatagtgtttcgagttgcctcatgtttaccttgagtcgtctgccggctcgccacatggtcaaggcgcatcgccgtcgatgcccgctcgattccaccgtcagccagatttttctggctcgatgtacctgcgacgtagtgtggagatgagacgcgcaggtgacgccggatgctagggaaccggaactagatccggtccctgctactgtggtggctgcgctggtttctgaattctcatattgggatttgaatgaatccttgaaacatttataacatgccttgaccgcttgtttacttaggtctctagttgaggagggcattgttaagatttgctctggtccatgagcgtgtatgtttacttgttgtggtctgtagtacgtattcaccaagtaatttttggtgttttcaccgtagatactggtctctaattctctatgctcttctgtttggttgtccgttaagcctgttggtattttttctgatgcttcagtatgtcctgctgtctgacaccttcaacataactcttgttatcatacattagtgcttgagcttttctttggattctaacagacaatagattcaaggtactctggtaatttgatttttaggttgatttgctttagttccttggttcagttgctttaccattttattacctgacatcactgtcatgtggctaaagagttaacttaactgatacgatgatttctgatggcttgagcaggatgaaggttgttgctgcctacctgcttgctgtcctcgctgggaatgccagcccctccgctgaggatttgactggcattctggagtcagttggctgtgaagttgacaatgaaaggatggaactgctgctgtcccaactgagcggtaaggacatcaccgagctcattgccgcgggcagagagaagtttgcttcagtcccatgtggcggcggcggtgtggctgttgcggcaggtgcacctgctgctggcggagctgctcctgcagctgaggcaaagaaagaagagaaggtggaagagaaggaagaaagcgatgatgatatgggcttcagcctcttcgactaggttgcacagtcatcacagtattgtttcgggcagtgaaatcaaagggaaaccagagtcatgtttagattttaaccttattttatgttggaaagtactgcaaagactgctaattgtctctgtatttggtaattcagctgtagattgctatgatggttgggatttactcgtgaaccagagtttttctatcttatatcctgaattggttatcccaaagttttctggctttttaactattttgttgttacatgttgatattgctttgttcatccttatcca

SEQ ID NO: 146307 - DNA, 279 bp, Zea Mays
atggcgagcagcggtgtgctatccaacgaggagcacgagaggggcgcggtggatggtgccacgacgaacgcatgggacccacaagtagatggggaggtggaggcacgacaccactggtgccatggctgggcgaagtcaatgaccgtgatggcgaacatgcgggaggatgagcgccggctggggcatgggagaaagaaggaaaagggcttaccagctcacagcgatcgtcgatggcgggacgagcacgacacgaacggaactccaagcgcaggcccctag

SEQ ID NO: 146308 - DNA, 123 bp, Zea Mays
ttttttgtttttcttttatttctctttgttttcactatttgaatttaggtgtaggttatataaatgctcttcaaaacacaatcatcacccctaaatatatactttttgagtttgcatggatgc

SEQ ID NO: 146309 - DNA, 1531 bp, Zea Mays
ttaccatgtacgcgcggatttttctttacgggaggacgggaggttgctatttatagtggcctcacgcgcgaccctgcacccaccgatcacacaatcccgacttcccgaggccgcccggcccgagagcaccgagcacgcttctcccaaactgcactgctccgtccacggcacggcgaggcggggacgccaaagcaaaaaggcaataaagccagcggccagggccaggaccaggagccggcgtcggtggaggctgaggcagaggcgccgaagcggcggcggcatgggggtgctgcggagcacgcagagcctggaggccgaggtagaggagatgcgcggcgcgctgctgctccatggcgcgtgggcgtggaggcccggcgggggcgccgccaagcgcgcggcccgcgccgtggagccccgccgccgcggaggcgcgcaccgtgtgcgtcacggggggcacgtccttcctcggctttgccgtcgtcgaccgcctgctccgccacggctacaccgtccgcctcgccctcgagacgcaagaggaccttgacaagctgcgggagatggagatgtttggggagaatggcagggatggggtctggactgtgatcgcaaatgtgatggacccggagagtttgcatgaggctttcgacggctgtgttggtgtctttcacacttcgtcgcatgtggatccagcgggcatctccggttacacgaaacacatggcaggcttggaggccaaagcagcagagctggtggtggaagcatgtgtgaggacagaatccgtgaggaagtgcgtcctgacgtcgtcactgttggcatgcgtctggaggcagaactaccctcatgaccgccgccggttcccaactaccatcgatgagaactgttggagcgacgagagcttgtgccgcgacaacaagctgtggctgtcactcggcaagacgatggcggaaaaggcggcgtggagggccgcacggggaacagacctgaagctagtgaccatatgcccagcactggtaaccgggccggggttccggaggcggaaccctactccatccattgcatacctcaaaggagcgcacgccatgctcgtccaaggtctgctggcgactgcgaacgtggagagggtggcggaggcgcacgtccgcgtgtacgaggagctgagcggcacggccgggggccggtacatctgctacgaccacgtggtgcgacgaggcgaggagttcgcggagctgcagcggcagctggggctcagggtccccgcgaccgcgacgcccgacggctatggcggcgacgacgacgacggccgggcgccgcggttccagctctgtaaccggaagctggcggcgctcatgtccgcgcggaggcggtgcacctacgacgcctacttccccatgccgcaggagtgagaccggaagaggagagagagctgctgatgctggacaacgactggagcgtgcgtgacaagtgacctcgtgtacatagcaatagtggtgatcggctcgcatcaatataataaatcggcctcaagtatccc

SEQ ID NO: 146310 - DNA, 359 bp, Zea Mays
tggctcctatgtataaccctgatcggtgtttacaatattattcactgggaacccattgtatatcgagcattatctctatattacatgtacaagttcttgaggaagacacagagaggaggttggatgtgcctgggaggaatactgctatgtgtaactggtactatgctcagcaaaccatttctgaaccttttgtcttgatctttggagtgtctcttactacaaggtgaccctttcactctttcagattctgaagcaatgtttgctgatctgggcatttcaaccagttgtcaatacagattgtttttacatgcatggtgtatccagcattgatccttgcatacatgggacaagctgcttat

SEQ ID NO: 146311 - DNA, 609 bp, Zea Mays
atggcaattgctattcttgcagcagttgtgggaagccaagccgtcatcactggtacattctcaatgatcaagcagtgcgcttctctgggctgctttcctcgggtgaagataatccatacatctgccaaagcacacgggcaaatatacatccctgagatcaattggattatgatgatactgtgcttagctgtaaccattggttttaggaacacaaaacacttgggaaatgcatcaggcactgtacttcttagccgcactcatcaagttcatgaggcactgtacttcttagccgcactcatcaagttcagggagggagcctgggtcccaatcgttcttgctctcatcttcatcttgataatgtgcgtctggcactatggcaccatcaagaagtacgagtttgacgtccagagcaaggtctccatcaactggctccttggactcagcccgaaccttggcattgtccgcgtccgtggcattggcctcatccacaccgagctcgaaaccggcatcccagctatcttctcgcatttcgtcaccaacttgcctgcctttcaccaggtagcctcaattcgtccttgtccaattgatggttccattgtccaaagctga

SEQ ID NO: 146312 - DNA, 1016 bp, Zea Mays
atggcaattgctattcttgcagcagttgtgggaagccaagccgtcatcactggtacattctcaatgatcaagcagtgcgcttctctgggctgctttcctcgggtgaagataatccatacatctgccaaagcacacgggcaaatatacatccctgagatcaattggattatgatgatactgtgcttagctgtaaccattggttttaggaacacaaaacacttgggaaatgcatcaggattggctattataaccgtcatgctggtcacaacgtgcctgatgtcccccgtgatagtcttgtgctggcataagagcatattccttgcgattggcttcatcctgttctttgggaccattgaggcactgtacttcttagccgcactcatcaagttcatgaggcactgtacttcttagccgcactcatcaagttcagggagggagcctgggtcccaatcgttcttgctctcatcttcatcttgataatgtgcgtctggcactatggcaccatcaagaagtacgagtttgacgtccagagcaaggtctccatcaactggctccttggactcagcccgaaccttggcattgtccgcgtccgtggcattggcctcatccacaccgagctcgaaaccggcatcccagctatcttctcgcatttcgtcaccaacttgcctgcctttcaccaggtagcctcaattcgtccttgtccaattgatggttccattgtccaaagctgagacagaggcgaatggtgcacggttctgccggttccgcatcccgccagattgggacgaattcgacatcggctccaccaaaggctccacggattcggcatcggctccacggattttcggtacccatgctttgtttagccagtgattttggtgctggtaggattttggtaatagtccatggtggaaaaagttatagctgaaaagctctattttcagttttccatcgaacatcattttgataggttgaagagccaaggctgacatatttgtctaaaaatgagaattata

SEQ ID NO: 146313 - DNA, 876 bp, Zea Mays
tgtttcattttattctatattttttcacactttattgtaggtggttcgaagttctatgatcataagacgcattcaggtcgatctcactcttcatgttcgtccccgctgcgcagaacgccactgcagcaccgatggaatcgtacggtgtcatcaggctcgactagatctagatgggatggactctacttgtgttgaaggagaggaagcacgtgtttggcttgcggggagcggggacatatttctgttcaacttttcttatgggttatgttacttgtcatgtcagattatacaactttaggtatttatgtctttgtgagaaaagtaccaaaatatttttactgcatggctattcagatgtgtttaatttgaatattctgtgtgtcgttgcaacacgcacgggtacatacctagtttttattaaggaccgtcacttgtctgtcactagtcgcctgacgactcgttccaggcccagttccgaaatgccacaaacaccccacccccaatcccactcgaatcgggcgaaagtcaagacggacgccgacctctccatccatgggcgagcaaacccactcccagactctctcctccacgcctcccgtctccgcctccgcctccgcctccgccgacctcggcgtgcgcaagggcgttcagatgctctacgccctccaagacgtgcctcgcccctcgcagatggacaggctgtgcgagcggtggcgcccctaccgctctgttggggcctggtacatgtggcggctcattgagtccaaggtgccccagccggcgccgcccatccctgccctcccttcgccggacggccagattatgctacagcagcagcagcagcaatctgtcatccaaatgatcattcccttttag

SEQ ID NO: 146314 - DNA, 2075 bp, Zea Mays
tgtttcattttattctatattttttcacactttattgtaggtggttcgaagttctatgatcataagacgcattcaggtcgatctcactcttcatgttcgtccccgctgcgcagaacgccactgcagcaccgatggaatcgtacggtgtcatcaggctcgactagatctagatgggatggactctacttgtgttgaaggagaggaagcacgtgtttggcttgcggggagcggggacatatttctgttcaacttttcttatgggttatgttacttgtcatgtcagattatacaactttaggtatttatgtctttgtgagaaaagtaccaaaatatttttactgcatggctattcagatgtgtttaatttgaatattctgtgtgtcgttgcaacacgcacgggtacatacctagtttttattaaggaccgtcacttgtctgtcactagtcgcctgacgactcgttccaggcccagttccgaaatgccacaaacaccccacccccaatcccactcgaatcgggcgaaagtcaagacggacgccgacctctccatccatgggcgagcaaacccactcccagactctctcctccacgcctcccgtctccgcctccgcctccgcctccgcctccgccgcgttacctgccacgaccagggcctcggaccccgcctctgccgcctccacctcccgcgccagcgccgcggcctcccgcgccagcgccgcggcctcccgcctcaagaagaaggaggcgaacgcatcgcccgaccccaacccggccaagaagcaccgcctgacgttctcgatcccgggccagcccctgtccgcggccggcgaggtgggcgtggccatccgccacctgcgcgccgtggaccccgccctcgccgccgtcatcgacgcgcacgagccccccgtgttccagtgcccgcaccgcccgttccactccctcgtacgatccatcctgtaccagcagctcgccttcaaggccgccgcctccgtctactcccgcttcctcgcgctcctcggcggcgaggccagcgtggcccccgacgccgtcctcgcgctcagcccgcaccagctccgccagatcggggtctccccgcgcaaggcgtcctacctccacgacctcgcccgcaagtatgcctcagggatcctctccgacgcctcgatcgtcaacatggacgaccgctccctcgccgccatgctcactatggtcaagggcatcggcgcctggagcgtccacatgttcatgatcttctccctcgcgcgccccgacgtgctcccctccgccgacctcggcgtgcgcaagggcgttcagatgctctacgccctccaagacgtgcctcgcccctcgcagatggacaggctgtgcgagcggtggcgcccctaccgctctgttggggcctggtacatgtggcggctcattgagtccaaggtgccccagccggcgccgcccatccctgccctcccttcgccggacggccagattatgctacagcagcagcagcagcaatctgtcatccaaatgatcattcccttttagatgctcccagggatggggtgaattcggtatcacttctgcccattagtcactccatcttagatcaatgtttactctgcgcatccgatagtcagttccgcactttgttgttctggaatggaacggcaggagggtggacatgaaatgagtattttcgtccaaacttattaagttttcaatttggtttgtgttgtttatctgtgtcaagaatctgtgaagatcatggttggctgttgtttacaatgtaaaaatcacctagtagtattttagaacctcctggaattgttccatgcttcatactagtgtccacctgttataaaatgattaaggccttgttcgtttgtgtcggattggtgggtcggaacaattcccaattcccggctggattgcttctctaatttatataaactttgattagccggaacgattccgggtgcaatccgacgcaaacgaacaagccgtaagggcctgttcggttcttggggattagccacccggaactattcctagccgaattggttacctaatttatataaggtttg

SEQ ID NO: 146315 - DNA, 1415 bp, Zea Mays
tgtttcattttattctatattttttcacactttattgtaggtggttcgaagttctatgatcataagacgcattcaggtcgatctcactcttcatgttcgtccccgctgcgcagaacgccactgcagcaccgatggaatcgtacggtgtcatcaggctcgactagatctagatgggatggactctacttgtgttgaaggagaggaagcacgtgtttggcttgcggggagcggggacatatttctgttcaacttttcttatgggttatgttacttgtcatgtcagattatacaactttaggtatttatgtctttgtgagaaaagtaccaaaatatttttactgcatggctattcagatgtgtttaatttgaatattctgtgtgtcgttgcaacacgcacgggtacatacctagtttttattaaggaccgtcacttgtctgtcactagtcgcctgacgactcgttccaggcccagttccgaaatgccacaaacaccccacccccaatcccactcgaatcgggcgaaagtcaagacggacgccgacctctccatccatgggcgagcaaacccactcccagactctctcctccacgcctcccgtctccgcctccgcctccgcctccgccgacctcggcgtgcgcaagggcgttcagatgctctacgccctccaagacgtgcctcgcccctcgcagatggacaggctgtgcgagcggtggcgcccctaccgctctgttggggcctggtacatgtggcggctcattgagtccaaggtgccccagccggcgccgcccatccctgccctcccttcgccggacggccagattatgctacagcagcagcagcagcaatctgtcatccaaatgatcattcccttttagatgctcccagggatggggtgaattcggtatcacttctgcccattagtcactccatcttagatcaatgtttactctgcgcatccgatagtcagttccgcactttgttgttctggaatggaacggcaggagggtggacatgaaatgagtattttcgtccaaacttattaagttttcaatttggtttgtgttgtttatctgtgtcaagaatctgtgaagatcatggttggctgttgtttacaatgtaaaaatcacctagtagtattttagaacctcctggaattgttccatgcttcatactagtgtccacctgttataaaatgattaaggccttgttcgtttgtgtcggattggtgggtcggaacaattcccaattcccggctggattgcttctctaatttatataaactttgattagccggaacgattccgggtgcaatccgacgcaaacgaacaagccgtaagggcctgttcggttcttggggattagccacccggaactattcctagccgaattggttacctaatttatataaggtttg

SEQ ID NO: 146316 - DNA, 1569 bp, Zea Mays
ccagctcaggcatgcagcccggaccccccccccccccccccccccccccaccaccactcgcctcgccgcaggcggtcacgatcaatgccgcatccctccgctgccggcctgctcacacagcctcctcttcctccagtcctcctcccacgcaccacgggcgaacaaaagcacaaaagccaacccacaccgcaccacccctactacccctaggaaacgacgaccgcaactacataccagccagccgacccgacccccagcagtcttgcaggctacagcccctgcggcaccagagggagcggccgcggcagggcgtcctcgtcgccgcggcagggcgctagggcaggcaggcatgcgctgatggaattcacggcccaggagggggaggagcccgtctcggaggagatgggcgcgagctccgcgccgccgccctgcctcggccccggccgcggcccggggaaccagaaccacgccgccgaggcgacgtaccacgagtgtctgcgcaaccacgcggcggcgctgggcggacacgtcgtcgatggctgcggcgagttcatgcccgaggacgccgacaggctcaagtgcgcagcctgcggctgccaccgcagcttccaccgcaagggcgacgcggggcgccgccaccagctcctgctgccgccgcccgccgcggcggtcccgcgcgtcccgctgctcctgcctccgccccacccctacgcggccggcgctgcccacccccactacgcgtcgccgccgctgttcccgtaccacggcacgcccagcggcaccacgaccgagtcgtccagcgaggagcgtggcccgccgtccgggttcgccgccgcgccgcacgcgcacgcgcagggccacgtccggcggaagcggatccggaccaagttcacgccggagcagaaggagcagatgctggcgttcgcggaacgcctcggctggcggatgcagaagcaggacgacgcgctggtgcagcacttctgcgaccaggtcggcgtccggcggcaggtcttcaaggtctggatgcacaacaacaagcacatcggcagcggcggcaggaggcagccgccgccgcacctgccgcctcccgaggggcagcaacagccccagcagccccagtagccacggtgggagacaaggctcagcagtcagcagcaccaccaccaccaccaccatttgcttaatcccccgcctcatttttttatgggctccgagagggggtgtgggattaaacaagggaagtcaggaggggttcctatcctttcttcccttccgtttttgggttcaccttatccttgattttttgtagtcacttcacgtcttcaccatcctcttttgcttcacgattcttgcttgcatatctttggttttattctgttcttactagcttgggggatcaattggaaggaggaggaggcactgtgcatgttttgtagctacaatcctgctaccttattgccatttagcccccttcggcgagcaaggttaaccaatctaaattccgatctatatttccatcttcacttaatctgttaatcaatagcgaatatagccggtggtctctcctcc

SEQ ID NO: 146317 - DNA, 112 bp, Zea Mays
gggaaatttggcatatccagatgtgatactggatattttgatcaacaatatattcaactacggtatcgagtaacaagttttagcatagaaaggttcccgccgtgaaaaaaaa

SEQ ID NO: 146318 - DNA, 238 bp, Zea Mays
caggcattgaggcatgtgcttgctgaagttgatttggaccggtttgaccacgttgagcgcatgccagaccctatgccaaagccagcttgctaattgtgttgctctctctcaccacagtctagaccatgactttgtagtttgcaagcatctgttcatcacatgtttgactagtaaccgaaaatgtcaacaacggctgctgaggccaagatattgctctggctccgccttatctacaggc

SEQ ID NO: 146319 - DNA, 100 bp, Zea Mays
ccgtcatcaccaaaacataatttcattgtaccttgtgtcacacaattttatggctagtgcgactcagctaaaaaacgaacatctgtgcaccatgtgaaac

SEQ ID NO: 146320 - DNA, 890 bp, Zea Mays
gccagcgcgttcttcgtgctctgtcaatctcgcagcagcgccactctcttccccacttccccaccgtggtccccccttccccacccaccggagaccgcgccattccccccttccccaccgcgaccaccagaccggcatggcgcatacctgagattgcgctctccccaccggatccggcttggcgcacaccggagaccacgcccttcacccttccccaccgtggccaccggatcccgcacacgcgcgctccggcatggcgcatccacagcacgaacgcccggaatggagcagcgtgcgtccatgtacccaccggagaccaggccattcaccaccgcagtgcccccaccctcatcatcctcgcgtccccccgtcgctacagccgccaagttggtctgcagggaggtccccccctcaccgcgccacgctcgccgcgcccgccgctcggtcctcgccgcgacatgcgcctaccctcacctacacgatgctcactcctccgcacatcgcaaagccgaaggtccacgccccctccgtgctgtgaccccctcccttgtgtgcccatgatgctggaagggaagtcctaccttgtgccgcgctccctgctaagctcctgcgagatagagacacagtgggcgtacttcgcccacgaggtccacggcggcaagcgcctggcgccggaagactgcgaggtcgaagacctggacaaagctgacgtcggcggcaagcgcagcaagccgccgtctccacagccgcacacgccggacatctccgagggtcgcggctccagccgccatgcctccggttgcggagagcagcagggcactgggagcaaccccatgaattcaatcgaccgtgacctgaccctcaatagcctcctccggactattgaatag

SEQ ID NO: 146321 - DNA, 1530 bp, Zea Mays
atgaggtcagacacggagcacggacgtgtcctcagtcgctgttgtcatgtgtcagtggatgcagtcgtcgctatcgcccacaagaaacctcgcttcgtggaaagattagtatttaacatttggatgaggaagtcaaggacaccgacctcaagcgctctaccaggaagtccgaggaggccgtcctcgccgacctcgcttggctcggcctcgaatgggaggaagacctgttggtggaagggtgtttttcacaaatatgaagatagccttctcagcactgagcttgattatcttcctaacaacacacacgaattgtccaactgtgctcataaaagaacacctgtgatgcctagaaggaaccctccaccacctccaagagagcaatctaatagtttttttaccgcatggaagctcaaaggcaggagatgcaccgttagaggtctctctgacacggagatacaaaattcttggaaaagtagagcagaacaacctcaacccgagccaaaatgtgagaaagacccatttaacagctttgttgcagattttgacactcacaatctcaacattgccgttggtaaggcatccgaacttgaacttgaagtctccaatctaaaggagcagttgaagaaaatcacattagaaaaggctgagatgacaaccaagcatgaaaagttatctgcaatctgccgatcacagcgtcaggagatccaagagctgaagctcactcttgttgagccaacgcctccctcaaacaaagtcagctcaaggacacaagattctggatctcagcgaaaggaaaagatccaaggcactgtgtgggagcttgaacaagggatgcttgctattgctagcaactcctcatcagccagttctgatgccaaaacatggcaggctttccctgacacaaagactcaggcccgaccaaaggtcgatcatgcaactaatgggagccaaaacataaccaagaacacaacgtcaggtgcttcccccgatgcgtggggttttggtactgataatttcagaacaccagcaacaacattaagagctaccacacagatcaacagggcagctgcccaacggagctcatcccaaagatttaacgctggtgtggccaagagccagtctcggagctgcttccccagggtgaaagtcgtgcacacgtcgctgcagcgggacaacaggtactacgagcgcgaaaacttgctgatggtcatcaagaacaacctgttgtggcaccaccttagcatgggcctgggctatgatgactccaactccaacgatagcggcgtgtcacctagctcggaccgtgcgaacaacatagaggtcgccacagtgtcgccggtgccggcggtcgtcaagaagcaggcgaggttcctggtggcctcacctaggagccccgacgtgaatgagaccatgatggaggagctgcacgagctgtgcgaggcgcgggaggccggcaccgcgttcatcatggagcactcggcatgtggagaccaagcccgggtcgtcactgctcaagaggctgacatgtga

SEQ ID NO: 146322 - DNA, 2367 bp, Zea Mays
atgccgcgccgcgacgaggtcgcctacgcgactcttctctcgggctatgccgcggcagctgacttcccgggcgctatggcgctcttctcccgcttccgcgcctcctcctcccagccacacgacgccgcggatccgttcatcctcagccccgtcctcaaggcgtgcgcttccgctgccgccagcgcagggctcctccccctccctcacgccgccgcggcggccgctctgcacgcgttcgccgtccgctcctcctccctgccgtccgtgttcgtctccacggcgctcgcggacgcctacgccaaggccggccgcctcgacctggcgctgcaggtgctcgacgaaatgcccagcaggaacgtggtctcgtggaccacgctcgtcgcctcgctggcgcgtgctggccggcggcacgacgcgctccgccgcttcgccgagatgcgggcctccggcgtggcctgcgactcccacgcctgctcggcggctctcacggcgtgcgccgacgcggggctgctgccacgcggccgcgaggtgcacgcgctctgcgccaagctcggcctcgacgccgtgcccttcgtcgccaacgcgctcgcggcgctgtacgcgcggtgcggcgatgtcgaccgcgcgctggccgcggtcggccgcatgggctcgcacgacgttgccgtgtgcacaacgctgatcgcatcctacgtccagaccggccgcacggaggaagccatcgaggcgtttgtgagaatgcttcgcgatgagtcgtcaaattctgcttcaccaaatgagtatacgttctctgccgtaattgccgcgtgtccaaatatggatcgtgcatatcttggagagcagttacatgcacaagctgcacggagagggctatctcatgcccgctctgtggccaattcccttgtcaaactctattcccgccgtggccatctttcagctgctgatgctatcttccgggagagtgtcgtcaaggatgttgtctcctggagcacaattatatcaggatacacacaagaaggcctcgccgaggagtcttttgccttgttctcagaaatgcggcatcacagtagctgccctcggccgaatgagtttactcttgccagtctcttcagtgtgtgtgcaagtgctgcgtcgctggatactggacgccagctgcatgcactcgctgttgctgctgggcttgaacaccatgcaatggtcaggagtgcgcttgttaacatgtatggaaagggtggtagcatgtcagatgctaatgtcgtattttccaatcgcactaaagatgatgtgatttcatggactgcgatgatcgttgggcatgctgagcatggtcacagcaaagaggcttttgaactgtttgaggaaatgtgccgtatcgggctaaagccagaccatgttacgttcattggtgtactcactgcttgctctcacgcgggggaacttgagctcggattgagatacctcaatgcaatgaacaaaagctatgggctggagcctgaaaaggagcactacggttgtgttgttgatttgttagccagagctggtagaatacatgaggctgaggagttgattggaagaattgctgctgaggaaagagatggtgtggtttggacatccttgcttagggcatgtgctgctcgaggggcagaggaaactggaaagatagctgcagagaggatgatggaggcagagccatggggttcaggagcacatgtggtgatggccaacctctatgcaagcaaggggctgtggtgtgaggcagcacaggaacgccatttgatgaagcagaaaggtgttctaaaaggtgcagggtggtcatcagtcgaagttggaggggacgacaggggggttggagtgtttgtttcaggagatcggacaaatccccaagacagtgccatctacatgatgcttgagctgatgtactatggagccggaatgatacttcatgaagtgagaataaagcgggatagcaaaagggagggcaggcttcgtgcttggtgcgagttgtctcactgggtcaccaggtcgcatgttcgaagcagtctcttcgcatttgtggggggaaggcttgcctcggtttacccccttccccagaccccactcatgtgggagactccggccctgggtctgccccttttcgctgcgatctgtattgtgccattcttgccagccatgggcgattcagtcatttccagtacaccaaatcttatagtcaaggaatgcaacaaaactgttttcatatcagaaatggtgttgaaaaagacgcaaaatttggaagagggcaatgcagaaagtttggcaatttttgaacatttttctgattctggtaatgatatgcaatctgaatatactgaagttgtcgctcattag

SEQ ID NO: 146323 - DNA, 673 bp, Zea Mays
atcgcacgtggccaccgcacagcctgcctccgccgacgccccgggcacgaccggtgccacctcaatctgtccccaacgcaccctcgcccccaacgcctaccacgtgcgcccagcttgcccccacacgctgtccctaatgcaacctcgcctgctcgcactgctccacctcccccatacgttggaggagttccacgcctgcctcctctgctcccacggccgcaacggcaccacgacgcgcgtcgtcgggagccaccaggatgtctgctacctaccccttctcaaggagtagctctccgagccatggactggcgcgagtgaggcaccgtcatcgaggtgaaggaccaaggccagtgcgtcatgttgctctcttgctccatcaccaattcagtatttttagtagctttttctgcaagcagatctcaaaattccggagaatgtctcgaagtgcatagattgaaaaaagtagcataagaagaatggatttgtggaattgattattttcacaagactgcaaatcagagtagatgtttttcgaccatgctttactctaaacgctttatgaagcatctcagcgtgcgtttcagctctacagttctataatccatccaagtatccatgtatgtatgctcaacaacatctatttgctcgatcgatacttgttgggtttttgaaa

SEQ ID NO: 146324 - DNA, 583 bp, Zea Mays
aaacgaaaggactgccctaacctcgtgcagtcgtgcccgcttgtttcacttgctcgccttcacccctcgccgccaccgccgccgccgtcgccgtcgcaagcgagacgatgctcgagatcaacttgttccgcaccgacaagggcggcaacccggaccttattcgcgagtcctagcgcagtcggttcgcctccgtcgagctcgtcgacgaggtcatcgccctcgacaaggcatggcgtggcaattcgagctggataagatccggcaggagctcaacgctaccagcaaaaagatcggcaagctcaaagccagcaagcaagaagaggaagcgaagaagctcatggatagcacagacgaaattaagaaaaggttggcagccaaagaagttgaggtgcaggaggccaagagcaccctcgacgccaaggtcatgacgatttgcaacatcgtgcatgagtctgtgccattcagcgatggcgaggcaaacaataaaattgtacgggcatttggagagaagagagtagaggataatttgaagaaccacgtggacctttgcaggatgcttgatattgtcgcattggaaaagggt

SEQ ID NO: 146325 - DNA, 3124 bp, Zea Mays
tctcccgttcccggccgtttattattagctgagctcgtgcctcgtacacgaggccggccctctcgctctcggtgcgtgcgtgggctgaggccgctgagaggcaatacgcggtgcgtggggtgtggggagcgaggcggcggcgacgagggttttgctgctccgcacaccgcgcgcagcggcgacgcgaccgcagctcgtcgccgccccggttcgaggaggaggaggaggagccggctgaggcgcctgtggtggctgctgcggcgggagcgggagcgccatgaggggcggcggcgggaggcagccttcctatgcggcgtcggacggggcggatgcggatgcggcggcggtcccggctgcttccaggaagatggtgcagagcctcaaggggatcctggccgaccgctcggagggcgagatctacgccaccctctgcgactgcggcatggaccccgacatagccgtagagaggctcatctcccaggatacttttcatgaggtgagaagaaagcgggataagaaaaaggagactaaagttaatcaggaaacaaggcctcgtccattccagaaatctatatatggaggatataaggctggttcagatcgaagtgggagagcaaactctataggcggtttcaaaggccctgccaaaaaagaaccagagttacatgcttcaataaactcgtcagccttagatgtcaacacaagtgccacttcagaaacattttctgctactggcaatgttgcccaggctgatgctaagaacactttccagcctccatctcaagtgaaacatggttggggtggtgttccaggtcgcccttccatggctgaaatagtgaagatgggccggcctcaagctaaagttgggagcagatctgttgcaagtagcattgtcatgccagctattggtgattcagccattcccaatacaccaaatcttgcgcccaatgaatacaaccaaactgtatttgcatcagaagtaggccatggtgcagcagataaattgccaaatgttgccgatgaggtgcactctgtatctaaagatgcttcctcacttgatatgttaccttcagcagagggaacagatgttgaagccccttccatgagtgctaacatgcaaggttcatcaacgccagatgccaatgaagatgacgttgaaaaagacacaaatttggaagagggcaatacagaaagcttgacgactcctggacaagtttctgcttctggtaaaggtatacattcagaatatactgaacttgtcagtcatctggatgaaggctcgatggagaaaacagatgactttcagctcgatgctctttcatttgaacacaatctaacagatctgaatggagatgtgtctacaacgacaacacaatttgatcatttgactctgcttgatggaccaaaattgtctgatgagaatccggctgtaataatccctggccatcttcaggtttcaaacgctgattgtgcgcacttgacatttggtagttttgtgtatggaacacttgatgcgtccttgacaacaaaacctcttgagagtcatggggatatcgtaacaattcctgacgatgattatgaccaatcagagggcagaatccatgacgatgaaagcaaggtaacattagcgcctgctgctaatgaatatgttacttctacgtcaaacagcaatgtagagaatcttgatattacatcagtacagcaatctgaagtcactagatccaatttcctggatgtcacgagcaatacggaatacaacctatcatcacccccagattatgcaacttcaagtgcagcgctgcaagattctacttcacagagttatctacaggaaaatcgacaattccagagcatttctcctctcccaagcttcatgcaaatacaaaatggtctcatgtcaccagcaattccaccattgcgcgaatttgatccagcattctcactattgctcactaatcctcctattatgcatggtacaacgtcatcatccatgagcagtgcaactgtttctacgcagccccaagagaatgccaatccagttggtttacccaaccctcaattgactcaatctcagccaagcaccagcattgctccagggcctccactccctcagcatcttcttcatccctatgctcaaacaacccttcctcttggatacgcaagcatgattggctatccatctcttccaccaagctatgcatatctcccacctgctgcttttcagcaaccatacatgaacagtggcatgttcctccaccaagcagcagcagcagttcccaactcaagtgtgaaataccctctgccgcagtacaaaagcaacattgcccttgctagcttaccacagccaggctctttgctctcaagctatgtcgggggctttggaactgcaaacaacatgcctggaaatttccctctgaaccaaagtacaacgtcggcaaccgcaactcttgggtttgatggaacggtcccgtcacatttggaagatggaaaccagtttgtttgtcttcagcagaacgagaaccctgcaatgtggatgcatggagctggttcacgagggatgcccccacttgcagccagtaccatgtatggctatcaagggcagagtcatcagaccggccttcggcagggccagctaccttcacaatatggctctgctctagggcagtcacagccgggcctgggccccgaacaccgaaatcctagcgatagtaacctaagtggtgctgctcaggctaaccagatgtggccaaacagctactgatccacccgaccaccccccttatcaacatctgtggaagacggtcttgttgttgtgtgcgcaaacgccagaggccatgcaaatgcctgtggcctgatccaggcacgcggataccagctgcgtgtgcatgagttactgtcgtgacattttgagaggcgcaagagatatatgttggagcatgttccacctgtagggtttgtaggatatggccaaaaatgtagctggatctgttcattcaaattctgatagggaaagggccggtcgtttttcgttctatttcccccctttttttgtcgtttgcatatcttgtgacaataaaaccggaatatctaacacatcagcaccattagttccccgaggggagtg

SEQ ID NO: 146326 - DNA, 3026 bp, Zea Mays
tctcccgttcccggccgtttattattagctgagctcgtgcctcgtacacgaggccggccctctcgctctcggtgcgtgcgtgggctgaggccgctgagaggcaatacgcggtgcgtggggtgtggggagcgaggcggcggcgacgagggttttgctgctccgcacaccgcgcgcagcggcgacgcgaccgcagctcgtcgccgccccggttcgaggaggaggaggaggagccggctgaggcgcctgtggtggctgctgcggcgggagcgggagcgccatgaggggcggcggcgggaggcagccttcctatgcggcgtcggacggggcggatgcggatgcggcggcggtcccggctgcttccaggaagatggtgcagagcctcaaggggatcctggccgaccgctcggagggcgagatctacgccaccctctgcgactgcggcatggaccccgacatagccgtagagaggctcatctcccaggatacttttcatgaggtgagaagaaagcgggataagaaaaaggagactaaagttaatcaggaaacaaggcctcgtccattccagaaatctatatatggaggatataaggctggttcagatcgaagtgggagaggcggtttcaaaggccctgccaaaaaagaaccagagttacatgcttcaataaactcgtcagccttagatgtcaacacaagtgccacttcagaaacattttctgctactggcaatgttgcccaggctgatgctaagaacactttccagcctccatctcaagtgaaacatggttggggtggtgttccaggtcgcccttccatggctgaaatagtgaagatgggccggcctcaagctaaagttgggagcagatctgttgcaagtagcattgtcatgccagctattggtgattcagccattcccaatacaccaaatcttgcgcccaatgaatacaaccaaactgtatttgcatcagaagtaggccatggtgcagcagataaattgccaaatgttgccgatgaggtgcactctgtatctaaagatgcttcctcacttgatatgttaccttcagcagagggaacagatgttgaagccccttccatgagtgctaacatgcaaggttcatcaacgccagatgccaatgaagatgacgttgaaaaagacacaaatttggaagagggcaatacagaaagcttgacgactcctggacaagtttctgcttctggtaaagatctgaatggagatgtgtctacaacgacaacacaatttgatcatttgactctgcttgatggaccaaaattgtctgatgagaatccggctgtaataatccctggccatcttcaggtttcaaacgctgattgtgcgcacttgacatttggtagttttgtgtatggaacacttgatgcgtccttgacaacaaaacctcttgagagtcatggggatatcgtaacaattcctgacgatgattatgaccaatcagagggcagaatccatgacgatgaaagcaaggtaacattagcgcctgctgctaatgaatatgttacttctacgtcaaacagcaatgtagagaatcttgatattacatcagtacagcaatctgaagtcactagatccaatttcctggatgtcacgagcaatacggaatacaacctatcatcacccccagattatgcaacttcaagtgcagcgctgcaagattctacttcacagagttatctacaggaaaatcgacaattccagagcatttctcctctcccaagcttcatgcaaatacaaaatggtctcatgtcaccagcaattccaccattgcgcgaatttgatccagcattctcactattgctcactaatcctcctattatgcatggtacaacgtcatcatccatgagcagtgcaactgtttctacgcagccccaagagaatgccaatccagttggtttacccaaccctcaattgactcaatctcagccaagcaccagcattgctccagggcctccactccctcagcatcttcttcatccctatgctcaaacaacccttcctcttggatacgcaagcatgattggctatccatctcttccaccaagctatgcatatctcccacctgctgcttttcagcaaccatacatgaacagtggcatgttcctccaccaagcagcagcagcagttcccaactcaagtgtgaaataccctctgccgcagtacaaaagcaacattgcccttgctagcttaccacagccaggctctttgctctcaagctatgtcgggggctttggaactgcaaacaacatgcctggaaatttccctctgaaccaaagtacaacgtcggcaaccgcaactcttgggtttgatggaacggtcccgtcacatttggaagatggaaaccagtttgtttgtcttcagcagaacgagaaccctgcaatgtggatgcatggagctggttcacgagggatgcccccacttgcagccagtaccatgtatggctatcaagggcagagtcatcagaccggccttcggcagggccagctaccttcacaatatggctctgctctagggcagtcacagccgggcctgggccccgaacaccgaaatcctagcgatagtaacctaagtggtgctgctcaggctaaccagatgtggccaaacagctactgatccacccgaccaccccccttatcaacatctgtggaagacggtcttgttgttgtgtgcgcaaacgccagaggccatgcaaatgcctgtggcctgatccaggcacgcggataccagctgcgtgtgcatgagttactgtcgtgacattttgagaggcgcaagagatatatgttggagcatgttccacctgtagggtttgtaggatatggccaaaaatgtagctggatctgttcattcaaattctgatagggaaagggccggtcgtttttcgttctatttcccccctttttttgtcgtttgcatatcttgtgacaataaaaccggaatatctaacacatcagcaccattagttccccgaggggagtgaaagatagtctgttgtctttgc

SEQ ID NO: 146327 - DNA, 3373 bp, Zea Mays
tctcccgttcccggccgtttattattagctgagctcgtgcctcgtacacgaggccggccctctcgctctcggtgcgtgcgtgggctgaggccgctgagaggcaatacgcggtgcgtggggtgtggggagcgaggcggcggcgacgagggttttgctgctccgcacaccgcgcgcagcggcgacgcgaccgcagctcgtcgccgccccggttcgaggaggaggaggaggagccggctgaggcgcctgtggtggctgctgcggcgggagcgggagcgccatgaggggcggcggcgggaggcagccttcctatgcggcgtcggacggggcggatgcggatgcggcggcggtcccggctgcttccaggaagatggtgcagagcctcaaggggatcctggccgaccgctcggagggcgagatctacgccaccctctgcgactgcggcatggaccccgacatagccgtagagaggctcatctcccaggatacttttcatgaggtgagaagaaagcgggataagaaaaaggagactaaagttaatcaggaaacaaggcctcgtccattccagaaatctatatatggaggatataaggctggttcagatcgaagtgggagagcaaactctataggcggtttcaaaggccctgccaaaaaagaaccagagttacatgcttcaataaactcgtcagccttagatgtcaacacaagtgccacttcagaaacattttctgctactggcaatgttgcccaggctgatgctaagaacactttccagcctccatctcaagtgaaacatggttggggtggtgttccaggtcgcccttccatggctgaaatagtgaagatgggccggcctcaagctaaagttgggagcagatctgttgcaagtagcattgtcatgccagctattggtgattcagccattcccaatacaccaaatcttgcgcccaatgaatacaaccaaactgtatttgcatcagaagtaggccatggtgcagcagataaattgccaaatgttgccgatgaggtgcactctgtatctaaagatgcttcctcacttgatatgttaccttcagcagagggaacagatgttgaagccccttccatgagtgctaacatgcaaggttcatcaacgccagatgccaatgaagatgacgttgaaaaagacacaaatttggaagagggcaatacagaaagcttgacgactcctggacaagtttctgcttctggtaaaggtatacattcagaatatactgaacttgtcagtcatctggatgaaggctcgatggagaaaacagatgactttcagctcgatgctctttcatttgaacacaatctaaatctgaatggagatgtgtctacaacgacaacacaatttgatcatttgactctgcttgatggaccaaaattgtctgatgagaatccggctgtaataatccctggccatcttcaggtttcaaacgctgattgtgcgcacttgacatttggtagttttgtgtatggaacacttgatgcgtccttgacaacaaaacctcttgagagtcatggggatatcgtaacaattcctgacgatgattatgaccaatcagagggcagaatccatgacgatgaaagcaaggtaacattagcgcctgctgctaatgaatatgttacttctacgtcaaacagcaatgtagagaatcttgatattacatcagtacagcaatctgaagtcactagatccaatttcctggatgtcacgagcaatacggaatacaacctatcatcacccccagattatgcaacttcaagtgcagcgctgcaagattctacttcacagagttatctacaggaaaatcgacaattccagagcatttctcctctcccaagcttcatgcaaatacaaaatggtctcatgtcaccagcaattccaccattgcgcgaatttgatccagcattctcactattgctcactaatcctcctattatgcatggtacaacgtcatcatccatgagcagtgcaactgtttctacgcagccccaagagaatgccaatccagttggtttacccaaccctcaattgactcaatctcagccaagcaccagcattgctccagggcctccactccctcagcatcttcttcatccctatgctcaaacaacccttcctcttggatacgcaagcatgattggctatccatctcttccaccaagctatgcatatctcccacctgctgcttttcagcaaccatacatgaacagtggcatgttcctccaccaagcagcagcagcagttcccaactcaagtgtgaaataccctctgccgcagtacaaaagcaacattgcccttgctagcttaccacagccaggctctttgctctcaagctatgtcgggggctttggaactgcaaacaacatgcctggaaatttccctctgaaccaaagtacaacgtcggcaaccgcaactcttgggtttgatggaacggtcccgtcacatttggaagatggaaaccagtttgtttgtcttcagcagaacgagaaccctgcaatgtggatgcatggagctggttcacgagggatgcccccacttgcagccagtaccatgtatggctatcaagggcagagtcatcagaccggccttcggcagggccagctaccttcacaatatggctctgctctagggcagtcacagccgggcctgggccccgaacaccgaaatcctagcgatagtaacctaagtggtgctgctcaggctaaccagatgtggccaaacagctactgatccacccgaccaccccccttatcaacatctgtggaagacggtcttgttgttgtgtgcgcaaacgccagaggccatgcaaatgcctgtggcctgatccaggcacgcggataccagctgcgtgtgcatgagttactgtcgtgacattttgagaggcgcaagagatatatgttggagcatgttccacctgtagggtttgtaggatatggccaaaaatgtagctggatctgttcattcaaattctgatagggaaagggccggtcgtttttcgttctatttcccccctttttttgtcgtttgcatatcttgtgacaataaaaccggaatatctaacacatcagcaccattagttccccgaggggagtgaaagatagtctgttgtctttgcatcaccagtattgcgcctgcctcgcttaaattttatgattgagatggttatttgatggatgagaatttcccaacctgtgccttgtctgatgagatgtatcgttgtatttgaacattgaatgcataaaaaagagagattgcagcacacatttgccagccaaatgttgattattcgctgaagtatgtaaatagctctcattatattgattgatttggtcaaattgtttggtt

SEQ ID NO: 146328 - DNA, 3150 bp, Zea Mays
gccctctcgctctcggtgcgtgcgtgggctgaggccgctgagaggcaatacgcggtgcgtggggtgtggggagcgaggcggcggcgacgagggttttgctgctccgcacaccgcgcgcagcggcgacgcgaccgcagctcgtcgccgccccggttcgaggaggaggaggaggagccggctgaggcgcctgtggtggctgctgcggcgggagcgggagcgccatgaggggcggcggcgggaggcagccttcctatgcggcgtcggacggggcggatgcggatgcggcggcggtcccggctgcttccaggaagatggtgcagagcctcaaggggatcctggccgaccgctcggagggcgagatctacgccaccctctgcgactgcggcatggaccccgacatagccgtagagaggctcatctcccaggatacttttcatgaggtgagaagaaagcgggataagaaaaaggagactaaagttaatcaggaaacaaggcctcgtccattccagaaatctatatatggaggatataaggctggttcagatcgaagtgggagaggcggtttcaaaggccctgccaaaaaagaaccagagttacatgcttcaataaactcgtcagccttagatgtcaacacaagtgccacttcagaaacattttctgctactggcaatgttgcccaggctgatgctaagaacactttccagcctccatctcaagtgaaacatggttggggtggtgttccaggtcgcccttccatggctgaaatagtgaagatgggccggcctcaagctaaagttgggagcagatctgttgcaagtagcattgtcatgccagctattggtgattcagccattcccaatacaccaaatcttgcgcccaatgaatacaaccaaactgtatttgcatcagaagtaggccatggtgcagcagataaattgccaaatgttgccgatgaggtgcactctgtatctaaagatgcttcctcacttgatatgttaccttcagcagagggaacagatgttgaagccccttccatgagtgctaacatgcaaggttcatcaacgccagatgccaatgaagatgacgttgaaaaagacacaaatttggaagagggcaatacagaaagcttgacgactcctggacaagtttctgcttctggtaaaggtatacattcagaatatactgaacttgtcagtcatctggatgaaggctcgatggagaaaacagatgactttcagctcgatgctctttcatttgaacacaatctaaatctgaatggagatgtgtctacaacgacaacacaatttgatcatttgactctgcttgatggaccaaaattgtctgatgagaatccggctgtaataatccctggccatcttcaggtttcaaacgctgattgtgcgcacttgacatttggtagttttgtgtatggaacacttgatgcgtccttgacaacaaaacctcttgagagtcatggggatatcgtaacaattcctgacgatgattatgaccaatcagagggcaggcatgttccttctttttcttttattttatgcactctatttttatcatgtatctcttataaaccctttatcttcagaatccatgacgatgaaagcaaggtaacattagcgcctgctgctaatgaatatgttacttctacgtcaaacagcaatgtagagaatcttgatattacatcagtacagcaatctgaagtcactagatccaatttcctggatgtcacgagcaatacggaatacaacctatcatcacccccagattatgcaacttcaagtgcagcgctgcaagattctacttcacagagttatctacaggaaaatcgacaattccagagcatttctcctctcccaagcttcatgcaaatacaaaatggtctcatgtcaccagcaattccaccattgcgcgaatttgatccagcattctcactattgctcactaatcctcctattatgcatggtacaacgtcatcatccatgagcagtgcaactgtttctacgcagccccaagagaatgccaatccagttggtttacccaaccctcaattgactcaatctcagccaagcaccagcattgctccagggcctccactccctcagcatcttcttcatccctatgctcaaacaacccttcctcttggatacgcaagcatgattggctatccatctcttccaccaagctatgcatatctcccacctgctgcttttcagcaaccatacatgaacagtggcatgttcctccaccaagcagcagcagcagttcccaactcaagtgtgaaataccctctgccgcagtacaaaagcaacattgcccttgctagcttaccacagccaggctctttgctctcaagctatgtcgggggctttggaactgcaaacaacatgcctggaaatttccctctgaaccaaagtacaacgtcggcaaccgcaactcttgggtttgatggaacggtcccgtcacatttggaagatggaaaccagtttgtttgtcttcagcagaacgagaaccctgcaatgtggatgcatggagctggttcacgagggatgcccccacttgcagccagtaccatgtatggctatcaagggcagagtcatcagaccggccttcggcagggccagctaccttcacaatatggctctgctctagggcagtcacagccgggcctgggccccgaacaccgaaatcctagcgatagtaacctaagtggtgctgctcaggctaaccagatgtggccaaacagctactgatccacccgaccaccccccttatcaacatctgtggaagacggtcttgttgttgtgtgcgcaaacgccagaggccatgcaaatgcctgtggcctgatccaggcacgcggataccagctgcgtgtgcatgagttactgtcgtgacattttgagaggcgcaagagatatatgttggagcatgttccacctgtagggtttgtaggatatggccaaaaatgtagctggatctgttcattcaaattctgatagggaaagggccggtcgtttttcgttctatttcccccctttttttgtcgtttgcatatcttgtgacaataaaaccggaatatctaacacatcagcaccattagttccccgaggggagtgaaagatagtctgttgtctttgc

SEQ ID NO: 146329 - DNA, 392 bp, Zea Mays
tcacaggcggaagccgaaacgcaggaagaagaagcagagcgtggcgaggacgacggcggactctatcacccacagcagatggaagacgacgctctcgtacaggcggcggaggaagacgacgcgcggcaggccggcggcggcggccccgtgcccgtgcctcccccgggccccggcgcagcgcggcggacagcgcgcgaacgcgcagcgcccaccgcggcgactgctgctgtctgcgcgcgcccggtgtcccggcgatcgtcgccatcctgttccgcagccactcccgcttcctcccgccggccatcggttggtggcgcgatcgatggaccagctggtggtgctgccgccgagaatcaggctctcttcttcttcgaccggatcctgtccttgat

SEQ ID NO: 146330 - DNA, 1079 bp, Zea Mays
tggcacttggcacacacactcgatcgatcgccatggactgctccaacgactgggacctgcaggcgctcgtgcggagctgcggcggcggtaaccgcagcgtgcagcattcgagggccggggccgacgctcctccaagggaggaagctgctatggtccgcggcggcggccgtgcggcggcccagctggagttgctcgggcaaccggtgggtgcggtgtcgtcgtggcggcgcggcctcgaccacttcgacgacctcgtggaccgcgaccgcgacccgcgccgcatgcccttctccgtctccgtcacgccttcatcatctcgcgagacgacggccacgtgtgggcccatggccagggccgggcaacagctccgccacgacgacgtgctcttctctttctcggctgccgctgcagcaggcgtcgtctccaggtccgggcatcagatggtccagcccaggaggcggcagcccggccgcaaggcgggaggtcgcactccccggcccaagagaagcaagaagaggcaggtgaagaaagtggtgtgcgaggtgccggcagccggcggcgtcgtctccacggacctctgggcgtggcgcaagtacggccagaagccgatcaagggctcaccctatccacggggatactacaagtgcagcagcctcaagagctgcacggcccggaagttggtggagcgcagcccggccaagcccggggtgctcgtcgtcacctacatcgctgaccactgccacgcggtgcccgcgatgctcaacgcgctggccggcacaacgcggaacaggccgtcgtcgtcgtcgtctgcgtcccccgacgacggcgaccacaaccaggaccaggagacgtcgtcggacggggcggcgccgtccgcggacaacaacagcaaggtcgacgacgacgacggcgccgccgccgtggccgtggccgtggacgagaacgacgcgtgcctgctggaggacgacggcaactgcccgttcgatggtttcttctggccgttcgacgacgacttggatcggtttttcgatgacgacggcggcggcgttcttggacgccgccggctgtcgctttagctg

SEQ ID NO: 146331 - DNA, 249 bp, Zea Mays
atgatcctacaaattgaccatcgacctcatctcatctcatggatcctggaacctcaaagactagtactatgcgtcatgcccacgtcacgtcttgaagaaaccatgctcggttcatcaagtatgggtccaccgtctgcccagctctgttcctctccaccacctgccaaatgcttcacctctacaagaagtaggtcagctgctgtttcttcctggaccccccttcgccgtacaggtcgttccactgcctga

SEQ ID NO: 146332 - DNA, 271 bp, Zea Mays
gagtgtcatttttggacactcggcaaagtatatttttatttcttttcttttcctaaccaaactttttgtggtatgctcctacactatgtagacctacttgttctatttttgcacaactataaaaatattttctataactattagatttagttcgtttaattgaatttcttcggaaaattcaaatttgaactgcaagtcactcgaaacatggaaactcgtgcatgcaaaaatgatattcatgttatttagcacaagttacgaccgattttag

SEQ ID NO: 146333 - DNA, 1698 bp, Zea Mays
atggccatccgcgagagctcccagatgccggaactgctccggctccctctgccgccgccggcgacgacggggagcccgtactctgtgtgcttgagcgtgccggcgtcgccgtcggggctgcacctcggcgtgtgcgcgtccgtccgcagcgtggcgccggctccacagccacagccggcagaggaccagcagctgctgcagaaccaggcgcggtaccactcgcagccgacgctgacgatccggaccgaggagccgccgccgctgcagcgggtgcgcaccgtgtcgcgcagcgacagcgcgcgcgaccgccgcttcgaccacttcaagaccttctccggccgcctggagcggcagctgtccaacctccgcggggtggtgcccgtggacatcgagcccgccggcgccgactctacctcgaacaagatcatctccgaggaggagaccgacgacgacgacgaggtccccagcgcggaccgctacttcgccgccctggagggccccgagctggagacgctgagaccgacagaggtgtcggcgctgcccgaggacgagacgtggccgttcctgctgcggttcccgatcaacgcgttcgggatgtgcctgggcgtgagcagccaggccatgctgtggaagacgctgcagtcggagccgtccacggcgttcctccacgtgagccccgccgtgaaccacgtgctctggtgggtctccgcctcgcttatggcgctcgtctccttcatctacctcttcaaggtcgtgttctacttcgaggcggtccggcgcgagttccaccacccgatccgcgtcaacttcttcttcgcgccgtggatcgcctgcctcttcctcgtcaagggcctgccgcacccggtgtggaccatccaccacgtggtgtggtacatcctcatggcgcccatcttcctcctcgacctcaagatctacggccagtggatgtccggcggcgcccggcggctgtccaaggtggccaacccgaccaaccacctcgccgtcgtgggcaacttcgtgggcgcgctgctgggcgccaagatggggcttcgcgaggtgcccatcttcttcttcgccgtcggggtggtgcactacctggtgctgttcgtgactctgtaccagaggctccccagcaacgcgcagctccccagggagctccacccggtgttcttcctcttcatcgccgcgcccagtgtcgcgtccgtcggctgggcaaggctgtgcggcgacttcaactacgccgccaagatcttatacttcacctccctcttcctctacatccaacaacctatagcctttgcaaaggaaccagaatcagatttctccagagttctaagaccgattccagcagctccgatccgcgtgcggaaacaagattgtttccgcagcgggccccgctacgcgacgcggagaggcgaggacgcgttccagcggctctcgtattcgccgacagcgtggactccgtttactcgtcgaccgttgatttctgctacgccggcgaagcttccccgacgagcgtgtcccaagcaacggcgcgacacggcggtggcgttgcccacggctcggcgtcggtccctcttccccttcgacggcacggtggcggcgttgcccgagctcgatcggttttcggagcgtgaaccacgcgctcgtcactcaccgtcgtcgcccaatgcttcttcgacgttgccggaatggtga

SEQ ID NO: 146334 - DNA, 1783 bp, Zea Mays
agcgaggcggcgatgagtgagcaatgattcccctgccaaatcgaaaaaatctccctgctaggctaggcaccaagccaagcaaatccactcgagaccagaccggcgacggcggccccgcgtccgtcgccatcaaagccaccgctgcggtcgctcctccgggacccctcctcctccgcggaccaccgccagcgctcgacagcaacacgcgcacgcccacgcgcgaagagtcaacaggagagagactggcggtggtggaactggcagtagaataagcttgcgtcgagtgggagttggcgaggcatcgctcgcttcccctccaccccactctgcccaccgagcgccagtggagcgcttacttgacttgacctcgccgcctcctgccctccccctccccctccccctgccggcgcccgttctttcctcccctcgccggacgcccaccgccggagcggaagaggggggaatgcagccgccgcagcaatacccgccggcgcccggctcctggggcggggtcgcgggggccagggccggcgccaccaccgtggatgaggcgtccatggaacgtagcaagagcttcatcaaggccctgcaggagctcaagaacctgcggccgcagctctacaccgcctccgagtactgcgagaagtcctacctccacagcgagcagaagcagaaggtgctggacaacctgaaagactatgccttacgagccgtcgtcaacgcggttgatcatctgggtactgttgcgtacaaactgaccgatcttttcgagcagcaagcttccgaggtgtcgacatatgaactgaaagtcgcacgcctgaaccagcaaatcttcacatgccaagtctacacagacaaagaaggcctcaggcagcagcagatgatgggagcaaacatcaagcaccacaagcactacatcttaccccccactggttataaaagatccctggcaaatggacacctgcaagcggacactgatcaggaatccaagcctagaccttacccctccgcaaaaaccctttcctggcatctgtcttcggagaacagcaccaaagcaaacgcacataagcctacatttgccctagtggacacggcaccatcaaaaccttcatcaggtaaggagcggtctgcttctcctatgcgcaggccgctgcagttcaacaggagcaccagttctgatactacgcagaaggttggcgctaagaacatatctggtgtaaaggaactttcaacattccattccttcgacaaccccaaaggtcgtgcgatccaaaaggcccctgttggcactaaaagcatgctggcggctctcttcatcagacacaaatcgtccaaggcgaaaaggatcgcagttcgctgacgagcgggggccgggtggggggcggcgacagcactgtaaatttcattctgtggaggaccggaagcctgttaattgtacatctggcctatcgttatgtgttggggcagagtctgtagccgtatttcatttcagaatatgacatcttgcaggtgaccgaaatgtaatgatttcgcataatctcatcttggcattcagcataaataaatgcatcttggaaatagcctttcagagttgttgttttttttcctgttctggaagggctcgtttcaaacctgctcactgtccaagaggttttggcatgtacacaggagtcatgtgttccgttcttgaaaagggggcagtgggcgattacgatttgctcctgtcagttggagaaagcatcgacattaaatgatccgctgaccaaagagaaaagaaaaaaaa

SEQ ID NO: 146335 - DNA, 2836 bp, Zea Mays
agcgaggcggcgatgagtgagcaatgattcccctgccaaatcgaaaaaatctccctgctaggctaggcaccaagccaagcaaatccactcgagaccagaccggcgacggcggccccgcgtccgtcgccatcaaagccaccgctgcggtcgctcctccgggacccctcctcctccgcggaccaccgccagcgctcgacagcaacacgcgcacgcccacgcgcgaagagtcaacaggagagagactggcggtggtggaactggcagtagaataagcttgcgtcgagtgggagttggcgaggcatcgctcgcttcccctccaccccactctgcccaccgagcgccagtggagcgcttacttgacttgacctcgccgcctcctgccctccccctccccctccccctgccggcgcccgttctttcctcccctcgccggacgcccaccgccggagcggaagaggggggaatgcagccgccgcagcaatacccgccggcgcccggctcctggggcggggtcgcgggggccagggccggcgccaccaccgtggatgaggcgtccatggaacgtagcaagagcttcatcaaggccctgcaggagctcaagaacctgcggccgcagctctacaccgcctccgagtactgcgagaagtcctacctccacagcgagcagaagcagaaggtgctggacaacctgaaagactatgccttacgagccgtcgtcaacgcggttgatcatctgggtactgttgcgtacaaactgaccgatcttttcgagcagcaagcttccgaggtgtcgacatatgaactgaaagtcgcacgcctgaaccagcaaatcttcacatgccaagtctacacagacaaagaaggcctcaggcagcagcagatgatgggagcaaacatcaagcaccacaagcactacatcttaccccccactggttataaaagatccctggcaaatggacacctgcaagcggacactgatcaggaatccaagcctagaccttacccctccgcaaaaaccctttcctggcatctgtcttcggagaacagcaccaaagcaaacgcacataagcctacatttgccctagtggacacggcaccatcaaaaccttcatcaggtaaggagcggtctgcttctcctatgcgcaggccgctgcagttcaacaggagcaccagttctgatactacgcagaaggttggcgctaagaacatatctggtgtaaaggaactttcaacattccattccttcgacaaccccaaaggtcgtgcgatccaaaaggcccctgttggcactaaaagcatgctggcggctctcttcatcagacacaaatcgtccaaggcgaaaaggatcgcagttcgctgacgagcgggggccgggtggggggcggcgacagcactgtaaatttcattctgtggaggaccggaagcctgttaattgtacatctggcctatcgttatgtgttggggcagagtctgtagccgtatttcatttcagaatatgacatcttgcaggtgaccgaaatgtaatgatttcgcataatctcatcttggcattcagcataaataaatgcatcttggaaatagcctttcagagttgttgttttttttcctgttctggaagggctcgtttcaaacctgctcactgtccaagaggttttggcatgtacacaggagtcatgtgttccgttcttgaaaagggggcagtgggcgattacgatttgctcctgtcagttggagaaagcatcgacattaaatgatccgctgaccaaagagaaaagaaaaaaaagaggatcacaaggcacatcgcattacttttcgcctggtatatgataatttggaactgttttacaagtccgtttctcttacataaaagatccagaggcaggaaacatagaccacacgacacacctcattaaagataacttggaaagatcgtaggatgagatggtcgaaaatggaagcaacacaaaggcaatcacccatgactgatgacttgtccaaagtctgtaatatcattgcacatatgcccaggctgaatcccactttcgagtatcagttgctctcccctctgaccgcggaaaaatatatcttagaagtctttcttttttccaattaaatgtaggagatgagccttaaaacatgcgcctccgatttggaacaatctcggggctattattcttcatcatggcaacaaactcctggtagttgattctcccatcctaagtagtaaaaccaaaggacatataacacttagcaattcatgtaaatttaaataccaaacatcacaattaattcactcgtcatgagtcttttcttatcaatgtgagccgtatggttcaaacttcaaacagttaagcgaagacccaataacatgatggtttagctaaccaggaaatgtcagtgaagacagtgatttccttgattactagttaaacaagttgaaccactgttcagactcaaggagcttgttattggtttttaaataaattttgttactttattgcattaaaaaacaccagttttttttaaaacgaaatctccttgaacgtgccaaaagtctacaagatcaaaacggtgataagtgcttttgtatgaaacaacaacaagtgagattattttgaatcttggaattactcacgtgatctgtgtctacttcagcaataatttctttaactgttgcctcatcgcccatatcatacttcttcaaagcttcttccaactcatcaactgtaatgtgcctgtacatgaatgtacaagcgacaaacaaagttaatgttaaaggtgaaaagtaacgaaaaggtggagttcggagtgaaattacccgctatgatccttgtca

SEQ ID NO: 146336 - DNA, 1451 bp, Zea Mays
cgaaaccaagagctcatacactgtttgattacaaaagaaagggtgctgaattttgactctcaatttttttcctgccaagctagccactggttataaaagatccctggcaaatggacacctgcaagcggacactgatcaggaatccaagcctagaccttacccctccgcaaaaaccctttcctggcatctgtcttcggagaacagcaccaaagcaaacgcacataagcctacatttgccctagtggacacggcaccatcaaaaccttcatcaggtaaggagcggtctgcttctcctatgcgcaggccgctgcagttcaacaggagcaccagttctgatactacgcagaaggttggcgctaagaacatatctggtgtaaaggaactttcaacattccattccttcgacaaccccaaaggtcgtgcgatccaaaaggcccctgttggcactaaaagcatgctggcggctctcttcatcagacacaaatcgtccaaggcgaaaaggatcgcagttcgctgacgagcgggggccgggtggggggcggcgacagcactgtaaatttcattctgtggaggaccggaagcctgttaattgtacatctggcctatcgttatgtgttggggcagagtctgtagccgtatttcatttcagaatatgacatcttgcaggtgaccgaaatgtaatgatttcgcataatctcatcttggcattcagcataaataaatgcatcttggaaatagcctttcagagttgttgttttttttcctgttctggaagggctcgtttcaaacctgctcactgtccaagaggttttggcatgtacacaggagtcatgtgttccgttcttgaaaagggggcagtgggcgattacgatttgctcctgtcagttggagaaagcatcgacattaaatgatccgctgaccaaagagaaaagaaaaaaaagaggatcacaaggcacatcgcattacttttcgcctggtatatgataatttggaactgttttacaagtccgtttctcttacataaaagatccagaggcaggaaacatagaccacacgacacacctcattaaagataacttggaaagatcgtaggatgagatggtcgaaaatggaagcaacacaaaggcaatcacccatgactgatgacttgtccaaagtctgtaatatcattgcacatatgcccaggctgaatcccactttcgagtatcagttgctctcccctctgaccgcggaaaaatatatcttagaagtctttcttttttccaattaaatgtaggagatgagccttaaaacatgcgcctccgatttggaacaatctcggggctattattcttcatcatggcaacaaactcctggtagttgattctcccatcctaagtagtaaaaccaaaggacatataacacttagcaattcatgtaaatttaaataccaaacatcacaattaattcac

SEQ ID NO: 146337 - DNA, 2327 bp, Zea Mays
aatcgttcgttcgtgtcttcctctgcatcattcgttcacagaaactgcgggaggccccaaacaatgagcgagcattgaggatccatggaccagctccgccaggtgggcgaggccctcggcggcatccacacgctcatggccttcgccgacgatctccgcatcaacccgcgacaatgccgcctcctcgccgacgcctgcgcgatggccttcgccgccgtcgccgccgaggtgcgcgcccacctccgcttcaacgagcgcctgtccaagtggaagcccctggaggcgccgctccgggagctccaccgcgccgtccgcgacgccgagggctacgtccgccactgcatggagccgcggggcagctggtgggggcgcgccgccgcggccacgcacggcgccgactgcgtcgagcagcacatgcacagcctgctgtggagcgtcgccgtggcgctcgaggccgtcgagctcgtctcggaggtcacggggtccgacccggacgagctcgcccggcggcggctgctcttcgccaaggactacgacagggacatgctggagccggcgctgttcgtgcagaggctcggcgcgcggtacctggccacgcgcgagctcgccgccaggatggacgcggcgtggaaggaggaccggtggctcctgtcgcagtacctcgaggagcggatgagcccgggctcgccggagccggtgccgcggagcaagcaccggctggccgacctcctgaccgcgccgcgcgggcaggtgcacccggcgtccgtgctcctgcagggcgacttccacgtccgcaagcgcctcatgggcaacctcaaggaggtgcagtggatgggggaggccttcgcggtgaagcacctcgtgggcgccggcgccgacgccgacgccgcgtgcgccgaggccgcgctgctcacctccgtggcgcaccccaacgtggcgcactgccggtactgcttccacgacgaggacaagaaggagttcttcctggtcatggaccaggtcatgaccaaggacctggccacccacgtcaaggaggcgaacagcggcaagcgacgggtacccttcccgctcgttgtcgtcgtcgacgtgatgctgcagatcgcgcgcggcatggagtacctgcactcgaggaacatctaccacggcgatctgaccccgtccaacgtgctcgtcaggacgcggcatgccgacgcgcacctgcacgtcaaggtggccgggttcgggcagcacgcggcggcggcggccgcggccgcggccggccactgccacaggcccagccctagggcgtcagcgaaagcatcaaacgccaccagcgccccttgcatctggtacgcgccggaggtgctggagcagcaggaggcggccaagcgcacggagaaggcggacgtgtacagcttcgggatggtctgcttcgagctgctgacggggaaggtcccgttcgaggacaaccacctgcagggggagcacatgagcaagaacatccgcgccggcgagcggccgctgttcccgttccaggcgcccaagtacctgaccagcctgaccaggcggtgctggcacggggacccggcgcagcggccgtcgttcgcgtccgtctgccgcgtcctccgctacgtgaagcggttcgtggtcatgaacgtgaaccccgcccccgcggagcagccagacgcggcggtgccgccgcccgtgccggcggtggactacctcgacatcgaggcgagcctgcagaggaggttcccggcgtggcagcccgggtctgggaacgcggcgccgcgggtctccgacgtgccgttccagatgttcgcgtacagggtggcggagaaggagaggagccgggcggccatcctgcacatcggcggcggcaagggcgcctccgactccagcagcgacggaaactcgctgtgcggggacgagagcggcggcacggcgctgtctgaagccgaggctctgaccgtgtcgagccgcggcgccaccaccacgcggtcgctgccggaccgcgctggcaacaggaaggtggatggcagcagggtcgcctccaggctagcaggcaagccttatgtccatagctagcttagctgctcctttcgctatatatgctccttctccgtgatgctagaaagaaaatgcacggtggtgcaggtgcaggtgcagggccgccgcacaagtcgatggaaaagtccaaatccacgggcgtggtgagtccgccgcagaccattaggcggacgcagaggatcaagtcggacggctacctgaaatctgccgcggtcgcgtcaccacggcggcgcggttccggcgatggacacgcttcagactccgaagtagcctgagaa

SEQ ID NO: 146338 - DNA, 149 bp, Zea Mays
caacttctatataactatgtccaaaaatctgttaaacaaacaatgattgcaactgctgtctggtgtgattgcaactgctttctggtgtaattgcaactactggtctggtgtgattgcaacttctatataactatgtccaaaaatctgtt

SEQ ID NO: 146339 - DNA, 2263 bp, Zea Mays
cccgccccggcctcctccgcagtcccatgagccaggccgcgcccgtggcgaaccctgctcgcgccgcgcctgcccattccccctccgcccccgtcggccaccgggccgcctcgcccgcccggcgcccgcgcggagccacaggcgtcggcgccacagccgcccgctcccctctgccgccggtgcccggagtgcagatccgtctgaccgcgccgccgccgctctcggatatcgctttatccttcgtataattgtattgtcaaactggcacccaccggaatcatatagcctggataaccagcaagctgctctccgtctcctctcatcagtatgtatccagcttttaaaggtgataaatccaagattctgccagtaaagatgccgatctgtagctgtgaagaaactatccatgagttcgagatgttaacacgcgatgctgggcgtgtacagaaggatacactgaaaaagatcctcgagttgaatgctgatgctgaatatctgaacaagttcggcctcaatggcaggactgatgtagagagctacaaatcctgcatcccgctgtgtgtgcacagtgatcttgagccatacatccataagattgctgatggtgatagctccccactcctcactgggaagcccgtcacctccctttccctcagttctggtacaacgcagggaaggcctaagttcttgccgtttactgatgaattgcttgagaccacacttcaaatattccagacttcatatgcatttaggaaccgtgagtatccaattggaagaggaaaagccttgcagtttatctatggtagcaagcaagtggtaacaaaaggcggcatccttgccacaactgcaacaacaaacttgtaccggagggcacgatacaaggaggggatgaaggatatccagtctcaatgctgcagccctgatgaagttgtttttggctctgacttccaccagtccttgtattgtcacttgctctgtggtctaatatactctgatgaggtccatcaggtgttctcgacattcgctcacagcttagtccatgcatttcaaacatttgaggaggtttgggaagatctctgtgctgacataagagatggtgtcctctcagagaaagttacagtgccatcggttcgtgaagccgtgacaaaaatcctcaagcccaatcctgagctcgctgactcgatctataagaagtgtacgggcctgagcaactggtacggtgtaatcccagcactctggccaaacgcaaagtatgtgtacggtatcatgacagggtccatggaaccgtatttaaagaaactgaggcactatgctgggcacttgcctctgataagcgcagattacggcgcatctgaaggatgggttggtgctaatataaaccccacacttccacctgaacaggtgacatacgctgttctccctcagaccggttattttgagttcattcctttggaggtggagaatagtgcctcctccattcactacttagaatcagaaccagttggcctgactgaagttgaggttggcaaaacctacgaagtcgtgataactaccttcggaggtctataccgctaccggctaggagatatcgtgaaggtaacgggcttccacaacgcaacaccggagctccggttcatctgccgcagaagcctagtcctgagcatcaacatcgacaagaacaccgagcaagacctccagctggccgtcgaggaggcagcgaagctcctggacgcggagaagctggagatcgtcgatttcaccagcttcgtggagaagtcaagcgaccccggtcgctacgtcatcttctgggagctgagctccgacgcgagcgaggacgtcctgcgaggctgcgcgaactgcctggacctagccttcgtcgatgctgggtatgtgggctcgaggaagatcagagccatcggcccgctggagctgcggattctgaagaggggaaccttcaaggagatcctggatcacttcctgagcctcggtggcgccgtgagccagttcaagacgcctcggttcgtcaacccgttgaacgtcaaggttctgcagatactcagtaggaacaccaccagaagctacttcagtaccgcctatgggctctgataaataagaaacgctgctagtagttccatccatgtaattatatttatataaaaaaatattgcttcactgttctgttctagtctccaggtaaaagaaaacaatctactcatcctagtcctgctggcgccctgctagaatgtctgtaaatccatatgca

SEQ ID NO: 146340 - DNA, 2112 bp, Zea Mays
cctccgcagtcccatgagccaggccgcgcccgtggcgaaccctgctcgcgccgcgcctgcccattccccctctgccgccggtgcccggagtgcagatccgtctgaccgcgccgccgccgctctcggtgataaatccaagattctgccagtaaagatgccgatctgtagctgtgaagaaactatccatgagttcgagatgttaacacgcgatgctgggcgtgtacagaaggatacactgaaaaagatcctcgagttgaatgctgatgctgaatatctgaacaagttcggcctcaatggcaggactgatgtagagagctacaaatcctgcatcccgctgtgtgtgcacagtgatcttgagccatacatccataagattgctgatggtgatagctccccactcctcactgggaagcccgtcacctccctttccctcagttctggtacaacgcagggaaggcctaagttcttgccgtttactgatgaattgcttgagaccacacttcaaatattccagacttcatatgcatttaggaaccgtgagtatccaattggaagaggaaaagccttgcagtttatctatggtagcaagcaagtggtaacaaaaggcggcatccttgccacaactgcaacaacaaacttgtaccggagggcacgatacaaggaggggatgaaggatatccagtctcaatgctgcagccctgatgaagttgtttttggctctgacttccaccagtccttgtattgtcacttgctctgtggtctaatatactctgatgaggtccatcaggtgttctcgacattcgctcacagcttagtccatgcatttcaaacatttgaggaggtttgggaagatctctgtgctgacataagagatggtgtcctctcagagaaagttacagtgccatcggttcgtgaagccgtgacaaaaatcctcaagcccaatcctgagctcgctgactcgatctataagaagtgtacgggcctgagcaactggtacggtgtaatcccagcactctggccaaacgcaaagtatgtgtacggtatcatgacagggtccatggaaccgtatttaaagaaactgaggcactatgctgggcacttgcctctgataagcgcagattacggcgcatctgaaggatgggttggtgctaatataaaccccacacttccacctgaacaggtgacatacgctgttctccctcagaccggttattttgagttcattcctttggaggtggagaatagtgcctcctccattcactacttagaatcagaaccagttggcctgactgaagttgaggttggcaaaacctacgaagtcgtgataactaccttcggaggtctataccgctaccggctaggagatatcgtgaaggtaacgggcttccacaacgcaacaccggagctccggttcatctgccgcagaagcctagtcctgagcatcaacatcgacaagaacaccgagcaagacctccagctggccgtcgaggaggcagcgaagctcctggacgcggagaagctggagatcgtcgatttcaccagcttcgtggagaagtcaagcgaccccggtcgctacgtcatcttctgggagctgagctccgacgcgagcgaggacgtcctgcgaggctgcgcgaactgcctggacctagccttcgtcgatgctgggtatgtgggctcgaggaagatcagagccatcggcccgctggagctgcggattctgaagaggggaaccttcaaggagatcctggatcacttcctgagcctcggtggcgccgtgagccagttcaagacgcctcggttcgtcaacccgttgaacgtcaaggttctgcagatactcagtaggaacaccaccagaagctacttcagtaccgcctatgggctctgataaataagaaacgctgctagtagttccatccatgtaattatatttatataaaaaaatattgcttcactgttctgttctagtctccaggtaaaagaaaacaatctactcatcctagtcctgctggcgccctgctagaatgtctgtaaatccatatgcaagcaaatgcattcagtctctgcctgtgttctgatctttgtgcatagcaagcaaatgcattcacagtctcc

SEQ ID NO: 146341 - DNA, 110 bp, Zea Mays
cgccgacattcgagcgcgaatcgttaccattaccatttatgttacattttgtgaaccaaacggcacctatatagagcccaagacgttgatgacaagcaccacccgcgggg

SEQ ID NO: 146342 - DNA, 1377 bp, Zea Mays
atgccgccgacgctgggcctgctcctcgcggcggcggcggcggtcctgctgctgctgctgccgccgccaccatcggcgggggcgcaggagacgtgctggtcggggccggcgccgcggcgcggggcgtggatgtccgtggccagcttcggggcgcgcggggacgggcagacgctcaacacgggcgcgttcgcgcgcgccgtggcgcgcatcgcgcgtcgccggggcgcgcggggcggcacgctgctgtacgtgccgcccggggtgtggctcacgggccccttcaacctcacctcccacatgacgctcttcctcgcccgcggcgccatcgtccgcgccacccagccatgccttgctaccatcgaactaataagtgagcaggacacgtcgagctggccgctcatcgacccgctgccgtcgtacgggagagggcgcgagctgcctggcgggagatacatgagcttgatccacggccacggtctgcaggacgtcttcatcacaggtgagaacggcaccatcgacggccaaggcggcgtgtggtgggacatgtggaagaagcgcacgctgcccttcacgaggccgcacctgctggagctcatgtactccaccgacgtcgtcgtctccaacctcgtcttccaggactcgccgttctggaacatccacccggtttactgcagcaacgtagtgatagcaaacctgactgtgttggcgccgcacgactcccccaacaccgacgggatcgatctagattcaagcagcaacgtgtgcgtcgaggactgctacatctccgccggcgacgacctgatctccatcaagagcgggtgggacgagtacggcgtggccttcggccgcccaagctccggcatcacggtccggaggataaccgggtcgggcccgttcgccggcttcgcggtcgggagcgagacctcgggcggcgtggaggacgtcgtggccgagcacctgagcttctccggcgtgggcgtcggggttcacgtgaagacaaactcgggcaggggcggcttcatccggaacgtcaccgtctcccaggtgaccctggacggcgcccgctacggcctgaggatcgccggcgacgttgggggccaccccggcgcgtcctacaacgcgagcctgctccccgtcatcgacggcgtggcggtcaggaacgtctggggccggaacgtccggcaggccgggctcatacggggcatcagggactcggtcttcagtaacatttgcctctccaacgtgaagctctatggcattggcagcgactccatcgggccgtggagatgccgagccgtcagtggcagcgcactcgacgtgcaaccgtcgccatgtgcggagctggctagtacgtccgggacaggtttctgtacctga

SEQ ID NO: 146343 - DNA, 2555 bp, Zea Mays
cgagtccagttcaccgtccctccctgtccttgccatggccatccccaccgcccccgccctcctcttcccctccgttctccctaactcattcccccgccggacaccctggcgacacctcgtccggcggcaaccgcgtcacctccgcgcgggccgcccgcgcctgcaggcgccggcgccggctcctcccccggtggcggaggtcgcggcggagcgggacgacacgcctccgctcaggctgctcgagccgccgcaggaggacgaccccttcccgcccgagatggagcccgcggaccctgatttctaccggataggatatgcgcggatgatgcgcgcctatgggatcgagttcctcgaaggccccgacgggatgggcgtctacgcttcccgggacgtggagccacttcgcagagctagagtgagacacttcattcaacaattctcctcttgtccaagtccaaccactagctaccgatcaatttgaggtttaaatctctgtctcattgcagctggacgtccatcaccacaccagttagtgtttggatgcagcacctgtgaatctgtgattgggtgggaaactcacatgagaataactggtcaaggacgttgttcgtgtgtagtaactgttagattatatttacactatatttagtaggtagtatacattaccactggaagtcaatggcttatgttaattgcctaattgttatttgctacatacttgctgtcaccaaaaaatatggcatctatagttataacacatgtttgctcgcagtcgcattaagctcacgaaatgccagacccatgtgttgaattcttcatcttgatgcatgctatagacctgtagtacgatggtcttgttcaaaagaattatatgatattcttggcatgctgaaactgtttgtataacatatttggttcttttcgttcgcaatgatgagcaatgttattgaaagatgtgctgatgttgctttcttttccaggtgattatggagattccgttggagctgatgctgactataactcaaaagaaaccttggatgtttttccctgacattattccactaggccatcctatatttgatgttatcgagtcaacagatccagagacagattgggatctaagattagcatgtcttcttctatatgcatttgatatagaagacaacttttggcagttatattctgattttttgccaagtgttgatgaatgcactagtttgctgctggcaccaaaggaagatctaatggaactagaagatgaagatcttgcttcacaaatgttaaaacaccaggaacgagcaattgacttttggcaaaagcattgggacaaaccaattcctctaaagctgaaacgccttgcacgtgaccatgagagatttctctgggcactgagtatagtacagtctcgttctgtcaacttgaagttgagaatgggagccttcatccaagatgcaaatgtgctagctccttatgctgatatgttgaaccactcacccaatgctaattgcttcctgcattggcgttttaaagaccgtatgcttgaagttatgattaaggctggacaagctatcaagaaaggagacgagatgacgatagattatatgagtggcgtcaacagcaaatttatggaaagatatgggttctcatcaccaacgaatccttgggagctcataaatttctcgagtcctgcaacaattcacatggattccttcttatcggtcttcaatatcgctggcttgcatgatgagctgtaccacaattctgcattgacctcagtagtagaaaccgactttgtggacggagcagtcgtagcagcagccagagcattgccgacatggtcagatggtgatgttcctgcaattcctagtgtggagagaaaatctgctcaggcactgcaagaggagtgccgccaaatgttggattcattcccaactaccatcgaacaagaccagcagatcctagattccgatgcgcatatcagcaaaacccgagaaattgcgatcaagtaggtgaactacctatttgttatgatgggctagtgattgatttgtgtgtatatatgtttttactctgggactgcttgtggataattttttgaaagtaggttgttgagttaccttctttcattctatgcgcaggtatcgtctgcaccggaagatgctcctacagaaaatcatggacgcactggacatatatcaggatagaattctgttctagctgtagaggcggcgctacctgtgctcatttagagcacagaacgagtgcccagttctactgctagtaaacctggggccattgtagaaaggggattttgtagggcagcctttcagttcatagcgtctgtaggttaacagcagaggatcccagaaggaaatcaacattaggataggctggttgccaggaaatatagctgctgtaagttcaagtcagcaagctgccatgtaacttgtttgcacagggcggcaatctgtcatagccacctgcatatctctcaggctcagcttcacaacaacttgcactgctgaaagaaatggcctgtgggctgtgtcctgtca

SEQ ID NO: 146344 - DNA, 1914 bp, Zea Mays
cgagtccagttcaccgtccctccctgtccttgccatggccatccccaccgcccccgccctcctcttcccctccgttctccctaactcattcccccgccggacaccctggcgacacctcgtccggcggcaaccgcgtcacctccgcgcgggccgcccgcgcctgcaggcgccggcgccggctcctcccccggtggcggaggtcgcggcggagcgggacgacacgcctccgctcaggctgctcgagccgccgcaggaggacgaccccttcccgcccgagatggagcccgcggaccctgatttctaccggataggatatgcgcggatgatgcgcgcctatgggatcgagttcctcgaaggccccgacgggatgggcgtctacgcttcccgggacgtggagccacttcgcagagctagagtgattatggagattccgttggagctgatgctgactataactcaaaagaaaccttggatgtttttccctgacattattccactaggccatcctatatttgatgttatcgagtcaacagatccagagacagattgggatctaagattagcatgtcttcttctatatgcatttgatatagaagacaacttttggcagttatattctgattttttgccaagtgttgatgaatgcactagtttgctgctggcaccaaaggaagatctaatggaactagaagatgaagatcttgcttcacaaatgttaaaacaccaggaacgagcaattgacttttggcaaaagcattgggacaaaccaattcctctaaagctgaaacgccttgcacgtgaccatgagagatttctctgggcactgagtatagtacagtctcgttctgtcaacttgaagttgagaatgggagccttcatccaagatgcaaatgtgctagctccttatgctgatatgttgaaccactcacccaatgctaattgcttcctgcattggcgttttaaagaccgtatgcttgaagttatgattaaggctggacaagctatcaagaaaggagacgagatgacgatagattatatgagtggcgtcaacagcaaatttatggaaagatatgggttctcatcaccaacgaatccttgggagctcataaatttctcgagtcctgcaacaattcacatggattccttcttatcggtcttcaatatcgctggcttgcatgatgagctgtaccacaattctgcattgacctcagtagtagaaaccgactttgtggacggagcagtcgtagcagcagccagagcattgccgacatggtcagatggtgatgttcctgcaattcctagtgtggagagaaaatctgctcaggcactgcaagaggagtgccgccaaatgttggattcattcccaactaccatcgaacaagaccagcagatcctagattccgatgcgcatatcagcaaaacccgagaaattgcgatcaagtatcgtctgcaccggaagatgctcctacagaaaatcatggacgcactggacatatatcaggatagaattctgttctagctgtagaggcggcgctacctgtgctcatttagagcacagaacgagtgcccagttctactgctagtaaacctggggccattgtagaaaggggattttgtagggcagcctttcagttcatagcgtctgtaggttaacagcagaggatcccagaaggaaatcaacattaggataggctggttgccaggaaatatagctgctgtaagttcaagtcagcaagctgccatgtaacttgtttgcacagggcggcaatctgtcatagccacctgcatatctctcaggctcagcttcacaacaacttgcactgctgaaagaaatggcctgtgggctgtgtcctgtcacctgtgtgtgtgaaatactatccatatgattggttggccgcatcgctttgtcctgaa

SEQ ID NO: 146345 - DNA, 1936 bp, Zea Mays
cgagtccagttcaccgtccctccctgtccttgccatggccatccccaccgcccccgccctcctcttcccctccgttctccctaactcattcccccgccggacaccctggcgacacctcgtccggcggcaaccgcgtcacctccgcgcgggccgcccgcgcctgcaggcgccggcgccggctcctcccccggtggcggaggtcgcggcggagcgggacgacacgcctccgctcaggctgctcgagccgccgcaggaggacgaccccttcccgcccgagatggagcccgcggaccctgatttctaccggataggatatgcgcggatgatgcgcgcctatgggatcgagttcctcgaaggccccgacgggatgggcgtctacgcttcccgggacgtggagccacttcgcagagctagactggacgtccatcaccacaccagtgattatggagattccgttggagctgatgctgactataactcaaaagaaaccttggatgtttttccctgacattattccactaggccatcctatatttgatgttatcgagtcaacagatccagagacagattgggatctaagattagcatgtcttcttctatatgcatttgatatagaagacaacttttggcagttatattctgattttttgccaagtgttgatgaatgcactagtttgctgctggcaccaaaggaagatctaatggaactagaagatgaagatcttgcttcacaaatgttaaaacaccaggaacgagcaattgacttttggcaaaagcattgggacaaaccaattcctctaaagctgaaacgccttgcacgtgaccatgagagatttctctgggcactgagtatagtacagtctcgttctgtcaacttgaagttgagaatgggagccttcatccaagatgcaaatgtgctagctccttatgctgatatgttgaaccactcacccaatgctaattgcttcctgcattggcgttttaaagaccgtatgcttgaagttatgattaaggctggacaagctatcaagaaaggagacgagatgacgatagattatatgagtggcgtcaacagcaaatttatggaaagatatgggttctcatcaccaacgaatccttgggagctcataaatttctcgagtcctgcaacaattcacatggattccttcttatcggtcttcaatatcgctggcttgcatgatgagctgtaccacaattctgcattgacctcagtagtagaaaccgactttgtggacggagcagtcgtagcagcagccagagcattgccgacatggtcagatggtgatgttcctgcaattcctagtgtggagagaaaatctgctcaggcactgcaagaggagtgccgccaaatgttggattcattcccaactaccatcgaacaagaccagcagatcctagattccgatgcgcatatcagcaaaacccgagaaattgcgatcaagtatcgtctgcaccggaagatgctcctacagaaaatcatggacgcactggacatatatcaggatagaattctgttctagctgtagaggcggcgctacctgtgctcatttagagcacagaacgagtgcccagttctactgctagtaaacctggggccattgtagaaaggggattttgtagggcagcctttcagttcatagcgtctgtaggttaacagcagaggatcccagaaggaaatcaacattaggataggctggttgccaggaaatatagctgctgtaagttcaagtcagcaagctgccatgtaacttgtttgcacagggcggcaatctgtcatagccacctgcatatctctcaggctcagcttcacaacaacttgcactgctgaaagaaatggcctgtgggctgtgtcctgtcacctgtgtgtgtgaaatactatccatatgattggttggccgcatcgctttgtcctgaa

SEQ ID NO: 146346 - DNA, 228 bp, Zea Mays
atgcctgagactctggttggcgtcgaaggcaacgacgcgtcatccagtttcaacaagcttgtaatagtcaaatcagcttcctctaatttgtgcaaccaaagcaacgcttctgacctcaaggcaagaagcaatcgagaggagtccgctccaacagcgatggctgcgtcggcttccctgagtgcactcttccagtctccaattttccttgcatccatgcatctgccttga

SEQ ID NO: 146347 - DNA, 800 bp, Zea Mays
atggctggcatcgggcatctccactcccactccaccggccccacctccgcgaggggcgacccgagaacaccaccacgcccgccatgtggcgccgcctccaaaccctagccccctcgctccgccgcgccgccgcatcgtcgtccccggcctccgcccgcgccgtgcccttgtccacggtgccggtggccgcgttccggcgcacttcgaccctcctctcctctcccggcgacaagccggcgcccagcaaggtcgaggatgtcatgccgatcgccacggggctggagcgcgaggagctcgaggcggagctccaggggaagaagcggtttgacatggatcctgccgtcggccccttcggtactaagccgtgattgaatcctactataacaagagaatagttggctgccctggtgccgaaggagaggatgaacacgatgtcgtctggttttggttggaaaaggataaaccgcatgagtgcctagtctgctcacgctcaaggtcattggtgatgggggtgatccagatggccacgatgacgaggatgatcatcactgaggccttgtgtcgataatgataataagaactttgtgaaacatggttttgtcctatctttgcagcatcagactgccctatagagtattgtaattgataagtgtttgaccatgaaccaggtcgggtggtgttttacacctacgaattttgttcagatcttttcgaccatacggttgcttctgtttggaatatagatttttttttctggagtgcaacatcaaataaaggatgagtgcatcggtttcactcta

SEQ ID NO: 146348 - DNA, 2127 bp, Zea Mays
atggctggcatcgggcatctccactcccactccaccggccccacctccgcgaggggcgacccgagaacaccaccacgcccgccatgtggcgccgcctccaaaccctagccccctcgctccgccgcgccgccgcatcgtcgtccccggcctccgcccgcgccgtgcccttgtccacggtgccggtggccgcgttccggcgcacttcgaccctcctctcctctcccggcgacaagccggcgcccagcaaggtcgaggatgtcatgccgatcgccacggggctggagcgcgaggagctcgaggcggagctccaggggaagaagcggtttgacatggatcctgccgtcggccccttcggtactaagattccgttttcttcgtcgtatttgtatttgctgcttcattgaatgtgcatgctgcttggttcccaataaaaactgaagcagtgcgtttgtttattctctctgcatggctgcatgctcctctcccaaacgttcaccttggcacaagagacgatgcataccggatagaaataactcattccttggtcactgtgctcgactactataagatggagattttagaaaggagggagtatgtctatattcaatggataatgaatttagacacatataaaacacatacatcaagtattgtatgaatctattaattttctaaaacgagttttaatttgggactgatggagtacctttttaagtgatgggcccaagatatctaacaaattatgagtcacttgtagtatctgttcctactgcttgatttattgacaggaactcttttgtgtatgttacgtggaaacttgaaagttttactgttgtatgacccatttatcaattgttgtgtgcagattaaacttgtgctaagcacaagtaatgacacaatatttcactccagtatggacatggctttaagtaaaaaagacccaccagatacatctcttgttactgatattaatatcgtaaactacaaagtatttgatatgtgcatgcttaagctgcattacctgaagcttgtttcaaatacaccagcagtcagccagccgtacatgaaattcgtagggtatgtttataactgccttgtcacttgggagcattgcgttaaatatcagtgtttgatgtatctggtgcttctattcttcaaccgtaggcatgccctcacatccatgctgagtactgacattgcctgtatttggtctagatatgtgttgaagttcttgaccactcacttcccttctgttttttttctttccagacttcctatgctgcaagatctcaattgttctggacaatataaagtactaccttaagaaaacaagtataataccaaaaaaacactaaacaacaggggcacacttttcacttgtttgtggttatgctattcctaaattttctaattttcaatcaattgatgcacccagcttctatgcataccctgtgctgactactgacattgtgtgcgcttttagtgaagagatgtaggatttcttgatcactctctccccttggttttgcataccactctttgtgctgcaagattgtccatttgttaattttgaatgtattgtctgcacgaggaatcagccgtgattgaatcctactataacaagagaatagttggctgccctggtgccgaaggaggtacatcaaggctaaccatatatgtcagtacctagtgttgagtatgtaactcaccataactgtgcttatttttccatcgtgcttattgcagaggatgaacacgatgtcgtctggttttggttggaaaaggataaaccgcatgagtgcctagtctgctcacgctcaaggtcattggtgatgggggtgatccagatggccacgatgacgaggatgatcatcactgaggccttgtgtcgataatgataataagaactttgtgaaacatggttttgtcctatctttgcagcatcagactgccctatagagtattgtaattgataagtgtttgaccatgaaccaggtcgggtggtgttttacacctacgaattttgttcagatcttttcgaccatacggttgcttctgtttggaatatagatttttttttctggagtgcaacatcaaataaaggatgagtgcatcggtttcactcta

SEQ ID NO: 146349 - DNA, 2470 bp, Zea Mays
atggctggcatcgggcatctccactcccactccaccggccccacctccgcgaggggcgacccgagaacaccaccacgcccgccatgtggcgccgcctccaaaccctagccccctcgctccgccgcgccgccgcatcgtcgtccccggcctccgcccgcgccgtgcccttgtccacggtgccggtggccgcgttccggcgcacttcgaccctcctctcctctcccggcgacaagccggcgcccagcaaggtcgaggatgtcatgccgatcgccacggggctggagcgcgaggagctcgaggcggagctccaggggaagaagcggtttgacatggatcctgccgtcggccccttcggtactaaggttggtttctcgagaagcaatgattgcattttttgtgggacggagagagtagtttcttcctcaagctgagtcctgttaggactgtgaagttaggtaattattggtactttttagaattaattatgtcaaaaaaaacttttgctgtgtccatggctattgttcacctgatctgctctgtggtctttggctagttgaacgtgttgtagtctagtttgttattaagacagccatttcgtggtacaaaatgtcatcatgttagaggccccagtgttcaatgtttaccagtctgctcattagttgtcatttacattgaagtctgtggcttcttttactccctctgtcctaaaatagtattcgttttagctctcggtttttactccctccgttccataatctgcctcgtctaagcaatttttttttgcagattccgttttcttcgtcgtatttgtatttgctgcttcattgaatgtgcatgctgcttggttcccaataaaaactgaagcagtgcgtttgtttattctctctgcatggctgcatgctcctctcccaaacgttcaccttggcacaagagacgatgcataccggatagaaataactcattccttggtcactgtgctcgactactataagatggagattttagaaaggagggagtatgtctatattcaatggataatgaatttagacacatataaaacacatacatcaagtattgtatgaatctattaattttctaaaacgagttttaatttgggactgatggagtacctttttaagtgatgggcccaagatatctaacaaattatgagtcacttgtagtatctgttcctactgcttgatttattgacaggaactcttttgtgtatgttacgtggaaacttgaaagttttactgttgtatgacccatttatcaattgttgtgtgcagattaaacttgtgctaagcacaagtaatgacacaatatttcactccagtatggacatggctttaagtaaaaaagacccaccagatacatctcttgttactgatattaatatcgtaaactacaaagtatttgatatgtgcatgcttaagctgcattacctgaagcttgtttcaaatacaccagcagtcagccagccgtacatgaaattcgtagggtatgtttataactgccttgtcacttgggagcattgcgttaaatatcagtgtttgatgtatctggtgcttctattcttcaaccgtaggcatgccctcacatccatgctgagtactgacattgcctgtatttggtctagatatgtgttgaagttcttgaccactcacttcccttctgttttttttctttccagacttcctatgctgcaagatctcaattgttctggacaatataaagtactaccttaagaaaacaagtataataccaaaaaaacactaaacaacaggggcacacttttcacttgtttgtggttatgctattcctaaattttctaattttcaatcaattgatgcacccagcttctatgcataccctgtgctgactactgacattgtgtgcgcttttagtgaagagatgtaggatttcttgatcactctctccccttggttttgcataccactctttgtgctgcaagattgtccatttgttaattttgaatgtattgtctgcacgaggaatcagccgtgattgaatcctactataacaagagaatagttggctgccctggtgccgaaggagaggatgaacacgatgtcgtctggttttggttggaaaaggataaaccgcatgagtgcctagtctgctcacggtactttgtgctcaaggtcattggtgatgggggtgatccagatggccacgatgacgaggatgatcatcactgaggccttgtgtcgataatgataataagaactttgtgaaacatggttttgtcctatctttgcagcatcagactgccctatagagtattgtaattgataagtgtttgaccatgaaccaggtcgggtggtgttttacacctacgaattttgttcagatcttttcgaccatacggttgcttctgtttggaatatagatttttttttctggagtgcaacatcaaataaaggatgagtgcatcggtttcactcta

SEQ ID NO: 146350 - DNA, 1543 bp, Zea Mays
atggctggcatcgggcatctccactcccactccaccggccccacctccgcgaggggcgacccgagaacaccaccacgcccgccatgtggcgccgcctccaaaccctagccccctcgctccgccgcgccgccgcatcgtcgtccccggcctccgcccgcgccgtgcccttgtccacggtgccggtggccgcgttccggcgcacttcgaccctcctctcctctcccggcgacaagccggcgcccagcaaggtcgaggatgtcatgccgatcgccacggggctggagcgcgaggagctcgaggcggagctccaggggaagaagcggtttgacatggatcctgccgtcggccccttcggtactaagattaaacttgtgctaagcacaagtaatgacacaatatttcactccagtatggacatggctttaagtaaaaaagacccaccagatacatctcttgttactgatattaatatcgtaaactacaaagtatttgatatgtgcatgcttaagctgcattacctgaagcttgtttcaaatacaccagcagtcagccagccgtacatgaaattcgtagggtatgtttataactgccttgtcacttgggagcattgcgttaaatatcagtgtttgatgtatctggtgcttctattcttcaaccgtaggcatgccctcacatccatgctgagtactgacattgcctgtatttggtctagatatgtgttgaagttcttgaccactcacttcccttctgttttttttctttccagacttcctatgctgcaagatctcaattgttctggacaatataaagtactaccttaagaaaacaagtataataccaaaaaaacactaaacaacaggggcacacttttcacttgtttgtggttatgctattcctaaattttctaattttcaatcaattgatgcacccagcttctatgcataccctgtgctgactactgacattgtgtgcgcttttagtgaagagatgtaggatttcttgatcactctctccccttggttttgcataccactctttgtgctgcaagattgtccatttgttaattttgaatgtattgtctgcacgaggaatcagccgtgattgaatcctactataacaagagaatagttggctgccctggtgccgaaggagaggatgaacacgatgtcgtctggttttggttggaaaaggataaaccgcatgagtgcctagtctgctcacggtactttgtgctcaaggtcattggtgatgggggtgatccagatggccacgatgacgaggatgatcatcactgaggccttgtgtcgataatgataataagaactttgtgaaacatggttttgtcctatctttgcagcatcagactgccctatagagtattgtaattgataagtgtttgaccatgaaccaggtcgggtggtgttttacacctacgaattttgttcagatcttttcgaccatacggttgcttctgtttggaatatagatttttttttctggagtgcaacatcaaataaaggatgagtgcatcggtttcactcta

SEQ ID NO: 146351 - DNA, 2197 bp, Zea Mays
cggactccgttcaccggctgcaatctcttctcccgttcgccccgcgctctccttctctctctctctcgtggcgcaactgggtggccgccgccctacgccaggtgcctttgccggtcttcgtcgggccggttgccggcgacgagcacccaccaggtatgcgctacgcagtgcgcatgccttctcgtcccttcttgctgtgcgagtgcgaagccgagcaccacgaaccctaattcaatacagattgcgagctattggttgaacatgtgtacaccaatgtcgccatggatggggcggctgcgctctcaccacgcgacccctcaaagttttcccaagaggaggcccccttcccagaccaagaacccggaggagaaagaggagctccaaacatggaagaagcatactgcccgcaagaagaccgcgagaggtcgccacgctggagctgctgcacagcagcccagggcgttcttacgtgggtcttcgcggctcgctggaagagactatgagcatccgattatgatagacgatgatgtaaacgaggaatgtaaatccagggctgatcaatcagcaattacacctctccgcagatccccacgattccatctggaagataaaagtttgagcaagtcactgttgccaccaaatcgctgtgagacctctcctaacagaaagactaaaaatgctcatagaaaagacaaaaatcaagagagcctgaaagggaataggggaagtgctggatttcctcctaggaaagatatttcagatgtatctaacaaaaagagtgacaagcaagagttaaagcccatccattgtaaagtgcaaacaggaaagaggaagagaggaacagaaaggaggttgttatcgaagaagcaaagttgccaggaccctggaccattgcctgcgtatcgccaagaaattgcatcttgcaatgaatccagaaaatccacccacagaaggattgaaaatgacccttctaccgaggtgaagcttaaagttggtgatgtgagattggcaaacattgatgaaaacatcaacaagcccagtgggactcagagagaaggaatagaaattttttgtggtcctgatgattggacaaaagagcaggacatggcattgcgcaaagcttacttcagtgcccgaccatccccacatttctggaagagggtttcaaaaatggtgccagggagatctgctgaagattgcttcaacagaatttatactgacctctcaacaccgactccaattgccccacgtcccagagcaagtaaaacaacattttctcctataggaaatttcacattgtctgatccaaaacctccaaatatcttggaacctacagttggaatgcgaaagtccgctaaacagaagagtctagtagcacagaagacagtgaggcatttgttgcagaaacattgccgcattgaccaagctcaagaggctgaccacttctcagtttttgaaagctcaccaagtgccttacaattgaacttatcttttgacaattctcctgggactcctgacagttatatgaattcagattctctaggcaagcacagtggaaggtcttcagcacgaaagaaaccattttcaaggttaagaactaaaccatctgaacccagcccaggagttctaaagcctataaagaatgttatcctacatgagaggtacattgataaattggcacgtagagaaggcgcaaaaaggcctcgcagaagggctccagctggctctaaagctgctgattctgggaagtctctttctgagcagcaagctggtagtctgaaggctgctaaaaatgctctcatctcagaagcaaccgacttcataagcagttttaagacgcttcaagccaattcgcttgcgcatgctgtggagaatagtgaagacgagattgaatgtgatgccagtgattgtagccatgatgataaagaataagaatgtccttatagtcttgattcccagcggcccttagcaatcatctcctttttgtcaactaacgttagtcatcacttatcagttgtcagctgatgttagtcagcacttatcagctgcaataaggctaggcagttgtcagggcagtgtattctgcctaatatgatgtatctagttttgttcctcttagtgcatcagagatgttagttagttgtgaaatgttgccttcgtcatgccttatgaagattgaaatcactggagattacaa

SEQ ID NO: 146352 - DNA, 2080 bp, Zea Mays
ctcttctcccgttcgccccgcgctctccttctctctctctctcgtggcgcaactgggtggccgccgccctacgccaggtgcctttgccggtcttcgtcgggccggttgccggcgacgagcacccaccagagctattggttgaacatgtgtacaccaatgtcgccatggatggggcggctgcgctctcaccacgcgacccctcaaagttttcccaagaggaggcccccttcccagaccaagaacccggaggagaaagaggagctccaaacatggaagaagcatactgcccgcaagaagaccgcgagaggtcgccacgctggagctgctgcacagcagcccagggcgttcttacgtgggtcttcgcggctcgctggaagagactatgagcatccgattatgatagacgatgatgtaaacgaggaatgtaaatccagggctgatcaatcagcaattacacctctccgcagatccccacgattccatctggaagataaaagtttgagcaagtcactgttgccaccaaatcgctgtgagacctctcctaacagaaagactaaaaatgctcatagaaaagacaaaaatcaagagagcctgaaagggaataggggaagtgctggatttcctcctaggaaagatatttcagatgtatctaacaaaaagagtgacaagcaagagttaaagcccatccattgtaaagtgcaaacaggaaagaggaagagaggaacagaaaggaggttgttatcgaagaagcaaagttgccaggaccctggaccattgcctgcgtatcgccaagaaattgcatcttgcaatgaatccagaaaatccacccacagaaggattgaaaatgacccttctaccgaggtgaagcttaaagttggtgatgtgagattggcaaacattgatgaaaacatcaacaagcccagtgggactcagagagaaggaatagaaattttttgtggtcctgatgattggacaaaagagcaggacatggcattgcgcaaagcttacttcagtgcccgaccatccccacatttctggaagagggtttcaaaaatggtgccagggagatctgctgaagattgcttcaacagaatttatactgacctctcaacaccgactccaattgccccacgtcccagagcaagtaaaacaacattttctcctataggaaatttcacattgtctgatccaaaacctccaaatatcttggaacctacagttggaatgcgaaagtccgctaaacagaagagtctagtagcacagaagacagtgaggcatttgttgcagaaacattgccgcattgaccaagctcaagaggctgaccacttctcagtttttgaaagctcaccaagtgccttacaattgaacttatcttttgacaattctcctgggactcctgacagttatatgaattcagattctctaggcaagcacagtggaaggtcttcagcacgaaagaaaccattttcaaggttaagaactaaaccatctgaacccagcccaggagttctaaagcctataaagaatgttatcctacatgagaggtacattgataaattggcacgtagagaaggcgcaaaaaggcctcgcagaagggctccagctggctctaaagctgctgattctgggaagtctctttctgagcagcaagctggtagtctgaaggctgctaaaaatgctctcatctcagaagcaaccgacttcataagcagttttaagacgcttcaagccaattcgcttgcgcatgctgtggagaatagtgaagacgagattgaatgtgatgccagtgattgtagccatgatgataaagaataagaatgtccttatagtcttgattcccagcggcccttagcaatcatctcctttttgtcaactaacgttagtcatcacttatcagttgtcagctgatgttagtcagcacttatcagctgcaataaggctaggcagttgtcagggcagtgtattctgcctaatatgatgtatctagttttgttcctcttagtgcatcagagatgttagttagttgtgaaatgttgccttcgtcatgccttatgaagattgaaatcactggagattacaa

SEQ ID NO: 146353 - DNA, 3067 bp, Zea Mays
gtcgtgtcttgggctgtcgtctcacccactggctcgcatcggcatcggaatcggctttgccacttcaagcgcaagttctaccagcgctacatcattgcaggagcttgccttgtagcgtcgcgttatgctggttgcagcgagtgactaagcagagatccgttcggcccattcactccaccactgctccacacagcgagtgacaaggcatgtcgcgaggggtcagctctggccgccgcacgtgcttggagctggagcggataatcctaaatcggcaccgctccggaagcctcggccgagaggacgcgctcaacctgttcgatgaattgcttcctcaggccagaccggcatcggtgcacgccttcaatagtgtcctcaccgtcgtcgctcgcgccgactcctcgtcgtcaccacgtcacagcgctgcgctcgccgtgtcccttttcaataccatggtccggtccggcgtcaatatgatggccgccatcataggcatcctcatccgttgcttctgcactgttggccgcttggacctcgccttcgctgcctttgccctgttcctcaagacgggatggagggtgcagaacgtgaccctcaaccagctaatcaagggtctctgtgatggcaacaggactgatgacgcaatggatatggtgttcagaagaatgccggagcttggctatacacctgatgttttctcctacaatgctcttatcaaagggctctgcgtcgagaaaaagagtcaagaggctcttgagctgctgattcacatgacggccgatggcggatacaactgttctcccaatgtggtgtcgtataacacagtcattgatggcttctttaaagaaggtgaagtcgacaaagcttacttcctgtttcatgaaatgatgggccaggggcttccacctgatgttgtgacatacaactcactcattgatggcctgtgcaaggctcaagcaatggacaaggctgtagcaatcctacaacatatgtttgataaaggtgttatgccggatactaggacatataatatcatgatccgtggatattgctctttaggacagttggaagaggcagtgagactgctcaaaaagatgtctggtagtggtcttcaaccggatgttgtcacttacagtcttctgatacagtattattgcaagattggaagatgcgcagaagctaggagtgtctttgattcaatggttcggaagggtcaaaaacccaattctactatctatcacatcttgcttcatgggtacgccacgaaaggagctcttattgatgtgcgtgatctccttgatttgatgattcgagacggtattccgtttgaacatcgtgccttcaacatcttgatttgtgcatacgctaaacatggagcagtggataaggcaatgactgcatttacagaaatgcgacagaatggtttgaggccagatgtagtcagctacagcacggtaattcacattctttgcaagaccggcagagtggaggatgctgtgtaccatttcaatcagatggtcagtgaagggttgtctcctaacatcataagttttacctcactaatacatggtctatgttccattggtgaatggaagaaggttgaggaactggcttttgaaatgatcaataggggcatccaccctgatgccatattcatgaacacaataatggacaacctatgcaaggaaggaagggttgtggaagcacaagatttctttgatatggttatacacattggtgtgaaaccagatgttgtttcatataatacactgatagatggatattgcttcgttgggaagatggatgaatcgattaagcaacttgatcgtatggtctccattggcttgagacctgacagttggacctataattctctgcttaatggctactttaagaatggaagggttgaagatgcattagctctttacagagaaatgttcaggaaggatgtaaaattttgtgctattacatctaacataatgctgcatgggttatttcaggctggaaggattgttgctgcaagggaattatacatgaaaatggttgacagaggaacacagttgagaatcgaaacatacaacacagttcttggaggactctgtgaaaatagttgtgttgatgaagcgctgagaatgtttgaggacttgcgttcaaaagaatttgagcttgatgttcggactttcagtatagtgattaatgcattgctgaaagttggtaggattgatgaagcaaagagcctgttttcagctatggtgctccgtggtccagtgcctgatgtgataacctacagcttaatgatcaaaagtcatatagaagaaggtttgttagaggagtctgataatctttttctatctatggagaagaatggctgtgctgccgactcacacatgctaaacatcatagttagaagactacttgaaaaaggagatgtgagaagggctggaacctaccttaccaaaattgatgagaagaacttctcccttgaagcttccaccgctgcattgctgattcctattgtttcagagaagaagtaccagaaagaagtaaagtttcttcctgaaaaataccactctttcatgcaacctagggatgattgagacctttcccggtttttctgtgctggacattagagattgctaactagacttatttcagaagatcaatttgaaaacatgaaatcttctgcataacttgggcacaaatgaagtggagagttacctggccttgaaggattttcttgtttctagagattgtctttcatatttaataaccacgcttgcatttactctgtgcctatcaaataccgtgtgcaggcttgtgtgggtagtgtttacccaatagcatccctatcggctatcgtgattgatggaaattctgaaactccattatgccttctacttttttgcgtcttcacataaatctcgagacacctggttttgtgttttctctgatccccacctggcctctctttttccttctgcatgttttttagtctcataaagttcctttcatttatagatttgatataaactgccttagctctcactggaatttgttagacacatatata

SEQ ID NO: 146354 - DNA, 100 bp, Zea Mays
cccaacaaaaaacacagtggaggttatgccaacaccacttgtgtcatcctatgccaaagttgtcctcgcaatcatgattgcatttgggttttgaatttgc

SEQ ID NO: 146355 - DNA, 1448 bp, Zea Mays
atcggcatcggaatcggcgttgccacttccaccgcttctgctccccttcgccctgcttcatgttccgcgattcccttcgcacaccctcccgctgccgccgctgttctcctaccacccgtcctcccgcgctgggtagcggtactaatttaggatctgatacactttctgtgcggaagcgcggtcctgctaaatccgtgtgccggggttccagattgcaggagcttgccttgtagcgtcgggttatgctggttgcagcgagtggctaagcagagatccagtcgcggcgcgctgcttgcttgcttccaaccctgggtgcttgtgctactctttcaagctcgtgatctcatcatgggcaatgcagcatgctcgttcttactagttactaagtttatttatccatacaacccatgttataagttgggtcaggaactcaggatacggatactgttatgcagctgtgcaggcagggccacagaacaagtttgtttgtacacagactcaagaaatggaaaacaaattcttgttatttgggaaaacaacttcttgttatttgcgtttgcacaccattttgagttgatttcatccactgaagactaaagagtgaagtaataaggtcgtgtacacttgattttcccctcctctggttggttgcacaggaccatgatctggtcgttgagccgaggtcattcaccggttccactcagcccagcagaccggatgtaaggccatcgtcttcatcgtccagcgataatgccagggcacataattcaggtaaagtatgtatgttgtggacatccatcattttcttctgtcacagttgctgcactacctgtgctttgctgggcacttgataatgttgccagattccgaaggcttaactttgccggatcctctttctataggagatacctggaagagccttgtctttggctgggtaaacacaaataatactacgctgagcctcctcagttcaaatgctgaaagcgccttgggttttcttcactgttctcgtggcgcggtagcataattcagacattcatgtactgggagctgagggattagtacgaggccatttatgctgttttgctgcatgcgttgaagccgatgtatcatgctgctcccgtgacatccagacgccccgttcctccttccagacgcccatttctgggatccaaatatggtggctctggtagggtggtttaagatcatgtatctgctgctgaatagctgagctgcccgggttgtctgcacagaacttagcacagccgctgtgttcttatgtaatgctgcagcagtgcgcgggataagttttctgcagaaaaatagcattcattgtatttgtctggaacgtatgatcccaatttgataactgtagcttctgctatttgctgtcataataagcagtctggaacgtatgcgtggcaggccctgctgcctgtacgcgtctc

SEQ ID NO: 146356 - DNA, 1532 bp, Zea Mays
atcggcatcggaatcggcgttgccacttccaccgcttctgctccccttcgccctgcttcatgttccgcgattcccttcgcacaccctcccgctgccgccgctgttctcctaccacccgtcctcccgcgctgggtagcggtactaatttaggatctgatacactttctgtgcggaagcgcggtcctgctaaatccgtgtgccggggttccagattgcaggagcttgccttgtagcgtcgggttatgctggttgcagcgagtggctaagcagagatccagtcgcggcgcgctgcttgcttgcttccaaccctgggtgcttgtgctactctttcaagctcgtgatctcatcatgggcaatgcagcatgctcgttcttactagttactaagtttatttatccatacaacccatgttataagttgggtcaggaactcaggatacggatactgttatgcagctgtgcaggcagggccacagaacaagtttgtttgtacacagactcaagaaatggaaaacaaattcttgttatttgggaaaacaacttcttgttatttgcgtttgcacaccattttgagttgatttcatccactgaagactaaagagtgaagtaataaggtcgtgtacacttgattttcccctcctctggttggttgcacaggaccatgatctggtcgttgagccgaggtcattcaccggttccactcagcccagcagaccggatgtaaggccatcgtcttcatcgtccagcgataatgccagggcacataattcaggtaaagtatgtatgttgtggacatccatcattttcttctgtcacagttgctgcactacctgtgctttgctgggcacttgataatgttgccagattccgaaggcttaactttgccggatcctctttctataggtaaccgtatgtggatatgtttctgtatccttggcacagtcagtatccagtgccatttatcaatactgtcaatgtcttcttcaggagatacctggaagagccttgtctttggctgggtaaacacaaataatactacgctgagcctcctcagttcaaatgctgaaagcgccttgggttttcttcactgttctcgtggcgcggtagcataattcagacattcatgtactgggagctgagggattagtacgaggccatttatgctgttttgctgcatgcgttgaagccgatgtatcatgctgctcccgtgacatccagacgccccgttcctccttccagacgcccatttctgggatccaaatatggtggctctggtagggtggtttaagatcatgtatctgctgctgaatagctgagctgcccgggttgtctgcacagaacttagcacagccgctgtgttcttatgtaatgctgcagcagtgcgcgggataagttttctgcagaaaaatagcattcattgtatttgtctggaacgtatgatcccaatttgataactgtagcttctgctatttgctgtcataataagcagtctggaacgtatgcgtggcaggccctgctgcctgtacgcgtctc

SEQ ID NO: 146357 - DNA, 1303 bp, Zea Mays
cggcgttgccacttccaccgcttctgctccccttcgccctgcttcatgttccgcgattcccttcgcacaccctcccgctgccgccgctgttctcctaccacccgtcctcccgcgctgggtagcggtactaatttaggatctgatacactttctgtgcggaagcgcggtcctgctaaatccgtgtgccggggttccagattgcaggagcttgccttgtagcgtcgggttatgctggttgcagcgagtggctaagcagagatccagtcgcggcgcgctgcttgcttgcttccaaccctgggtgcttgtgctactctttcaagctcgtgatctcatcatgggcaatgcagcatgctcgttcttactagttactaagtttatttatccatacaacccatgttataagttgggtcaggaactcaggatacggatactgttatgcagctgtgcaggcagggccacagaacaagtttgtttgtacacagactcaagaaatggaaaacaaattcttgttatttgggaaaacaacttcttgttatttgcgtttgcacaccattttgagttgatttcatccactgaagactaaagagtgaagtaataaggtcgtgtacacttgattttcccctcctctggttggttgcacaggaccatgatctggtcgttgagccgaggtcattcaccggttccactcagcccagcagaccggatgtaaggccatcgtcttcatcgtccagcgataatgccagggcacataattcaggagatacctggaagagccttgtctttggctgggtaaacacaaataatactacgctgagcctcctcagttcaaatgctgaaagcgccttgggttttcttcactgttctcgtggcgcggtagcataattcagacattcatgtactgggagctgagggattagtacgaggccatttatgctgttttgctgcatgcgttgaagccgatgtatcatgctgctcccgtgacatccagacgccccgttcctccttccagacgcccatttctgggatccaaatatggtggctctggtagggtggtttaagatcatgtatctgctgctgaatagctgagctgcccgggttgtctgcacagaacttagcacagccgctgtgttcttatgtaatgctgcagcagtgcgcgggataagttttctgcagaaaaatagcattcattgtatttgtctggaacgtatgatcccaatttgataactgtagcttctgctatttgctgtcataataagcagtctggaacgtatgcgtggcaggccctgctgcctgtacgcgtctc

SEQ ID NO: 146358 - DNA, 1539 bp, Zea Mays
cggcgttgccacttccaccgcttctgctccccttcgccctgcttcatgttccgcgattcccttcgcacaccctcccgctgccgccgctgttctcctaccacccgtcctcccgcgctgggtagcggtactaatttaggatctgatacactttctgtgcggaagcgcggtcctgctaaatccgtgtgccggggttccagattgcaggagcttgccttgtagcgtcgggttatgctggttgcagcgagtggctaagcagagatccagtcgcggcgcgctgcttgcttgcttccaaccctgggtgcttgtgctactctttcaagctcgtgatctcatcatgggcaatgcagcatgctcgttcttactagttactaagtttatttatccatacaacccatgttataagttgggtcaggaactcaggatacggatactgttatgcagctgtgcaggcagggccacagaacaagtttgtttgtacacagactcaagaaatggaaaacaaattcttgttatttgggaaaacaacttcttgttatttgcgtttgcacaccattttgagttgatttcatccactgaagactaaagagtgaagtaataaggtcgtgtacacttgattttcccctcctctggttggttgcacaggaccatgatctggtcgttgagccgaggtcattcaccggttccactcagcccagcagaccggatgtaaggccatcgtcttcatcgtccagcgataatgccagggcacataattcaggtaaccgtatgtggatatgtttctgtatccttggcacagtcagtatccagtgccatttatcaatactgtcaatgtcttcttcaggagatacctggaagagccttgtctttggctgggtaaacacaaataatactacgctgagcctcctcagttcaaatgctgaaagcgccttgggttttcttcactgttctcgtggcgcggtagcataattcagacattcatgtactgggagctgagggattagtacgaggccatttatgctgttttgctgcatgtaattcttaacctctgcatctctgctggcaaacgtactgatttaccctgtttgctgtatcgtttcaatcccaagcgatccaatctatcttctgccctgctttttgtccatcaacaaccagctagaacttggttggcaataagaactaagaagcgttgaagccgatgtatcatgctgctcccgtgacatccagacgccccgttcctccttccagacgcccatttctgggatccaaatatggtggctctggtagggtggtttaagatcatgtatctgctgctgaatagctgagctgcccgggttgtctgcacagaacttagcacagccgctgtgttcttatgtaatgctgcagcagtgcgcgggataagttttctgcagaaaaatagcattcattgtatttgtctggaacgtatgatcccaatttgataactgtagcttctgctatttgctgtcataataagcagtctggaacgtatgcgtggcaggccctgctgcctgtacgcgtctc

SEQ ID NO: 146359 - DNA, 2920 bp, Zea Mays
gtctccatggccaggctcagatgccatgcgtcgcgacctccacaagcttcgtctgatgcatgcatgcacacgtgggacgccgcccctggtttgccggtcgccaaaatttgcggggacggaaagagagactgttggagtaaaattagtaaatgaaaaatggtgtttctccgtcaaatataattttgggaagcttttacatattttcttggagatactctgatactgtttttatttgacggcggcacagtgttttctgttgccctcttcctctcgctgtgccgccggcgccaacgccgttcagcccatccactccaccactgctcccaccacacaggggttgtacaaggcatgtcgcgaggggtcagctctggccgccgcacgtgcttggagctagagcggatcatcctaaatcggcaccgctccggaagcctcggccgagaggacgcgctcaacctgttcgatgaattgcttcctcaggccagaccggcatcggtgcacgccttcaatagtgtcctcaccgtcgtcgctcgcgccgactcctcgtcgtcaccgcgtcacagcgctgcgctcgccgtgtcccttttcaataccatggcccggtccggcgtcaatatgatggccgccaaccgttacatcataggcatcctcatccgttgcttctgcactgttggccgcttggacctcgccttcgctgcctttgccctgttcctcaagatgggatggagggtgcagaacgtgaccctcaaccagctaatcaagggtctctgtgatggcaagaggactgatgacgcaatggatatggtgttcagacgaatgccggagcttggctatacacctgatgttttctcctacaatgctcttatcaaggggctctgcgtcgagaaaaagagtcaagaggctcttgagctgctgcttcatatgacggccgatggcggatacaactgttctcccaatgtggtgtcgtatagcacaatcattgatggcttctttaaagaaggtgaagtcgacaaagcttacttcctgtttgatgaaatgattggccaggggtttccacctgatgttgtgacatacagctcactcattgatggcctgtgcaaggctcaagcaatgaacaaggctgaagcaatcctacaacatatgtttgataaaggtgttatgccgaatactaggacatataatatcatgatccgtggatattgctctttaggacagttggaagaggcagtgagactgctcaaaaagatgtctggtagtggtcttcaaccggatgttgtcacttacattcttctgatacagtattattgcaagattggaagatgcgcagaagctaggagtgtctttgattcaatggttcggaagggtcaaaaacccaattctactatctatcacatcttgcttcatgggtacgccaccaaaggagctcttattgatgtgcgtgatctccttgatttgatgattcgagacggtattccgtttgaacatcgtgccttcaatatcttgatttgtgcatacgctaaacatggagcagtggataaggcaatgactgcatttacagaaatgcgacagaatggtttgaggccagatgtagtcagctacagcacggtaattcacattctttgcaagatcggcagagtggaggatgctgtgtaccatttcaatcagatggtcagtgaagggttgtctcctaacatcataagttttacctcactaatacatggtctatgttccattggtgaatggaagaaggttgaggaactggcttttgaaatgatcaataggggcatccaccctgatgccatattcatgaacacaataatggacaacctatgcaaggaaggaagggttgtggaagcacaagatttctttgatatggttatacacattggtgtgaaaccaaatgttgtttcatataatacactgatagatggatattgtttcgttgggaagatggatgaatcgattaagcaatttgatcgtatggtctccattggcttgagacctgacagttggacctataatgctctacttaatggctactttaagaatggaagggttgaagatgcattagctctttacagagaaatgttcaggaaggatgtaaaattttgtgctattacatctaacataatcctgcatgggttatttcaggctggaaggattgttgctgcaagggaattatacatgaaaatggttgacagaggaacacagttgagaatcgaaacatacaacacagttcttggaggactctgtgaaaatagttgtgttgatgaagcgctgagaatgtttgaggacttgcgttcaaaagaatttgagcttgatgtttggactttcaatatagtgattaatgcattgctgaaagttggtaggattgatgaagcaaagagcctgttttcagctatggtgctccgtggtccagtgcctcatgtgataacctacagcttaatgatcaaaagtcgtatagaagaaggtttgttagaggagtctgatgatctttttctatctatggagaagaatggctgtgctgccgactcacacatgctaaacgtcataattagaagactacttgaaaaaggagatgtgagaagggctggaacctacctaaccaaaattgatgagaagaacttctccgttgaagcttccaccgctgcattgctgattcctattgtttcagagaagaagtaccagaaagaagtaaagtttcttcctgaaaaataccactctttcatgcaacctagggatgattgagacctttcccggtttttctgtgctggacattagagattgctaactagacttatttcagaagatcaatttgaaaacatgaaatcttctgcataacttgggcacaaatgaagtggagagttacctggccttgaaggattttcttgtttctagagattgtctttcatatttaataacc

SEQ ID NO: 146360 - DNA, 240 bp, Zea Mays
gaccttggagcattctggacacaggagacggcccctcgacctgcactttgtgcagggaacaagattctcagtcttagcttcagctccaagagactcgtagaggtcatccagcacgcccaaactgagcatccctccactccgagctgatcctgttcatttgcactgcgagcatgctacaatccgaaggccaccgcacctcttacacatccctagtgataatatatattgagaggaggagag

SEQ ID NO: 146361 - DNA, 2099 bp, Zea Mays
gaaggcgacgcagtggccgtacagtagtgtcacctgcacattgcagaccgcctcagcgcctcaccaagcgaaactcgttggcggctagggttttgctgcctcccgagcccaaaccctagagcacccgcgcccatcccatggcgtgctaggcttcgattgagactggggggattagtaccgcaggctgggattagagcaagcgccgagcggaaatggcatcgagtaaccaattcgatctacttggagacgtcgagaacgacgaccctgcccacctcctcgcagctgccgagaagaaggcggccgcggtgcctaagcccgcgcccgcgccggccaagttgcccaccaagcctccgccgcccgcgcaacctgtgagggaggaaaggaactatggtgctccaccgcgcgatggtccaggacgtggaagaggcggccgcggtggcaggactggcccgaggcgagattttggcgatgctgatgcccacggctttgagggggggtatggtggcggcggcggcggttttggggacggtggagttgctcgcggtgaaaatggtgagggtaggcaggcagagaggggccgtgggccccgccagccttaccgtggaggtgggcgacgtggtgggtacagcgatgggcaggctgggaatgagtttggacgtcctcgccgggcatatgagcgccacagcggcacaggccgtggctacgggatgaagcgtgaaggggctgggcgtggaaattggggaactgcaactgatgaaggccttgaacaggacactgtggatgctgttaatcctgaggagactactgccgtggtggaggatgagaagaaacctgaagatgcaccacagtctgaggttgagaaggacaaggagggcgcggagaatgaagaagaagaaaaggaacctgaggataaggagatgactttggaggaatatgaaaaggtactggaggaaaaacgaaaagctttactctcccttaaggctgaggagagaaaagttgaaattgacaaggagctacaggccatgcaacaactgtcagttaaaaaggatggcgatgaagtgtttatcaagctgggctctgacaaggacttgaaaaagaaagaaagtgctgaaagagaagaacggggcaagaagtccctgagcatcaacgagttcttgaagccagctgaaggcgaaaggtactataaccctagtggccgtggccgtggtaggggccgtggggggttccgtggtggttacaacggcggttatcggggaccagctgctgctccagcgatcgaagaccaggctcagttccctgccctggcctaagcacagctcgtgttctcgctcaagattgtgtcacttttgcggagtgcgtcagtcagtcctagtgttgttgctcccaagcttgctttccggattatgtgtatccaacattttctgatattatgtactggtgtgctcgtgattgcatggttttgctaagctcagctgaggggtgtcgtgttctgtttgcctggctgatggctgttgacagacttgtcacacatccttcgagcctgaccggtctccagatttatttacttttttcctcggatcagtcatgggaggaaatagtacaccattctttgcattagccattgagttgattacatcgttattttgtcagccatgtgcatatctagaggctaacatgttctttgatgtcgtcgagacggcggtccatgatctccgagacagcctgcaagaagacagtctcgcatcctcctccccgttccgccgcctcacggacgatctcttcgatggcggactccttggtcagggtctctctgcacatgatgctcccgatgtggaaggcggtgaggcccctctccacacccttcttcagcagcatggtggcgacgcgcagcgtgcgcgcgcactcgcgcgacacctcccacccgtggagcctcagcatagtcacgtcctcctccgcgtccagggaccgcacgtactccaccgtctcgtcgctgaagggctcccggcactgaggccagtagagccactcgaaagtgcagtcctcgaactgcatgccaggtcactccaagatgaagagaagtgggaacaaaaaatgaaaaa

SEQ ID NO: 146362 - DNA, 2232 bp, Zea Mays
ctcctctcctctcgccccgcctcgtcatgtcacgtctcccaaagtcccatctcgccttcgcttaaacataaaccacacccatcgcacccagccagccctcgccatccatggccaccaccgccgccatccacctgcgcccgctccgttccgtcgccgtctcctccgcgaggtcacgctcgctcctccacctcctcgcccggcccctctcctcttcccaatcgtcctacgcctaccgcccttcccctacagcgcccgccgccgccgcccccaaccatgtccaccaccctccccatcaccaccagtcggtgcctcccccaggaccccctccacagtggtccgcgcagggacatccgcctccgccgccccgtggctatgggcctccaccgccgcagcaccagcatgtgccgcctccgccaccacgcggctacggacctccaccaccgcctccacacggccacgtacctccgccgcctccgccgcgacacggccacgggcctccaccaccgggccagcacgtactgccgcccctgctaccacacggccacggacctccgccaccgggccagcacatgccaccgccacacggccacgggcctccaccaccgggccagcgcgtaccgccgcctccgccgccacacggccacggtcctccgccaccgggccagcacctaccgccgcctccaccaccacacggccacggtcctccacccccgcaccagcaggcaccgccgccgcctgatcctgtggcggggcctggggagctgatgggactgtgccgggaggggcgggtaaaggatgccgtggagcttctctccaagggtgcgcgcaccgacctggacaccttctacgagctcgcggccacctgctccaaccctaagctgctggaggagctcaggaaggtgcacgacttcttcctccgctcgcccttccgcggcgacctccgggtcaacaacatgctgctcgcgatgtatgccaagtgcgcagccatgccacatgcccgcaggacgtttgacaatatgcctgaccgcgacatggactcgtggcacatcatgatcgacggctactctgtcaatggacttggggacgaggcgctgcgtctgttcgagctgatgaaggagtgtatggcacccacaagtcagacctacctgcttgtgctcaatgcctgtgccaactcagaggccatcgaggaggcgctcctttactttgatgccatgtccagggaccatggcattgagcctggtgtggagcactatgttgggatcattgaggtcttggggaagtcagggcatctcaacgaggctctggagttcattgagaagctgcctttcgagcccaatgccatggtgtgggagtcactcttgaacctggcccggatgaatggagacattgaccttgaggaccgggcagaggagttgttggtgtcgcttgatccatccaaggcaaatcctaagaagctcccaaccccacctcccaagaggcgcctgggaattaacatgcttgatgggaggaacaagctagtagagtacaggctgccaccaaagattgaaaagaaggtggtcaatgagcagaggtatgtcccagacacaagatatgtgctccatgacattgaccaggaggccaaggaacaggcattgctgtaccacagtgagaggctggcaattgcttatggtctgattagcactccagcaagaactccacttcgtatcattaagaacctgaggatatgtggtgactgccacaacgccatcaagatcatgtcaaggatcgttgggagagagcttattgtgagggacaacaagaggttccaccacttcaaagatggaaagtgctcctgtggagattattggtgataatggattaaagccgctcttctatcctttatatggagctgctggcagccatggtttcagttgataataagcaatatgaaggtatccaatgggtgttgctagtattttgtcatccttaaatattcttaagatacttagctgcaagcacttgtatcatgcaaggctatcacttgttgatgcgctaattgatcctactctcctctgtatcaacatcttgtttcccatgggaaaacatgtgctggtctggagtatataacaactatacggttgtaagagctgggtcttccttgcattactttgactaaaacgaatcttatatatctgtgcgcatgtatttattttcttgttttattatgtgcagtctatgttggatatactaccg

SEQ ID NO: 146363 - DNA, 136 bp, Zea Mays
caataaaaaaatcagcaatcgcataagcactagtttcagatgcaacaagctcattatttccgtctccctctacccgaatctagctgatggataactcactcaatgtaaaccgttgtcgataaaattaaagagacaa

SEQ ID NO: 146364 - DNA, 601 bp, Zea Mays
aaaagagtccatctcctccctccctggctcggctgtcggctcccttcgccaccgccttcacctccttccctcaccttccagagcccactgttccccggcggcggcagagatgaacgtgtggaactacgtcgtcacggcgcacaagcccacaagcgtcagccattcctgcgtcggcaactttaccagccccaaccagctcaacctcattatcgcgaaatgcacccggatcgagatccatttgcttacccctcagggccttcagccgatgcttgatgtgcctatatatgggagaattgcaacgattgagctcttccggcctcataatgagactcaggattttcttttcattgctacggagaggtacaaattctgtgttctgcaatgggacacagaaaaatcagagctaatcaccaggtctcacttacatgttgtctgtaggaaaacaaaactggtgttctctatttcgtatggaaaataatgatttatttgtaacatggatttgtacaggggcagacgcaaggggtgggcaaggtgggccatggccccaccttaattttataacttcttatacctaggtttaaatatacattaaaataaaaaa

SEQ ID NO: 146365 - DNA, 2459 bp, Zea Mays
tggtcattgaaatcttctttcaatgatccatatgacatgtaccttgttgtgagctttataagtgagacacgattcttggcaatgaacatggaagatgaacttgaagagaccgagatagaggggtttgatgcacaaactcagaccctgttttgtcaaaatgcgatcaatgaccttcttatacaggttactgctaattcggttcgattagtcagttgtacctcccgggagctagtggatcagtggaatgcaccagcaggattctcagtcaatgttgcttcagctaatgccagtcaggttctgttggcaaccggtggtggccatcttgtttacctagaaattagggatgctaaacttgttgaagtgaagcatgcacagttagaacatgagatttcttgtcttgatttgaacccaattggagagcatctagagtatagttccctagctgctgttgggatgtggacagatataagtgttagaatattttcacttccagatcttgtattaataaggaaagaaaatttgggtggagaaattgttcctcggtctgttctgctgtgcaccttggagggggtttcgtatttactttgtgctcttggggatggtaatctgttcagttttctgctgaatgcaagcacaggtgaactgactgatagaaaaaaggttaccctcgggacccaaccaatcagccttcgtacattctcatcaaagggtaccacccacgtgtttgcttcatcagataggccaactgtcatctatagcagcaataagaagcttctctatagcaatgtaaatttgaaagaggttaatcatatgtgccctttcaatacagccgcttttccagacagtcttgcaattgctaaagagggtgagctttcaattggaactattgatgatatccagaagcttcatatccgcacaatcccccttaatgaacaagcacgccgcatttgccaccaggagcaatcaaagacactagcattttgcagtttcaagtacaaccagagtgtggaggaaagtgagactcacttaatacgtctgctagatcatcagacttttgagtccctgtgtgtgtatcctctagaccagtatgaatgtggctgctccatcattagctgttcgtttgtggatgacaataatgtctattactgtgtgggaactgcatatgttatacctgaagaaaatgaaccaaccaagggccgaatccttgtatttgcagttgaagatggaagtttgcaattaattgtggagaaagaaaccaaaggagcagtttattcgttgaatgcattcaatgggaaattgttggctgctatcaaccagaagattcaattatacaagtggatgtcgcgcgaggatggttcacatgagctgcaatctgagtgtggccaccatgggcacatacttgccttgtacactcaaacacgtggtgacttcattgtggttggcgatctgatgaagtcaatttccttgctggtgtataagcatgaggaaagcgcgatcgaagagcgtgctagggattacaatgcaaactggatgactgcagttgagatgcttgatgatgaagtctatgttggggcggagaatggctataacttattcaccgtgcgcaagaacagtgatgctgccacagatgacgaaagggccaagcttgaggtcgttggggagtaccatctcggagagtttgtgaacagattccgccatggttcactcgtgatgcgccttccagactcagagatagggaagattcctacggtcatctttggcacaataaacggggtcattggcattatcgcctccctcccgcatgaccattacaccttccttgagaagttccagtccactcttgtcaagtacataaagggagttggaaacatgagccatgagcaatggcggtcgttccataacgacaagaagacagcggaggcacggaacttccttgatggtgacctgatcgagtcgttccttgaccttagccggagcaagatggaggtggtgtccaaggctatgggcgtttcggtggaggatctgtccaagattgtggaagagctgacgaggcttcactagtacatggatacgcagaagctttgcttgtaacttgatgcatgtacatcctctttttgccatctatttttgtgctgtagcagttccatgagctgcctcagcagttgccgcgggccgtgttggcccgaagctgtagcctgccctgctttattggttgactcggaatactttttgggttgtgccagtttgttgagattgttttttttcttttattctatgttgaatggaaagattagcggtgaatcctgtcatggtcctatctgaatatattggggtactaggagccagagagatgaccgaatgactgtcttgtaggacctggttcattccaggcccaattcaatcgggcagggtcagcaacccagccctttgtttaaaaaatgtatccggtgttcaaagga

SEQ ID NO: 146366 - DNA, 303 bp, Zea Mays
atggatgctggaagagaggcggagccacgcaatgctgccgagaagaagaaactcgatgaggagaagcgcccttctcaaggagttcatccgagcaggatccctcccaagctgtcatttgggtctcttgtgcctggttgggttgtgtacaagcacagtactgtgctatactgctatcttgaaaaccgatgtcttcatgatttagcctcctcgagtccaaaggttctgtggatgcaaaccagtattgtgtgcattggttctagagattcttcaagactgaaaaaaaagaaaaacttctctgcgtga

SEQ ID NO: 146367 - DNA, 1080 bp, Zea Mays
cttttttcttctctgtgctctagaagattagtattgtagggcttctgtgcagcacccaagcaggaattcagaaagaatgcctggaagcatccacatctcagccactcaaccaccagtcatcacccctctgtttctgcaagtcactgtgggcaacagagaatacagtggaaacatagaacaagatgctttatctttccccgttacatcacttcgggagagtatggtaataatgctgtacagtgcagacggggcattgatatcaaaatcagagctgaagacaaaagagattgtggagtcaggaactatggacacagtatttgctcttgatagcgggggagaaatagttcttcagattcagttcttgctcaacgatgatgaccgcaagcgaatccaagaaatgagaaattctgcgatgaagatgaagcagcaagggctgcttggggatggcaatgaactcaatttttcagacagcgcattgtctaaacggctgacggagaagatttccaacatccgaagcaaagcagctgaacgatctgagcttcagaagagcatgtcactggatgatttgcaagagcgggccgtgttccctggaatcgatgcggatccacgggtgaaggcctcaagggactcgttgctgcaagggggtgtaaggttggaagatcccggtggctccaagcagcggctgagccaggccgaagtcgaagccttggcatcgccggtggaaggggagaggcggcgcctaggcctggacgtagcatccggcggcgggcgaggggtcgtgggagaggcggagcaggaagtcagcgacggggcaggggcagtggatgcgatcagcacgtggccgccggacaggccgggccctggctccaagaaaggggacagcataccagagagcagcaaatcaagtagtgcagtgaagacgatgataagtagctttgaaggcaccaccaccccacaggttggttggtttgtttgtgtgttttcatccaaacattttcaaacaaagaaatcagttttatttgtcaggaacatgtcgtcatctagtagcagtgatatccaaatatgattgattggtggatg

SEQ ID NO: 146368 - DNA, 940 bp, Zea Mays
gggtcccacatgcagaatacgacgacctctcctgctcctccgaatcctgaaaccaaccagatcacacgaaccaaaccaccgcctcctcccccgaccggagaggagcctcaccgccggcgcccatggcgacacgctacttgatcgtgtcgctgcccgtgcagtcgcccggcgccaccgccagctccctgtggtcgcgcctccaggactccatctcccgccactccttcgacaccccgctctaccgcttcaacgtcccggatctccgcgtcggcaccctcgactcgctcctcgcgctcagtgacgacctcgtcaagtccaatgtcttcgtggagggcgtgtcacacaagatccggaggcagatcgaggacctcgagcgcgccggaggggtcgagaccgggaccctcaccgtcgacggcgtccccgtcgacacctacctcactaggtctgctgcaaactgccaaccccatcggatgggtgccctgttcagcttaaaagcttctgtgttgatcgcgcgcgcaggttcgtgtgggatgagggcaagtaccccacaatgtcccctctcaaggagatcgtcggcagcatacagtcacaggttgccaagatcgaggatgacatgaaggttcgagcatcggaatataataatgtaaggagccagcttagtgcgatcaacaggaagcaaagtgggaggtaaattgcgctgacatactttgtgtgttcagactctagaggaagtgcttgattccaggactttttccttgtttattgtaaaaggaacaggagagcagaaatgaatggcttactcattttatctgttgcctttcctatactaattagtttggccttttattgtgtgaaagcttagcggttcgtgatctttccaatctggtaaaaccggaggatatgatcacctcggaacatctcgtgacacttcttgcaattg

SEQ ID NO: 146369 - DNA, 1577 bp, Zea Mays
gggtcccacatgcagaatacgacgacctctcctgctcctccgaatcctgaaaccaaccagatcacacgaaccaaaccaccgcctcctcccccgaccggagaggagcctcaccgccggcgcccatggcgacacgctacttgatcgtgtcgctgcccgtgcagtcgcccggcgccaccgccagctccctgtggtcgcgcctccaggactccatctcccgccactccttcgacaccccgctctaccgcttcaacgtcccggatctccgcgtcggcaccctcgactcgctcctcgcgctcagtgacgacctcgtcaagtccaatgtcttcgtggagggcgtgtcacacaagatccggaggcagatcgaggacctcgagcgcgccggaggggtcgagaccgggaccctcaccgtcgacggcgtccccgtcgacacctacctcactaggttcgtgtgggatgagggcaagtaccccacaatgtcccctctcaaggagatcgtcggcagcatacagtcacaggttgccaagatcgaggatgacatgaaggttcgagcatcggaatataataatgtaaggagccagcttagtgcgatcaacaggaagcaaagtgggagcttagcggttcgtgatctttccaatctggtaaaaccggaggatatgatcacctcggaacatctcgtgacacttcttgcaattgttcccaagtactcccaaaaagactggttgtcaagctatgagaaaattgacacattcgtggtacctaggtcatctaaaaagctctatgaagacaatgaatatgctctctacactgtaacactgtttgctaaggttgttgacaattttaaggtccgtgctcgcgagaagggttttcaggtccgtgattttgagtacagtcctgaagcacaggaaagtcggaagcaggagatggagaagctactgcaagaccaagaagccatgaggaccactcttcttcaatggtgctatgccagctacagcgaggtattcagttcctggatgcacttctgtgctgtgcgtgtctttgtagagagcatccttagatatggtctccctccatcattcctgtctgctgttcttgcaccatctacaaagagcgagaagaaagtaaggagcatcttagaggagctctgcggcaatgcccatagtatttattggaaatccgaagacgacgtaggcgtcgccggtctgggaggtgaaacagaggcgcacccttacgtctccttcaccataaattttgtctgagaccggcatgttcctggccgtctgcggcccaggcaatatttcgagcagaactgccataaattctttgttgatttgtcggttcatgtgctcctgtaattcacatcacagagagaccagccgatcaataatgtagtttctgaggacatgtttccctgcagtattgtaccttgggagcgcattgtaaatggcctggaacagttgtctactggatttgtttatttatttacaataaaagccatgtgaaaataagtaactaaaatttggattgtcagttgatgaaaaatggaatgtggagctagctaggctctgggtttgtggcgc

SEQ ID NO: 146370 - DNA, 1754 bp, Zea Mays
gggtcccacatgcagaatacgacgacctctcctgctcctccgaatcctgaaaccaaccagatcacacgaaccaaaccaccgcctcctcccccgaccggagaggagcctcaccgccggcgcccatggcgacacgctacttgatcgtgtcgctgcccgtgcagtcgcccggcgccaccgccagctccctgtggtcgcgcctccaggactccatctcccgccactccttcgacaccccgctctaccgcgtaagcgatcccctccgacccgtctccttcacccgccgggatttaatctcgcgtagcctcaccgtccgcgcagttcaacgtcccggatctccgcgtcggcaccctcgactcgctcctcgcgctcagtgacgacctcgtcaaggttccccgcacgatctcgatcccctctcccctctccagctgccccggggcactagcctctgattccgtgccatcgtgtgtttgtctctatatgtatacccgcagtccaatgtcttcgtggagggcgtgtcacacaagatccggaggcagatcgaggacctcgagcgcgccggaggggtcgagaccgggaccctcaccgtcgacggcgtccccgtcgacacctacctcactaggttcgtgtgggatgagggcaagtaccccacaatgtcccctctcaaggagatcgtcggcagcatacagtcacaggttgccaagatcgaggatgacatgaaggttcgagcatcggaatataataatgtaaggagccagcttagtgcgatcaacaggaagcaaagtgggagcttagcggttcgtgatctttccaatctggtaaaaccggaggatatgatcacctcggaacatctcgtgacacttcttgcaattgttcccaagtactcccaaaaagactggttgtcaagctatgagaaaattgacacattcgtggtacctaggtcatctaaaaagctctatgaagacaatgaatatgctctctacactgtaacactgtttgctaaggttgttgacaattttaaggtccgtgctcgcgagaagggttttcaggtccgtgattttgagtacagtcctgaagcacaggaaagtcggaagcaggagatggagaagctactgcaagaccaagaagccatgaggaccactcttcttcaatggtgctatgccagctacagcgaggtattcagttcctggatgcacttctgtgctgtgcgtgtctttgtagagagcatccttagatatggtctccctccatcattcctgtctgctgttcttgcaccatctacaaagagcgagaagaaagtaaggagcatcttagaggagctctgcggcaatgcccatagtatttattggaaatccgaagacgacgtaggcgtcgccggtctgggaggtgaaacagaggcgcacccttacgtctccttcaccataaattttgtctgagaccggcatgttcctggccgtctgcggcccaggcaatatttcgagcagaactgccataaattctttgttgatttgtcggttcatgtgctcctgtaattcacatcacagagagaccagccgatcaataatgtagtttctgaggacatgtttccctgcagtattgtaccttgggagcgcattgtaaatggcctggaacagttgtctactggatttgtttatttatttacaataaaagccatgtgaaaataagtaactaaaatttggattgtcagttgatgaaaaatggaatgtggagctagctaggctctgggtttgtggcgc

SEQ ID NO: 146371 - DNA, 1650 bp, Zea Mays
gggtcccacatgcagaatacgacgacctctcctgctcctccgaatcctgaaaccaaccagatcacacgaaccaaaccaccgcctcctcccccgaccggagaggagcctcaccgccggcgcccatggcgacacgctacttgatcgtgtcgctgcccgtgcagtcgcccggcgccaccgccagctccctgtggtcgcgcctccaggactccatctcccgccactccttcgacaccccgctctaccgcgtaagcgatcccctccgacccgtctccttcacccgccgggatttaatctcgcgtagcctcaccgtccgcgcagttcaacgtcccggatctccgcgtcggcaccctcgactcgctcctcgcgctcagtgacgacctcgtcaagtccaatgtcttcgtggagggcgtgtcacacaagatccggaggcagatcgaggacctcgagcgcgccggaggggtcgagaccgggaccctcaccgtcgacggcgtccccgtcgacacctacctcactaggttcgtgtgggatgagggcaagtaccccacaatgtcccctctcaaggagatcgtcggcagcatacagtcacaggttgccaagatcgaggatgacatgaaggttcgagcatcggaatataataatgtaaggagccagcttagtgcgatcaacaggaagcaaagtgggagcttagcggttcgtgatctttccaatctggtaaaaccggaggatatgatcacctcggaacatctcgtgacacttcttgcaattgttcccaagtactcccaaaaagactggttgtcaagctatgagaaaattgacacattcgtggtacctaggtcatctaaaaagctctatgaagacaatgaatatgctctctacactgtaacactgtttgctaaggttgttgacaattttaaggtccgtgctcgcgagaagggttttcaggtccgtgattttgagtacagtcctgaagcacaggaaagtcggaagcaggagatggagaagctactgcaagaccaagaagccatgaggaccactcttcttcaatggtgctatgccagctacagcgaggtattcagttcctggatgcacttctgtgctgtgcgtgtctttgtagagagcatccttagatatggtctccctccatcattcctgtctgctgttcttgcaccatctacaaagagcgagaagaaagtaaggagcatcttagaggagctctgcggcaatgcccatagtatttattggaaatccgaagacgacgtaggcgtcgccggtctgggaggtgaaacagaggcgcacccttacgtctccttcaccataaattttgtctgagaccggcatgttcctggccgtctgcggcccaggcaatatttcgagcagaactgccataaattctttgttgatttgtcggttcatgtgctcctgtaattcacatcacagagagaccagccgatcaataatgtagtttctgaggacatgtttccctgcagtattgtaccttgggagcgcattgtaaatggcctggaacagttgtctactggatttgtttatttatttacaataaaagccatgtgaaaataagtaactaaaatttggattgtcagttgatgaaaaatggaatgtggagctagctaggctctgggtttgtggcgc

SEQ ID NO: 146372 - DNA, 1649 bp, Zea Mays
gggtcccacatgcagaatacgacgacctctcctgctcctccgaatcctgaaaccaaccagatcacacgaaccaaaccaccgcctcctcccccgaccggagaggagcctcaccgccggcgcccatggcgacacgctacttgatcgtgtcgctgcccgtgcagtcgcccggcgccaccgccagctccctgtggtcgcgcctccaggactccatctcccgccactccttcgacaccccgctctaccgcttcaacgtcccggatctccgcgtcggcaccctcgactcgctcctcgcgctcagtgacgacctcgtcaagtccaatgtcttcgtggagggcgtgtcacacaagatccggaggcagatcgaggacctcgagcgcgccggaggggtcgagaccgggaccctcaccgtcgacggcgtccccgtcgacacctacctcactaggtctgctgcaaactgccaaccccatcggatgggtgccctgttcagcttaaaagcttctgtgttgatcgcgcgcgcaggttcgtgtgggatgagggcaagtaccccacaatgtcccctctcaaggagatcgtcggcagcatacagtcacaggttgccaagatcgaggatgacatgaaggttcgagcatcggaatataataatgtaaggagccagcttagtgcgatcaacaggaagcaaagtgggagcggttcgtgatctttccaatctggtaaaaccggaggatatgatcacctcggaacatctcgtgacacttcttgcaattgttcccaagtactcccaaaaagactggttgtcaagctatgagaaaattgacacattcgtggtacctaggtcatctaaaaagctctatgaagacaatgaatatgctctctacactgtaacactgtttgctaaggttgttgacaattttaaggtccgtgctcgcgagaagggttttcaggtccgtgattttgagtacagtcctgaagcacaggaaagtcggaagcaggagatggagaagctactgcaagaccaagaagccatgaggaccactcttcttcaatggtgctatgccagctacagcgaggtattcagttcctggatgcacttctgtgctgtgcgtgtctttgtagagagcatccttagatatggtctccctccatcattcctgtctgctgttcttgcaccatctacaaagagcgagaagaaagtaaggagcatcttagaggagctctgcggcaatgcccatagtatttattggaaatccgaagacgacgtaggcgtcgccggtctgggaggtgaaacagaggcgcacccttacgtctccttcaccataaattttgtctgagaccggcatgttcctggccgtctgcggcccaggcaatatttcgagcagaactgccataaattctttgttgatttgtcggttcatgtgctcctgtaattcacatcacagagagaccagccgatcaataatgtagtttctgaggacatgtttccctgcagtattgtaccttgggagcgcattgtaaatggcctggaacagttgtctactggatttgtttatttatttacaataaaagccatgtgaaaataagtaactaaaatttggattgtcagttgatgaaaaatggaatgtggagctagctaggctctgggtttgtggcgc

SEQ ID NO: 146373 - DNA, 1572 bp, Zea Mays
gggtcccacatgcagaatacgacgacctctcctgctcctccgaatcctgaaaccaaccagatcacacgaaccaaaccaccgcctcctcccccgaccggagaggagcctcaccgccggcgcccatggcgacacgctacttgatcgtgtcgctgcccgtgcagtcgcccggcgccaccgccagctccctgtggtcgcgcctccaggactccatctcccgccactccttcgacaccccgctctaccgcttcaacgtcccggatctccgcgtcggcaccctcgactcgctcctcgcgctcagtgacgacctcgtcaagtccaatgtcttcgtggagggcgtgtcacacaagatccggaggcagatcgaggacctcgagcgcgccggaggggtcgagaccgggaccctcaccgtcgacggcgtccccgtcgacacctacctcactaggttcgtgtgggatgagggcaagtaccccacaatgtcccctctcaaggagatcgtcggcagcatacagtcacaggttgccaagatcgaggatgacatgaaggttcgagcatcggaatataataatgtaaggagccagcttagtgcgatcaacaggaagcaaagtgggagcggttcgtgatctttccaatctggtaaaaccggaggatatgatcacctcggaacatctcgtgacacttcttgcaattgttcccaagtactcccaaaaagactggttgtcaagctatgagaaaattgacacattcgtggtacctaggtcatctaaaaagctctatgaagacaatgaatatgctctctacactgtaacactgtttgctaaggttgttgacaattttaaggtccgtgctcgcgagaagggttttcaggtccgtgattttgagtacagtcctgaagcacaggaaagtcggaagcaggagatggagaagctactgcaagaccaagaagccatgaggaccactcttcttcaatggtgctatgccagctacagcgaggtattcagttcctggatgcacttctgtgctgtgcgtgtctttgtagagagcatccttagatatggtctccctccatcattcctgtctgctgttcttgcaccatctacaaagagcgagaagaaagtaaggagcatcttagaggagctctgcggcaatgcccatagtatttattggaaatccgaagacgacgtaggcgtcgccggtctgggaggtgaaacagaggcgcacccttacgtctccttcaccataaattttgtctgagaccggcatgttcctggccgtctgcggcccaggcaatatttcgagcagaactgccataaattctttgttgatttgtcggttcatgtgctcctgtaattcacatcacagagagaccagccgatcaataatgtagtttctgaggacatgtttccctgcagtattgtaccttgggagcgcattgtaaatggcctggaacagttgtctactggatttgtttatttatttacaataaaagccatgtgaaaataagtaactaaaatttggattgtcagttgatgaaaaatggaatgtggagctagctaggctctgggtttgtggcgc

SEQ ID NO: 146374 - DNA, 2442 bp, Zea Mays
gaaccagaatagattggcgtgtttggaacgcatggctgacaaattaaacccaagtcttatggaattttctcagttcccgaattctcgagccaagaggagcgagcagtactggatgccgagaactgccagccgtcgtccccgcgccgccgcggcgtccgggcgtttacaccacccatgcacgcacggacgaggtacccttcatcgtcgtcgtcgccgccgccgccgcccgctccaaaaccagaaagcggatgccactccaaggaagggcagctcctttccacactagtctcgctcgggccgacagcgatgtctccgtgcgcctgctcctcctcctgctgctgctcttcctcctcgcgcgcgctcacacccacctaacctataacccgctccgcctagctccttcctacccgttacctgctgcggagcggagacgacgaccacttccacctcctcccccccttccgcacccaatcccatccccctttccaaattccaatttccagcaggccgcccgcgatgcccaagccggcgacggcgaaccggcgccggaagcgcggcggcggcggcggcgaggggggcgccgccgatgaacaggccagcagcaagaggaggcccgccaccagcgtgctcacctccctggacgtcaacgacgccccgcgcccggagctccccctcttccagctgagccgacctcgccagcaggcggaacaggacgacgaagaggaggaggtgaccggtgggggcggaggaggaggagcggggtcgtcgttgtcatccgtggtcaacggccacgggcagagcccgcaccagcagcggcggctgtgggtcaaggaccggtcgcgcgcgtggtgggagcagtgcagcagcgccgactacccggaggcggacttccggtccgccttccggatggggcgcgccaccttcgcgatgctgtgcgacgcgctgggcgcggccgtggccaaggaggacaccgcgctccgcgccgccatccccgtccggcagcgcgtggcggtgtgcgtgtggcggctcgccacgggggagccgctccgcctcgtgtccaagcgcttcggcctcggcatctccacctgccacaagctggtcctggaggtctgcgccgccatccggggcctcctgatgccgcgcttcctccgctggcccgatgacgccgccgccgaggcgttcaagtcccggttccaggcggagtccgggatccccagcgtggtgggcgccatctacaccacccacatccccatcatcgcgcccaaggtgtcggtgaccgcctacttcaaccgccggcacacggagcgcaaccacaagacgtcctactccatcacgctgcagggggtggtggaccccgacggcgccttcaccgacgtctgcatcggctggcccgggtccatgcccgacgaccaggtgctggagcggtcggcgctgcagcagcgcgcggcggccgggatgatggcggggtcctgggtggtgggcggcgtcagcttcccgctcacggagtgggtgctggccccctacgcgcaggccaacctgacgtgggcgcagcacgccttcaacgagaaggtggcggaggtccggcgcgtcgccgtggacgccttcgcgcgcctcaagggccggtgggcgtgcctgcagaagcgcacggaggtgaagctgcaggacctcccggtggtgctgggcgcctgctgcgtgctgcacaacatctgcgagtcgcgcggggagggcatggaccccgcgctccgatgcgacatcgacgacgacgagacggtgccggagaaccccgtgcggtcggacggcgccaccaaggctagggacgacatcgcgcacaacctgctccacagcggacgagccggcaccaaattcttctgaattctctcagtcggttcgttcgttccatcagattcttctactatgctgctgctgctactctgtctcccgactccctctcctttcattggattggaaccgtccatggaattgatcattcgttgggttgtttgaactgtactgggaagtgggaagatcacccgcaatccgtcatcctcatcctcgtagaacgctgaacacacggagagaaaggtagatcaaagacaaagagtgggttgggtttgcttttgatcataggatttttagtctagtagcacgtggtacagttgttgaacaaacctacgtatccaagagccaagtcaaagaaacagcaacaagaagcagtagcacatctcaatccgtgcgttttccttgtgttttacctatggcattggcatgatcatgtaaaacaatattttgggatgaccgtatggccaaaatgctgaacgtgttgccgatcgggccgatccgatcgatatccactggtcgttaacaataacatgtttggatgagctggtcgaaccggacgttaatgactgactttcgatttttatttatgaattatttattttt

SEQ ID NO: 146375 - DNA, 1842 bp, Zea Mays
gcttccactcgcgccggcctgcctgcctgcctgcggccgcaggcggcttccgttgccgccagggcaccgcccgtgacaccctgatctcccctcacctactcctggattcgatcccatccagcccgtcccgtccctctcccacccttttcagatctgcctgcgagcccccgccacgcacccccatgcccatgcccatgaccccccgacgcgaggccactactgccaatggctccctgccgtgaccgagcccatggaggacctcgccccgggggccctcgcgctcttcgccgccgtcgctgacttcatagacgactccgctcccgctgccgccggggccgggatgccaccgccggagcccgagtccgcgcccgggagtccctgctccgactgcagcagcgtcgccaccgccgacttcgagggcttcgccgacctcgcctccacgctcgtgctcgacgacctcgtctcccccgcctccgcctccgcctccgccagctcgctccccgcctccgggcccagggccgccaggagcgtcttcgcgctcgactgcgtgccgcgctggggactccactccgtgtgcggccgacggcccgagatggaggacgccgcccgcgtgctcccaaccttcttccacgtcccgctctggatgctcgccggcgacgcgcccgtcgacggcctcgaccgggcatccttccgcctccccgcgcacttcttcgccgtctacgacggccacggcggccttcaggtcgccaactactgccgggacagaatgcacgaggtactggccgaggggctcaccagggcagagcaggccgtgtccgacgctgacttgagtggccttgaccctagtactcacgagcactgggagaaggtctttgtggactgcttcagccgtgttgatgcagaggtgggaggagacgcggcgaccggaaccaagcctgtggctccagacacagtggggtcaacagcggtggttgcgctcgtctgctcatcgcatgtcatcgttgccaactgcggcgactcgagggcggtgctctgccggggcaagcagcccctgccgctgtccgtggaccataaaccaaacagggaagatgagtatgcgaggatcgaggcccaggggggcaaggtcatcaactggaacggctaccgagttctcggtgttcttgccatgtcccggtcaattggggacaggtacctgaagccatatataatcccagtccctgaggtcacaattgtcgcccgtgcaaaggatgatgagtgcctaattcttgcaagcgatggcctgtgggatgtaatgtcaaacgaggaggtatgtgatgctgctcgcaagcgcatactgctgtggcacaagaagaacggcgacgactcagcgtcagcccaaagaagcggtgattcggcagatgaagcagctcaagcagctgctgaatatttgtcgaagctggccctccagaaggggagcaaggacaacattaccgtcattgtagtcgacctcaagtcacatagaaagttcaagagcagaacataaccacggattcggtaagacttggacagtaacaatagacgctaggaaggttgagaaaatgctcctgtttaccctttttttttctttttctttcccacaaccatataggctgccacgtttgatcagggtacagattcatacacagatgtaatctggttggagactgggctggctaggtaaggtggtcgattctagggtccaaatcttagaaataacatacatatgtagattccaacaagtagttcactgattgggtttggggcattgtttctgttattaacaggtaaaggtacaatagaaactgccacccctgaactacctaa

SEQ ID NO: 146376 - DNA, 4506 bp, Zea Mays
cctttggcaacccaattcgagttccatcgcaccgcatcatcaccccacgcaggtagggttttccttcctttcggcctcgccgcgtcgatctccgtcaatccacccgcccgccccctacccaaaccctagggcttccaaggtccaagcttgccgttgatggggcgcaagaagaacgtcgccatcgacgacgacgagtacttctttccgcaggacgacgcggccgacccagccccgcccccgcccgcccccgccgccgccgacaaagagaagtccaagaagggcggcaagaagggaaagaaggggggcaaggctgccgcgcccgacgacgacgactacgagccccctcccccgccgccgccggccgccgacgaggacgatgacggcgagcccatcaacctcgtcttcaccggcaagaaaaagaagaagaagggcgccactcccgccgctcccttcagcgccttcagcgccctcggcgaggagggcgaggaccaggatgaggaggaccccgccccgtctgccgcagccgagccggaggccatcaacgatccggcggaggacgacgatgacgtcgtcgatttcgatttcagcaaggccaagaagaaaaagaagaaggacaagggacctcgctcggcacctgccaaagacgaggatgtcgagcctgctccgccacccccacctgtggctgaggaggaggatgaggagcccccagtgattgccgcagcagctgcgaagaagccgcagaagaagaagaaaaagaagggtgcgtttatgatggatggtgagaatgtcgaccagatccttgcggggatggaggatcctcagctcatggatgagcctgaaccagaggaggtgaaagctcaggattctgtggctgcccctgatgcggatgatgccacgggaaagaaatcaaagaagaagaaaaagaagggagggtttacgatggatgtggatggtgaggagtttgaccagatccttgcagttatagatgaccttccgcctcctgaggaggagcctgagcccaaggaccccaaggatgagggtactgcagctactgctgcccttgtggatgatgctgaagggaagaaatcgaagaagaaaaagaagaaaagtggaaggacagcgaaggaagaagaggagttggacaagattcttgctgagcttgatggagtccctccagtggaggaggacaaacccactcaggcaccacaatctgctgctttggccaaggaggacgttggtgctgcagaggatggtaatgtggaggacaaagctgaggaaggaggagaggtggaatctgctgctgccaagaagaagaagaagaagaaggaaaaggagaaggagaaaaaggctgcagcaaagggagcggagtctaagaaaggggaggagcaagaggcacctaaaggcaaggttgacatgaagaagctccctaaacatgttcgtgagatgcaggaagcacttgccagaaggaaggaagctgaggagcgacaaaagagagaggaggaagagcgattgcggaaggaggaggaagagcgtctgcgacgtgaggaggaggagaggaaagcagaggaagcaaagaggaggaggaaggagagggaaaaggagaagctgctcaagaagaaacaggagggtaaactcttgactgggaagcagaaggaggaagcaaagaggttagaagccatgaggagacagtttcttgagcagagtgaactccaaaaggctgaggatgctgcccctgagaccaagaagaggccaatatatgattctaagaaaaagaaagctcaatcaaaggccacagagactgcaaaagtagtcgaagaacaacaggaagaactcaatgaagttaacaatgacgaggaagaatatgtgctcgtggatcaggaatctcaatctcaggttgaggaatctgatgagaaaactgaacctgaccaggagactgaagagccaaaaccagaagaggacgaggaagatgaggatgagtgggatgcaaagagctgggatgatattgatgtcaacttgcctaagataagcgcttttgatgaggaagaggcaaagcctattgtcaagaaggctgagcctgtccagaagcaggagaataataaagctcaacctgcaattcctgctgccaaaaagcttgttccttctgttgcagactctaaaaagagtgaaactgatgatgtgggtgccagtaatggaaatgttaagaggcacaaaaagaaaggacctgtgaaagaggataactctaagagtggtagtgacctcagatcaccaatctgctgcatccttgggcacgtcgatactggaaagacaaagctactagattgtattaggcgcactaatgtccaagaaggcgaagctgggggtattacccaacagatcggagcaacatacttccctactgaaaacattagagagagaactagggagttgaaagctgatgctacactcaaggttccaggcctgcttgttattgatacccctgggcatgagtcgttcagtaatctgcgttcgagaggttcaagtttgtgtgatattgccattttagttgttgacatcatgcatgggcttgaacctcagacaattgaatccctgaatcttttgaagagtcgagatgcagtgttcattgttgctttgaataaggttgatcgtctctatggttggaagaaatgtccaaatgctcctattgtgaaggctttaaaacaacaaaatgaagatgttaagagggagttcaatatgagactcacagatattgttacacaattcaagatgcaaggagtgaatactgctttgtactacaagaacaaggagatggaagatacctttaacatagtgcctacgagtgctgtaagtggtgaaggtattcctgatttgcttctgttactggttcaatggactcagaagacaatggaagaaaaactcacttttgttgatgaagtccagtgtactgtactggaagtcaaggttgttgaaggccatggtactacaattgatgttgttttggtcaatggtatactccatgaaggagatcaaatagttgtttgtggcatgcagggacccattgtgacaactgtcagggctttgttaacaccacacccaatgagagagcttcgagttaagggcacctacatacatcataaggagatcagagctgcacaaggagtcaaaatatctgctcagggtctcgaacatgcaattgcagggacagccctttacgtgttaggacctgatgatgatttagacaaactgaatgaagctgttatggaagagatgacacgggttaggagccggattgacaggagtggtgaaggtgtctatgtacaggcatctacccttgggtctttggaagctctcactgagttcttgaagagccctgctgtgaatattcccttctgtgatttcagtatagggccagtgcataagaaggatgttatgaaggctagtgtcatgcttgagagaaagaaagaatatgcaactatcttggcctttgatgtcaaagtgatgcctgatgcccgcgatctcgcagaagagtccggtgtgaggatctttgtggcagatataatataccatctgtttgatcaatttacagcatacattaagaacctcaaggaagagaagaagaaagaaagcgctgaagaagctgtgttcccttgtgttcttaagattatgccaaactgtgtcttcaacaagaaggacccaatcgttttgggtgttgatgtccttgaaggaatagccaaggtgggaactcctctctgcatacccagtaaagaatttattgatattgggaagattgcctcagttgaaatcaaccacaagcaagttgatatggctacaaaaggccaaaaggttgctattaagattattgcgaacaattctgatgagcagcagaggagcttcggcagacactttgatatggaagatgagcttgtcagccggatatcaagaagatctattgatattttgaaacagaactacagggaggatttgacaactgaagactggaaacttgttgtaaagttgaaatcaatattgaagatacaatgaaaagccccctcccctaacacacctgcccatgaatttgggagttgtggttctgtggcgccacacctatctctagttctctacaccggagttccccagggagggttaccaattttgatacggtttgatttttgtaatttgctcggaaggcgcttcattttacaaccacattccgtaataacataatattttgtgtttgtttctgtacttttcatgaactctgaagcctctcaccaacgaattgtgtaatactacatgctatggaaaatctgtgctgtttacgacatggggaggccttgccttggctagtttgggaactcagatcctctctaggattgaagggaacgagggggaagggaaattagtttgtttccctgtattttccttagtctcgagagtatgcatttgagttctcaaactagccctaaaagttgtggctttacatcttgacaagaagagattaatagcttg

SEQ ID NO: 146377 - DNA, 1224 bp, Zea Mays
ctcgatgcttagtgttccattccagtacaattccgcgatcatctagggttggaaaccaaacacattgttgccctaatcacacttggtgctcatctagttggggctgcacaaaacgctgacttgtgcttctccccaatgccactatgagccaacacctgcaactccctcggtgtttgctgttgccgcttcttgtgccaccgccgctgtaccggcaactcccttggctttcgctgccaccgacgttgccgcttcttgtggcgccgctgctgtacctgcacctccctcggtgtttgctgttgccgcttcttgtgccgccgccgctgtaccggcaactcccttggctttcgctgccaccgacgttgccgcttcttgtggcaccgctgctgtacctgcacctccctcggtgttcgctgttgccgcttcttgtgccaccgctgctgtacctgcaactcccttggctttccctgccgcctcttgtgcaactcccttggctctggctgccggtgtcttctgcggcaccttggcagccttcttctgcttattgttactattgtccacctgtggcagtaatttcttgatctgcgctccagacagtgtctcatgctcaagaagggcgttcgctagcatatgaagctccttatcgtgagttgtcagaattgcctttgcgttattgtacgccttctccagaatttccttcacctccttatcaatcacacttgtttggccgctaacactattctcactgtaggaaacaagacccacacgcttactcataccatacttggtcaccatggctcttgccagcctagtcgcgtagtttaggtcagacgaggaaccggtggttacctcgctttccccaaatataagctcctcagccactcttcctcccatgcacacatccagcctcgccagcatctgctttcttgaaacgctatgctggtccttctctgggagctgtataaccataccaagagaaactcccctcggaacaattgtagccttgtgaacagggtgagcgccctctgtgtggatcgcaacaagggcatgccctccctcgtgatacgcagtaatcttcctggattcatcagatataactgctgatttgcgctcactgcccatcatgatcctgtccttcgcatattcaaggtcctgcatcgtaacagcttttgcttcatccatagcggccttcagagcagctacattcaccaagttcgcaagatctgc

SEQ ID NO: 146378 - DNA, 111 bp, Zea Mays
aattttattttactcctcacatgtttttcatgtcaacaattactcaaacatttctttatcacacaggcctactaatattctactcgttacattaattcagctaattaaccg

SEQ ID NO: 146379 - DNA, 633 bp, Zea Mays
caacttggccccaaatcgtggagtggaaaccctactcgtccccttccgcagccggtactcaaccccaaccctatcctgtccgccgccgtcgcccggcgcctcctcccccacctagaaacccagaggctctaatcctagttctttctgtgcagtcgccgcccaattcccccacccaattcccactctccgctcgacagatccatacatgatgggagaggccaaggagaacgacgtttatgaggaggagctcctggactacgaggaggacgacgacaagacggtcgatggctccgctgctaagcccaccggagaggtcgcaaagaagggctacgtcgggatccacagttccggtttcagagacttcctgctcaagccagagctgctccgtgctatccaggattgtggttttgagcatccttccgaaggcaagcttctttttatctattgttgtcagttgacttcggtgttcccgtccgtgaaaactgcaaggtggctgcaaactcatagtcaccatgatactcagttgtcaagaagataaactctctactgaggcagtagtttttttagtttttgagaagttgaacagctgaaactcttgtacatacatatggaataagatgtcaaacttttatc

SEQ ID NO: 146380 - DNA, 1997 bp, Zea Mays
caacttggccccaaatcgtggagtggaaaccctactcgtccccttccgcagccggtactcaaccccaaccctatcctgtccgccgccgtcgcccggcgcctcctcccccacctagaaacccagaggctctaatcctagttctttctgtgcagtcgccgcccaattcccccacccaattcccactctccgctcgacagatccatacatgatgggagaggccaaggagaacgacgtttatgaggaggagctcctggactacgaggaggacgacgacaagacggtcgatggctccgctgctaagcccaccggagaggtcgcaaagaagggctacgtcgggatccacagttccggtttcagagacttcctgctcaagccagagctgctccgtgctatccaggattgtggttttgagcatccttccgaagtgcaacacgagtgtatccctcaagccattcttggaatggatgtcatctgtcaagctaaatctgggatggggaaaactgctgtttttgtcctttcatccctccaacaaattgaccctgttgcgggtcaggtagcagcacttgtactgtgccacacaagggaactggcttatcagatatgccacgaatttgagaggttcagcaaatatcttactgaagttaaagttgctgtcttctatggaggtgttcacatcaggaagcataaagatttgttgaagaatgaatgccctcatattgtggttggcacgcctggtaggatacttgctcttgccagggataaggatctctccttgaagaatgtgaggcacttcattcttgatgaatgtgacaaaatgctggaatcacttgacatgcggagagatgttcaggagatcttcaaaatgactcctcatgataagcaagtcatgatgttttcagcaacgctcagcaaggagatccgtcctgtatgcaagaaatttatgcaagatccgatggaaatatatgttgatgatgaggcaaagttgaccctccatggtcttgtacagcactatataaaacttagcgaggcagagaagaaccggaaactgaatgatctcttggacgctcttgatttcaaccaagttgtgatattcgtgaagagtgttagcagagctgccgaactgaataagttactttgtgaatgcaacttcccatcaatctgcattcattctggaatgactcaggaagaaaggctaacaagatataagaacttcaaggaaggccacaagagaattcttgtggctacagatttagttggcaggggcattgacattgagcgtgtcaacattgtgataaactatgacatgccagactcagctgatacttatttgcacagggttggaagggctggacgttttggcacgaagggacttgcaattacctttgtttcctctgcttcggattctgatgttcttaaccaggtgcaagaaaggtttgaggtagacataaaggaactgcctgagcaaattgacacctcgacctacatgccatcataaatgggaaggacaactgagaagagaggaggataggggagtgagcagccgtctggagatggttacctttgaactatccgatctggaggatttgatttgcctcctttgtgtactttaaaaagggcagccaggatgatgatctgtattttaagacaatgctgtctgtttgggtttaggattttgctttgtcgaaaactagcacacttattgtactactgagcagcatatttgttttcatccctgggttaaatgatgcgtctaaacacttctgctggcctgaaaagagcaccaccgtcttggtctcccagcagcaggcagcattgactcgctaaaaggttacaattctcagatgcggatgagccagtcgtattcagcagcctgtagttacaattctcagatgccgatgagccagtcgtattcggcattctgtgttttgtttggttatcttttgctgagccttggaaacagtttctgtttttgcaaaagcgaaaaacaaacgcaaatt

SEQ ID NO: 146381 - DNA, 2111 bp, Zea Mays
caacttggccccaaatcgtggagtggaaaccctactcgtccccttccgcagccggtactcaaccccaaccctatcctgtccgccgccgtcgcccggcgcctcctcccccacctagaaacccagaggctctaatcctagttctttctgtgcagtcgccgcccaattcccccacccaattcccactctccgctcgacagatccatacatgatgggagaggccaaggagaacgacgtttatgaggaggagctcctggactacgaggaggacgacgacaagacggtcgatggctccgctgctaagcccaccggagaggtcgcaaagaagggctacgtcgggatccacagttccggtttcagagacttcctgctcaagccagagctgctccgtgctatccaggattgtggttttgagcatccttccgaaggtacactttcttctttggagcagaacatggtaacactttccattaacatggatccagaaggttaaacttttactcactgggttgctgctccaatttcttttggttccacatcagtgcaacacgagtgtatccctcaagccattcttggaatggatgtcatctgtcaagctaaatctgggatggggaaaactgctgtttttgtcctttcatccctccaacaaattgaccctgttgcgggtcaggtagcagcacttgtactgtgccacacaagggaactggcttatcagatatgccacgaatttgagaggttcagcaaatatcttactgaagttaaagttgctgtcttctatggaggtgttcacatcaggaagcataaagatttgttgaagaatgaatgccctcatattgtggttggcacgcctggtaggatacttgctcttgccagggataaggatctctccttgaagaatgtgaggcacttcattcttgatgaatgtgacaaaatgctggaatcacttgacatgcggagagatgttcaggagatcttcaaaatgactcctcatgataagcaagtcatgatgttttcagcaacgctcagcaaggagatccgtcctgtatgcaagaaatttatgcaagatccgatggaaatatatgttgatgatgaggcaaagttgaccctccatggtcttgtacagcactatataaaacttagcgaggcagagaagaaccggaaactgaatgatctcttggacgctcttgatttcaaccaagttgtgatattcgtgaagagtgttagcagagctgccgaactgaataagttactttgtgaatgcaacttcccatcaatctgcattcattctggaatgactcaggaagaaaggctaacaagatataagaacttcaaggaaggccacaagagaattcttgtggctacagatttagttggcaggggcattgacattgagcgtgtcaacattgtgataaactatgacatgccagactcagctgatacttatttgcacagggttggaagggctggacgttttggcacgaagggacttgcaattacctttgtttcctctgcttcggattctgatgttcttaaccaggtgcaagaaaggtttgaggtagacataaaggaactgcctgagcaaattgacacctcgacctacatgccatcataaatgggaaggacaactgagaagagaggaggataggggagtgagcagccgtctggagatggttacctttgaactatccgatctggaggatttgatttgcctcctttgtgtactttaaaaagggcagccaggatgatgatctgtattttaagacaatgctgtctgtttgggtttaggattttgctttgtcgaaaactagcacacttattgtactactgagcagcatatttgttttcatccctgggttaaatgatgcgtctaaacacttctgctggcctgaaaagagcaccaccgtcttggtctcccagcagcaggcagcattgactcgctaaaaggttacaattctcagatgcggatgagccagtcgtattcagcagcctgtagttacaattctcagatgccgatgagccagtcgtattcggcattctgtgttttgtttggttatcttttgctgagccttggaaacagtttctgtttttgcaaaagcgaaaaacaaacgcaaatt

SEQ ID NO: 146382 - DNA, 1898 bp, Zea Mays
aacttggccccaaatcgtggagtggaaaccctactcgtccccttccgcagccgtcgccgcccaattcccccacccaattcccactctccgctcgacagatccatacatgatgggagaggccaaggagaacgacgtttatgaggaggagctcctggactacgaggaggacgacgacaagacggtcgatggctccgctgctaagcccaccggagaggtcgcaaagaagggctacgtcgggatccacagttccggtttcagagacttcctgctcaagccagagctgctccgtgctatccaggattgtggttttgagcatccttccgaagtgcaacacgagtgtatccctcaagccattcttggaatggatgtcatctgtcaagctaaatctgggatggggaaaactgctgtttttgtcctttcatccctccaacaaattgaccctgttgcgggtcaggtagcagcacttgtactgtgccacacaagggaactggcttatcagatatgccacgaatttgagaggttcagcaaatatcttactgaagttaaagttgctgtcttctatggaggtgttcacatcaggaagcataaagatttgttgaagaatgaatgccctcatattgtggttggcacgcctggtaggatacttgctcttgccagggataaggatctctccttgaagaatgtgaggcacttcattcttgatgaatgtgacaaaatgctggaatcacttgacatgcggagagatgttcaggagatcttcaaaatgactcctcatgataagcaagtcatgatgttttcagcaacgctcagcaaggagatccgtcctgtatgcaagaaatttatgcaagatccgatggaaatatatgttgatgatgaggcaaagttgaccctccatggtcttgtacagcactatataaaacttagcgaggcagagaagaaccggaaactgaatgatctcttggacgctcttgatttcaaccaagttgtgatattcgtgaagagtgttagcagagctgccgaactgaataagttactttgtgaatgcaacttcccatcaatctgcattcattctggaatgactcaggaagaaaggctaacaagatataagaacttcaaggaaggccacaagagaattcttgtggctacagatttagttggcaggggcattgacattgagcgtgtcaacattgtgataaactatgacatgccagactcagctgatacttatttgcacagggttggaagggctggacgttttggcacgaagggacttgcaattacctttgtttcctctgcttcggattctgatgttcttaaccaggtgcaagaaaggtttgaggtagacataaaggaactgcctgagcaaattgacacctcgacctacatgccatcataaatgggaaggacaactgagaagagaggaggataggggagtgagcagccgtctggagatggttacctttgaactatccgatctggaggatttgatttgcctcctttgtgtactttaaaaagggcagccaggatgatgatctgtattttaagacaatgctgtctgtttgggtttaggattttgctttgtcgaaaactagcacacttattgtactactgagcagcatatttgttttcatccctgggttaaatgatgcgtctaaacacttctgctggcctgaaaagagcaccaccgtcttggtctcccagcagcaggcagcattgactcgctaaaaggttacaattctcagatgcggatgagccagtcgtattcagcagcctgtagttacaattctcagatgccgatgagccagtcgtattcggcattctgtgttttgtttggttatcttttgctgagccttggaaacagtttctgtttttgcaaaagcgaaaaacaaacgcaaatt

SEQ ID NO: 146383 - DNA, 963 bp, Zea Mays
gcctggggaagagtctgccggcctcttaagctggaaggcctgggcatctccgggctacccgagatgtgttgggctcttcagatgagatggttatggctgcataaaactgattcaacacggccttgggcgcagctcccctttcatgttcctaataaagttcgggctttcttctccactgttcttctttcagaagttggaaatggagccaacaccctgttctagactgataaatggatctcagggcagagaatatgtgacattgctcccagggtttttcagtgtatacccagaagaattcaaaaagaactgttcaggaggctcttctaaatagaagatggatctctgatatcaaaggtgccctctttgtgggagttttagtggattatcttcagctttggaaccttctttctgagatagtgttgcagcctactattgaagacaaacatgttttcagtattgcctcagatggtaactatttagctaaagtggcttatgaagggctcttcatgggatcagtctatttcagccactatcccaaggtgtggaaaacctgggccctgcctaaatgcagattttttctttggctcgctgcgcataacaggtgctggaccgttgacaggttggccaaaagagggcttgatcaccctccaaaatgccccttgtgtgatcaagaggatgaaaccttagatcatctcctggcctcctgtgtttactcaagggatttctggcagctgctgaggactttcgaccttcaagtgctagccccttccttcatgagctggtgggaataagcctcttcttcggttacaggtcttcttagaaaggggttcaattctcttattgctttgggggctggattatttggaatcatcgcaacaaatgtgtcttgataattggagccctaatgtgtctttagccattaggatggttgtagaggaaagatggatgtgggaaatggctggg

SEQ ID NO: 146384 - DNA, 1262 bp, Zea Mays
atggcaattgatttcccaccatgggctattaaagtcgtggacaagcttcagagaagttttctttggatgggctgcatgggtgggacattgtcatgtggcttgagaaaaggtcacccgacccccccgagcttggtggacttggaatttctgatctcaaacatcctgtctgggcgctaaggatgaaagtgggtttgacttaaaaaactgaacctcatcgcccttgagcagccttcctattcagatcccagaccaagttaatgccttctttccggtggccgttgtatcagaagtaggcaatgggaatcacactttgttctggactggttgtttggaaccgtggacagtgtattgctgatcttgcacctcaatactagaggccatcctaaaggatgaagcaacgtactgtccaggaagctcttactgatcacagctgggttttggatattaagggagccctcactgtaggtgttattgtgaatgtcctccatctctgggaattgctgtacaacttcgatatagagcctgatgtcgaagatgtcaacatttgacaactttcaactagtgggcaatactcagccaagtctgcttatgagggtttcttcctgggatctactcagtttgaacagtatgagaggatttggagaatccgggcaccgcctaaatgcagttttttccactggttggtggcccatgatcagtgctggaaggcaaatcacctgcgcggcgtgggctgtcccatcctgagcactcccatctttgtgagctgggagatgacactaccaaccaccacctagtcttctatgtctttgctaggcaattctgtacatctttttaaggcaggtcagcctctattccttgtcgccacagccttcagacacttccttttgacagctggtggggaaaactattggaacaagcaaattgatgcaaaaaggtctcaactctctcattgtgcttggggcatggactaaccatcggaatcattgtgttttttatgatattatacccagccttggtggtgctcttacccttggtggagaagagcgccggttgtggagtctagcaggagctaagggtctgtcctctttgacagcccctctccttggtggttagcttagtgctagtctttttgatcacccctttttctaacttcaggtgcaaatgtaatttctgagttgtgtagggttgtgtgtggtgtgtgttgcagggctctaacccctttctttcttcttaatataatgatgcacagatatcctgcgttt

SEQ ID NO: 146385 - DNA, 95 bp, Zea Mays
gattcttcttctcacctcgcgtacgtctataaattgttcgatcatgaattgttcgagtacatgtagtgctgctacatcgctgtcactctacgtcg

SEQ ID NO: 146386 - DNA, 121 bp, Zea Mays
ttgaattttaattttaatttgtcttcaatacaatgcatgtgcttttacaatttggtaatagacatgacataacaagacatgttcaaactgtaatagtagaacaggacattcaaatattcaa

SEQ ID NO: 146387 - DNA, 861 bp, Zea Mays
gcagtcgcggtctcgctgctgtgggagtccctctgctctactgccgtgagagttgagacagcagacagacagcatggtgtggaagagctggggcgctgcgccatcgctgctgctgctgcgcattgctctgctcctcctcggcgctgcggcgccactctgctccggcgccggcgacgtcgccctcagtttcgcagccaccccgcgccgcgtctccaggtccacgtccgccgccttcgccttgcgggtcctgcgcgccaccggagggccttgcgccgactgcgtcgttacctgccaggtaccacgatatacgcccggcattgctgcctgcctgcctgcctcaagcacacacggcgcagatgagcgctcaccatgcatgcatggctgcttccttgttcgtcgccctcctcctggctacttcatctgcagccatccttcttgtcctctcctagcaacgtacggaaccatatgtgctaggtggtgggttgattgaatttgatgcaggaacagcaacactaaggatcggtcggtcgatgcttgcttgtgtttgcatgtcatgtacgtccatgcagttggacggcgaggcagcgtcgctctgcggtgggacggcggcggcgagctatgcggggctcagggacggcaaccacagcttcacggcgtgcgcgagcacgacgtcagcttcgaactcgtcgtccagccccagccccacccccacctgcgccacctacgcttgggatgttggttgagtaacaaacaaaacctggctgcctgcctgccgccttcttctccgctgtgcatgtgacgactgtgaataatgacgcgagctctgcgccgttgcagacactgtccccccgacggcgtccg

SEQ ID NO: 146388 - DNA, 3455 bp, Zea Mays
atggtgtggaagagctggggcgctgcgccatcgctgctgctgctgcgcattgctctgctcctcctcggcgctgcggcgccactctgctccggcgccggcgacgtcgccctcagtttcgcagccaccccgcgccgcgtctccaggtccacgtccgccgccttcgccttgcgggtcctgcgcgccaccggagggccttgcgccgactgcgtcgttacctgccagttggacggcgaggcagcgtcgctctgcggtgggacggcggcggcgagctatgcggggctcagggacggcaaccacagcttcacggcacactgtccccccgacggcgtccgtgtcggcggggccggcgttcacgagcgcgtcctccaccgtgtcggcgctcgtctccttctccgagccctgccccggccgcggtggattcgtctgcaacgccacctactgcaatgtacgttactgcaccgcgctgaattgtctccgtccgtctgtctgtctgtctgcacgcgcacgcagccaaaatctgtattgtctgcgttgcagctcatcgtgtacggctccggcagtgtggatccgtcgacgctccaggtgctgagccccggcctgcgctactccgtggccgtcgccatctcgccggacgccgagtacggccgcctcgtcctcgtcatgggcaggggcttctgcacggacgccgccggacacccgttcaccaggacgcccaactccactttcaccctgcgcttcgatcgaaggagcgactccatgaacatcaccgccaccgttgccgagaagatggtgcagatacagggcgtcaccaggctggttcaggccagcaacgaggaagagggcctgaggatatacctggccttcgcccagccggtgctcaactcgtcggagcagatcctgcgcgcgcttacagcgactgacgccgtcgccgtgcacctcacacccaccaacagaagcaccctcggcaaccgccgcttcggctacgttgtgaagaagatgtctgacgccgccgccattgtgagcgttgcctgcgacacaagctctattatcagcaggcaagggactccggtggttccagcagagccattcacgtttctttatgatacacagagaccttgggttaagctcggcacatcgactcggcggaccagctcacgcgacatcctcgtcctcatcaagtttgcaaagcctgtgttcaacttcagctcctcggcagtgcaggtgtctgggggcaatgtgttgagctttcatgaagccagtaagagcatatacacgctgcagatacaggccgtcggtcagctggtatcggttcaggtagctgagaacgcggccatggacgtcgccgggaaccccaacctagcatcagaccgtcttcaagtcaggcactattctgtgcccgcgtcatcttcttggatcgcggcgatcaccaccgtcgtatttctgacaactgctgccgttgccgcgctcctcaccgtctccacgtcgtctctcgtcgctgccggagctgtctcgaggccctcttcctacatgatctcggagccatcaagaaatgtgctgaggatggcgtgccacatccaaatctttgctctgtcaagatggctgtcggccaacctgccgatcgagtactacgagttcgcaaagggggtagagtggagcataccctacatgcgtcttccatgggaaggcccagccgcagatccgtacctggggtactccacgatgcctgccatcgcgtactcggagtcggagctgctcgacaggagcgccgtcggcggcgctgcaaacatctcctcctatcgtcctcgagcacagcaaggtcagccggtgacgccagcgcagatcatcccgtcggatccggtattcccgacggagatccctgaagatgggaaacccacaccgccggtgcaaactccgggaggagacgccacgccgccggtgatgccagtgcagaccccgttgccgttggacgggatgccgctgacggcaatggagtaccgttccttcttcgagaacccggacatgaagcctgaggcacaaatcatcatgaagctacaagatttggatgggtggaagtacttcggcaggaacatgttctggctgggtgtcatcggcggcggcctcatcctcctgcacctcctcaccctcctctacttcaagctgaggtacagagacagggagcggcggcggcatggctacgccgcactgcttctccccaggctggagatcatggtcgtcgtcctggcgatgccgtgcgtcgcccaagcggcggcggcgctcatcaggggcgggaccacgtgcggcctggtggtcgggatcgtgctcaccgccgtcctgacgtcggtcctggtggccctgctgctgttcctgtctctgggcatcaccatgggcaagctgctgcagtacagggaggtgcaccatgaggaggggcaggaggagtaccactggtaccaggatctggcccgccgcacgctgggcgccggcaagcgcgggcagtggacgtggaaggacccgcgccgcgccgcctgcctgcccaggcttggcccgctcttcgaggacctgcgcggcccgcccaagtacacgcgtggcggtggaggcggcaagcgccgcgccgaaggcggcggaccagagcggcgggtcatcgcgtcggaggacgagaacgaggggtcgagggcgcccttggtgcagcagctcctcggcgtgctccgcatctacttgacgctgctggagtcggtgaagcgcgtggcggtgggcatcgtggccggcgcgcacgcgtcgtcggggcggtcgtcccgcgcgcacgccgtggcggtgctgtccgtcgcctcgttccagctcctgttcatgctgctcgggaagcccttcgtcaagaagcgggtgcagctggtggagaccctgtcggtggccagcgaggtggccgtgttcgcggcgtgcctggcgctcatcgacaggacggcatcgagtggcgggtggctgcccgacggcgaggcgcgcggcgtggggctggcgatgctgggcgccttcgtgctggggttcgcggcgcaggtgtgcaacgagtggaacgcgctgtaccggcaggcgcggctgctgagcgccgaccggagctccttcctggacggcgccaagacagcgggcctgggcctgctcgtgctggtgctgccgtcgtctgcgctcggcgaccaccgggatccgccacctcccgacggcggtggaggagccggggagagcgtgtcagcgtcgacggcggccgacgggggcaggggcgggagctccaacaacgagcggtggtggcttgggcagctgtgggagatggcgaaggctagcttcagcaaggagagtaatgcgtaagaatgtgtttggtactgtatctcggaacatgtaacatcagaaatcagcattaaacgattagaatgacagcgctcgagctcaagaaaatgattctttttttttggtaccga

SEQ ID NO: 146389 - DNA, 1188 bp, Zea Mays
cggccgcccgcggtcaccctcgcgctctcccgtcacgccggatcggacggaccccggccccctccttcccaactccaacgttggcaagagaggagggcgttcctaaccaccataacctgcagcatggcccgcctgcccaccagcagcggcatggcagcactgctcctcctcgtcgccttcgtcgtcctcccctccgccgccctgtcctcctcgtcctcgcttctgcactcacctcctgagagtgatgagacaagcggcggcagcgagcagcaagccccgccggaagacgagaacaaggagaaagagcggcagctggccaaggagaaggcgtacgcggcggagaaggtcgtccagcaggagatgctcaagtacgccaaggagaagggtctggtgtccccgaccaacggcacggggtggtacaggggcatcgcccgggagttcgtggacgcccacaacgagctccgcgcgcgctacggcgtgccgcccatgaagtgggacaaccagctggcgcggcaggcgcggcgctggtccaacgccatgcgcaaggactgccagatcctccacagcggccacgagtacggcgagagcgtgttcaggagctacgacgactggaacgccaccgccagggaggccgtcttctggtggggcaaggaggaggccatctacgacaaggacaaggagaagtgcaagtacggcaaggtcttcaaggagtgcggccacttcgcgctcatggtcggcaagaggagcaccaaggtcggctgcgcacgagccgagtgcttcaagggcggcgtcttcatcacctgcaactactatgcaacggacctggacaagaacaagaacaaaacaccaaacgataactgactctatccacccatctgttcgttcctatgtacgtacgtacgtagtagcgctgacttatttactgagtgatgattggattgttaattaactactactgaagcaattgcctgattccgaggttggagatgatgacgatgaagacgacgactactacgtacgagaggatcctcctccctcttcttcttttttgttttttaattttgttcttccaattttgagcccaatcagtcaagcagattgtatctatatctatatatatacacacgatcgagtacagcagacagccaattgatcagttcatttcagttggatgattggatttttatc

SEQ ID NO: 146390 - DNA, 618 bp, Zea Mays
ccgtcgccgtgtcggacgggacgggagcatcaggcggcgcagagcagtttcctctttccccttcttcttcaactctcctcttcctcctcacgcacctgcttcatcaactacatacatatatatacaggcagcattaccatggatcctccatggctgctcttgattatgtcctcaggactcaggtaataccctagctagcatgggccgagatcaagctgcatcgcatctgatcgggcaggggccggagttcctgatgaacaagatacatatataggtagtagaaactaaacagattaaagacacatatgcagtggcttcagctaatcttcaagactgcaaacgtaaggatacagagctagctgcttgaggtgggatcatgcaagactgcttaattacctacctatagcttaacttgaagcgcctgctgcagtttgtgcaaaactgcagcttcattttctctttcagctcataccttgagctgtttatttatttttgggatgtcgattatatgcgacgaatcagtcgaatttcaccttcattaattcagttggtcccacagttagcactctctgctgacagtgcaagcttcagggacgaagatgcaatgaaggtgctctc

SEQ ID NO: 146391 - DNA, 1807 bp, Zea Mays
ccgtcgccgtgtcggacgggacgggagcatcaggcggcgcagagcagtttcctctttccccttcttcttcaactctcctcttcctcctcacgcacctgcttcatcaactacatacatatatatacaggcagcattaccatggatcctccatggctgctcttgattatgtcctcaggactcaggtgacgtatctggtaataccctagctagcatgggccgagatcaagctgcatcgcatctgatcgggcaggggccggagttcctgatgaacaagatacatatataggtagtagaaactaaacagattaaagacacatatgcagtggcttcagctaatcttcaagactgcaaacgtaaggatacagagctagctgcttgaggtgggatcatgcaagactgcttaattacctacctatagcttaacttgaagcgcctgctgcagtttgtgcaaaactgcagcttcattttctctttcagctcataccttgagctgtttatttatttttgggatgtcgattatatgcgacgaatcagtcgaatttcaccttcattaattcagttggtcccacagttagcactctctgctgacagtgcaagcttcagggacgaagatgcaatgaaggtgctctctgcctcctaaaacgggtacgtccaagcatcaggatcatgtgcatgactcgcagccgacaagaggaatcggatcatggaggccactgcagttaaaatatacagaagcgcaagttttcactgtcatgtcggatggtgcggcggcatgcaggcgtgggttgccactgatgcccacatgacgctcctcggggcctgcaattgattatatgctcacttgcaactaactcactcactaataatacttactcctgtcctgcagctctgtctgcttaagcctgtagctagctctagctatataaagagacatggccatgtcaagctgcctgaaccaacatatcgcagcaagctaagctaacctattctgccattgccgcttctgtcgcacaagttagtaaggaagcctgaggatgaagaccaaggcggctgggagccgagcagccgctggagctggagggttcggcagatctctcagggagcagagggccaaggtgtacatcgccatgagatgcgtcgtcatgctcctcaggtggcatgactgatctctatgcactgactcactgatccggcaagaattttgacgtctgagcatagcattctttgttttcttcttgcttgcttgttctccggttaccagaatggtagggagagcaggcaggccaggtgatgtatgtaactgcagttgtagagaactctagctagagatggatggtgctaacagattcatcagataatgtaactgctgtattcagattctttgtccaagctacagtaaactatctctcccctcagtcctccccacagctctcttgaattctatctgtgtgtgtgtgtcccctgtgacatgaacaaccaacaaccaaagcaaaagcaatggagcagggccgtgatcattttcatccattctgtacaggctaagctcctactgtgactaccgctgtagagaactctcgagcacagagagcgagtccgacccttcatgcttgctctgcgcgggcgtcgtcctcctcgaatgccgcttcgtcggcacgatcacctcctcctccatccacccatcgtcgtccatcaccgagtacctgtcgtcgccttcgtcccccttgaacaccgggtgcaggtacgagttggccaggtacgccttcagatccaagttgggctcccgggcgcgttctagggtgtccttctt

SEQ ID NO: 146392 - DNA, 1225 bp, Zea Mays
tcctcctgcggccgtcctgctcctgctagtgctggctataaaccccccacggcccactcgggctcttcactcttccgatcccgacgaggtaaaaacaccgtcgctcaccaccaacacaacgccaaccaacctgccccctcacccccgctggccgctgcttaacaaaccgccgccacaggacaagacaaacttattacagctccacctcagtgctgcagagactgagggccagccaaaccgctcaccgcacacgcggaattcaagcagcatgtacgccgacgccgggttcgccttcgccttcgccgccgcctactcccccaccctcacttcctcgcagccccagccgccgccgccgccgttcgactacgccttctcctccgagccacccctcctctccatgcccgccatggaccacgacgcctacctgaaccttggagccaacacgcctcgaccagcagcaaatgtttgtgtgaccatcagtgacctcaagaccgaagaaaggaagcaaaagctttccaggtataggaagaagaagatcaagcggaactttggcaggaagatcaagtacgcgtgcaggaaggctctggcagacagccagccaagagtgcgagggagatttgccaagatcgaagaatgcgacctgctgaagccaagcaagtagatccaagtatgcttggttttggcttctagctaggcgccgctccatcgtccttaccttgtgcgctggagaggcgccgcgatgcccgtcggaattcattcaattgacctctcctgtttctctcgggcagcatgctgtgtaataataatctcctccgggcccttgggtgcgagtgaagagctgaaaatttggtatggtagtctagcccccctgtactgtacaaaaggcttgaagatggtaataaaactcagctcccctcttgcttgcttggcattttttttaatgttatctgaatctgactgttagcattgtgctcctgaacatggatcattgggcaacaggaggaaaggtaacagaatatgatcatggtttcatattgtcctatcatgatggcattctgtccgtcaaataataataatgtctaatcccacagctctagaataatatgtacccccaaaaacaagaccaagctatcatgatggtatggatatggtgtaatatagatccaaaatctcatcgcaagtaatgtctaatcacacagctccagaatagcatctaccctctcac

SEQ ID NO: 146393 - DNA, 1710 bp, Zea Mays
actcttccgatcccgacgaggtaaaaacaccgtcgctcaccaccaacacaacgccaaccaacctgccccctcacccccgctggccgctgcttaacaaaccgccgccacaggacaagacaaacttattacagctccacctcagtgctgcagagactgagggccagccaaaccgctcaccgcacacgcggaattcaagcagcatgtacgccgacgccgggttcgccttcgccttcgccgccgcctactcccccaccctcacttcctcgcagccccagccgccgccgccgccgttcgactacgccttctcctccgagccacccctcctctccatgcccgccatggaccacgacgcctacctggggaacttggtacagccatccatggtatcagaatatgacctgggaggagaaggggacctgttcaaagctccagaagccatcatcgaggaaccgctgctcagcctcgatcctgtcgcagctgccttttcaatgatggctggcaatggaagtgctgtcatggatcaaactattaaggacgcaggcatcggcaccatccaaaatgaccccctcctgagtgaggtgctgtacgagtgcgagaaggaactcatggagaagtccacaatcgaagagacaatttctgaacttatggatgttaagattcctatgctgcaagttgaagaaatcccaagccaagctgaacaggttcttatacagaaccagcagctcccggccatggagaaagagaagcaatccgttcctgaatgctcgctccaaaaaagtgttagttctggatgcctcaactcagcagattggatgaatggacctgccaggccaaactttctagacttccaggggctggactttgaggcagcatttgggctgaggagagcttacagcgaaaggagacattcagaaccttggagccaacacgcctcgaccagcagcaaatgtttgtgtgaccatcagtgacctcaagaccgaagaaaggaagcaaaagctttccaggtataggaagaagaagatcaagcggaactttggcaggaagatcaagtacgcgtgcaggaaggctctggcagacagccagccaagagtgcgagggagatttgccaagatcgaagaatgcgacctgctgaagccaagcaagtagatccaagtatgcttggttttggcttctagctaggcgccgctccatcgtccttaccttgtgcgctggagaggcgccgcgatgcccgtcggaattcattcaattgacctctcctgtttctctcgggcagcatgctgtgtaataataatctcctccgggcccttgggtgcgagtgaagagctgaaaatttggtatggtagtctagcccccctgtactgtacaaaaggcttgaagatggtaataaaactcagctcccctcttgcttgcttggcattttttttaatgttatctgaatctgactgttagcattgtgctcctgaacatggatcattgggcaacaggaggaaaggtaacagaatatgatcatggtttcatattgtcctatcatgatggcattctgtccgtcaaataataataatgtctaatcccacagctctagaataatatgtacccccaaaaacaagaccaagctatcatgatggtatggatatggtgtaatatagatccaaaatctcatcgcaagtaatgtctaatcacacagctccagaatagcatctaccctctcac

SEQ ID NO: 146394 - DNA, 604 bp, Zea Mays
atagtccactaaaggcaagaagtaggagagagaaacaaacctacgtgcatatacgacgatttaaaagaagtataaggattttttaaaggaaccacggtgaaaacgagaaagagtacatactcctttagagaagttagatttgtagataaaaaaagctgcttaaacgactactgtaatagcaaaatactcgaacggaacgaagatttggcatcacccaccccctagctggcgtttcttaatttcacgtggagcgaatgctgctcctgctcggcatcggctgctctgctgccgtggcccgtgcgtgggatttagctcaggaacccacgcctgacatcccctcttcctccccggccggcgatgtcgtcttcgtcttccgcgctggccaaaggcaagtcggcaatcggatccgcagccggatctgccaaattcgaggtaggcctccttccttgttcgcttagcttgttggttgcctgccctccctctttgtccaagtcaaaccaaaccaaaccagatccagatcagatcccgtagtctcctcctcctcctcctcgtatggcaattttcagactggtcgattctaactaagccaggctctaaatcgggg

SEQ ID NO: 146395 - DNA, 729 bp, Zea Mays
atagtccactaaaggcaagaagtaggagagagaaacaaacctacgtgcatatacgacgatttaaaagaagtataaggattttttaaaggaaccacggtgaaaacgagaaagagtacatactcctttagagaagttagatttgtagataaaaaaagctgcttaaacgactactgtaatagcaaaatactcgaacggaacgaagatttggcatcacccaccccctagctggcgtttcttaatttcacgtggagcgaatgctgctcctgctcggcatcggctgctctgctgccgtggcccgtgcgtgggatttagctcaggaacccacgcctgacatcccctcttcctccccggccggcgatgtcgtcttcgtcttccgcgctggccaaaggcaagtcggcaatcggatccgcagccggatctgccaaattcgaggccaaggggaaattctcctcctcctcctccccagctgcggcagctaccaagcgtggaaccaccaccagcagcagcagaggtagaggtagagggaaggccgacaagaaggtctactccttgcccggccagaagttcgatcctccggaggagagggagcctctcaggattttctacgagtcactgtccaagcagatcccctccagtgagatggctgaattctggtatgcattatgctttctcccctcacccgatggacgatcagtatttagtagtaaattcttatgctgcaaagaaata

SEQ ID NO: 146396 - DNA, 1994 bp, Zea Mays
ctctcccgcttccgcttcccctcagccgtcacctccccgctcccaccgccaccaatcgcactcgcagtggctgttggcgtgcgctcgcgtccaaaccaagcaaaccccacaaatcctaccttccgccggcgtcgccaccggccgtgctccctccctccggccccggttgaccctagcctcgcatcaccctaaccctacccccctcccgccgctgccagagcaggggaaaaagatgccgcgcgagatcatcacgatccaggtggggcaatgcgggaaccagatcgggatggagttctggaagcagctctgcctcgagcacggcatcggcaaggacggcctcctcgaggacttcgccactcaggtctctgcttattgacctggagccgagagtgatcaatgggattcagaacagcgagtacaggaacctgtacaaccatgagaacatatttgttgctgagcacggtggtggtgccgggaacaactgggccagtgggtatcatcagggtgaacaatttgttgatgatatcatggacatggttgacagagaagctgatggaagtgatagccttgagggttttgtcctgtgccactctattgctggtggaactggttcaggtatgggttcttatctattggagacactgaatgatcgatacagtaaaaagcttgtgcagacatatagtgttttcccaaatcaggtggaaacaagtgatgttgtcgtccaaccttacaactcacttttgactctgaagcggctgacactgaatgctgactgtgtggttgttcttgacaatacggctcttaataggattgccgtcgagcgccttcatctatcaaatcctacgtttgcacaaacaaactctttggtctccacggttatgtctgcaagcacaactactttaaggtatcctggatatatgaacaatgatctggttggccttcttgcctccttgattcccactccaaggtgtcattttttgatgacaggttatactccgttgactgtcgagcgccaggttaacatgatacgcaaaacgacggtattggatgttatgagaagacttctgcagacaaagaatataatggtgtcatcatatgctcgaacaaaagaagctagccaggctaaatacatctccatattgaacatcattcaaggggaggtggaccctacacaggttcacgagagcctgcaaagaatacgcgaaaggaagcttgttaactttatagactgggcacctgcaagcattcaggttgctttgtcaagaaaatccccttatgttcaaacaacccacagggttagtggtctgatgttagcaaatcatacaagcatccgtcatttattcagcaaatgcctgggacaatatgaaaagctaaggaaaaagcaggcttttcttgacaactacaggaagttcccaatgtttgcggacaatgatctatctgaatttgatgaatctcgagagataatagagagcctagttgatgaatacaaggcctgcgagtcgcctgactacatcaaatggggaatggaggaccctggagaggcaaatgttgtggcggcacttgactctaagttggtagtgtaaatataaagtgttgtgcagcaatccacgcaactgaggaagtgctgtctacaatctacattcaagtcatgttggtcatccagaccaaatatgctactgtcacatctagtagtcatcagtttgacgccgcctgcttctatagatccaatcggagtgcagccaaagtgggttttgacgttatttcgacctcaaatttgcctttagtctgtgctatgtatatttcgaaacccacttcctctggcctgttttcatttctttagggctagtttggtaacaccatttttccaagggatttttattttctcaagtgaaattagttcattttcccaaacgaaaattgaaatctcttgggaaaatgttgttcgcaaactatcccttactatatttattgagaatctcccttcgtgcgttgcc

SEQ ID NO: 146397 - DNA, 2059 bp, Zea Mays
ctctcccgcttccgcttcccctcagccgtcacctccccgctcccaccgccaccaatcgcactcgcagtggctgttggcgtgcgctcgcgtccaaaccaagcaaaccccacaaatcctaccttccgccggcgtcgccaccggccgtgctccctccctccggccccggttgaccctagcctcgcatcaccctaaccctacccccctcccgccgctgccagagcaggggaaaaagatgccgcgcgagatcatcacgatccaggtggggcaatgcgggaaccagatcgggatggagttctggaagcagctctgcctcgagcacggcatcggcaaggacggcctcctcgaggacttcgccactcaggggggcgacaggaaggatgtcttcttttaccaggctgatgatcagcacttcatacccaggtctctgcttattgacctggagccgagagtgatcaatgggattcagaacagcgagtacaggaacctgtacaaccatgagaacatatttgttgctgagcacggtggtggtgccgggaacaactgggccagtgggtatcatcagggtgaacaatttgttgatgatatcatggacatggttgacagagaagctgatggaagtgatagccttgagggttttgtcctgtgccactctattgctggtggaactggttcaggtatgggttcttatctattggagacactgaatgatcgatacagtaaaaagcttgtgcagacatatagtgttttcccaaatcaggtggaaacaagtgatgttgtcgtccaaccttacaactcacttttgactctgaagcggctgacactgaatgctgactgtgtggttgttcttgacaatacggctcttaataggattgccgtcgagcgccttcatctatcaaatcctacgtttgcacaaacaaactctttggtctccacggttatgtctgcaagcacaactactttaaggtatcctggatatatgaacaatgatctggttggccttcttgcctccttgattcccactccaaggtgtcattttttgatgacaggttatactccgttgactgtcgagcgccaggttaacatgatacgcaaaacgacggtattggatgttatgagaagacttctgcagacaaagaatataatggtgtcatcatatgctcgaacaaaagaagctagccaggctaaatacatctccatattgaacatcattcaaggggaggtggaccctacacaggttcacgagagcctgcaaagaatacgcgaaaggaagcttgttaactttatagactgggcacctgcaagcattcaggttgctttgtcaagaaaatccccttatgttcaaacaacccacagggttagtggtctgatgttagcaaatcatacaagcatccgtcatttattcagcaaatgcctgggacaatatgaaaagctaaggaaaaagcaggcttttcttgacaactacaggaagttcccaatgtttgcggacaatgatctatctgaatttgatgaatctcgagagataatagagagcctagttgatgaatacaaggcctgcgagtcgcctgactacatcaaatggggaatggaggaccctggagaggcaaatgttgtggcggcacttgactctaagttggtagtgtaaatataaagtgttgtgcagcaatccacgcaactgaggaagtgctgtctacaatctacattcaagtcatgttggtcatccagaccaaatatgctactgtcacatctagtagtcatcagtttgacgccgcctgcttctatagatccaatcggagtgcagccaaagtgggttttgacgttatttcgacctcaaatttgcctttagtctgtgctatgtatatttcgaaacccacttcctctggcctgttttcatttctttagggctagtttggtaacaccatttttccaagggatttttattttctcaagtgaaattagttcattttcccaaacgaaaattgaaatctcttgggaaaatgttgttcgcaaactatcccttactatatttattgagaatctcccttcgtgcgttgcctcctgc

SEQ ID NO: 146398 - DNA, 1752 bp, Zea Mays
cccgcttccgcttcccctcagccgtcacctccccgctcccaccgccaccaatcgcactcgcagtggctgttggcgtgcgctcgcgtccaaaccaagcaaaccccacaaatcctaccttccgccggcgtcgccaccggccgtgctccctccctccggccccggttgaccctagcctcgcatcaccctaaccctacccccctcccgccgctgccagagcaggggaaaaagatgccgcgcgagatcatcacgatccaggtggggcaatgcgggaaccagatcgggatggagttctggaagcagctctgcctcgagcacggcatcggcaaggacggcctcctcgaggacttcgccactcaggggggcgacaggaaggatgtcttcttttaccaggctgatgatcagcacttcatacccaggtctctgcttattgacctggagccgagagtgatcaatgggattcagaacagcgagtacaggaacctgtacaaccatgagaacatatttgttgctgagcacggtggtggtgccgggaacaactgggccagtgggtatcatcagggtgaacaatttgttgatgatatcatggacatggttgacagagaagctgatggaagtgatagccttgagggttttgtcctgtgccactctattgctggtggaactggttcaggtatgggttcttatctattggagacactgaatgatcgatacagtaaaaagcttgtgcagacatatagtgttttcccaaatcaggtggaaacaagtgatgttgtcgtccaaccttacaactcacttttgactctgaagcggctgacactgaatgctgactgtgtggttgttcttgacaatacggctcttaataggattgccgtcgagcgccttcatctatcaaatcctacgtttgcacaaacaaactctttggtctccacggttatgtctgcaagcacaactactttaaggtatcctggatatatgaacaatgatctggttggccttcttgcctccttgattcccactccaaggtgtcattttttgatgacaggttatactccgttgactgtcgagcgccaggttaacatgatacgcaaaacgacggtattggatgttatgagaagacttctgcagacaaagaatataatggtgtcatcatatgctcgaacaaaagaagctagccaggctaaatacatctccatattgaacatcattcaaggggaggtggaccctacacaggttcacgagagcctgcaaagaatacgcgaaaggaagcttgttaactttatagactgggcacctgcaagcattcaggttgctttgtcaagaaaatccccttatgttcaaacaacccacagggttagtggtctgatgttagcaaatcatacaagcatccgtcatttattcagcaaatgcctgggacaatatgaaaagctaaggaaaaagcaggcttttcttgacaactacaggaagttcccaatgtttgcggacaatgatctatctgaatttgatgaatctcgagagataatagagagcctagttgatgaatacaaggcctgcgagtcgcctgactacatcaaatggggaatggaggaccctggagaggcaaatgttgtggcggcacttgactctaagttggtagtgtaaatataaaggtaccatctcacagtattaggcactttttatgcagaaacaatttgacgcacaatcatattgaattgattatccacttgaaaccttgaacacttgctttcttttgat

SEQ ID NO: 146399 - DNA, 2023 bp, Zea Mays
cccgcttccgcttcccctcagccgtcacctccccgctcccaccgccaccaatcgcactcgcagtggctgttggcgtgcgctcgcgtccaaaccaagcaaaccccacaaatcctaccttccgccggcgtcgccaccggccgtgctccctccctccggccccggttgaccctagcctcgcatcaccctaaccctacccccctcccgccgctgccagagcaggggaaaaagatgccgcgcgagatcatcacgatccaggtggggcaatgcgggaaccagatcgggatggagttctggaagcagctctgcctcgagcacggcatcggcaaggacggcctcctcgaggacttcgccactcaggggggcgacaggaaggatgtcttcttttaccaggctgatgatcagcacttcatacccaggtctctgcttattgacctggagccgagagtgatcaatgggattcagaacagcgagtacaggaacctgtacaaccatgagaacatatttgttgctgagcacggtggtggtgccgggaacaactgggccagtgggtatcatcagggtgaacaatttgttgatgatatcatggacatggttgacagagaagctgatggaagtgatagccttgagggttttgtcctgtgccactctattgctggtggaactggttcaggtatgggttcttatctattggagacactgaatgatcgatacagtaaaaagcttgtgcagacatatagtgttttcccaaatcaggtggaaacaagtgatgttgtcgtccaaccttacaactcacttttgactctgaagcggctgacactgaatgctgactgtgtggttgttcttgacaatacggctcttaataggattgccgtcgagcgccttcatctatcaaatcctacgtttgcacaaacaaactctttggtctccacggttatgtctgcaagcacaactactttaaggtatcctggatatatgaacaatgatctggttggccttcttgcctccttgattcccactccaaggtgtcattttttgatgacaggttatactccgttgactgtcgagcgccaggttaacatgatacgcaaaacgacggtattggatgttatgagaagacttctgcagacaaagaatataatggtgtcatcatatgctcgaacaaaagaagctagccaggctaaatacatctccatattgaacatcattcaaggggaggtggaccctacacaggttcacgagagcctgcaaagaatacgcgaaaggaagcttgttaactttatagactgggcacctgcaagcattcaggttgctttgtcaagaaaatccccttatgttcaaacaacccacagggttagtggtctgatgttagcaaatcatacaagcatccgtcatttattcagcaaatgcctgggacaatatgaaaagctaaggaaaaagcaggcttttcttgacaactacaggaagttcccaatgtttgcggacaatgatctatctgaatttgatgaatctcgagagataatagagagcctagttgatgaatacaaggcctgcgagtcgcctgactacatcaaatggggaatggaggaccctggagaggcaaatgttgtggcggcacttgactctaagttggtagtgtaaatataaaggagagcagtctatgggacgtgtcccacctaaagtgaagacctgcaaaggacaccaccattgggagtctatcggacgtgtcgcacctaaagtggagacctgcaaaggacacgaccattgggcatgacaactcgagcagtagcaactgcttagaaggttaatattcataacaatggtcacatagaagcaccacggtggaatggctccatctgctcgtggatttgtaaaagcgaaagtagtggtccccacaagggcggagccaggattatgatagaagaggggccgaccaattcatcaatactgtatgataaaataatattgtatattgttatcaagtttaagcactcagcatgaaataaaaattctagatctttacaaa

SEQ ID NO: 146400 - DNA, 1847 bp, Zea Mays
gctcccaccgccaccaatcgcactcgcagtggctgttggcgtgcgctcgcgtccaaaccaagcaaaccccacaaatcctaccttccgccggcgtcgccaccggccgtgctccctccctccggccccggttgaccctagcctcgcatcaccctaaccctacccccctcccgccgctgccagagcaggggaaaaagatgccgcgcgagatcatcacgatccaggtggggcaatgcgggaaccagatcgggatggagttctggaagcagctctgcctcgagcacggcatcggcaaggacggcctcctcgaggacttcgccactcaggggggcgacaggaaggatgtcttcttttaccaggctgatgatcagcacttcatacccaggtctctgcttattgacctggagccgagagtgatcaatgggattcagaacagcgagtacaggaacctgtacaaccatgagaacatatttgttgctgagcacggtggtggtgccgggaacaactgggccagtgggtatcatcagggtgaacaatttgttgatgatatcatggacatggttgacagagaagctgatggaagtgatagccttgagggttttgtcctgtgccactctattgctggtggaactggttcaggtatgggttcttatctattggagacactgaatgatcgatacagtaaaaagcttgtgcagacatatagtgttttcccaaatcaggtggaaacaagtgatgttgtcgtccaaccttacaactcacttttgactctgaagcggctgacactgaatgctgactgtgtggttgttcttgacaatacggctcttaataggattgccgtcgagcgccttcatctatcaaatcctacgtttgcacaaacaaactctttggtctccacggttatgtctgcaagcacaactactttaaggtatcctggatatatgaacaatgatctggttggccttcttgcctccttgattcccactccaaggtgtcattttttgatgacaggttatactccgttgactgtcgagcgccaggttaacatgatacgcaaaacgacggtattggatgttatgagaagacttctgcagacaaagaatataatggtgtcatcatatgctcgaacaaaagaagctagccaggctaaatacatctccatattgaacatcattcaaggggaggtggaccctacacaggttcacgagagcctgcaaagaatacgcgaaaggaagcttgttaactttatagactgggcacctgcaagcattcaggttgctttgtcaagaaaatccccttatgttcaaacaacccacagggttagtggtctgatgttagcaaatcatacaagcatccgtcatttattcagcaaatgcctgggacaatatgaaaagctaaggaaaaagcaggcttttcttgacaactacaggaagttcccaatgtttgcggacaatgatctatctgaatttgatgaatctcgagagataatagagagcctagttgatgaatacaaggcctgcgagtcgcctgactacatcaaatggggaatggaggaccctggagaggcaaatgttgtggcggcacttgactctaagttggtagtgtaaatataaagcaatccacgcaactgaggaagtgctgtctacaatctacattcaagtcatgttggtcatccagaccaaatatgctactgtcacatctagtagtcatcagtttgacgccgcctgcttctatagatccaatcggagtgcagccaaagtgggttttgacgttatttcgacctcaaatttgcctttagtctgtgctatgtatatttcgaaacccacttcctctggcctgttttcatttct

SEQ ID NO: 146401 - DNA, 719 bp, Zea Mays
tttccttcgtttccgtccgtttccgttttcatcctacctgctcgagacagcccgcctaccgtccatatgcactcgtgctgtgtgctgtcacttccctttcttctttccctaatccccatctccccttctctcgctgctggtggcctgcgaatggcgggcggaagcggcgaggcggctatgtctccgccgtcctctagtgccagcgggaagcgcgggcgggacccggaggaggacgtgtacgtggacaatctccattcccacaaacggtatctcagcgaggtcggtcgcccatcccacgccctgctcctctgcgttccgtctcgcttgagtttcggtctgggtagttggttatcgggttctcgcttctcgggaaaggggtcgcgggttccgtgtggttccttggccaattcatcggatacagccgttgtcgattctcgagtcgattgtttggctcctccgtctgggctccagggtttgggtgttaattcctcgaattggatggttccttggtgagggttcggatgatttcactgtttgcgtctgttgctgtattactcctctgcttttcttttggtttgtgcctctttggctccaacattgggtggtattaaaacctagttttggcctcaattcgtgcaatgttggcttactttccacttcccctactgtgtaattccttgggaaaaccaggtgatttggtaattcgaagccgcatattg

SEQ ID NO: 146402 - DNA, 1190 bp, Zea Mays
tttccttcgtttccgtccgtttccgttttcatcctacctgctcgagacagcccgcctaccgtccatatgcactcgtgctgtgtgctgtcacttccctttcttctttccctaatccccatctccccttctctcgctgctggtggcctgcgaatggcgggcggaagcggcgaggcggctatgtctccgccgtcctctagtgccagcgggaagcgcgggcgggacccggaggaggacgtgtacgtggacaatctccattcccacaaacggtatctcagcgagataatggcatccagtctgaatggactgtctgttggggattcactgcctgacaacatcatggagtcccctgcaaggtcagagactgcttcctgctacagggatgagatattatcccaatactcaccgatgtcagaagactcggatgattaccggtgctatgacactcaattaaaccccagtgggaatcatcctgatgcgatgatcagcccttcaactagcccaatgtcatctcctcatcgacaccagagaccacaatcttctttgttaccttcaaacccataccctctcccaagctgctccctttcgtcagtagtctgctctcatgctcggcgtggctccgataatgaaggccggttcccgtcctcgccaaatgacatgtgccatgtagcagatttgaggcgaacagcactactgaggtcagtgcaaatgagggtgcagggaccccattcgtatgacctatcattcggcatcagacaaggacaagatcatgcacatgagcatgaaggggaacatgaccatgagcatgaacatctagaggacttggaagggacagaaggatcatcttgcaataagtcaatcgttaacgaagtcacgtacaaccagagacgtgaccatgattttggtcggtcagagcacgagatagattacatcaacaacagcacatcagatgattgtgtaagtgatctaaaatttaagcaagaagataagagccatagtaaatttgatatccctatgcacaaaaattcatagcacatggaacatatgtgttagttttttggattataactctacttaacttcattgtattcttgacggatgccttatctattgtccgtggttttagcatcagcgttctgaatagcgacattgtaatatttgagtgaaattaacctttggattgttgcgatgcc

SEQ ID NO: 146403 - DNA, 95 bp, Zea Mays
ctttatataagaatttatgctctgcgtgactcatatcatccaattttttgcgcgcgtgcagtggaaacaaaaatatcatccaaaatttgcgcgca

SEQ ID NO: 146404 - DNA, 1087 bp, Zea Mays
tgattctaaaatattcaccaaatcaaagcgtgtcccatttattgttatcaatttcgtttgattcgatccatgattcatcgctaaaaatcttcaattcataaatatctctaattctcagtaaaaaaaagaagaaaagaaaatctaaataaaaaaatctgggaaaatatctgttcttccctatcctatccgctgctctttcgatctatttatatccccttcgtttctatccagccggtgctcggttatcttcaacctcctgccgtgggcactcacggtcgtctctctcccttgcttccctcatggcacctggccccggctccttgcgtcggcctcccctgggtccggcttcttcctggcggctccccgagctccgtctccatggtgcgctcgggattctccaagctcgtcgcgttcggcttattccctgcgcgccgcgcctgctgcgagctcgccaggatgcccctgctcatcttcccttggccgcgggcccttgccatgctcgccgagctccctctggtcttctctgctcgccgagattctccctggtgccgcgtcgcgccctcccctcggtcttcaacgttgaacgtcgccatctctctggtgttctgcgctggccgcagatcgaatctttgtcgtgcgcccagtcgagcgatcccctgcgcgcgcgttccctgcgcttgccccagccgcgctctggccgtcccagctccactcggcgccccctcggctcgcccccatggtgctggtcgtgtccctcgacgccggtcgcttcttcttgctattccatgccgcggcaatcaccctgctgctccagtgcgcccagccgagcgattctctgctccgtgcgcgcggtatttctccagcatgtcgcgcccagtccctgctccttgtttttctctgtgatgtggagtctcctcgccgcgcggatctctctccttcctaccctgctcggattgtgccgcgcttgctatcgcgttcggcctgtccggatccgaagttggtcgcctcggtgtgaaatcgccgtcgcgtccaggattttgacatgtctccctgctcgccgtcgaacttgggttctctgctcagcctt

SEQ ID NO: 146405 - DNA, 627 bp, Zea Mays
ttcaacacaatatgcaccttcacactcttccagctaatctatctgttgatcgtctttgggatgacatggataccagtagcaggaatcctcttcccactgctcttcttcttcctcattatcatcaggcagcacttcatcccgaaatattttgatccgagccacctgagggaattagatgcagccgagtacgaagaactgaaaggttttacacctgatccatcagtgtgtgaggacgagtctgttcgcagcggagatgctcagcctggatatgcttccgaaatactcgaggaattcacgactcaccgtggagagctgaagcgcaggaactctaccttccgtgatgggagactacttcagcttaactctatcaagatgacgagagagctttctcgggctccttctcggcttacatgaatcctggaagaatacgcggtttctgaatccgaactccaattaagcatgggggtgcgaagtctcatggcctaattgcttacagagtattttctgaagcaagcaactcattttaggtactgactttggggcaaatacacggggatgagcagaggaatgtagcagagctggaaaatgtttgtaaaaaaatataaagacaaaagaactgcatgttaa

SEQ ID NO: 146406 - DNA, 153 bp, Zea Mays
atggcaattggtgaggatgtggtcgacaccaaagatgacaaagacgtcatcgacaacactacttccgaggtactaccttccaccaatgatctcgccgttgagatagaagagctgaacgctgctttggctagtcaggaaaagttgcttaagtag

SEQ ID NO: 146407 - DNA, 930 bp, Zea Mays
atggcatccagcagctgccaagcacgtgaccccgtcgttcacctcagcctgctgctggatgccacctcgcctccctcggtgcgtcgttgcgcgtgcctcgaccatggcgacgtgcccaagcacgtgaccgaggccaacctactcgccttgttctacgaggtcgccaccgtcgacgaggtcaccatcatcaaggacaaggccaccaaggtctcccgagaagaaatattgctcgaaaatgtagagctgactcttgaagcctttgactacctgcaactgccattcacgctgaaaggtggattgcactgctgcagagtttccggtgaatcaaactggataaaagtggagcaaaagttggttgctaaaggaaccaatagaacctcaaggcttcaaataacaactaacaagaaaggagttgtctggtttgatcaagtatcactcatgcctgaagacacatacaagggacatggctttcgcacagaacttatatccatgattttggatttaaaaccacgattcttgagatttcctggaggctgctttgtagaaggtgactggttaagaaatgcctttaggtggagagaatctattggtccatgggaagagagacctggacacttcgggggtgtttggcattactggactgatgatggccttggatactatgaatttcttcagcttgcggaggacctgactcctaaaccaatctgggtattcaacaattgagtcagccacaatgatgaagttgatactgttgctattgctccttttgtaaaggtatgttttgattccatagttatttatctagcagattaaacattccttgatatagaggcataagaaccttcacaatttttaaagcttcatactttgtacatcattgtatatcagaacactagatttctttgaactattggttaacaaaataattga

SEQ ID NO: 146408 - DNA, 607 bp, Zea Mays
ctgatcaaacttgaaggtttggtgacgtcacgcatgtcaagcagcttgtatcttgtatttgaatacatggagcacgaccttgcaggacttgcagctacacctggcttaaaattctcagaacctcaggtcaagtgttacatgcaacaactactttgtggacttgatcattgtcataaccgtggtgttttgcatcgggatataaagggtgcaaatctcctacttgacaacaatggcattcttaaaatagcagattttggtctagctacattctttaatcccaaacaaaaacaacatttgacaagtcgtgtagtaacattgtggtaccgacctcctgagcttttgttgggtgctactaactatggtgctgctgttgatctatggagtgccggttgcattcttgctgagttgttatcagggaagcctatcatgccaggacgaactgaggtggaacaattgcacaaaatttttaagctctgcggttcaccatcagaggagttttgggctaatttgaagttatcccgagctaccatattcaagcctcacatccgtaccgccgatgtgtgaatgatgtatataaggactttcctactactgctttaacactttt

SEQ ID NO: 146409 - DNA, 3843 bp, Zea Mays
gaagcggaagcagcagcagaagcactgcgcggcattgcagcgatcgagcgggaggaatttggggcatggtggtcgccaacgccgctcggatctagaggcccgcacgggccgattggtctccgcccgcctcgtcggtgttggtgtcgttggcgtgtggagccgtctcggtgggagcagcggggagggagcggagatggcggccaacaaggggatggtggcgggctcgcacaaccgcaacgagttcgtcatgatccgccacgacggcgatgcgccgggctcggctaagcccacaaagagtgcgaatgggcaggtctgccagatttgtggtgactctgtgggtgtttcagccactggtgatgtctttgttgcctgcaatgagtgtgccttccctgtctgccgcccatgctatgagtatgagcgcaaggaggggaaccaatgctgcccccagtgcaagactagatacaagagacagaaaggtagccctcgagttcatggtgatgaggatgaggaagatgttgatgacctagacaatgaattcaactacaagcaaggcaatgggaaaggcccagagtggcaactgcaaggagatgatgctgatctgtcttcatctgctcgccatgagccacatcatcggattccacgcctgacaagcggtcaacagattcctgatgcttcccctgaccgtcattctatccgcagtccaacatcgagctatgttgatccaagcgtcccagttcctgtgaggattgtggacccctcgaaggacttgaattcctatgggcttaatagtgttgactggaaggaaagagttgagagctggagggttaaacaggacaaaaatatgatgcaagtgactaataaatatccagaggctagaggaggagacatggaggggactggctcaaatggagaagatatgcaaatggttgatgatgcacggctacctttgagccgtatcgtgccaatttcctcaaaccagctcaacctttaccgggtagtgatcattctccgtcttatcatcctgtgcttcttcttccagtatcgtgtcagtcatccagtgcgtaatgcttatggattatggctagtatctgttatctgcgaggtctggtttgccttgtcttggcttctagatcagttcccaaaatggtatccaatcaaccgtgagacatatcttgacaggcttgcattgaggtatgatagagagggagagccatcacagctggctcccattgatgtcttcgtcagtacagtggatccattgaaggaacctccactgatcacagccaacactgttttgtccattctttctgtggattaccctgttgacaaagtgtcatgctatgtttctgatgatggttcagctatgctgacttttgagtctctctcagaaaccgcagaatttgctagaaagtgggttcccttttgtaagaagcacaatattgaaccaagagctccagaattttactttgctcaaaaaatagattacctgaaggacaaaattcaaccttcatttgttaaggaaagacgcgcaatgaagagggagtatgaagaattcaaagtaagaatcaatgcccttgttgccaaagcacagaaagtgcctgaagaggggtggaccatggctgatggaactgcatggcctgggaataatcctagggaccatcctggcatgattcaggttttcttggggcacagtggtgggctcgacactgatggaaatgagttaccacgtcttgtctatgtctctcgtgaaaagagaccaggctttcagcatcacaagaaggctggtgcaatgaatgcgctgattcgtgtatctgctgtgctgacaaatggtgcctatcttctcaatgtggattgcgaccattacttcaatagcagcaaagctcttagagaagcaatgtgcttcatgatggatccggctctaggaaggaaaacttgttatgtacaatttccacagagatttgatggcattgacttgcacgatcgatatgctaatcggaacatagttttctttgatatcaacatgaaaggtctggatggcattcagggtccagtttacgtgggaacaggatgctgtttcaatagacaggctttgtatggatacgatcctgttttgactgaagctgatctggagccaaacattgttattaagagctgctgtggtagaaggaagaaaaagaacaagagttatatggatagtcaaagccgtattatgaagagaacagaatcttcagctcccatcttcaatatggaagacatcgaagagggtattgaaggttatgaggatgaaaggtcagtgcttatgtcccagaggaaattggagaaacgctttggtcagtctcctattttcattgcatccacctttatgacacaaggtggcataccaccttcaacaaacccagcttctctactaaaggaagctatccatgtcatcagttgtggatatgaggacaaaactgaatggggaaaagagattggctggatctatggttcagtaacggaggatattctgactgggtttaaaatgcatgcaaggggctggcaatcaatctactgcatgccaccacgaccttgtttcaagggttctgcaccaatcaatctttccgatcgtcttaatcaggtgctccgttgggctcttgggtcagtggaaattctgcttagtagacattgtcctatctggtatggttacaatggacgattgaagcttttggagaggctggcttacatcaacactattgtatatccaatcacatccattccgcttattgcctattgtgtgcttcccgctatctgcctccttaccaataaatttatcattcctgagattagcaattatgctgggatgttcttcattcttcttttcgcctccatttttgccactggtatattggagcttagatggagtggtgttggcattgaagattggtggagaaatgagcagttttgggttattggtggcacctctgcccatctcttcgcagtgttccagggtctgctgaaagtgttggctgggattgataccaacttcacagttacctcaaaggcatctgatgaggatggcgactttgctgagctatatgtgttcaagtggaccagtttgctcattcctccgaccactgttcttgtcattaacctggtcggaatggtggctggaatttcttatgccattaacagtggctaccaatcctggggtccgctctttggaaagctgttcttctcgatctgggtgatcctccatctctaccccttcctcaagggtctcatgggaaggcagaaccgcacaccaacaatcgtcattgtctggtccatccttcttgcatctatcttctccttgctgtgggtgaagatcgatcctttcatctccccgacacagaaagctgctgccttggggcaatgtggcgtcaactgctgatcgagacagtgactcttatttgaagaggctcaatcaagatctgccccctcgtgtaaatacctgtcacctgaggaggctagatgggaattccttttgttgtaggtgaggatggatttgcatctaagttatgcctctgttcattagcttcttccgtgccggtgctgcagcggactaagaatcacggagcctttctaccttgcatgtagcgctagccagcagcgtaagatgtgaattttgaagttttgttatgcgtgcagtttattgttttagagtaaattatcatttgtttgtgggaactgttcacacgagcttatattggcaatgctgttatttatacacaaagactacattctttggaatgtgtgcagacagtcagaacactgtaatctattagcacaactatataaggcagctgttgtatcatctctattgtt

SEQ ID NO: 146410 - DNA, 3910 bp, Zea Mays
agcagcagaagcactgcgcggcattgcagcgatcgagcgggaggaatttggggcatggtggtcgccaacgccgctcggatctagaggcccgcacgggccgattggtctccgcccgcctcgtcggtgttggtgtcgttggcgtgtggagccgtctcggtgggagcagcggggagggagcggagatggcggccaacaaggggatggtggcgggctcgcacaaccgcaacgagttcgtcatgatccgccacgacggcgatgcgccgggctcggctaagcccacaaagagtgcgaatgggcaggtctgccagatttgtggtgactctgtgggtgtttcagccactggtgatgtctttgttgcctgcaatgagtgtgccttccctgtctgccgcccatgctatgagtatgagcgcaaggaggggaaccaatgctgcccccagtgcaagactagatacaagagacagaaaggtagccctcgagttcatggtgatgaggatgaggaagatgttgatgacctagacaatgaattcaactacaagcaaggcaatgggaaaggcccagagtggcaactgcaaggagatgatgctgatctgtcttcatctgctcgccatgagccacatcatcggattccacgcctgacaagcggtcaacagatatctggagagattcctgatgcttcccctgaccgtcattctatccgcagtccaacatcgagctatgttgatccaagcgtcccagttcctgtgaggattgtggacccctcgaaggacttgaattcctatgggcttaatagtgttgactggaaggaaagagttgagagctggagggttaaacaggacaaaaatatgatgcaagtgactaataaatatccagaggctagaggaggagacatggaggggactggctcaaatggagaagatatgcaaatggttgatgatgcacggctacctttgagccgtatcgtgccaatttcctcaaaccagctcaacctttaccgggtagtgatcattctccgtcttatcatcctgtgcttcttcttccagtatcgtgtcagtcatccagtgcgtaatgcttatggattatggctagtatctgttatctgcgaggtctggtttgccttgtcttggcttctagatcagttcccaaaatggtatccaatcaaccgtgagacatatcttgacaggcttgcattgaggtatgatagagagggagagccatcacagctggctcccattgatgtcttcgtcagtacagtggatccattgaaggaacctccactgatcacagccaacactgttttgtccattctttctgtggattaccctgttgacaaagtgtcatgctatgtttctgatgatggttcagctatgctgacttttgagtctctctcagaaaccgcagaatttgctagaaagtgggttcccttttgtaagaagcacaatattgaaccaagagctccagaattttactttgctcaaaaaatagattacctgaaggacaaaattcaaccttcatttgttaaggaaagacgcgcaatgaagagggagtatgaagaattcaaagtaagaatcaatgcccttgttgccaaagcacagaaagtgcctgaagaggggtggaccatggctgatggaactgcatggcctgggaataatcctagggaccatcctggcatgattcaggttttcttggggcacagtggtgggctcgacactgatggaaatgagttaccacgtcttgtctatgtctctcgtgaaaagagaccaggctttcagcatcacaagaaggctggtgcaatgaatgcgctgattcgtgtatctgctgtgctgacaaatggtgcctatcttctcaatgtggattgcgaccattacttcaatagcagcaaagctcttagagaagcaatgtgcttcatgatggatccggctctaggaaggaaaacttgttatgtacaatttccacagagatttgatggcattgacttgcacgatcgatatgctaatcggaacatagttttctttgatatcaacatgaaaggtctggatggcattcagggtccagtttacgtgggaacaggatgctgtttcaatagacaggctttgtatggatacgatcctgttttgactgaagctgatctggagccaaacattgttattaagagctgctgtggtagaaggaagaaaaagaacaagagttatatggatagtcaaagccgtattatgaagagaacagaatcttcagctcccatcttcaatatggaagacatcgaagagggtattgaaggttatgaggatgaaaggtcagtgcttatgtcccagaggaaattggagaaacgctttggtcagtctcctattttcattgcatccacctttatgacacaaggtggcataccaccttcaacaaacccagcttctctactaaaggaagctatccatgtcatcagttgtggatatgaggacaaaactgaatggggaaaagagattggctggatctatggttcagtaacggaggatattctgactgggtttaaaatgcatgcaaggggctggcaatcaatctactgcatgccaccacgaccttgtttcaagggttctgcaccaatcaatctttccgatcgtcttaatcaggtgctccgttgggctcttgggtcagtggaaattctgcttagtagacattgtcctatctggtatggttacaatggacgattgaagcttttggagaggctggcttacatcaacactattgtatatccaatcacatccattccgcttattgcctattgtgtgcttcccgctatctgcctccttaccaataaatttatcattcctgagattagcaattatgctgggatgttcttcattcttcttttcgcctccatttttgccactggtatattggagcttagatggagtggtgttggcattgaagattggtggagaaatgagcagttttgggttattggtggcacctctgcccatctcttcgcagtgttccagggtctgctgaaagtgttggctgggattgataccaacttcacagttacctcaaaggcatctgatgaggatggcgactttgctgagctatatgtgttcaagtggaccagtttgctcattcctccgaccactgttcttgtcattaacctggtcggaatggtggctggaatttcttatgccattaacagtggctaccaatcctggggtccgctctttggaaagctgttcttctcgatctgggtgatcctccatctctaccccttcctcaagggtctcatgggaaggcagaaccgcacaccaacaatcgtcattgtctggtccatccttcttgcatctatcttctccttgctgtgggtgaagatcgatcctttcatctccccgacacagaaagctgctgccttggggcaatgtggcgtcaactgctgatcgagacagtgactcttatttgaagaggctcaatcaagatctgccccctcgtgtaaatacctgtcacctgaggaggctagatgggaattccttttgttgtaggtgaggatggatttgcatctaagttatgcctctgttcattagcttcttccgtgccggtgctgcagcggactaagaatcacggagcctttctaccttgcatgtagcgctagccagcagcgtaagatgtgaattttgaagttttgttatgcgtgcagtttattgttttagagtaaattatcatttgtttgtgggaactgttcacacgagcttatattggcaatgctgttatttatacacaaagactacattctttggaatgtgtgcagacagtcagaacactgtaatctattagcacaactatataaggcagctgttgtatcatctctattgtttctgatgggccctggggatatgtaattgcgaatgactagcaacattatattgttggctgattatca

SEQ ID NO: 146411 - DNA, 204 bp, Zea Mays
cttttttttttttttggttggtcgtgtttgattgccgccgtgtgtagggtttgtgggtgtttggtttcgcctttctggttttttgtttttcgtttttgttttttttttttttttatcttttttttttttttttttttttttttttttttttttttttttttttttttttttttttttttttttttttttttttttttttttttt

SEQ ID NO: 146412 - DNA, 545 bp, Zea Mays
aactcaccatccgcttcaacatgtcgggagacaccgcggcggcggtgcaggcaggaggagacgcgcagcaggccgtcggcaggaaccggattcaggtgtccagctccaagaaacctctattcttctacgtcaatctcgccaagaggtacatgcagcatcacgacgacgacgtcgagctctccgcgctcgggctggccatatcgacggctgtaaccgttgcagagatcctgaagaacaatggtcttgctgtcgagaagaaggttagaacatccacagttgacatcaaaaacgaaataagcacccggtcaatccaaaaggctaagattgagatagtgctgggaaagactaacaagttcgatgaactgatggccgccaatgatggagatggaaccgcaggggatggcgtgggaaagaatgacaagttcgatgaattgatggctgccaatgatggagatggaaccgcagggggtggcaacaaacagagatttgttatagattttcctaccatttttatctcttctcctctccttgatagatctagttaa

SEQ ID NO: 146413 - DNA, 1655 bp, Zea Mays
cctcaagcctcaacctccaaattctccctcgttgtcttaccgtgtcgttgttgccgggttttcttggcgagcgacggagccacagaaatggagtgcaatacgggcgcctaattttagcggcggggaggggagcgaagcctgggcagccactcgccggcctccaagaaaccgtcgccattttttcatccgagtgccgccgattttgatttcattattgtctgtcttcgtggggaaccaattcggttttgtttcggaagaagggagaggaggatgcagtgggcgggtctgagatcgcaggcgccggttcccacggcggcgtggacggggccgaggccaagaaccgcgaggtgcccgcagggtagattccccacagcgcgccgggcgctggtggcgtcggcagcggcctcggacgctaattcgagctcgaattcgccggggaaggacgaggagggggaggaggtggtgcgaagggagaaggaggagaaggcggtcgcgtcgcttctgatgagaagccagaagtacgccatgctaaagcagcagctcgccgtggccgcccaatttgaggattacaaggaagcagcgaggttgagggactcgctgaggtccttcgaggagaaggagcctgtgttgtgcctccgccggttgatgaagaaggccattgaggaggagaggtttgaggatgctgctaaatacagagatgaattaaagattttggctccacactccctcctcaaatgttctagtgatgcaactactttggggataagagttcaagtcaggagcgtctatattgaaagccggagccagccattgaaagggcaattcttttttgcttatagaattagaattacgaatagttctcagcgccctgttcagcttctcaaaaggcactggattgttacagatggaaatggaaggacagaaaacatttggggagttggagtagtgggagaacaacctgtcatattcccgaagactggttttgagtactcttctgcatgcccattgagcactccaaatgggagaatggaaggtgactttgagatgaagcacatcgacaaggctggatcatcaacattcaatgttgcaattgcgccattctctctgtcaattcttggtgacgataatgatgttctgctatgaactacactgaggacttgcttgggagcaaatggattgaagggaattaagggggctacaatcccttactattcaattttgaatagtaagggattttagctcacaatccccttctgcaaacaagccctgagatttaaactagacacacaaacacaaatatttattgtaagtgatgtaattgagcgcaaggttcaggtggaactactatggttgacttatggctggagccaagtgccctggtgcaaggtcaggtagagttctctgggatgttgaatctggaccatgcgagtatcaattgtgaggcacaataggacatcctaccaattgtacttctaaatgtacagcatggaacttagagcttgctacatgtattatacagtacctttttatttttcccatcacggtatcaccttagttatcgcggcctttgattatattgtatatcagctcagcaaaatatggtgttttttgttggaactgcaatgtaagatgtttgatatgaccgttggtgcttc

SEQ ID NO: 146414 - DNA, 1071 bp, Zea Mays
gtttcagttcatcatgacccagaaggttgtcttggccatctgaagcagtacagttttcaggagatgagaatggctaccaataacttcagccaaagaaatattttgggagagggaggatatggtatagtatacaagggtgatttgcctgatggaacaactgttgctgttaaaagacttaaggatcatgattcagttgttggggatgatcaattccacacagaagttgaagtgataagcttggctgtccatcgtaatctccttcatcttaatgggttttgcgttgcaaataatgaaaggcttcttgtgtatccctacatgccgaatggaacggttgcttctaaattaaaagaatgcgttgatggagaaccagccttagactgggcaaagagaaagaggatagcccttggtgcgtcacagggactgctctatttgcatgaacaatgtgatcctaagataatccatcgtgacatcaaggcctccaatgtcctccttgatgaatatcttgaagcagttgttgcagattttggattggcaaaacttgtagatcattggatgtcccatgttgtcacatcagtgcgcggaacaattgggcgcataccacccgagtattatctgtctggccacgcttcggagaagactgatgtcttttgctttggtcttctgttgattgagttagtcactggtcgatcaacgctggagcttcatgagaatgaatttgataagggaggaattattgaattggccaaagaacttctggaacaaaataagctaagcatgtttgtggaccggaagctaggaagcaactacgacagtgctgaattggaggagatggttcagattgctttgctctgcacaatgtacagatcttgccaccgccccaggatgtctgaaattgttaagatgctggaaggaggagatggggttgcagaaaaatggcaggccatgaaagatattgaggaaccaaaccccgactcgtcatcagaatttgtgtgcattggtataaattatgacgtagacgagtgcaattcaatcgagcttcaagccgttgaactctcagggccaaggtgatct

SEQ ID NO: 146415 - DNA, 1153 bp, Zea Mays
atgagcgcgctggacaagctgttccacatcgcgcgcgcggcgttcatcgacatcgtggggcggttcgcgatccagacggtgggcttcctcatgatgacggccttcatgctggggctggccgtcccgtaccgccagtggacgcgccccggcaaccagacggggttcgtggcccaacgccacgaccttcatcgtgcctgcggaaatctaccggcgcgactccgcgcgacgtgccacggcatctcggcggcgtcgggcaagagccaggacccggccaagacgatgcacgggtacgcgccgggcatcggcgtgcgcaactcgctgctgctgttggccgggtgcatcttcctagggttcctgctcacgttcctggtgccggagcccaagggcaagtcgctcgaggagatgtcgcgcgagacggagaagacaagaaaacaaggggctatgttccttggaatgatgagatggataagtggttttggatgggattgggagaagaacaagctcaaagttgatagtgacactgtatgggatgagtacgttgagaggaataaggaagcaaaaggatatagacataaggttgtgaagttttgggatctactcggcctagtgtacaataaaaaccaagcaaatggagagggtgctaaaacagcagctgaaagttcaaaggaaatggcaaaagagaatgataccagaggcaaggatgttccatattctgtatcttcctcgagtagtttaaaaagacaaagattagatgattcatttaactctatgtggtgtgagaagtttgacatgcttacatcagcattgaaagatgacggtccgaagctaccctcttccgctgaagttcttgccgtgttacaagaggttgagggacttgatgaagacatagaacttgagctttatgacatcctcacctctaatgcacgcaagtttgagtcgatgatggcattcccaatggaaaggagtaagaggtggcttatggtgcagccaaggaagtgaaacaacttatatgtgaactgatctttgtgttgaactgattgtgtgaacttgtctttgtgaaacttttgtgcgcgaacttgatggctttgtgaaactgttgtgtgtgaacttgatgactttgtgaaactattgtgtgaagatttgatgtctttgt

SEQ ID NO: 146416 - DNA, 1371 bp, Zea Mays
cgcgcttcgtcccctcggcaagcaagcccaagattcgatcgatccacccccgccaccgcaccacactctcactgcgattccgctctcacccacctcctcttcctctcccctcccgggatcacgaggcgacgccacccgcgagattgacgggagccgatagatctgcgcggctacgctacgcagtcacactgcgctcacctgacctgactccgctctgttcatgccgcggaggtagagtccgcgggccggcggtggccacggccagcctcctcggccgtcgggatgaagccgcggaggttcggctacggctacggctacggctacggccgggtcaggcgcgcggcggcgctgctgctgctgctgctgctctgcctctgcctcagcagcctgttcctcctgcttctccatggctcctccacgccgctggagcccgcggcggcggcggcggcggcggaagcaagagttgccgaggcgcaggcggaggtcgaggaggcgccgctgccgccggggaactccaaggtcgccttcctcttcatcgcgcgcaaccgcctcccgctcgaactcgtctgggatgccttcttccgcggtgacaaggaggggaggttctccatcctcgtgcactcgcggccgggcttcgtgctcacacgagccaccactcgatcccgattcttctacaaccgtcaggtcaacgatagcatccaggtggattggggggaggcgagcatgatcacggctgagcgcattttgctcagccatgctctcaaggatccactcaatgaccgctttgtttttgtatctgacagctgtgtaccactatacaatttcagctatacttacgactacataatgtcgtcatcgaccagctttgtagacaggacctagcgccccttttcgtggcggcggtgctccttttggtatagatgtcccatttggaccaccaggtcctgacatgctcccgacatttgtcaattggagtacctatggagctgtgacaccaatacaagatcagggagactgtggttcgtgctgggcatttggtgtcaccggtctcatagaggcagctcacttcatacgaaacaaggagttaataaaactttctgagcaacacctgatagatggaaacaacctcaggaactttggatgcaaacatggatcatgctccgaggccctagactacattatgagaaacggtggaattatcaatgcagaaagttacccatacaaggaagcccaagagcctgtccggtctatcacggtacatagcaattcgctactgtaacttatatgcatagttgctgagcgcacactattagacctgagcttgtaatttgttctttaggttcatgctgggcatttggtgtcaccggtctc

SEQ ID NO: 146417 - DNA, 1868 bp, Zea Mays
cgcgcttcgtcccctcggcaagcaagcccaagattcgatcgatccacccccgccaccgcaccacactctcactgcgattccgctctcacccacctcctcttcctctcccctcccgggatcacgaggcgacgccacccgcgagattgacgggagccgatagatctgcgcggctacgctacgcagtcacactgcgctcacctgacctgactccgctctgttcatgccgcggaggtagagtccgcgggccggcggtggccacggccagcctcctcggccgtcgggatgaagccgcggaggttcggctacggctacggctacggctacggccgggtcaggcgcgcggcggcgctgctgctgctgctgctgctctgcctctgcctcagcagcctgttcctcctgcttctccatggctcctccacgccgctggagcccgcggcggcggcggcggcggcggaagcaagagttgccgaggcgcaggcggaggtcgaggaggcgccgctgccgccggggaactccaaggtcgccttcctcttcatcgcgcgcaaccgcctcccgctcgaactcgtctgggatgccttcttccgcggtgacaaggaggggaggttctccatcctcgtgcactcgcggccgggcttcgtgctcacacgagccaccactcgatcccgattcttctacaaccgtcaggtcaacgatagcatccaggtggattggggggaggcgagcatgatcacggctgagcgcattttgctcagccatgctctcaaggatccactcaatgaccgctttgtttttgtatctgacagctgtgtaccactatacaatttcagctatacttacgactacataatgtcgtcatcgaccagctttgtagacagttttgctgatacaaaggcagggagatacaacccaagaatggacccagttatcccagtggagaattggagaaaaggctcacaggtggtccttccaccattataaataaagactgaacattgcttgataattaattctgatgcctttaccactgaacttttattcatacactgtttccagtgggctgtgctaattaaaaagcatgctgaggttgtggttgatgatgaagtggtgttaccagaattccagaagcattgcaggaggagacccttgccagagttctggcgggattgggatcgtcctattcctgcggaggcatggaaagcccataactgcataccagatgagcactatgttcagacgttgcttgcacaaagtggtctagaagaagaacttacgcggcgatcagtaacacatagtgcatgggatctttcagcttctaaagatcgtgaaagacgcgggtggcatcctgtaacatataaagtctctgatgctactacaagacttataaaatctataaaggatattgataatatatattacgagaccgaaaatagaagggagtggtgtacaagtaatggaaagccagccccctgcttcctttttgccaggaagtttacacgtggagctggtctgaagcttcttgattcatcactgatagcttcaaagtgatgaatattagtgacagatgcaagtgccttttgattgtttcacctttcgagaatatttcagttcacacaaatgtaaaggtacgggaccacggaaaagacacaaaataacaggactttctttttattcagtgtgtgattatcatatattattttgttgcttcatagaaaggcacgatacatgttgtaaagaattatcttcgttccttttatttcctaggatagcacgtccattaacacatgactcagcattataacatcagtcgaccagttggtcgtggagtcctgagaaaacttgtcggcaaaattatgaagaaatgttctctc

SEQ ID NO: 146418 - DNA, 1772 bp, Zea Mays
cgcgcttcgtcccctcggcaagcaagcccaagattcgatcgatccacccccgccaccgcaccacactctcactgcgattccgctctcacccacctcctcttcctctcccctcccgggatcacgaggcgacgccacccgcgagattgacgggagccgatagatctgcgcggctacgctacgcagtcacactgcgctcacctgacctgactccgctctgttcatgccgcggaggtagagtccgcgggccggcggtggccacggccagcctcctcggccgtcgggatgaagccgcggaggttcggctacggctacggctacggctacggccgggtcaggcgcgcggcggcgctgctgctgctgctgctgctctgcctctgcctcagcagcctgttcctcctgcttctccatggctcctccacgccgctggagcccgcggcggcggcggcggcggcggaagcaagagttgccgaggcgcaggcggaggtcgaggaggcgccgctgccgccggggaactccaaggtcgccttcctcttcatcgcgcgcaaccgcctcccgctcgaactcgtctgggatgccttcttccgcggtgacaaggaggggaggttctccatcctcgtgcactcgcggccgggcttcgtgctcacacgagccaccactcgatcccgattcttctacaaccgtcaggtcaacgatagcatccaggtggattggggggaggcgagcatgatcacggctgagcgcattttgctcagccatgctctcaaggatccactcaatgaccgctttgtttttgtatctgacagctgtgtaccactatacaatttcagctatacttacgactacataatgtcgtcatcgaccagctttgtagacagttttgctgatacaaaggcagggagatacaacccaagaatggacccagttatcccagtggagaattggagaaaaggctcacagtgggctgtgctaattaaaaagcatgctgaggttgtggttgatgatgaagtggtgttaccagaattccagaagcattgcaggaggagacccttgccagagttctggcgggattgggatcgtcctattcctgcggaggcatggaaagcccataactgcataccagatgagcactatgttcagacgttgcttgcacaaagtggtctagaagaagaacttacgcggcgatcagtaacacatagtgcatgggatctttcagcttctaaagatcgtgaaagacgcgggtggcatcctgtaacatataaagtctctgatgctactacaagacttataaaatctataaaggatattgataatatatattacgagaccgaaaatagaagggagtggtgtacaagtaatggaaagccagccccctgcttcctttttgccaggaagtttacacgtggagctggtctgaagcttcttgattcatcactgatagcttcaaagtgatgaatattagtgacagatgcaagtgccttttgattgtttcacctttcgagaatatttcagttcacacaaatgtaaaggtacgggaccacggaaaagacacaaaataacaggactttctttttattcagtgtgtgattatcatatattattttgttgcttcatagaaaggcacgatacatgttgtaaagaattatcttcgttccttttatttcctaggatagcacgtccattaacacatgactcagcattataacatcagtcgaccagttggtcgtggagtcctgagaaaacttgtcggcaaaattatgaagaaatgttctctc

SEQ ID NO: 146419 - DNA, 1634 bp, Zea Mays
tgcgattccgctctcacccacctcctcttcctctcccctcccgggatcacgaggcgacgccacccgcgagattgacgggagccgatagatctgcgcggctacgctacgcagtcacactgcgctcacctgacctgactccgctctgttcatgccgcggaggtagagtccgcgggccggcggtggccacggccagcctcctcggccgtcgggatgaagccgcggaggttcggctacggctacggctacggctacggccgggtcaggcgcgcggcggcgctgctgctgctgctgctgctctgcctctgcctcagcagcctgttcctcctgcttctccatggctcctccacgccgctggagcccgcggcggcggcggcggcggcggaagcaagagttgccgaggcgcaggcggaggtcgaggaggcgccgctgccgccggggaactccaagggtgacaaggaggggaggttctccatcctcgtgcactcgcggccgggcttcgtgctcacacgagccaccactcgatcccgattcttctacaaccgtcaggtcaacgatagcatccaggtggattggggggaggcgagcatgatcacggctgagcgcattttgctcagccatgctctcaaggatccactcaatgaccgctttgtttttgtatctgacagctgtgtaccactatacaatttcagctatacttacgactacataatgtcgtcatcgaccagctttgtagacagttttgctgatacaaaggcagggagatacaacccaagaatggacccagttatcccagtggagaattggagaaaaggctcacagtgggctgtgctaattaaaaagcatgctgaggttgtggttgatgatgaagtggtgttaccagaattccagaagcattgcaggaggagacccttgccagagttctggcgggattgggatcgtcctattcctgcggaggcatggaaagcccataactgcataccagatgagcactatgttcagacgttgcttgcacaaagtggtctagaagaagaacttacgcggcgatcagtaacacatagtgcatgggatctttcagcttctaaagatcgtgaaagacgcgggtggcatcctgtaacatataaagtctctgatgctactacaagacttataaaatctataaaggatattgataatatatattacgagaccgaaaatagaagggagtggtgtacaagtaatggaaagccagccccctgcttcctttttgccaggaagtttacacgtggagctggtctgaagcttcttgattcatcactgatagcttcaaagtgatgaatattagtgacagatgcaagtgccttttgattgtttcacctttcgagaatatttcagttcacacaaatgtaaaggtacgggaccacggaaaagacacaaaataacaggactttctttttattcagtgtgtgattatcatatattattttgttgcttcatagaaaggcacgatacatgttgtaaagaattatcttcgttccttttatttcctaggatagcacgtccattaacacatgactcagcattataacatcagtcgaccagttggtcgtggagtcctgagaaaacttgtcggcaaaattatgaagaaatgttctctc

SEQ ID NO: 146420 - DNA, 1853 bp, Zea Mays
aaataatataaaagttagccaagcgaaccgaaccacactctcgtctccctcctccccgttccttattcgccagaccggagggaggggtacgagcttcaccgctttcatcccgcccgcgctcctccccagatctcgtctccattaaagccgaccttgcccagattcgcgccctcctcgctcatatctgaaagcggctctgattttccaagccgaccgcaggagcggtgcaccgggccgcgtgattccggcggcttgatttggaatttgtgatctttcggggcattcgtcggtttgtctgtcggtgacggtggtgctgcgtttcgagggcagcgaagatgggtgtcggcggagagaagttccagctggggacggtgggggcgctgagcctatccgtggtctcctccgtctccattgtcatctgcaacaaggccctcatgagctccctcggctttaacttcgccactaccttgacaagctggcatctgctggttacattctgctcccttcatgtggcattatggatgaaattctttgagcataagccttttgattcaagaactgtcatgggatttggagtacttaatggaatctccattgggctcctcaacttgagtcttggcttcaactctgttgggttttaccagatgactaagctggcgatcatcccgtgcactgtcatcttagagacacttttcttcaggaagaagttcagtcggagtatccagatgtccctttctgtgctccttcttggtgttggtgttgcaactgtcactgatctgcaactcaatgctgtgggatccatactctccttgctggcaattatcacgacttgcattgctcaaattatgacaaacactatccagaagaagttcaaggtctcatcgacccaactgctctaccagtcttgcccttatcaatcactgaccctgtttctcattggccccttccttgatggctttttgactaaccaaaacgtctttgcttttaattatacatcacaagttgtgtttttcattgtgttgtcatgcctgatatcggtctcagtgaacttcagcacttttcttgtgattggaaagacgtctcctgttacttaccaagtcctgggccatcttaaaacatgccttgttcttacctttggttatgttttgcttcatgacccatttagctggagaaacatacttgggatcctaattgcagtagttggaatggtcttatattcatacttctgcacagtggagacccagcataagaacactgaagtctccccacagcaggtgaaagaaagtgaggcagcccctttgatctcagactctttgagcaaagttgaaaatgggggcggtgttgttgatgacgagcctttgaaggtacccatgtggagctcaaagtattcgcgggagtgaaattttctcccgctagacggtggcatcatacaggattcagtttagtaggcagatagtagggttggaagccaacccagagtgtaatgaacatttgagttacattttttggccttttttagcgtcacgatctactactggtaaaagggtctgtttcttgggaggatcttaccttcaagattgccagatatacattgaaactagacggcagatattgtatgattgtatctggacatgttccacatcgtctaactgtaacttccaactggtacatggcatgcctatatccaaagatagatttctttttttttgtatcagaaagatccggtaagacttgcgcaaaatttgtagtactattggttcgagtttgtttctttcagttcatgttcactttaaaactttatcatgcaagttctgtatattacaagttcttgcatgcaaaggttttcctttatg

SEQ ID NO: 146421 - DNA, 1746 bp, Zea Mays
agtgccaaatggtatctgtccaaacttcaacggtcgttgattggtgccagtttgattgtgaatggtgaaacatgtgtgaccctggagctaacctgatttcggtgaaagcttcagaaaagctattctttgcttggttatttctctagccctcagcactcgagtttgacaccatccgacccacacgccggcagctctgtcccatccgataatgtgtcccgctccatgttgttttcttctttattattttgctcccctagctgttaatgtgggactgcttttacctgctgggtctctcgaagcgtctccactgtccggccattttatattcagcgtcgttgccgatgctaccgagccactaccttgacaagctggcatctgctggttacattctgctcccttcatgtggcattatggatgaaattctttgagcataagccttttgattcaagaactgtcatgggatttggagtacttaatggaatctccattgggctcctcaacttgagtcttggcttcaactctgttgggttttaccagatgactaagctggcgatcatcccgtgcactgtcatcttagagacacttttcttcaggaagaagttcagtcggagtatccagatgtccctttctgtgctccttcttggtgttggtgttgcaactgtcactgatctgcaactcaatgctgtgggatccatactctccttgctggcaattatcacgacttgcattgctcaaattatgacaaacactatccagaagaagttcaaggtctcatcgacccaactgctctaccagtcttgcccttatcaatcactgaccctgtttctcattggccccttccttgatggctttttgactaaccaaaacgtctttgcttttaattatacatcacaagttgtgtttttcattgtgttgtcatgcctgatatcggtctcagtgaacttcagcacttttcttgtgattggaaagacgtctcctgttacttaccaagtcctgggccatcttaaaacatgccttgttcttacctttggttatgttttgcttcatgacccatttagctggagaaacatacttgggatcctaattgcagtagttggaatggtcttatattcatacttctgcacagtggagacccagcataagaacactgaagtctccccacagcaggtgaaagaaagtgaggcagcccctttgatctcagactctttgagcaaagttgaaaatgggggcggtgttgttgatgacgagcctttgaaggtacccatgtggagctcaaagtattcgcgggagtgaaattttctcccgctagacggtggcatcatacaggattcagtttagtaggcagatagtagggttggaagccaacccagagtgtaatgaacatttgagttacattttttggccttttttagcgtcacgatctactactggtaaaagggtctgtttcttgggaggatcttaccttcaagattgccagatatacattgaaactagacggcagatattgtatgattgtatctggacatgttccacatcgtctaactgtaacttccaactggtacatggcatgcctatatccaaagatagatttctttttttttgtatcagaaagatccggtaagacttgcgcaaaatttgtagtactattggttcgagtttgtttctttcagttcatgttcactttaaaactttatcatgcaagttctgtatattacaagttcttgcatgcaaaggttttcctttatg

SEQ ID NO: 146422 - DNA, 1257 bp, Zea Mays
gataataattaatccacctaactgatgctgaaatgcctttatatctagatgactaagctggcgatcatcccgtgcactgtcatcttagagacacttttcttcaggaagaagttcagtcggagtatccagatgtccctttctgtgctccttcttggtgttggtgttgcaactgtcactgatctgcaactcaatgctgtgggatccatactctccttgctggcaattatcacgacttgcattgctcaaattatgacaaacactatccagaagaagttcaaggtctcatcgacccaactgctctaccagtcttgcccttatcaatcactgaccctgtttctcattggccccttccttgatggctttttgactaaccaaaacgtctttgcttttaattatacatcacaagttgtgtttttcattgtgttgtcatgcctgatatcggtctcagtgaacttcagcacttttcttgtgattggaaagacgtctcctgttacttaccaagtcctgggccatcttaaaacatgccttgttcttacctttggttatgttttgcttcatgacccatttagctggagaaacatacttgggatcctaattgcagtagttggaatggtcttatattcatacttctgcacagtggagacccagcataagaacactgaagtctccccacagcaggtgaaagaaagtgaggcagcccctttgatctcagactctttgagcaaagttgaaaatgggggcggtgttgttgatgacgagcctttgaaggtacccatgtggagctcaaagtattcgcgggagtgaaattttctcccgctagacggtggcatcatacaggattcagtttagtaggcagatagtagggttggaagccaacccagagtgtaatgaacatttgagttacattttttggccttttttagcgtcacgatctactactggtaaaagggtctgtttcttgggaggatcttaccttcaagattgccagatatacattgaaactagacggcagatattgtatgattgtatctggacatgttccacatcgtctaactgtaacttccaactggtacatggcatgcctatatccaaagatagatttctttttttttgtatcagaaagatccggtaagacttgcgcaaaatttgtagtactattggttcgagtttgtttctttcagttcatgttcactttaaaactttatcatgcaagttctgtatattacaagttcttgcatgcaaaggttttcctttatg

SEQ ID NO: 146423 - DNA, 426 bp, Zea Mays
acgcttacattttatgatacaaagacatcgcttatacaattgagatcaatctcatccaacgacttctttttgatacatagaatcgtcaaaccattaacctctcttgagtcattgttgaccttaaatagttcacaaaaatatttcaattttaaaaagcttctctctgtcgatgtaatcatcatgtgtatagtaaataatactcactctgtatcaaaatagaattcgttttgcttctctaatggattcatcatcatttgttgaatatagacataaaaatgaagaactaaaacaaatattgttttagaacagagggagtattcgataggtaattgagatattagtttaacaatctaaacgaagttgattgatagtgcgtcgctctttgtatatttatatctagggtaaataggtttaacgggaaaaggt

SEQ ID NO: 146424 - DNA, 741 bp, Zea Mays
tctcatgctgttttcagcgaacggcctgaccatgatgagctagggaagaagatcaagagggagtagtcaccggcggagcgcatggcggcggcggcacggaggagctgcagctcgccggcgggggctggtgctgttgcaggggccgcgatgaacataatcacgccgtgcgccgcgtgtaagctgctccggcgacggtgcgcgcaggagtgccccttctcgccctacttctcgccgctggagccgcacaagttcgccgccgtccacagggtcttcggcgccagcaacgtctccaagatgctcctggaggtgcacgagagccagcgcgccgacacggcgaacagcctggtgtacgaggcgaacctgcggctccgggaccccgtctacggctgcatgggcgccatcctcaccctgcagcagcaggtgcaagcgctggaggccgagctcgccaccgtcagggccgagatcgtcaggcacagctgccgtccggcggccgcggcggtggccacggtgctcccctcgtcgcacgcctcccatctcctcgcggcctcggccgccgccagccgcgggctgcacgctggcagcagcaagtcggtaggggcaagagcggcaactttggcggcggccgctgccgtggggcctgcggcctcctcgtcgtcgtcatcggcggtgtacgccgccgccgcgtcgagctcaacggactatagctccgtcaccaatgagaacgttccttattttggttga

SEQ ID NO: 146425 - DNA, 312 bp, Zea Mays
cgtgcggtcttgtgttacctgagcagcaagatcaagccgttgtacgtgaaggtgtcctggtggtacggcgagcgcctgcggctcggcggcgcggcgagcgagggcgaggagcccgacccgtccccggcgccgccgtcccagggtccttcgtcgttggccccggcgccgcagccggtggtggttgcctgcagcgtgcgagcgccccacgctgacgtgcccgcggggctgaggcaggtgtgcaagcagctcgggaagagtcggtcgggcttgcggcttgaactaattacaactagcatggtaacacaagctcct

SEQ ID NO: 146426 - DNA, 87 bp, Zea Mays
ccaagttcagcctcaggcgcaacaggaagctccgcctcgcccgaccccagggctcggccacaacctcggcctcggaaggaggactct

SEQ ID NO: 146427 - DNA, 700 bp, Zea Mays
atgcctagctcgggtttatcctgaggaaggatggtctctacctgcaagaatattttcattgggagcatggtgggatcttactgcaaagttccctataatgctattttcatccttaggaacacaaacaatactaaggatggaagtacttaaatcgggacttgggctaggaacaggtgatgttctacccaggttaattaaggattggatgcgtatgtaggtctgtatgatcaaggactatcttaactagccacatgccctggatatgggacatagtaagcttgaacccggctattccatacatgaaaagacaatcgcgcactgggagtggagagatagcgagagtggcacgtacctcctggcaaaggaccgcctaaaaggggtggtgtgctctcgggtggcgcggacctgttcatgcagtggaggatccatgggaatggtagacatatgcaagagttacgagaaacatatgtcgtgtggttagagatcctcagctgagtaaatcgattcagatcaccgttatatcctcggagagtggagacttgatcgctgccctacaacctaagtcaagatgtaaacattatgagtaaaaatgatgttgtattgatgagatggtgaaattagactaggtgcaaccagagtctattaatatttaatctggcgttaaaatattgaaagtaaggactcactttagtaagctatt

SEQ ID NO: 146428 - DNA, 603 bp, Zea Mays
atggggggtggcgacccccgcgaagccaaggtggaggagggagaggatccggactcgtcgagcgcgcgacggaggggcccgcgttcgggccggcggcgtcgcagcagaggcgcacgaagtcgcgcgtacggcactgcgccggcgccagactcccgaatccgcgtgagcgccgcctccatctgcgtggctcgcagcaccttgcgcgcctcctccaccgtgaggctcgctgcggacagcgccgcatccggctcccgcttggccggcgccagcgccggcgcgggcgacacgaggccgtcgaggttgatccgtgggaacgcgacgccgaccccgaggtcccggatccggtcggccaggggcatgaagcggtcgggcggcacggcggggcagaatgccggctgctcctgcaggaaccgccggagcccgaacgtcgtcggcgctcaaccgcacggcggcaaggagaaggcgaggcggtggcaggaccttgatgaccacgcggaggccgaagcgcgtgggccggcgcctcgggaggaacatggccgaggatcccccgccgccagtggaggagagggagggggacagagctcgcggaggttggcgaggtag

SEQ ID NO: 146429 - DNA, 216 bp, Zea Mays
caagtcagttttctagaggatcagaaaatctcccaggttgcatgcggattgaggcacactctggccctctccgagaagaaaaatgtcttctcctgggggaggggcactagcggacagctcggcaacggtgaaatagttgacaggtggttcttaccctgcgtgcgagctcagtgtctatgtcttcccccgccccttgctggaacacgcctgtgctga

SEQ ID NO: 146430 - DNA, 94 bp, Zea Mays
aacatcgcctgtgctgatcgatgccctgagctcagacggttctgcctgcaagaagctggagtcatccacggcagccccgttcgcaggtctggtt

SEQ ID NO: 146431 - DNA, 95 bp, Zea Mays
ggcacgtgtggcgttcgttggggaagaggaaggacttgttgaaggctgaggcagctagtccttcatcatcggagtcggataaagaacagtcggag

SEQ ID NO: 146432 - DNA, 246 bp, Zea Mays
atgggcgtcagtgcggagcccaaggagcaggcggcgtccgccgcagctctggcggtggaggacgaggcgggcgggaaggaggacaaggcggccgcggtgtcctgttcgatctgcctcgacgcggtgctcgccgcgttcggggagcggtccaccgccaggctgcactgtggccacgagttccatctaggtttcgtggatgaattttttgctattttagttggctccatatgtaggtactgtttgtga

SEQ ID NO: 146433 - DNA, 321 bp, Zea Mays
gcttgataacctttggtatgctaattttaagttctttccccagattgcattggatcagcatttaatgccaaagggggtatgcaatgccccaactgccgcaaaattgagaaagggaattggctttatgcaaatggtttccgacctgcacatgatgttagcatggatgagtgggcccatgatgaagacctttatgatgttagctactcagaaatgccatttcgcttccattggtgtccatttggtcgcttagctcaacttccatctttatttgagtatgttcttcttcagatgattattttttactattgtttagcattctgt

SEQ ID NO: 146434 - DNA, 121 bp, Zea Mays
cttttctatttcctatcttgtttcttttcttgtttaaattctaatttcaattttgaattcaaagttgagtttgtattagtggttacattatatgtttttgcaagggaggagcaactgctag

SEQ ID NO: 146435 - DNA, 3537 bp, Zea Mays
cagccagcgagcgccccctccggctccggccctcctcttcctcttcccccaattcccattcccaattcgccctcctcaaatccggcgccgcattcccgacattccgcagatctgggatccgccgccgacggatcccctgccgcccgcaacgacccgggacgcgcgtgatcccgccgcctagccgccaagttggcgcctcagcggaggtcgcagcgcctcgccggcggcggcgcgggctctgccgccgccgccgccgcgcagccgcccggagcctctagcgcgcacgctgcgacgggtgactcgggcgacgccgtcatggcgcgctggctgcagtccgcggggcttcagcacctcgcaacgtcctccgccgccggcgctggcggcgcggactaccgtggtgggatgcctgggtttgggggcgctggcgccggaagcatgctgtcgagcctgctcatgcagggctatgggccagaatcaattgaagaaaagcagaggctttatacgcttctgagaggtctaaattttagcggagagtctgtacccacatcaatctctgagccttacacaccaacagctcagagctttggtggtgggaaccctgtagaggggttttattcgcctgaacttagaggggatcttggtgctggacttctagaccttcatgctatggatgatactgggcttctgtctgaggatgtagcatcggaaccatttgagccatcaccttttatgccgaaggatattgatgatgatgatgaggatgtgatagcagggagtcagcaagcctcagtagataattatggtgtggtgaccagtgaaaaagagaccactgctagagaaaataatgtagcaaagattaaagtagtggtaaggaaaagacctttgaacagaaaggagctatctcgaaaggaagaagacatcataactgtggaggattcatcatttttgacagtttatgagcctaagctgaaggtggatctgacagcctatgtggagaagcatgaattttgttttgatgctgttttggacgaacatgtttccaatgatgaggtttaccgtgaaacagttgagcccataattccaattatatttcagagaacgaaagcaacatgttttgcttatggccaaacaggtagtggcaagacgtacacaatgcaacctttgcctctgagagctgcacaagacatggttcgtctattgcaccaacctgtctatcggaatcagaattttaagttgtggcttagctattttgaaatatatggtgggaaactatttgatcttctatctgacagaaggcaactactgatgagggaagatggcaagaaacaagtttgcattgttggtctacaggaatttgaggtgtctgatgtacagatcgtaaaggaatatattgaaagaggaaatgcagctagaagcacagggtcaacaggggccaatgaggaatcatcaaggtcacatgctattctacaactggctgtgaagaagcatatcattgtaaaagataccaggagacagagagatcgtgatgctaatgaagctaaaaatacaaaggctgtggggaaaatatcatttattgaccttgctggaagtgagcgtggtgctgatactaccgataatgatagacaaacaaggattgagggagcagagataaataaaagtctgttagctctcaaggaatgcattcgagcacttgataatgatcagatacacattcctttcagaggaagcaagcttactgaggtccttcgtgactcatttgttggtaactctaggacagtgatgatttcttgcatttctccaaacgcaggttcatgtgaacacacactaaatacattgagatacgctgatagggtcaaaagtctttccaagggcggaaatacaagaaaagagcagtccacaggaccaactaccacttctagccgggattctttgtcagctttatcatattcattgcctgctgaagctgaagaaattcctaatcaagttcaagagaagagaccagtcgatacttataggaagggcactgaaaattttatctccaacccttctgtggagtctgaccgaaattcctttagtacgattccaaattattccaatagagggagagaagaaaatggtgcagcatctggtaatgacagggagagctatgatttgaagtccagccaacctgcttacactagtaagccacagttggttcagaattcagcaaacacacaggaggaggagaaagtcacaaaagtctcacctcctcggagaaaggcttatagagaagacaaatctgataggcagagcaactatatgaaaaaggataatggtcctgagacaagtcgggttgggtataagatgcagcaggcaaagcagctgcaacagcaacaaagaccagcatctgcttcagcctcatcaaggcaatctgaaaaggaaagttcttgtgatgatgtagaaattgatgcaattcttgaggaagaggaggccctcattgcagttcacaggaaggagatcgagaatactatggagattgtgcgggaagagatgaaccttttggcagaggttgatcaaccaggcagcctgattgacaactacgtgacacaactgagctttctgctgtcacgcaaggctgcaggtttggtaagcctccaatcacacttggcacggtttcagcaccgcctcaaagagcaagagatccttagccgcaagaaaccttccagatagtatgctcaacaatggctctggattttgcctggaaatcttattgcttggagctcaatcgcagtctattagttggttttctcctgtgcgctccagtaaatgttagacccaagcaaagcagtgatagagaggacacatgggagttgcttgagggtgtggtgatcttgatgttgaggatggtgtggtcctggttgatgtctccactttgtgtttgtcagggttgacaaccagtttggtagtagtcctttttacagtggggctgcttgggtgtttttttttggcagatgtcatgtatggcttgcccactttgcctttttttttcttttccccattttgtacgagaaactggaatgtctggaatgttgtttgcagacaccggtgggtcgatattcaccgagggggtctgtggaaaccgatacattgttgtatactagtcggttgaccgtgcgttacaacggcttacaacaatatccacgtaaactattcataaaaaatttttaagattttttattgattgtctccgcgctctctgtataatatattttttgatttggctaactgatgttattgtttactccatgcaaatatatcttggtacaacacggccaataaagtgagcgattagaagagagttcacaatgattgactgaatgaacagagattataaaatgacataattccatcataaggagaccaaataagagagtttgtgagatcaagtttctaaaaaagtcccatgaagtcaaacttataaaaaagatagattaaaatatggagtgattgctaaagtcaggcatcaataaaaactggatgcgctccatataaattatg

SEQ ID NO: 146436 - DNA, 2915 bp, Zea Mays
ttcccattcccaattcgccctcctcaaatccggcgccgcattcccgacattccgcagatctgggatccgccgccgacggatcccctgccgcccgcaacgacccgggacgcgcgtgatcccgccgcctagccgccaagcggactaccgtggtgggatgcctgggtttgggggcgctggcgccggaagcatgctgtcgagcctgctcatgcagggctatgggccagaatcaattgaagaaaagcagaggctttatacgcttctgagaggtctaaattttagcggagagtctgtacccacatcaatctctgagccttacacaccaacagctcagagctttggtggtgggaaccctgtagaggggttttattcgcctgaacttagaggggatcttggtgctggacttctagaccttcatgctatggatgatactgggcttctgtctgaggatgtagcatcggaaccatttgagccatcaccttttatgccgaaggatattgatgatgatgatgaggatgtgatagcagggagtcagcaagcctcagtagataattatggtgtggtgaccagtgaaaaagagaccactgctagagaaaataatgtagcaaagattaaagtagtggtaaggaaaagacctttgaacagaaaggagctatctcgaaaggaagaagacatcataactgtggaggattcatcatttttgacagtttatgagcctaagctgaaggtggatctgacagcctatgtggagaagcatgaattttgttttgatgctgttttggacgaacatgtttccaatgatgaggtttaccgtgaaacagttgagcccataattccaattatatttcagagaacgaaagcaacatgttttgcttatggccaaacaggtagtggcaagacgtacacaatgcaacctttgcctctgagagctgcacaagacatggttcgtctattgcaccaacctgtctatcggaatcagaattttaagttgtggcttagctattttgaaatatatggtgggaaactatttgatcttctatctgacagaaggcaactactgatgagggaagatggcaagaaacaagtttgcattgttggtctacaggaatttgaggtgtctgatgtacagatcgtaaaggaatatattgaaagaggaaatgcagctagaagcacagggtcaacaggggccaatgaggaatcatcaaggtcacatgctattctacaactggctgtgaagaagcatatcattgtaaaagataccaggagacagagagatcgtgatgctaatgaagctaaaaatacaaaggctgtggggaaaatatcatttattgaccttgctggaagtgagcgtggtgctgatactaccgataatgatagacaaacaaggattgagggagcagagataaataaaagtctgttagctctcaaggaatgcattcgagcacttgataatgatcagatacacattcctttcagaggaagcaagcttactgaggtccttcgtgactcatttgttggtaactctaggacagtgatgatttcttgcatttctccaaacgcaggttcatgtgaacacacactaaatacattgagatacgctgatagggtcaaaagtctttccaagggcggaaatacaagaaaagagcagtccacaggaccaactaccacttctagccgggattctttgtcagctttatcatattcattgcctgctgaagctgaagaaattcctaatcaagttcaagagaagagaccagtcgatacttataggaagggcactgaaaattttatctccaacccttctgtggagtctgaccgaaattcctttagtacgattccaaattattccaatagagggagagaagaaaatggtgcagcatctggtaatgacagggagagctatgatttgaagtccagccaacctgcttacactagtaagccacagttggttcagaattcagcaaacacacaggaggaggagaaagtcacaaaagtctcacctcctcggagaaaggcttatagagaagacaaatctgataggcagagcaactatatgaaaaaggataatggtcctgagacaagtcgggttgggtataagatgcagcaggcaaagcagctgcaacagcaacaaagaccagcatctgcttcagcctcatcaaggcaatctgaaaaggaaagttcttgtgatgatgtagaaattgatgcaattcttgaggaagaggaggccctcattgcagttcacaggaaggagatcgagaatactatggagattgtgcgggaagagatgaaccttttggcagaggttgatcaaccaggcagcctgattgacaactacgtgacacaactgagctttctgctgtcacgcaaggctgcaggtttggtaagcctccaatcacacttggcacggtttcagcaccgcctcaaagagcaagagatccttagccgcaagaaaccttccagatagtatgctcaacaatggctctggattttgcctggaaatcttattgcttggagctcaatcgcagtctattagttggttttctcctgtgcgctccagtaaatgttagacccaagcaaagcagtgatagagaggacacatgggagttgcttgagggtgtggtgatcttgatgttgaggatggtgtggtcctggttgatgtctccactttgtgtttgtcagggttgacaaccagtttggtagtagtcctttttacagtggggctgcttgggtgtttttttttggcagatgtcatgtatggcttgcccactttgcctttttttttcttttccccattttgtacgagaaactggaatgtctggaatgttgtttgcagacaccggtgggtcgatattcaccgagggggtctgtggaaaccgatacattgttgtatactagtcggttgaccgtgcgttacaacg

SEQ ID NO: 146437 - DNA, 104 bp, Zea Mays
atcgaaagcacatcgattacggtcgaaaattatcaaatcgatatttcaaaaatgaaaaacatatcaaactatataacttcgctaatagcataatattatgatag

SEQ ID NO: 146438 - DNA, 282 bp, Zea Mays
aggaaaaccttctgcgaaggcaagactttggggatttcacagttttctttctctccccggacctcctctggcaaggggctagcatgctgttactgcaagaccagtgcattcttagtctacaaagatggaccggtgtaacacttgtactctaagaaggccctctctgaaacttttcttcctcttgtaaaatacgcttatcttgttggagcattggacaaaaaaatgtaaacaattagatcaatatgtattcaggtagaccagaaattagcgatgctttgtaac

SEQ ID NO: 146439 - DNA, 1168 bp, Zea Mays
aacgatttgctcggttcgtcgacgacaacctccatcttcacattccgtcctctctccctctccctctccctcttcctcctcactccccacccccctactccctctctcgtcatccgccacacgccgccaccgtctccgggcaggcaggaagcaaagcggtaagatgatgatgacgcgggccccgatgggaccgatggagggcgcggcggtggacgaggtggtgcgccgtctcgtggagggcggccgcggcggccgccaggtgcagctgtcagaggcggagatccggcagctctgcgtagacggaaagcgggtgctcctttcccagcccaacctcctccgaattcacgcccccgtcaagatctgcggtgatatccatggccagtttgttgatcttctgaggttgttcgatttgggtggttatcctccagcttcaacttatgtattccttggagactatgtcgatagaggcaaacagagcttggagactatatgcctgctgctggcatacaaaatcaggtatcccgaaaaaattttcctgttgagggggaaccatgaggatgcgaagatcaacagagtctatggtttctatgacgaatgtaagaggaggttcaatgttcggctgtggaagatattctcagattgcttcaactgcctgcctattgcagcgctcattgatgacaagatactgtgcatgcatggtggtctctcaccagaatggactagtttggatcagataaaggatattgagaggcctgctgagattcctgattatggtctcttgtgtgatctgctttggtctgatcctagtcctgatggagaagggtggggggagagtgacagaggtgtttcgtgtacgtttggtgcagataagctcgtagagtttttggagaagaacgatctcgaccttatatgccgagctcatcaggtagttgaagatggttatgagttttttgcacaacgaagattagtgacaatcttttcagctccaaattactgtggagagttcgataacgccggtgctctgttgagcatagatgagagcctaatgtgttcatttcagattctgaagccaactgatatgggtccaccacatgcaagaaaacaaattccaaataaggtaaatcagctaccttcacataggaatataggatcaatgttcagctataaa

SEQ ID NO: 146440 - DNA, 1564 bp, Zea Mays
aacgatttgctcggttcgtcgacgacaacctccatcttcacattccgtcctctctccctctccctctccctcttcctcctcactccccacccccctactccctctctcgtcatccgccacacgccgccaccgtctccgggcaggcaggaagcaaagcggtaagatgatgatgacgcgggccccgatgggaccgatggagggcgcggcggtggacgaggtggtgcgccgtctcgtggagggcggccgcggcggccgccaggtgcagctgtcagaggcggagatccggcagctctgcgtagacggaaagcgggtgctcctttcccagcccaacctcctccgaattcacgcccccgtcaagatctgcggtgatatccatggccagtttgttgatcttctgaggttgttcgatttgggtggttatcctccagcttcaacttatgtattccttggagactatgtcgatagaggcaaacagagcttggagactatatgcctgctgctggcatacaaaatcaggtatcccgaaaaaattttcctgttgagggggaaccatgaggatgcgaagatcaacagagtctatggtttctatgacgaatgtaagaggaggttcaatgttcggctgtggaagatattctcagattgcttcaactgcctgcctattgcagcgctcattgatgacaagatactgtgcatgcatggtggtctctcaccagaatggactagtttggatcagataaaggatattgagaggcctgctgagattcctgattatggtctcttgtgtgatctgctttggtctgatcctagtcctgatggagaagggtggggggagagtgacagaggtgtttcgtgtacgtttggtgcagataagctcgtagagtttttggagaagaacgatctcgaccttatatgccgagctcatcaggtagttgaagatggttatgagttttttgcacaacgaagattagtgacaatcttttcagctccaaattactgtggagagttcgataacgccggtgctctgttgagcatagatgagagcctaatgtgttcatttcagattctgaagccaactgatatgggtccaccacatgcaagaaaacaaattccaaataagccagcaagagggtgaagccttcgaccagcatccaatactttcagcatcatgatcgtcagtcagctcaaagggggtgatctgttgtttggatagttggatccaccaggacatggcattagactcagcgtcttggttggcggcttggctgtaaaggatattctgtacagcattaggttggattcagcgcaccatctgttctattgttcttcctgccggcacagtacctcattggcagcttgacatccagtagatgttagtagtctctatttgttttttcttagctgtgtcatgcattgttttttgagcgtaacttgatgtatggtgatttttgtaatctttgtaatatgtaaatgctgcaggaaataggtctgcacaaattctgtccatcagcagtaccattcttttctttttttgacttccagttcttttgtggatctgaaagatgtg

SEQ ID NO: 146441 - DNA, 649 bp, Zea Mays
ctgaagtcgaatcccctcacactataaagctcctccattgcgccgccgccactctcctttcggaggaggcggaccaggtaagcagcagcaggaaccctagcaccgccgcatccgcagccatgggtatcgacctcgttgccggtgggaggaacaagaagaccaagcgcacagcgccgaagtccgacgatgtttatctcaagctccttgtcaagctctaccgtttcttggtcaggaggaccaagagcaacttcaatgctgtcattctcaagaggctcttcatgagcaaaaccaatcgcccaccaatctccatgcgccgccttgtcaagttcatggaaggaaaggagatgacaagaggatccaagaggttccagcaatgaaggttactgccctgaggttcaccgagacggcaagggccaggattgtcaatgctggtggggagtgcctcacatttgaccagcttgctctccgtgctccacttggcgagaacacagtcctcttgaggggccccaagaatgcccgtgaggcggtgaggcacttcggcaaggctcctggagtgccgcacagccacaccaagccatatgtgcgctccaagggaaggaagttcgagaaggctcgtggcaggaggaacagccgtgggttcaaggtttaa

SEQ ID NO: 146442 - DNA, 638 bp, Zea Mays
ctgaagtcgaatcccctcacactataaagctcctccattgcgccgccgccactctcctttcggaggaggcggaccaggtaagcagcagcaggaaccctagcaccgccgcatccgcagccatgggtatcgacctcgttgccggtgggaggaacaagaagaccaagcgcacagcgccgaagtccgacgatgtttatctcaagctccttgtcaagctctaccgtttcttggtcaggaggaccaagagcaacttcaatgctgtcattctcaagaggctcttcatgagcaaaaccaatcgcccaccaatctccatgcgccgccttgtcaagttcatggaaggaaaggagaagaacattgctgtgattgttggcacagtcacagatgacaagaggatccaagaggttccagcaatgaaggttactgccctgaggttcaccaagccatatgtgcgctccaagggaaggaagttcgagaaggctcgtggcaggaggaacagccgtgggttcaaggtttaagaaagttgtgggccatcagcatagtaatcacttcctaccgagtagtagcacattttgttgccttggcttggattttgaaagatatttaaggattttcgtgccttgtctactggttactggttgagc

SEQ ID NO: 146443 - DNA, 1030 bp, Zea Mays
ctgaagtcgaatcccctcacactataaagctcctccattgcgccgccgccactctcctttcggaggaggcggaccaggtaagcagcagcaggaaccctagcaccgccgcatccgcagccatgggtatcgacctcgttgccggtgggaggaacaagaagaccaagcgcacagcgccgaagtccgacgatgtttatctcaagctccttgtcaagctctaccgtttcttggtcaggaggaccaagagcaacttcaatgctgtcattctcaagaggctcttcatgagcaaaaccaatcgcccaccaatctccatgcgccgccttgtcaagttcatggaaggaaaggagaagaacattgctgtgattgttggcacagtcacagatgacaagaggatccaagaggttccagcaatgaaggttactgccctgaggttcaccgagacggcaagggccaggattgtcaatgctggtggggagtgcctcacatttgaccagcttgctctccgtgctccacttggcgagaacacagtcctcttgaggggccccaagaatgcccgtgaggcggtgaggcacttcggcaaggctcctggagtgccgcacagccacaccaagccatatgtgcgctccaagggaaggaagttcgagaaggctcgtggcaggaggaacagccgtgggttcaaggtttaagaaagttgtgggccatcagcatagtaatcacttcctaccgagtagtagcacattttgttgccttggcttggattttgaaagatatttaaggattttcgtgccttgtctactggttactggttgagcaagaagacaatgttcttttgcacctctttttattggtcggcatattttgcgctgtgattggaactgtgttgtgttatctgctggatgtacttactgcatcacctagaaaggtggcttgggccatttggaatcataaaacgaaagttgctcgcttcaagctagaatacacgattcctcgaacccttgttttgagttacaaagtgaaaccacttttgttttga

SEQ ID NO: 146444 - DNA, 1394 bp, Zea Mays
ctgaagtcgaatcccctcacactataaagctcctccattgcgccgccgccactctcctttcggaggaggcggaccaggtaagcagcagcaggaaccctagcaccgccgcatccgcagccatgggtatcgacctcgttgccggtgggaggaacaagaagaccaagcgcacagcgccgaagtccgacgatgtttatctcaagctccttgtcaaggtacgcctcgtgtagtgtttttctgacttcccgagcgaggcggcgatgttggcttctgtagatcttctcgtggtcgcgttgtttggatctgaaaattctttgtgattcgtagtcttgtactgctacaataacaatagcattattttcgcgaggatttgcttgttgccctgatgtagtaatcctgtaagcttcactagcctgacgagattttctaataagaaaggattacttttctatgcatttgtttcatagatagatagatgaacaatacttgttttggtggtatctgcttaccctttatcaaaagtgtcatgtcgattttgattggtgtgtcatgattttgatgtgctatgctgggttgtagctctaccgtttcttggtcaggaggaccaagagcaacttcaatgctgtcattctcaagaggctcttcatgagcaaaaccaatcgcccaccaatctccatgcgccgccttgtcaagttcatggaaggaaaggagaagaacattgctgtgattgttggcacagtcacagatgacaagaggatccaagaggttccagcaatgaaggttactgccctgaggttcaccgagacggcaagggccaggattgtcaatgctggtggggagtgcctcacatttgaccagcttgctctccgtgctccacttggcgagaacacagtcctcttgaggggccccaagaatgcccgtgaggcggtgaggcacttcggcaaggctcctggagtgccgcacagccacaccaagccatatgtgcgctccaagggaaggaagttcgagaaggctcgtggcaggaggaacagccgtgggttcaaggtttaagaaagttgtgggccatcagcatagtaatcacttcctaccgagtagtagcacattttgttgccttggcttggattttgaaagatatttaaggattttcgtgccttgtctactggttactggttgagcaagaagacaatgttcttttgcacctctttttattggtcggcatattttgcgctgtgattggaactgtgttgtgttatctgctggatgtacttactgcatcacctagaaaggtggcttgggccatttggaatcataaaacgaaagttgctcgcttcaagctagaatacacgattcctcgaacccttgttttgagttacaaagtgaaaccacttttgttttga

SEQ ID NO: 146445 - DNA, 859 bp, Zea Mays
gggtatcgacctcgttgccggtgggaggaacaagaagaccaagcgaccgtttcttggtcaggaggaccaagagcaacttcaatgctgtcattctcaagaggctcttcatgagcaaaaccaatcgcccaccaatctccatgcgccgccttgtcaagttcatggaaggaaaggagaagaacattgctgtgattgttggcacagtcacagatgacaagaggatccaagaggttccagcaatgaaggttactgccctgaggttcaccgagacggcaagggccaggattgtcaatgctggtggggagtgcctcacatttgaccagcttgctctccgtgctccacttggcgagaacacagtcctcttgaggggccccaagaatgcccgtgaggcggtgaggcacttcggcaaggctcctggagtgccgcacagccacaccaagccatatgtgcgctccaagggaaggaagttcgagaaggctcgtggcaggaggaacagccgtgggttcaaggtttaagaaagttgtgggccatcagcatagtaatcacttcctaccgagtagtagcacattttgttgccttggcttggattttgaaagatatttaaggattttcgtgccttgtctactggttactggttgagcaagaagacaatgttcttttgcacctctttttattggtcggcatattttgcgctgtgattggaactgtgttgtgttatctgctggatgtacttactgcatcacctagaaaggtggcttgggccatttggaatcataaaacgaaagttgctcgcttcaagctagaatacacgattcctcgaacccttgttttgagttacaaagtgaaaccacttttgttttga

SEQ ID NO: 146446 - DNA, 874 bp, Zea Mays
gagtgctttgtcgtttactgttttcttatcaatctgcgtgattttatgtatctatttagtcatttgtgcaacgggcatagcctgatttgttctgcaacgatgataatatactaaaatcccagctcgatgtctgggatcattatgtttcctagcatctgagctagcttatgcattcttaatttaagcagcatttggaagaaaatgatgaattaggtttgtactaagaatgtacagtgcatcctgtcctgaaatgcgattattactagttgtcgtgtactgcaaatattaatttgcacttgagaaaggtagtcgaaactagccctatcctgctctacatgaactaatgttgtggccttaccacactgcaggtcctcttgaggggccccaagaatgcccgtgaggcggtgaggcacttcggcaaggctcctggagtgccgcacagccacaccaagccatatgtgcgctccaagggaaggaagttcgagaaggctcgtggcaggaggaacagccgtgggttcaaggtttaagaaagttgtgggccatcagcatagtaatcacttcctaccgagtagtagcacattttgttgccttggcttggattttgaaagatatttaaggattttcgtgccttgtctactggttactggttgagcaagaagacaatgttcttttgcacctctttttattggtcggcatattttgcgctgtgattggaactgtgttgtgttatctgctggatgtacttactgcatcacctagaaaggtggcttgggccatttggaatcataaaacgaaagttgctcgcttcaagctagaatacacgattcctcgaacccttgttttgagttacaaagtgaaaccacttttgttttga

SEQ ID NO: 146447 - DNA, 901 bp, Zea Mays
gaaggagaacagaagcaggagagcacaacgttacaaggacgcatcgaggagactacctacggccatggcgaggagaaggcttctcgcgctcgcctcccggctctacgggaggcctcaggcgacgcagccgtggcggcgacccccgccccggtttctctcctcagctgcgtccggcaccctcgatcacctgaagtcgccgcctttcgcgcgtccggctgcccggaaccccgcctcctatccatgggatcgattcggaggagggcagaagaggaccatgttcatccagacacagtcgaccccgaacccgcagtcactcatgttctatcctggaaagccagttatggagattgggagctctgatttccctaatgctcggactgcgatgacatcccctttggctaagtcgctttttgctattgatggagtaaccagggtattctttggatctgattttgtaactgttacaaaatcagaagaaacttcctgggattgcctcaaacctgaggtttttgctgcaataatggacttctactcatctgggcaaccactttttctggactcaaatgctgcagcttctatggacacagcaattcacgaggatgattctgaaatagttgccatgataaaagaattattggagactcgtattcgaccagctgttcaagatgacggcggtgacattgaataccgaggattcgacccgtgagtctttccctccctcccttcgtgtgtggtggtctgctgatatgaagaatttggtttccctgtctcactagaacactatcctttcagagaaacaggaacagttaagcttaaaatgcaaggtgcctgcagcggctgtccaagttcgtcagtcacattgaagtctgggatagaaaacatgcttatgcactatgtgcct

SEQ ID NO: 146448 - DNA, 1281 bp, Zea Mays
gaaggagaacagaagcaggagagcacaacgttacaaggacgcatcgaggagactacctacggccatggcgaggagaaggcttctcgcgctcgcctcccggctctacgggaggcctcaggcgacgcagccgtggcggcgacccccgccccggtttctctcctcagctgcgtccggcaccctcgatcacctgaagtcgccgcctttcgcgcgtccggctgcccggaaccccgcctcctatccatgggatcgattcggaggagggcagaagaggaccatgttcatccagacacagtcgaccccgaacccgcagtcactcatgttctatcctggaaagccagttatggagattgggagctctgatttccctaatgctcggactgcgatgacatcccctttggctaagtcgctttttgctattgatggagtaaccagggtattctttggatctgattttgtaactgttacaaaatcagaagaaacttcctgggattgcctcaaacctgaggtttttgctgcaataatggacttctactcatctgggcaaccactttttctggactcaaatgctgcagcttctatggacacagcaattcacgaggatgattctgaaatagttgccatgataaaagaattattggagactcgtattcgaccagctgttcaagatgacggcggtgacattgaataccgaggattcgacccagaaacaggaacagttaagcttaaaatgcaaggtgcctgcagcggctgtccaagttcgtcagtcacattgaagtctgggatagaaaacatgcttatgcactatgtgcctgaggtgaaaggagtagaacaggagttcgatggtgatgaggaagctgaagtggctggatagatcgagagagtttttacaggttttgagggtcaacacagcctgatgttatagcaacttcgcacgtacggtattgccgatcctgatgtatgcaggaggcaggcttagatagcagaggcgtcaatagtctgaaataacatccgttgcactagtatccgaataaagtgacagtgaattgattttttattttcattaaatttctgtgtatatgtgagttaaacacggcaatgagcagtaaaaacccgtgtacctgcggatactggacctggtggtgcggacatgggcgtcatcttgtgcccaccggcatgggtacagaattgtacccaacaggacgaaggtagacggtaaaaaaatagcaaacccgtatccatttaacctgccaaacccgcaatgacatgtggatattgcaaaat

SEQ ID NO: 146449 - DNA, 1305 bp, Zea Mays
gaaggagaacagaagcaggagagcacaacgttacaaggacgcatcgaggagactacctacggccatggcgaggagaaggcttctcgcgctcgcctcccggctctacgggaggcctcaggcgacgcagccgtggcggcgacccccgccccggtttctctcctcagctgcgtccggcaccctcgatcacctgaagtcgccgcctttcgcgcgtccggctgcccggaaccccgcctcctatccatgggatcgattcggaggagggcagaagaggaccatgttcatccagacacagtcgaccccgaacccgcagtcactcatgttctatcctggaaagccagttatggagattgggagctctgatttccctaatgctcggactgcgatgacatcccctttggctaagtcgctttttgctattgatggagtaaccagggtattctttggatctgattttgtaactgttacaaaatcagaagaaacttcctgggattgcctcaaacctgaggtttttgctgcaataatggacttctactcatctgggcaaccactttttctggactcaaatgctgcagcttctatggacacagcaattcacgaggatgattctgaaatagttgccatgataaaagaattattggagactcgtattcgaccagctgttcaagatgacggcggtgacattgaataccgaggattcgacccagaaacaggaacagttaagcttaaaatgcaaggtgcctgcagcggctgtccaagttcgtcagtcacattgaagtctgggatagaaaacatgcttatgcactatgtgcctgagtttgtcatgctacttttgaaacaggtgaaaggagtagaacaggagttcgatggtgatgaggaagctgaagtggctggatagatcgagagagtttttacaggttttgagggtcaacacagcctgatgttatagcaacttcgcacgtacggtattgccgatcctgatgtatgcaggaggcaggcttagatagcagaggcgtcaatagtctgaaataacatccgttgcactagtatccgaataaagtgacagtgaattgattttttattttcattaaatttctgtgtatatgtgagttaaacacggcaatgagcagtaaaaacccgtgtacctgcggatactggacctggtggtgcggacatgggcgtcatcttgtgcccaccggcatgggtacagaattgtacccaacaggacgaaggtagacggtaaaaaaatagcaaacccgtatccatttaacctgccaaacccgcaatgacatgtggatattgcaaaat

SEQ ID NO: 146450 - DNA, 1272 bp, Zea Mays
tcccaccaagttaggaaccataaatgtcacagaattaaccctggtatactgctgttctagataagcatgcaacaacttccagacaacggtggcaaatacaacagacaagacaagacgaaccacaaacctgtgtacatgttacacaatagaccaatgaagaagactcaagaaaccagaatgggactcccaaaaacccatttgacattgtcttataagttgcgccaatactcatgcaacatgttatacagcacaggaaccgctttgacaaaaaacgacacgttccctatctttcaaggttctttctaccaacaggtaaaacaatataattcatttatgctgtataggaggcaaaacccaactcccgacaacacccgcgactccatgcctgatgcctcccaccagaggtggtgctggtgggagcaagagcccaaatgatccaaccggctgaccttcaagactgaccaccgaccaagctgcaccactggtaatgcagcccaaggactgaccctgctgactgggactgacatgacaactccctgagaccagaccaatgggactcaaccatgacttggttgacgccgctaccccacacctctgactagcccagagcactagccaaggcataatggcacagcggccattccaaatgggcatctgcatccaaagttgaatccacctgatggaacagagggctggttcccaaagttgaagccattctggggattgtcgcctgagggcatggcatcatcttcctcctccagccagtaggattccagcatcttcacagccttctcatatatctcggtgttgtcatggctctgcaggttctcaatcttgtccaggccctcagcatcatcaatcatctgtgcatagacattgacatcacctgcaccaaggtttttctctgcctcgccaaccttcaggatgttctcgagaccctccaagcaaactgttacgattctgggatccgggcaaacaagcagatcacagagtggcttaatgcaaccctgggcaacaaggtacctacatttcatacagcagacaatgttatcaaatatacttataaatgaagcatactaataacacaagctaaaatgaatttaaaactagatatttgcatacttgatctgatcatgtgtgccaccagaagtggcatttgaaattgcccaggctgcttctttcttgatgtcaaattcagcagtttgcaggagttgcaccagaggtgcaattatatttgcattgatcacagcctgcaaccataatttgggaaga

SEQ ID NO: 146451 - DNA, 366 bp, Zea Mays
atggctgacagtagcgctgctcctgcggccgatgtcaacgtcgtcgagttgcacgctgctatcctccactgccgtgtgcaggaagatgatgatgacgcacgtcatcatgcatcagatgcggccaccactgtccaggccaattgggacgcaaccactcgccatcgacttcagaacgatgttgttccctctattgccatgccactctgcaccctaaccttggctccaatcatagcctggatctggtcctttgtgccccctaaggtatatttgaacatcactgggcactgcaccagtgctagcttcctgtatgtacatttgacaaacattataaccagaaattacagcaagtcaactacaatcaactaa

SEQ ID NO: 146452 - DNA, 222 bp, Zea Mays
ctgtaaaacgcgccctcagcccacatccatgtgggctgccccggccttcagggaacgcctcggcgattttgacgccaccaacatcggtgcagtttgtaattaaagcgcaagaatatccagaaatgaaaacgaatactctactgctccttatgcattccaccttttaattgcaactttactcgtccatccgctttcagtacgaatcaagctgattcatcaacg

SEQ ID NO: 146453 - DNA, 2403 bp, Zea Mays
gtaaattcttataatagcttacagggaaaagactcttcaatctgaagcaaaatgtaccgggaatgttgaagagcgggactcttaagcagtagtgagatgcggcggtggtggtcgccggcgttggcggctgtggagccgcggtccgtgcagctcctgctcctgggcgtcgctctcgtcgcagcttctttctacgccggcaccctcttcggctcctccgcgtcccctgcgctcgtactgcccccttcgcgcccccgatcgcccgattccttcagggccaaagatgttccagtgtttaccaacagagtttctcgtacgtaccgggcaaaatcagtgacagttccagatcacggagttgatgtgtgtcctttggaatacaatgagtatgtcccctgccatgatggagcctatataagcagcttgaagagcctggatacatctaggcatgtggatcttgaaagtatttgtcctccatgggagaagcggttgttttgtttggtgccccctccaaatgactacaagataccaataagatggccaacaagccgagactacgtatggcgtagtaatgtcaaccattcacatcttgctgaggtcaaaggaggacagaactgggtgcatgagaagggcaaactttggtggtttcctggaggtggcactcacttcaaacatggtgcatcagaatacatagagaggctaggaaatatgatgacaaatagtactggtgatcttcgttctgccggagtagttcaagttttggatgttggatgtggtgttgctagcttttctgcatatcttcttccgctagacattcgaaccatgtcatttgctccaaaagatggccatgagaatcaaatccagtttgctttagaacgtgggattggtgcaatgatctctgtgttggccacaaaacaattaccttatcctgaaaattcatttgaaatggttcactgttcaagatgtcgtgttgattggcatgaaaatgatggaatattactcaaagaggtagaccgtcttttgcgacctaatgggtattttgtatactctgctccaccagcttatagaaaagataaggactttcctgttatttgggagaagctagttaatattacaacaacaatgtgttggaagcttattgctaagcatgttcaaacagctatttgggttaaacctgaagatgagtcctgcagacagaaaaatgttgatatgaatctactgagtatttgtgaatccaatgacaacatttcaccatcatggaaaattccgttaatgaattgtgtgaagctcaacaaggacaaatccaatattcagaaattgccttccagatctgatcgcctatcattttattccaagagtttggagataataggagttgcaccagagaggtttgagaagaataaccagttctggaagaaccaggttcacaagtattggtcatttcttcatgttgaaaagactagcattcgaaacgtcatggacatgaatgctaattatggtggatttgctgcagcactaagcagtgaccctgtctggattatgaatatagtaccctataccatgatgaacacattgcctgttatctatgaccgtgggttactcggttcttaccatgactggtgtgagccattctcaacatatcctagatcctatgacttgttgcatgctttccacctcttttctcattataaacgccgcaaggaagattgtttgttggaggatatcatgttagaaatggatcgcatcattcgaccacagggttttatcattattagagacgagaatgacactctctcaagaatcatcaatctagcaccgaagttcctttgggatgttaccacgcacatgttggaaaatgaggaaagcgggacagatcaagttctgttttgcaggaagaaattctgggctattgtttgagttatacttgggtggaaattgggaagctgccatattttatcctacttttggttgccctttgtatcagtgacagagcagagcgtaaggagagctgtttggcatgatagatgttccaatgaaacataatatttcattgcacgttctctgcagttgacagtagtgcattgttgagaaggcatatggtacggtggtgcggttgacagggttatccagaaactagctcggataatttttgcttttgagctgtactatttgtctacgaaggacatgggtgagccggtaaggtgtagtcttactgacagtgtttgtagtttctctcataatgaatagccgttaattcttttgttatcttattcactaatggctgattaggtttaggttctcaagttctcaacaacatgttggtagtgctgtttctgttgttccatctggggagcatctgtagtactataaaccttatgtaaggtactgtttccagccaatgccgaggtg

SEQ ID NO: 146454 - DNA, 2463 bp, Zea Mays
gtaaattcttataatagcttacagggaaaagactcttcaatctgaagcaaaatgtaccgggaatgttgaagagcgggactcttaagcagtagtgagatgcggcggtggtggtcgccggcgttggcggctgtggagccgcggtccgtgcagctcctgctcctgggcgtcgctctcgtcgcagcttctttctacgccggcaccctcttcggctcctccgcgtcccctgcgctcgtactgcccccttcgcgcccccgatcgcccgattccttcagggccaaagttacagatgttccagtgtttaccaacagagtttctcgtacgtaccgggcaaaatcagtgacagttccagatcacggagttgatgtgtgtcctttggaatacaatgagtatgtcccctgccatgatggagcctatataagcagcttgaagagcctggatacatctaggcatgtggatcttgaaagtatttgtcctccatgggagaagcggttgttttgtttggtgccccctccaaatgactacaagataccaataagatggccaacaagccgagactacgtatggcgtagtaatgtcaaccattcacatcttgctgaggtcaaaggaggacagaactgggtgcatgagaagggcaaactttggtggtttcctggaggtggcactcacttcaaacatggtgcatcagaatacatagagaggctaggaaatatgatgacaaatagtactggtgatcttcgttctgccggagtagttcaagttttggatgttggatgtggtgttgctagcttttctgcatatcttcttccgctagacattcgaaccatgtcatttgctccaaaagatggccatgagaatcaaatccagtttgctttagaacgtgggattggtgcaatgatctctgtgttggccacaaaacaattaccttatcctgaaaattcatttgaaatggttcactgttcaagatgtcgtgttgattggcatgaaaatgatggaatattactcaaagaggtagaccgtcttttgcgacctaatgggtattttgtatactctgctccaccagcttatagaaaagataaggactttcctgttatttgggagaagctagttaatattacaacaacaatgtgttggaagcttattgctaagcatgttcaaacagctatttgggttaaacctgaagatgagtcctgcagacagaaaaatgttgatatgaatctactgagtatttgtgaatccaatgacaacatttcaccatcatggaaaattccgttaatgaattgtgtgaagctcaacaaggacaaatccaatattcagaaattgccttccagatctgatcgcctatcattttattccaagagtttggagataataggagttgcaccagagaggtttgagaagaataaccagttctggaagaaccaggttcacaagtattggtcatttcttcatgttgaaaagactagcattcgaaacgtcatggacatgaatgctaattatggtggatttgctgcagcactaagcagtgaccctgtctggattatgaatatagtaccctataccatgatgaacacattgcctgttatctatgaccgtgggttactcggttcttaccatgactggtgtgagccattctcaacatatcctagatcctatgacttgttgcatgctttccacctcttttctcattataaacgccgcaaggaagattgtttgttggaggatatcatgttagaaatggatcgcatcattcgaccacagggttttatcattattagagacgagaatgacactctctcaagaatcatcaatctagcaccgaagttcctttgggatgttaccacgcacatgttggaaaatgaggaaagcgggacagatcaagttctgttttgcaggaagaaattctgggctattgtttgagttatacttgggtggaaattgggaagctgccatattttatcctacttttggttgccctttgtatcagtgacagagcagagcgtaaggagagctgtttggcatgatagatgttccaatgaaacataatatttcattgcacgttctctgcagttgacagtagtgcattgttgagaaggcatatggtacggtggtgcggttgacagggttatccagaaactagctcggataatttttgcttttgagctgtactatttgtctacgaaggacatgggtgagccggtaaggtgtagtcttactgacagtgtttgtagtttctctcataatgaatagccgttaattcttttgttatcttattcactaatggctgattaggtttaggttctcaagttctcaacaacatgttggtagtgctgtttctgttgttccatctggggagcatctgtagtactataaaccttatgtaaggtactgtttccagccaatgccgaggtgcatttgttacattatttgttttttgttttgcttatacgttactctctttgttct

SEQ ID NO: 146455 - DNA, 109 bp, Zea Mays
atggcggtcgtcctcgtcaagccccaacaccagccgcccgatggccagtggcgtcctgtcgtagctgtaccaccagggcgtggaggtcgacgcgctggtgcgggtcgag

SEQ ID NO: 146456 - DNA, 371 bp, Zea Mays
ttctcttttttttcttttgtcttttcaatttcctgttctattttgcatttcaaattctaaattccaatctgagtttggtctagtaaatttatataaatgcaggttagagtgggccggttctgaggggttttgtttatctctttttttctttttcttttctaggctaaaaataccaaaagatggatgctggatgagaaccgactatctaattagtgggcaggtgctctcacagtctataaacaaatattctcgtttgatccatggtgcaacagaacggcttctcttaacgcagcaaagccactaacctctgatgttgcaccataagagcaaaatctatactgcgcgaagtttgacactctaatctttcgacg

SEQ ID NO: 146457 - DNA, 471 bp, Zea Mays
acacagtccttatggttcaccagagcagccaccaaccaaaactagcaaacccgagatgtcaccacggcacctcggtcgcaagtctaccaccacggtagcgcattctccaacacttaccatgctgctctggtctcatttccatccagtatcatcaagtatcaaggtataagataatcaacatagatcatgccatcaatgcatagtttctctcgttcactcaatatcaggtgtgtcatcttatgcaacaactatgtctagcaagttttatatattttctcacttaggagcaaccatgataaaagcaaggggtcgatgagacttgccttcgttcagttgcgtgtccgcggcgtcatgttcttcgtctcctggctcctccgggttctcttccggaactggctaccatggacacgtatgattaagcaagggctcctatacttcaacactacttttcttctaccttgcccttgaatg

SEQ ID NO: 146458 - DNA, 288 bp, Zea Mays
atgaaggcaaacatcagggaacgtttcttactagcaatcgaggcagtgtctagtccgaccacgcaacatggcgggtccgcggcggcacaacaccgatggaagtcccccattccctgggaccgaacccaagttctactggtggcaatgcgcttcagagagtatggaggaactatggggagaggactcaccaatcatggttctgtggcgcagccggttcacaacgatgaatttctctctcaccctacctacacggacggcaatggtgcaaggttggggcgcatcgtttag

SEQ ID NO: 146459 - DNA, 417 bp, Zea Mays
atgctcacgtgtctggccatccttggagataccagcctcaaaaccaccagtggtggagtcaatgataaggacagcacagtcagcctgggaggtaccagtgatcatgttcttgataaagtcacggtgtccaggggcatcaataacggtgcaatagtacttggtggtctcaaacttccacagagcaatatcaatggtgatacccctctcacgctcagccttgagcttgtcaagcacccaagcatacttgaaggatcgcttgttcatttcagcggcctccttctcaaacctctcgatcacacgcttgtcaatgcctccaagcttgtagatcaggtggccggtggttgtcgacttgccagagtcgacgtggccaataaccacaatgttgatgtgagacttctccttacccatggctggagg

SEQ ID NO: 146460 - DNA, 1813 bp, Zea Mays
tggctccgtttatgggccctgggccgccattcgggagtcaattatttggctggtccggcctacgccgaagcccttatataaagtctcgaaccctagaggccagcaccttcctccccaactcgccgtcgtcttctgcggttctgccgtctacgcctccaatttggcctctctcccttgcaagtttaagcttcaccttcaaccatgggtaaggagaagtcccacatcaacattgtggtcattggccacgtcgactctggcaagtcgaccaccaccggccacctgatctacaagcttggaggcattgacaagcgtgtaatagagaggtttgagaaggaggctgctgagatgaacaagcggtccttcaagtatgcttgggtgctcgacaagctcaaggctgagcgtgagaggggtatcaccattgatattgctctgtggaagtttgagaccaccaagtattactgcaccgtcattgatgcccctggacaccgtgacttcatcaagaacatgatcactggtacctcccaggctgactgtgctgtccttatcattgactccaccactggtggttttgaggctggtatctccaaggatggccagacccgtgagcatgctctccttgcgttcactcttggagtgaagcagatgatttgctgctgcaacaagatggatgcaacgactcccaaatactccaaggcgcgttatgatgagattgtgaaggaagtctcatcctacctcaagaaagttgggtacaaccctgataagattgcctttgtccccatctctggttttgagggcgacaacatgattgagaggtccaccaaccttgactggtacaaaggcccgaccctgcttgaggctcttgaccagatcaccgagcccaagagaccttcggacaagcccctgcgtctccccctgcaggatgtgtacaagattggtggtattggaactgtaccggttggtcgtgtggagactggtgtcatcaagcctggtatggttgtcaccttcggtccaactggcctgactactgaggtgaagtctgttgagatgcaccacgaggctcttcaggaggcccttcctggtgacaatgttggcttcaacgtgaagaacgttgctgtgaaggatctcaagcgtggttttgtggcctcaaactccaaggatgaccctgccaaggaggctgccagcttcacgtcccaggtcatcatcatgaaccaccctggccagatcggtaacggctatgccccagtgctggactgccatacctcccatattgctgtcaagtttgctgagctgattaccaagatcgacaggcgttctggcaaggagcttgagaaagagcccaagttcttgaagaacggcgatgctggtatggtgaagatgattcccaccaagcccatggtggtggagacattctcgcagtatcctccccttggtaggtttgctgtccgcgacatgaggcagacagttgctgttggagtcatcaagagtgtggagaagaaggacccgaccggcgccaaggttaccaaggcagctgccaaaaagaaatgatgcaacctgtcgttaatcctgtatctgcttttgcaatacctgacttgtcactccatcccgaagttttgtatgcggttgttactgttattgtgtactgttaagctctgctgcggcgtgccctgttgtttgggtagcgtcaacgtcgagcgccacttgcgggtgtgcctttgtctgctatcagtagcggcaaaaattgaaagctctcgagacttatgtcccttttgggcgccgttgaactgattattttaaagtctgcccacatttttct

SEQ ID NO: 146461 - DNA, 1795 bp, Zea Mays
tggctccgtttatgggccctgggccgccattcgggagtcaattatttggctggtccggcctacgccgaagcccttatataaagtctcgaaccctagaggccagcaccttcctccccaactcgccgtcgtcttctgcggttctgccgtctacgcctccaatttggcctctctcccttgcaagccatgggtaaggagaagtcccacatcaacattgtggtcattggccacgtcgactctggcaagtcgaccaccaccggccacctgatctacaagcttggaggcattgacaagcgtgtaatagagaggtttgagaaggaggctgctgagatgaacaagcggtccttcaagtatgcttgggtgctcgacaagctcaaggctgagcgtgagaggggtatcaccattgatattgctctgtggaagtttgagaccaccaagtattactgcaccgtcattgatgcccctggacaccgtgacttcatcaagaacatgatcactggtacctcccaggctgactgtgctgtccttatcattgactccaccactggtggttttgaggctggtatctccaaggatggccagacccgtgagcatgctctccttgcgttcactcttggagtgaagcagatgatttgctgctgcaacaagatggatgcaacgactcccaaatactccaaggcgcgttatgatgagattgtgaaggaagtctcatcctacctcaagaaagttgggtacaaccctgataagattgcctttgtccccatctctggttttgagggcgacaacatgattgagaggtccaccaaccttgactggtacaaaggcccgaccctgcttgaggctcttgaccagatcaccgagcccaagagaccttcggacaagcccctgcgtctccccctgcaggatgtgtacaagattggtggtattggaactgtaccggttggtcgtgtggagactggtgtcatcaagcctggtatggttgtcaccttcggtccaactggcctgactactgaggtgaagtctgttgagatgcaccacgaggctcttcaggaggcccttcctggtgacaatgttggcttcaacgtgaagaacgttgctgtgaaggatctcaagcgtggttttgtggcctcaaactccaaggatgaccctgccaaggaggctgccagcttcacgtcccaggtcatcatcatgaaccaccctggccagatcggtaacggctatgccccagtgctggactgccatacctcccatattgctgtcaagtttgctgagctgattaccaagatcgacaggcgttctggcaaggagcttgagaaagagcccaagttcttgaagaacggcgatgctggtatggtgaagatgattcccaccaagcccatggtggtggagacattctcgcagtatcctccccttggtaggtttgctgtccgcgacatgaggcagacagttgctgttggagtcatcaagagtgtggagaagaaggacccgaccggcgccaaggttaccaaggcagctgccaaaaagaaatgatgcaacctgtcgttaatcctgtatctgcttttgcaatacctgacttgtcactccatcccgaagttttgtatgcggttgttactgttattgtgtactgttaagctctgctgcggcgtgccctgttgtttgggtagcgtcaacgtcgagcgccacttgcgggtgtgcctttgtctgctatcagtagcggcaaaaattgaaagctctcgagacttatgtcccttttgggcgccgttgaactgattattttaaagtctgcccacatttttct

SEQ ID NO: 146462 - DNA, 1524 bp, Zea Mays
tgcttgatgcgatagcgattggatcaaatttaagcttcaccttcaaccatgggtaaggagaagtcccacatcaacattgtggtcattggccacgtcgactctggcaagtcgaccaccaccggccacctgatctacaagcttggaggcattgacaagcgtgtaatagagaggtttgagaaggaggctgctgagatgaacaagcggtccttcaagtatgcttgggtgctcgacaagctcaaggctgagcgtgagaggggtatcaccattgatattgctctgtggaagtttgagaccaccaagtattactgcaccgtcattgatgcccctggacaccgtgacttcatcaagaacatgatcactggtacctcccaggctgactgtgctgtccttatcattgactccaccactggtggttttgaggctggtatctccaaggatggccagacccgtgagcatgctctccttgcgttcactcttggagtgaagcagatgatttgctgctgcaacaagatggatgcaacgactcccaaatactccaaggcgcgttatgatgagattgtgaaggaagtctcatcctacctcaagaaagttgggtacaaccctgataagattgcctttgtccccatctctggttttgagggcgacaacatgattgagaggtccaccaaccttgactggtacaaaggcccgaccctgcttgaggctcttgaccagatcaccgagcccaagagaccttcggacaagcccctgcgtctccccctgcaggatgtgtacaagattggtggtattggaactgtaccggttggtcgtgtggagactggtgtcatcaagcctggtatggttgtcaccttcggtccaactggcctgactactgaggtgaagtctgttgagatgcaccacgaggctcttcaggaggcccttcctggtgacaatgttggcttcaacgtgaagaacgttgctgtgaaggatctcaagcgtggttttgtggcctcaaactccaaggatgaccctgccaaggaggctgccagcttcacgtcccaggtcatcatcatgaaccaccctggccagatcggtaacggctatgccccagtgctggactgccatacctcccatattgctgtcaagtttgctgagctgattaccaagatcgacaggcgttctggcaaggagcttgagaaagagcccaagttcttgaagaacggcgatgctggtatggtgaagatgattcccaccaagcccatggtggtggagacattctcgcagtatcctccccttggtaggtttgctgtccgcgacatgaggcagacagttgctgttggagtcatcaagagtgtggagaagaaggacccgaccggcgccaaggttaccaaggcagctgccaaaaagaaatgatgcaacctgtcgttaatcctttttgtatgcggttgttactgttattgtgtactgttaagctctgctgcggcgtgccctgttgtttgggtagcgtcaacgtcgagcgccacttgcgggtgtgcctttgtctgc

SEQ ID NO: 146463 - DNA, 741 bp, Zea Mays
tggagaagaaggacccgaccggcgccaaggttaccaaggcagctgccaaaaagaaatgatgcaacctgtcgttaatcctgtatctgcttttgcaatacctgacttgtcactccatcccgaagttttgtatgcggttgttactgttattgtgtactgttaagctctgctgcggcgtgccctgttgtttgggtagcgtcaacgtcgagcgccacttgcgggtgtgcctttgtctgctatcagtagcggcaaaaattgaaagctctcgagacttatgtcccttttgggcgccgttgaactgattattttaaagtctgcccacatttttctacgataggttcactcgtgaggatagagcgacagaagtatgaaaatagaataaggtagcagcgagacgagcatcccttatgcaactcctgaaacgcacgatgtgtattttgcacgctgtgtattttgaaatatgaagttagatgagtgggatagagtcgtctgcagataatcgtagtccatttctagcatataatcctagtctatttctagcagaccgtgcaaaatactgttttgcattttagattgcactgtttgcagagtattgaaataaagagtcagatatgaagtggattagggagtctggagatagtctaatccgagttttgttccaaaacagctgcgtgatgtggtgtggatgtgttgtaacacatgctttctcctaatgtgttgtgtaacgggacgctgtttacagct

SEQ ID NO: 146464 - DNA, 444 bp, Zea Mays
atgtaccaggtagtttgtcttccttctttaaagcattgtttccatgttcggttactgcagaacattgtatcagtgaccatagtttctacactatccctgtccggtgctgttccaactaaaccattgacatggaatttaatcaaagtttggttgcctgtgaatatcatctttgttggaatgctgatcacaagcatgtttagtttgaagtacattaatgttgccatgctgactatattgaagaatgtcgccaatgtcctgactgcttctggggaaacttattttttcaagaagcagcatggtactcaagtttgggttgctcttatgttgatgagcccctcggagaaaactgaaaaggaggattgccagctaccatccaacccgaaagaggtggaggcgctgagaaaaggatacagcttgcaaccctttgatagcgttcacatttga

SEQ ID NO: 146465 - DNA, 1710 bp, Zea Mays
atggcggaggacggctgcgacagggaccagcagcagcagcagccggcggccgccgcggcgtcaggtggcgccggggtcgaggggcgcagcagggagagcgtcaagctcttcgtggggcaggtgcccaaacagatgtcggaggccgagctggtcgccatgttccgcggcgtcgccctcgtcgacgaggtcacggtcatccgcgacagggccaccagggtctcgcgaggctgctgcttcctgatatgtccatcaagggaggaggctgacaaggctgtgactgcataccacaacaagcgcacactacctggggcctcaagtcccttgcaagtaaaatatgctgatggggagttggaaagattagagcacaagctctttgttggaatgctaccaaaaaatgtaacagatgctgaaatgatagatttattttcaaaatatgggaatatcaaggatttgcagattttgagaggttctcaacaaacgagcaaagctggctgtgcctttctaaaatatgaaacaaaagagcaagctgtggctgctatagaagctctaaatggaacacacaaaatagagtttcgaatgaaagatgcttaccgtgattgcaatttgcaaacatcacctatcagccacacattggatggtacttccagtttacatatcattgtgctgggttcaagtgttcccttggttgtcaaatgggctgacactgaaaaggaaaggcaagctcgaaaagcgcaaaaatctccattccagtcttctaacatgttgaatgcaaatgctatgcggcagaattcagtgtttggagctctacagatgggatatgtgccgcagtacaatggatttggctaccagccacaaggaacctacgggcttatgcaatacccacctctatctcctgtgcaaaatcaagctgccttccagaatatggtccagcctattaatcaagcaagctcgacccgtggagctaattctgaacttccccctgatttagttcctagatcatttaattccacacagttgggaagcccctattcgcctctgcctggcttgcagtatcctggagtgtatcctggtggccctattaatcatcgccccttttcaaattctcacagttcaaccaaagttcaaaatttaaatgctaatttaccgtcttcaagtcccagcagcaatcctgccccccagatagagggccctcctggagccaatttgttcatatatcacattccacaagaatttggtgaccatgatcttgcaaatgcatttcatagttttggtagagtactgagtgctaaagtttttgtagacaaggcaactggtgttagtaaatgctttggtttcgtaagctacgattctccagcttctgcacaagcagccattagtgtgatgaatggataccaattaggtggtaaaaagttgaaagttcaactcaagagagacaacagcaagcacagtaaacctttctgacacagcgaattcattgtatgctcacatgatcaggaaaatcggtacatactatgtttcacaattgattattacattgtttcctctggctcttgtatctttgttcaattcacatccttgaaaactgtcacatcgtgtatttttatcgcagcatagttgtagcatttgtaccattagatcttgtacatcagacattaattcattcaattctttatttttaattttcatcatgaatcattttattgtaaataa

SEQ ID NO: 146466 - DNA, 3201 bp, Zea Mays
tcgggtcccctcaaatcaatcgatcacacgcgtcccgccccattcggccattcccagccttcgagaggtcgccgccgccggtcgctgctccgccgactcggggatgccaccggcggtagcgcccgcctcgccgcgccaagaccctagcggctccagtctttccgccgcagccgccgcggcttccatggcgaacccggtcctagggcttggcctcgcgccaccgggcgctgagccctccgccggaacgccaccgtcttcacgccgcgcgccgcgcttggccaagcggcgccacgcgcccgcctcctcccgtttccgcgcggcgcaggcctcagtcggaacatggaacccgtttggcggcggcggcggtacggatggacagactcgaggttttgtgtttggtgctgcttccccagtgagccagcagccttcggagccagcagtggagatatcttcatccagtgaggcgcccttcgtgtttcagagtgtgagggagaaccttcctcggtttgaggagggattgtctggttcatcaatgctccctgataagatggggaagctgaacctgcgcacatcaggtgaggttggcgatggtctcggtcaggggagggatcgaaaggatggaagttcagcatttggtgttgatatatctggtttgttttctaacaaggaagataatgggctccaggagaagcttacacagttgaatttaggccacagagaacccttgcaaagtgagaagagggatagtgctaatggtgtgccacaagcatttgtgtttggatgtaatggagctgggagttttgctgattgtaagaacacagttgcctctggtgcacagtcagatgatcctagttcagtttgtggcactgatgcaaaagctatggctgggaagtcgacgcaattcaatataggcagtcaagcaccttcctggggtggagggattgagggtactaatggagcaccagaagctttcacgtttcaaagtaccgcagtaagtggtcatgtggataatataaacaatgttgtctccggtgccaataccagtgccaatacaagttcgtccactgttgctaaaggtgtgggtgatgtagatttgcttccagaaaagttaacacggttgaatataggaagtgacatgcccttgcatgagtcgaaaagtggttatcagcccaaagtgtttagagcagtccaagggacaatttttggaaatgaaacaagcagcacatcagataggagcagtgaattcctctctgcaaatagcaatacttctagttcaagcagtgatttgttctctacagcaaatagcaacacttctaattcagctaatggcacttactgttttcctccagagaagacaccagatttgaatgcaggagagggagtcatgtcggagagcttggaaagtgatagttctaactgtccaccacaaacctttttatttgaaagaaatgaaacccgaagctctgtttcacactctgcaagcatagccatggatgacggtggcaattttgtcaatcacaaaaatactgacacctgtagttcagctcgtggtacatttgattatgcaggtgctctcccagagaagatgacgaaattaaatataggatgcagaaattcataccatagcaggaaagatgaaactgctactgaaccaccagaagtatttgtatttgggtgtaatgtttctagcttttcttctacccatactgcaagtaaatcacatgatcccacgactcctgaattttgttttcaaagtaaagcagaggcaacttcaggatatggggctgttccccaaaccaaagttcaggagtcatacttgtttacgactttgaataattcttgtagtccctctacttttgagaatgcagttcctgctttcagttttgggacaatggatgcagaaatagaaactgctccagatgatcatttttctgtcaaacaggatttgcctgggttttccagggagaccttatttggtttagacagtataaaatctgcatacaaggacaaaagggaagcacacaaaggcaaaatgaaaaataaaaggccaactaggctaaagcaacatgctcagctccatcaggttatttctaaggaagcctgtaacgatggaaaatcatcagatttagcaggtgactattcaccaatggattgttcgccatatcctgcagaagctgaacatgtgccaacagaggcatatgtggcttctggtcagcccgttcacattggtgatagtgttatctcaaactggaacaccagctgtgctgaagatgatgtagtttctgcaaccgagcacttgattattgatgtaaacctaccaatgtttggagatgaaggtagaggaccgaaactagatgcatctgagagcaattttggtagcagcttttctagttttcaaggagatcaaagtaatggaccacagcattctttcactaatattgggcaagactgtaacgataatacctacagaactccccatgattttgttgagcctcctgcttttcaatcaagctcatcaaatttcagtgggctgaactttagattcggtgtgtcatcctctccacaaatctctgcagcagcacaaagacgtaacacaagaaggaagttaagaacaaagggcagtctggcatcgaaaccttcaactatcggctcttttgaacagtcaaaatcttcacaagatactaagggcatgcggtttttctgtgaaacaagcaaaaatgaagacccagtgaaagagcaaccgtcaagaaagtcttctacttctgcggccttggaggcttgtgaaacctggcgtactagtggaaataaagcctatgaaaatgggcactttgctactgcagaggattattatacccgtggaataaactctgttacccactatggtgtttctggacattgttctcgcgcattgatgctgtgttacagcaaccgtgcagctacaagaatgtcgcttggcatgatgtgggaagcacttcaagattgtttgactgctacatcaattgaccccacctttcttaaagctaaagttagagctgccaattgccatcttgcattgggcgatcttgaagatgcattaaaggagttacatggcctgtttgaacagtaacactgggagttcttctgaccctaaaaatattagccgaggcttctgatggcctggaaagagtcaaggtatcttgtttttttgctagagctgacctt

SEQ ID NO: 146467 - DNA, 942 bp, Zea Mays
atggagttatcctgtgcaatcaagcagattggtttgattcagagagtgatcgattgggtatccctgtgcaaggaacttattgagaaaaaaacatctcctgaagcaacaaaagccttagaattgatctccaatgcattgcacatatgtccatattcagacagcctcaaggagatgaaggcagaggcattgctgatgctacgaagatacgaagaagtgattcaactatgtcaggagtctgtaaatccgactgaaagaaagccagctttattcaaagataatggagaaccaaagaattccagtctctttgaacaaacacacttctctggaaggtattggcggccctatctcatttgcaagtcttatttcctttcaggcaagctggatgaggctgtcgaattattaaagaaacatgagcaagtcacacctgtcaaagaaagtgacgtgaacacatatcaagaaaatttctcatcattgtcagcgattataagagaactactttcccttaaggctgctggaaatgaatcatttcaagctggtagatattcagatgctgtcaaacagtattcagcagctttggcatgtaatagtgaatcgcgcgcattttcagctgtctgtttttgcaatcgcgcagctgcgtatcaagcactcggtcaagttactgatgcaatagctgattgttcacttgccatggttcttgatacaaattaccccaaggcaatttcaagacgagccaccttatacgagatgataagggattatggacatgctgctaatgatttaaggaagctaatctcacttcttgaaaagaaagtcaatgtgtctggaatatcaccaaaagcttttaacaagcataaagatatcaagcaagcacatgcgaggctttcacacatacatgctgaagcaaaaaacgatacccccctgaatttgtatttaatcttgtaa

SEQ ID NO: 146468 - DNA, 1515 bp, Zea Mays
atgaggagtggttgtgatgcacaaatacaatcttggtctgagttccaaaagtttgtagaaagaagtatctctgtgacctttcctgcttctgtgcttgatagcttggacctagtccaatcatcactaacaaaggcatctcatgcctttctcttaggatctttagctggatcatatggctactggtttcctgactccccttgtggcctcctgcagattgatgagagggcgggggagggtgagcagaggctgggcaagcttgctgtgagggtgggaaagggggagcaggactcaccagaggggcgacgcaagttgctgggagtggagccatcctgctcttcagcagatattaagaaggcataccggaaagctgcattgagacatcacccagacaaggctgctcaattattagtaaggaacgagaatgctgaagatggattttggagggatgttatcaaggaagtctatgcagatgcggatcatctgttcaaaacaattggggaggcatataatgttctttctgacccggacaagcgtcaagagtacgactttgaagagaatctaagaaatgctcggagagtatcgagttcaaggagcatgcgtaggtcacctgaacataactacagcgacagaggctttaatccacggcagtggcagtcaagcagagcatcacgttggtacagcaaatcagacgattactggtaaagaaggcactacggcgtggtcatgtggtgagaagcaacttttgcaactatgtcatgtgtggagcaaatgcctccttgcaccaaagatgggatgggatgcacctgccttcccttaggtgccggtgctaatgcaccagccttgcagtcagcagctttcctgtttgtttgctgcgtttctttttcagaggatggaaatattaggattgatcaattggggatctgggatgattgcttgacactggtagcgtcgtgacttgactagcacaggaaatatggaggattaggaagtggtatatcaaatagtcttttgttggcctggtgatgtctgaacactgactgcttgggagtggctggcatgatggtatctgctctgaagtcaaaacactgagaacaacatcaaaggttagaaatctgggtaaagatgtcagtttgtccaataggtacaggcattcttttgctgaatgcatggcccgctgtcgtaagtttacagcagatcagctgaaagaaaaagagacaggctcttctgtttggcgcgtgcgcgtgcagttttgttctgttgtttccttattaccaaatgatgtagcgttggaaagagtgggtacatattgtgactgcccaatgttgaaatctcgtaacatttatttattctttattactagacttgttagcctaatgttggaagcattttgagataatcaaggttccttcaaagcaagaagaggatctggttatggtaccgtttcgtttgtaaccatggtaccgtggagattcttttgattcgattctcgattgtgctagttcaaagttcttagtg

SEQ ID NO: 146469 - DNA, 1849 bp, Zea Mays
aggctcgtgcaccatttcccctggttcccctcaatccaaatagtgccgtcccggcgtcccccccatcggctacctttcctcatcccacgcgacgcccatgccagccacacctgttcgaccacctgacccgcgcgcgccctgatggctcccgcgctcacctccaacccgccctccttccgtcccctcacgtccccactccgccgtcgtgccgccaccgtcccatgccgcgtcggtaagcccggcaaggactcctccgctgcggatgacgctaccggccccaacaagaggcccaacctcttcgcggacttcgggaatgccaagtcgctcatacaggcgttcccgtcgcagtcgctgttcgcgggcggtggcaggggcaggaaggacccgcagacggtgttcgtcgcaggcgccacagggcaggccggggtccgcatcgcgcagaccctgctgcggcaggggtttgccgtgcgcgctggtgtcccggacctagcgtcggcgcaggagctagcgcggctggcggcggcataccggctcatctcccccgcggaagcgcggcggctgaacgcggtagaggcgggcttcggtgaccccgacgcgatagccaagtccatcggccccgccgcgaaggtggtggtcaccgtcggctcggccgagaaagggccagaaggcggaggcgtcaccaccgacgacgcgctccgagtggtgcgggccgcagatctcgccagcgtggcgcacgtggttgtcgtgtatgacgagggggcggccagcggcggccttggcggcgggggctccacttacaatgtgctcgacggcttcacgtccttcttctccaacctcttctcgcgagagcagcaggcgctgacgctgagccagttcttggccaaggtggcggagaccgatgtcaggtatacactggtgaaggcttcactcaccgacgactatacccctgagagctactacgcccagctggtactcacgaaggagggagtatcgcctagcgacacaggcaaagtgtcaaggtcacagattgcagcccttgtagctgatgtcttctccaatgtggcagtcgctgagaacaaagtcgtcgaagtttcaacttcctcgtcagcaacagcaaagaacatagccgaggctttcacagctatccctgaagacagaagaagaacagagtacctagaagctgctgcgaaagcacaagccgaagaggaaacgttggcctcagaacgagctaataaaaaagccgaagcggctgccagtaaatctgaagccgacacgaagacgacaccttcagaggaggcagctgctactcctagcgcggtgaacggggctcaggcctctctagagaacctcttgagtagagccaaagtgatcagtgcggatttctcgtgggagaagttcagcacacagtttgccgacgtgacgacccctctaacctcatcactagagaaggaacccaacaaggcacagatagccactgtgcgaggccaggaaaaagcgaagaagctggcaccgcggattgctgttgtgaagccagcagcgcagaaggcgaagcagccggatcccaaaccagaagtgagagcactgtttggtggcctcttcaaacaagaaacggtgtatgtggatgatgactaaaacgaggagcgccaatttatcctctacgtgattttctttcttttgttttttttgtttgtccagtgccttggtgtactcttgaaataggaacgcttaaagttgtacaaaaattggctatatataagaaccaatgatcatgtgttacagaagattgtcgatacattgacgagagtcaagtgttgccggacggaatacaggagaggagcgacagatgcag

SEQ ID NO: 146470 - DNA, 865 bp, Zea Mays
ttatgcccgtgccgtggtactttatttttatttatatccgtggtacttgttactcaattggcacttaaaattggtgatatttttcttattttctaggtcgtcgaagtttcaacttcctcgtcagcaacagcaaagaacatagccgaggctttcacagctatccctgaagacagaagaagaacagagtacctagaagctgctgcgaaagcacaagccgaagaggaaacgttggcctcagaacgagctaataaaaaagccgaagcggctgccagtaaatctgaagccgacacgaagacgacaccttcagaggaggcagctgctactcctagcgcggtgaacggggctcaggcctctctagagaacctcttgagtagagccaaagtgatcagtgcggatttctcgtgggagaagttcagcacacagtttgccgacgtgacgacccctctaacctcatcactagagaaggaacccaacaaggcacagatagccactgtgcgaggccaggaaaaagcgaagaagctggcaccgcggattgctgttgtgaagccagcagcgcagaaggcgaagcagccggatcccaaaccagaagtgagagcactgtttggtggcctcttcaaacaagaaacggtgtatgtggatgatgactaaaacgaggagcgccaatttatcctctacgtgattttctttcttttgttttttttgtttgtccagtgccttggtgtactcttgaaataggaacgcttaaagttgtacaaaaattggctatatataagaaccaatgatcatgtgttacagaagattgtcgatacattgacgagagtcaagtgttgccggacggaatacaggagaggagcgacagatgcag

SEQ ID NO: 146471 - DNA, 683 bp, Zea Mays
tttagtatagttacgcagcggatttgagagacccatatcagaaattgtctacacagcacaagcagtaacttctttacagcgataacagttgcggtgacaaacaagagggtggaacgaagattcaataggaaagaaaacacgacgcagtcatgctgccaggaccccaccaagaacactgtcacctccctgtccttatgtcaagacaaagatatgtccatacagctgcttctaaaatagctcatcttcatccaaaaaatcaaaaatcaaactcacctgtcgcctgcaaagtcgatttgtcaaatccatgtcagcaatgcaacaaagggtaccgcactgaagtcgctcatcaaaacacatttgaggccaacatggctgagttctcaggtccatgataaattaactataaagtttgcacgatagctaacttatggccttacagccaatttggaagtttttgaacggaataaaggtgcagcgaaacattacttttcccttctggtaatgaatgaattacatgctttaacaactcagaaaaaagcaccagtatcttgcaacagcctgcctactctgcatgtcttctgtgcgagaatcacaatttaagatgattattgtgtggtcaattagtttgaaattagctgcgcctttatttttttcgaacaagcaggagagttgcgtatcttttt

SEQ ID NO: 146472 - DNA, 1600 bp, Zea Mays
acaacacctaaattgtaacgcctccagcgaaacccaaaaccctcccaccaaatttcaatgacgccgtcgaaaccccctggcaagcgccgccgttcggctccacctccgcgcttgccctcacccgctccacccgtggcgctctcgccgccgggcttcgtcgccgaccgcgccgaggccgcggcgcgcgtggagcgcctcctgcggtaccagttctgcgaccgcgcccttctagaggaggccctgacccaccaatccttctcggatggcgctctctcttaccagcggctcgagttcgtcggcgacgccgctctcggcctagccttctctaacttcctatacctcaccaaccccaccctcgggcccggcgcgctctccacgctccgcgccgccaacatctctaccgagaagctcgcgcgcgtcgccgtccggcacgacctctacccgctgctccggcgcaagtgcccccgcctcgacctactagtaggccagttcattgagtcagtgaagcaagaactaatgcatgaccttgccactgcaccgtatggtggtagcgtggttaaagctcccaaggtgcttgcagatattgttgaggccatcgctgctgcagtctacgttgattgcaaatttgaccttgagaagctttggaaggttacaaggtggctctttgagccaattatcacagcagaaacaatagatgagcaacctgtgactacattgcatgagttatgccaaaaacatggcaaagttgcacagttcaagacatggcagaaggatgggatgatcgtggtaaatgtatttgttggtggggagatggttggacttggttcctcggagcagaaggtaattgctaagctgaatgctgcacgagatgcactgggcaagcttattggtggtgcaaagcagcaagtgttgatcaattgtgccgccaatggattggtggatgacattgcagagcttagggagtgtaaacagaaacttattgagcagtgcatcagaaaacattggccaaaacctatctttaaattagaaaaagaaggtggccctgcacatgaaaggaactttgtgtgttctgttcaggtagatacccaaactggcacttttgtaaccataggtgaatctatgtcaagagttaaggatgcagagaattcggctgcgcataagatggtcgaactattgttgaaattgtgagatatattcatgtacatggctagatctttggtatacctctttcgagaaacaatttgttcaaggatacctattatggtagctttgtcattacatggatagatctttagccctctcgagaaacaatttgttcaagtacacctattatggtagctttgtcatagtgtgggtcatgtcatctagttaatacggtttataattgagcatttatctcaaatcatgtctttttataatgcatgattctagacaacttagttttagaatagggtaaggagacgggtttaactatcaaaaccaatgcctatatagttattgttttgtactgtcctgttttacattaatattatataaaatatcatgaagcgtggaatattttgtggatttgatatttggattatttcaaataaggagagct

SEQ ID NO: 146473 - DNA, 1488 bp, Zea Mays
acaacacctaaattgtaacgcctccagcgaaacccaaaaccctcccaccaaatttcaatgacgccgtcgaaaccccctggcaagcgccgccgttcggctccacctccgcgcttgccctcacccgctccacccgtggcgctctcgccgccgggcttcgtcgccgaccgcgccgaggccgcggcgcgcgtggagcgcctcctgcggtaccagttctgcgaccgcgcccttctagaggaggccctgacccaccaatccttctcggatggcgctctctcttaccagcggctcgagttcgtcggcgacgccgctctcggcctagccttctctaacttcctatacctcaccaaccccaccctcgggcccggcgcgctctccacgctccgcgccgccaacatctctaccgagaagctcgcgcgcgtcgccgtccggcacgacctctacccgctgctccggcgcaagtgcccccgcctcgacctactagtaggccagttcattgagtcagtgaagcaagaactaatgcatgaccttgccactgcaccgtatggtggtagcgtggttaaagctcccaaggtgcttgcagatattgttgaggccatcgctgctgcagtctacgttgattgcaaatttgaccttgagaagctttggaaggttacaaggtggctctttgagccaattatcacagcagaaacaatagatgagcaacctgtgactacattgcatgagttatgccaaaaacatggcaaagttgcacagttcaagacatggcagaaggatgggatgatcgtggtaaatgtatttgttggtggggagatggttggacttggttcctcggagcagaagagcttagggagtgtaaacagaaacttattgagcagtgcatcagaaaacattggccaaaacctatctttaaattagaaaaagaaggtggccctgcacatgaaaggaactttgtgtgttctgttcaggtagatacccaaactggcacttttgtaaccataggtgaatctatgtcaagagttaaggatgcagagaattcggctgcgcataagatggtcgaactattgttgaaattgtgagatatattcatgtacatggctagatctttggtatacctctttcgagaaacaatttgttcaaggatacctattatggtagctttgtcattacatggatagatctttagccctctcgagaaacaatttgttcaagtacacctattatggtagctttgtcatagtgtgggtcatgtcatctagttaatacggtttataattgagcatttatctcaaatcatgtctttttataatgcatgattctagacaacttagttttagaatagggtaaggagacgggtttaactatcaaaaccaatgcctatatagttattgttttgtactgtcctgttttacattaatattatataaaatatcatgaagcgtggaatattttgtggatttgatatttggattatttcaaataaggagagct

SEQ ID NO: 146474 - DNA, 961 bp, Zea Mays
agttcccatctttctgaagttttgtgatcttttggatctttttctttcttagcaaaagcaaattatctgtaagcttgacacattgttcagttctgactcaagttcatagtaaacacttcttttaattgtcatgttgtgagtgtctcatctcgatttgatattttctttgtaccaaatgttttgatgactgtttgtcctgaccatgccatatgcaggtaggccagttcattgagtcagtgaagcaagaactaatgcatgaccttgccactgcaccgtatggtggtagcgtggttaaagctcccaaggtgcttgcagatattgttgaggccatcgctgctgcagtctacgttgattgcaaatttgaccttgagaagctttggaagattagaaaaagaaggtggccctgcacatgaaaggaactttgtgtgttctgttcaggtagatacccaaactggcacttttgtaaccataggtgaatctatgtcaagagttaaggatgcagagaattcggctgcgcataagatggtcgaactattgttgaaattgtgagatatattcatgtacatggctagatctttggtatacctctttcgagaaacaatttgttcaaggatacctattatggtagctttgtcattacatggatagatctttagccctctcgagaaacaatttgttcaagtacacctattatggtagctttgtcatagtgtgggtcatgtcatctagttaatacggtttataattgagcatttatctcaaatcatgtctttttataatgcatgattctagacaacttagttttagaatagggtaaggagacgggtttaactatcaaaaccaatgcctatatagttattgttttgtactgtcctgttttacattaatattatataaaatatcatgaagcgtggaatattttgtggatttgatatttggattatttcaaataaggagagct

SEQ ID NO: 146475 - DNA, 99 bp, Zea Mays
gatgttattgtgacatttatctctatacactctatatactctgatgttattgtgacaactttccttcacggtacacctgggtaactagggttttctgag

SEQ ID NO: 146476 - DNA, 705 bp, Zea Mays
atggcgcctgggtcccctgcatctccctcatcgctcctgctccctagggggtgctgtagcagtgtcgagctagtcccatcctccatctcgtcgatggctcccctgctgatatccccatggtcacttgcccctgcgtttcccctcatggcgcgctctgcgcaccgttgccggcatgctctacctcgctgtccgccccatctgaatccgagcagcagctcgtgcatcagttccccaatacgtagccatggtggtgctctacgcaccatgctaaccacaacagcaagccccaagccactctcctcttcactcggtctgctcgacgaaatgcccctcagtgcacgctactgcccccatgccgtgtcacttgcgcgagtgttcgtcgagagcagccgtgtcgtcgatccatgcaaccccgacgtctccgcgtctcgcttcgccgtcgatctgcacagtccccgtcacaatgccgtcaatccgcgtcctccgtcgatgtcgcgtctcgtgctatgcctatgcgacgcaatgcgagccggtggacagcacatgcgactcaccgatccggccaggttgcttttgttttatttacgatttagtcgatgacatgaacatgtgcgtgaaagtataattgtatgaatggacgcgtgtaaagaagaaactaaagtagaaagaactcggatatttttatatatatttgataggaaaata

SEQ ID NO: 146477 - DNA, 1282 bp, Zea Mays
gcgcagaagcatcaccctgtcttcttcctcgacgccccctgctcctctctctaccgagcccccattctccacgacgtttggcagcagggagcccttctcccccaacaggagcagagcctccatggtgtccgacccctctcctttctcctccccgctcggagctctgctatagcgcacgcaaatcccttccccctccattcctaggcgcaggaacttctcccccacgccgtccaactccaggccggatccaattcgccctatccctgctcgcccagaatttcttgccccaagtccggcaatcccctcgccgtggatttcctcgagcttgcctccccatggccgccaaccatcctgcccctgcccctggtgcgctgggcgcgtagtgctctgacctcgatggccgacggactctaggcacccggagctctatccggtctagcttcgagcaccctctgctccattccttcaccagcgcaccctattccattgagcacatgccgcagggaaggccgtttccccatggtgctgctctccggcgatgcccccaggtccggcgacccctctcctccatggtcgagctcccatggttcagacgccccttccccatcggatccatggcgcaggggagcaacagctcttcctcccctagcctccatttccctgctcggttttgtctttaacctctaggccacgaccttctcccatggcgcgggccctcctctagtccagtgcgcgcaaggagatcctccaatgccgcacccaaggtccgctccagcctccccttgtcttgcggatagccatggcacctgggtcccctgcatctccctcatcgctcctgctccctatggcgtgctgtagcagtgtcgagctagtcccatcctccatctcgtcgatggctcccctgctgatatccccatggtcacttgcccctgcgtttcccctcatggcgcgctctgcgcaccgttgccggcatgctctacctcgctgtccgccccatctgaatccgagcagcagctcgtgcatcagttccccaatacgtagccatggtggtgctctacgcaccatgctaaccacaacagcaagccccaagccactctcctcttcactcggtctgctcgacgaaatgcccctcagtgcacgctactgcccccatgccgtgtcacttgcgcgagtgttcgtcgagagcagccgtgtcgtcgatccatgcaaccccgacgtctccgcgtctcgcttcgccgtcgatctgcacagtccccgtcacaatgccgtcaatccgcggtga

SEQ ID NO: 146478 - DNA, 774 bp, Zea Mays
gccagccgtctccttatccctgcgatgccgctcacctgggctcatcttccagccgccctccgcccagcagcagagcacaccatcctctcaactcggatccccaagccctcgcctccagctcttgccacggcatccatcccctgttcggacctccacccggccgcgtcctcgccggtggccagcgccgctgcatcgcccttcctagcgtcggccttggcaccgcttccccgagcgccccagtcgagctcgcccatcctctgctctagccctttctccacgccgtcgctgagctcgcccctcccctcagccatggacacgacgacctgcagcccttcttggtggccaagcccatcttcctgctcgcgccccctctttttccacctctgcgcgtatcagctcgtccaacccccatggtgtttcctccctctcggctcccttgctccctccccatggcgttccccctggatgttggtgatctgttccccacggtgcaggcaaatgttctttccctccctgcagcagcaccttggtggttgtcgagcagcacgtcgcgcttgcgcagcctcggtcacgacgttgttcaccccggtgtcatgtgttcgccgaaatgcctaaacatgtagtctgtcgtcgtcgtatccacagtcaattttagtcatggggaacttggtacagccatccatggtatcagaatatgacctgggaggagaaggggacctgttcaaagctccagaagccatcatcgaggaaccgctgctcctgaactgtctgtct

SEQ ID NO: 146479 - DNA, 105 bp, Zea Mays
cagcaatagttgcaacatcatcgtatgcctaaaatttctgatctggtttataaagtttgtgtccaattttgaattcgtcttactggctcaaaattccgtgcggtc

SEQ ID NO: 146480 - DNA, 411 bp, Zea Mays
atgctcacgggtctggccatccttggagataccagcctcaaaaccaccagtggtggagtcaatgataaggacaacacaatcaccctgggaggtactagtgatcatgttcttgatgaagtcacggtgtccaggggcatcaatgacggcgcaatagtacttggtggtctcaaacttccacaaagcaatatcaacggtgatacctctctcacgctcagccttgagcttgtcaagcacccaagcatacttgaaggaccgcttattcatttcagcagcctcctcgaacctctcaatcacacgcttgtcaatgcctccaaacttgtagattaggtggcctgtggtggtcgacttgtcagattcgacatggccaataaccacaatgttaatgtgggacttctccgtacccatggctgg

SEQ ID NO: 146481 - DNA, 661 bp, Zea Mays
atgaatcatttactaaaagctcccttttgtatacatccaaagacaggccgtgtttgtgttccgattgaccccagtaactgtgatgattttgatcctgcggctgttccgactctatcacagcttttaggagagctgaatgctactggttttcagacagatcctgaaaataattgggaaagaacgtcccttgggaaatccatcagttttttcagaacttccttcctgcacccattgctgaaagcatgcaaggaggaactggaaagtgcatatagcgcgaagcttcagcagtccaagaattccttggactggtaaaatctacgcatgtttctgcctctgttttatcatcagcccccgttcggccctccctgagcatccaacgggtaacatggacctggtgctaggtggaatatctatgacgctgccaacccgtgttgcatgcctgggatgcatgcaaccatgtcagtttgaagttgcgtcttaggattcatgttaacatggaacaagtccgagtacatgctttgtggtatttttacctttggattagtttattaggttgaagggttataatgacggtcaaacactcgaaaatggatgcatggagatctgcctcggtcatttcatgcaagttcgttgctcagcagataactggggctgcttggtt

SEQ ID NO: 146482 - DNA, 102 bp, Zea Mays
gctgttttaagggagagtggagcaggtttttttagatcccacctttcttcacaaaaacgactcccgatctttcggctccacacgagaatcagtttaaaaaaa

SEQ ID NO: 146483 - DNA, 1952 bp, Zea Mays
acccctcttctccacagaattaccatggatccctctgctcttcacctataaatccccaaactcacctctcgtcgttctcgcaatcatctcaaacaagctcaggggcaagacgtgcattgctaccatggcgctccactctgctgcagccgccgccgctctctcggccctcctgatgctctccttctcaggccttacgctctccgacacgacgccgtccacgccggtgtcaccgtcggccgcgtgcaacgccaccactgacccgaccttctgccggtccgtcctcccgccgcgcggcaagggggacctctacaagtacggccgcttctcggtggccgagtccctggcgggcgcgcgcatgttcgcggccctcgtcgaccgctacctcgcgcgccaccggcacctctcctcgagcgccatcggggcgctgcgggactgccagctcatggccgacctcaacgtggacttcctcacggccgccggcgccacgatcaagaccacggacaccctcctggacccgcaagccgacgacgtgcacacgctgctgtcggcgatcctgaccaaccagcagacgtgcttcgacggcctgcaggccgcgtcggggtcgtggtccgaccgcggcggcctcgacgcgcccatcgccaacggcaccaagctgtacagcctctcgctgtcgctcttcaccagggcatgggtgccaacggcgaagccggctcactcgcacaagggtggcagcaatgacccgcaccacggccacggccacggccacggtgacaagaacaagaagcacccggcggcatccgcggcgaggaggggcctgtttgacgtgaccgacgacgagatggtgcggcggatggcgatcgaggggccagaggcgacggtggaggtgaataccgtggtcacggtggaccagagtggcgccgggaatttcaccacgatcggggacgccgtggctgccgcgccgagaaacctcaacggcagcaccgggtactacgtggtctacgtgcttgctggcgtctacgaggagaacgtggtggtgcccaagcacagcaagtacatcatgctggtcggcgacggcatcggccagaccgtggtcaccggcaaccggagcgtcgtcgacggctggaccaccttccaatcggccaccttcgccgtggtggggcaaggattcgtggcggtgaacatgacgttccgtaacacggcggggccagccaagcaccaggcggtggcgttccgttccggggccgacctgtcggcgtactacggctgcagcttcgaggcgtaccaggacacgctgtacacgcactccctccgccagttctaccgcggctgcgacatctacggcaccgtggactacgtgttcggcaacgccgcggtcgtgttccagggctgcaccttctactcccggctgcccatgcaggggcagtgcaacacggtcacggcgcagggccgcagcgaccccaaccagaacaccggcacctccatccagggctgctccctcgtcgcggcgccggagctcgccgccaacaccgccttcacgacgctcagctacctcggccgcccatggaagaacttctcgcggacggtggtcatggagtcgtacgtcggcgcgctcgtcgacccctccggctggatgccctggtccggggacttcgcgctcagcacgttgtattacgcagagtacaacaacaccggcccgggcgccgacaccagccgccgggttgcgtggccggggttccacgtgcttggcgacggcaccgacgccggcaacttcaccgtctcaagcatggtgctaggcgagaactggctgccgcagactggcgtgccattcaccagcggcttaattccttgaagcgcgtgcttcatgtcaatagttagctacccctatatatatgtgtttctgcagtaataattttaacttaatcatcgaaaccggaacgataaatgcagtaggt

SEQ ID NO: 146484 - DNA, 309 bp, Zea Mays
atggatcatgtgctcgcaggactgatgggcgaccatctcgcgttgatcgtggaccggctgctgatagagtcgacgttggaggcggcgatcggcggtgggaagcatatggtcgatctgtgtcaggagacgatggacgtcgagtacttccatcgtgggctaggcggcggctcggtgacgaaggtggtggagtgcaggatttgccaggaggaggactgggacacctgcatggaggccccctgcacctgctgtggcagcctcaaggtacctgacctctttaatcacgctattttttatttgggaccaaaataa

SEQ ID NO: 146485 - DNA, 998 bp, Zea Mays
agatttgcagatgcactgcagaagcagagcacaaaagaaatccatccgtctcattgcttccgcttgttcaccaaacaaaaccgaagccacactccaccgctctcctccccaatcagctatgctcgcccaccgcttcctcctcctcgtcgtcgtcgccgcggctgcggcgagcggcatcgcctccgctaagccgacggcgtacgaagccctcgccgactacgacttccccccggggatccttcccaagggcgtggtcgcctacacggtcgacaacgccacgggcgccttcacggccacgctcgatgcctccgcgtccggcgcgggatcctccatctgcgagttctccatcgagggctcctactcgctacgctaccagaccaagatcaccggcaagatctcccccgaccacctcaccgacctccagggtgtctccgtcaaggtcctcttcttttggctcaacatcgtcgaggtcacccgccatggcgataatctcgagttctccgtcggcatcgcctccgcggacttcgggattgacaacttcctcgagtgcccaacctgtggctgcgggttcgactgcaacgacctgctcatgctccagaaggcgggggcagccaccgccaggctgcgcctgcgaggtgccttctagaattccactcatgcaaatccaggatgggatagtaagttcaggactcgattttatgtttcaccaactgtttcagacagttttaggagagtcagagatttaattaagatctttcaaatatgtaaacttatatttctctatggaaattgccttctttccattgagatgtttgcccacatgtgaatcagtttctaaagtggtgatagttgaatcccatggttatggatggttgcttgaagtgcttattatggttgttggttcaagacttcattagttttccattttgatgagacaatatttgttctcacatagttgagagaactttaaatcagtaacagagtaactttatacttta

SEQ ID NO: 146486 - DNA, 216 bp, Zea Mays
cacagtttttccaaactgcagtttttcaaatactaaagtatactttagtcatgacattactacagtttacaatgcttcagttttcgaatacaacagtatccaatacatcaaggtgtttgggaaaaacattggttgagaccaatcaaccagagcgggacccagctggcgctctctttacagaaaaaaactttggctgagaccaaagtttccaaaact

SEQ ID NO: 146487 - DNA, 3164 bp, Zea Mays
ccacacgtacgtactgtacgtacgcttccccgcccgtctcccccaccgcttccaggcaacatatatatctgattcgagagcaggcggagttgcggattagctgctggtccgatccagaagctcctagacgatgatggacgtggagtaccacgaggagtacgtgaggaacgcgaggggcgtgcagctcttcacctgcgtctggctgccggcgccgtcctccgcgcccaccaaagcgctcgtcttcctctgccatggctacgggatggagtgcagcgacttcatgagagcatgtgggatgaagctggccacagcagggtatggcgtgtttggtatcgattatgagggccacggcaagtccatgggtgccaggtgctacatccacaagtttgagagcctcgtggccgactgcgacatgttcttcaagtccatctgtgacatggagggatacaggaacaagagccggtttctatacggcgagtccatgggcggagccgtggctctactgctgcacaggaaggatccgaccttctgggacggtgcagttcttgtggcgccaatgtgcaagatatcggagaaagtgaagccgcacccggtggtggtcaccctgctaactcaggtggaggagatcatccccaagtggaagatcgtccccaccaaggacgtcatcgactccgcattcaaggaccccgtcaagcgcgagaagatcaggaagaacacgctcatctaccaggacaagccccggctgaagacggcgctggagcttctcaggaccagcatggatgtggaagacagtctgtcagaggtgaggatgccgttcctcgtcctgcacggcgaggccgacgcggtgaccgaccccgaggtcagccgcgccctctacgagcgcgcggccagcgccgacaagaccatgaagctctacccggggatgtggcacggcctcaccgccggcgagcctgacgacaacgtggagctggtgttctccgacatcgtctcgtggctcgacaagcgcagtcgccactgggaacccgacgagcgggtgagaagggctccgccggagcctgagaacaagcgccgcgtcaccagcagcagcagtcaacggcccggcagcttcctctgcggactaggctgccgctgccggcaacaccagcaacagtgtagtaggatgtagatatggaaaacgcttgctttttcctcctcctttaagttgttgacaaagaactgagaaaagtcatggtctcaacaaagatcttgttccatcctaagaactgtgtttctttgttctagtatagtttctgggagcaggataggcattctccgcgtgtcaacaaagaaagaactagacccaccaaagcagggcacacttgcaaaagcaaacaaaaaaaagtgagctataccatatatatgatgctatgctctcaacaaagaattagatcatccaggtttatccccaacggttcaactggaattttttttgtatagctaatggctgagcgaactgagagagaaaaaatacaggagaaagaatagcattacagcatcaaccaaggtatttcagcgacacattcccgacgaactacatggccatagcttttgtcagtaaggagaggagggtcgaccaagcagctagaagcaggccaccaaaaatttccaagtcccgtgctcctcttccgtcctagccttgctggtttccggtggtggcagccgcggtgtcttggtcgccgaagatgcgcttgcggaagtcggtgaccatgaggggaaggccctcgcggagggggatcttcggctcccacccaaggagctccttggcacggccgatgtcgggcttgcgcttgtgtgggtcgtcctgggtgttctgacggaactcgatccgtgcgttggggtcgatggtgtcctggacaaccttggcaagctccagcatggtgaactcgccggggttgcccaggttaaatggtcctacatgctcgccttccatcagcttcatcagaccctcgacctgggagaagacccacaaatcagtacaatgaatgcaaagaataatagattcccttgtaatgaatagttcgagcatcccacttgctggctaggccactaagccaccggaaaaaaaaaatcaaatctggtactctggcagtgatgttgaatcgagtgtctcttatttttttttcaatatatgttgagtagaggtagacttgccagatcagaaacatattggaaactcctggtttgctttccatcaccataaaccgtcaagggctccttcctcagtgcctgcaaccataaccgcacgtagtaagtttttagttgtcatcttttgggttctgtaactaagataaacagcagtgtacatattatttacctgagcaacgaagttactgacaacacggccatcgtcaatgcacatgcgagggccatatgtgttgaagatacgtgcgatcctaacctggaaacaacaagaaatcaccaagatgaatctacttcatcgcagacgaaatgaaattccaaccgaccaaaccgacatttttggattgcgacttacctcaaggttggcaccacggtggtaatccatggtcaacgtttcggctgtacgcttgccctcatcgtaacagctcctgacacctgtcattcagaaatcgtacccatcagtaaaactctgcagagagcaggcaagagcttgcctactctgtaaagaagccgtcgagtatccaacggccaacaaatgctatgtaaatagctcaacaaacttcattcattgttttaggtgcaatggttggtgggcgtttggttaggcatagttggtcaagtatagttgtgttctcctattgctttattgaaaaggatttgcacctcaaagtggccctcttggagcaaattccaccaaccaacattgtccttttccaccaaaaagaaccaaaacatgcaagagacccaccaagttaagattccatagccagcatctccaagatacccttttgcatattgcttatacaagacttctttcatgcaacagtaagcttcaagtctggaccagcactgttttctgaaaagggctcattcctgcttactacagctcggattaaaaaaaaataataaagatttgacaacgtagagccttcctgtttgcaacagtacattgtccagcttgcaattccctcctccctctctttttc

SEQ ID NO: 146488 - DNA, 1444 bp, Zea Mays
ggaaaatcttctctgcgcttctatccaccaccgctcaatcgtttgattttttttttcgcgcaagcttcttacctcctgcgcgcagattgcttcttcctgctgcacggcatgccggagaaagatatgtctctcagattttttcttctctaccgattgctttgctcctggcgtgattttttttctctgcgattgatctcatccctgcacggctctagtggaaaaatcccgccgcccctgggcgcttcaaaaatccagccgacgctcgcccctatcttcttcctcagcccagccgtcttcctgggcaaccgcgtctccttcttcctccccctgcgtccctgttcggttcctgcgcacgctgactccctgcgtcgcgagcttcagctcggattccccctcccatggctgccgagcagctcgccggaattccacgctcggtgcctggatctccctcctccctgcagctcgctctctctccctagctcgctcgctcctggccttcccctgccggcgcgcctgttccctggccgaagccacctggtcccaggtccggtcggccggctcagtttttcccagtgccgcgcgtcgtgcttccccttccagccgaccgaagctccagctccagccaggcgcgtccggctccctaggcgcttgaccatctgctcgcctgctttcctgccagtgctgcccagtgcctctctgctagccgcgcgcccctgtcttatttccctgcgcaccgtcgtgtcctcagctagccggctgcgacccctgctcggattttcccctatggccggaacctttttcctggccgcagctcagatctccggggccgcgagctcccctaagctcgccatggcgatttccacggctggcagctgaccttcctgtgtcgcgtcctgactttacccaatgcccggtcgagctctctgaccgccgcgccgtgaattttcctgcgcgcgtgtctccttgctcacgcgtcgccgtcgagttctctggtgtttgcgtgccatgaagttcctctagcgccgtggcttcccaattccatctagtcacgcgcgcgagttttcttcgcctcagccttagctcgtcggtcacgctcgtcagatgtgcgatcgaggacttcagctgaaggccgtcgtcagacaactaccaaatcgagttgtgatatggtgcgataattaatcacgtgatgcggaagatgactcaagtcgaccccaagcacgggctactccgcatggagatgctgatgaatgaacctgcctgatcaagtgttaggacaaggatgatcgtcaagtgatcgacgtctaacaaacactaacctagtgtttcttccaggcaagccccggtgcatttgccccttccttgtgttttaaatgctttttcaccttatctgatgcattaggtgataggagttgtgtgataaacaattgatgcattaccattcctt

SEQ ID NO: 146489 - DNA, 359 bp, Zea Mays
tctgcccccctcctcgcgcgctcggccagccatggcgcggcgccccctgctccttcctcgcgcagcagcagccgagcgtcccctccctgggccgacctcggccaagtccctgtccatggcgcgcatggagcagccctagggccagcgcccctgcgtgcgttcctccctaacgcccagaaatttcagcagggagctccttacactcatgctccagtgcctcgccgtggaatccccctctcctccctgctctggcatcaacacggccagggacacaaccagcggcagccttgctgttcacgtgtggcaccaaggaagaagaagacccctttgggtctatgacgtgtgggcccaaggcaggg

SEQ ID NO: 146490 - DNA, 1734 bp, Zea Mays
atggcgtcgaccaaggctcccggccccggcgagaagcaccactccatcgacgcgcagctccgtcagctggtcccaggcaaggtcttcgaggacgacaagctcatcgagtacgatgcgctgctcgtcgaccgcttcctcaacatcctccaggacctccacgggcccagccttcgcgaatttgtccaggagtgctacgaggtctcggccgactacgagggcaaagaagacacgacgaagctgggcgagctcagcgccaagctcacggggctggccccccgccgacgccatcctcgtggcgagctccatcctgcacatgctcaacctcgccaacctcgccgaggaggtgcagatcacgcactgccgccgcaacgacagcaagctcaagaaaaggtggcttcgccgacgagggctcagccaccaccgagtccgacatcgaggagacgctcaagcgcctcgtgtccgaggtcggcaagtcccccaaggaggtgttcgaggcgctcaagaaccagaccatcgacctcgtcttcaccgcgcatcccacacagtccgcccgccgctcgctcctgcagaaaaacgccaggatccggaattgtctaacccagctgaatgccaggacatcactgacgatgacaagcaggagctcgatgaggctatgcagagagtgattcaagaaatggaggtgatacttcgaatgaggcccataaaaggaattctacagatggcaacaataaacaaacaagctggtcagttgcatcttgtgaaaccatatatggttgcagttcagagtaacaatgtctctgccgtgaatgaagccttgaatgaactttatgtcgaagatgaggactacgagagactccgtgaatcagttgacatgcatgacaactttgaccagattggtcttgcccagaagcttgagaagcatgaattgctggagatgaggaggatcgccgcctacatttacaagaaggctggcaggtggaagcagtccattgctctatcgaagaaagacaacatgtacaaggactgcatggagacatgctcacaatctggcgaccgtgaactatcagaggacttgctcgtgtatttcattgagcagggtaagaaagaatgttttgcttcttgcctcttcatttgctacgacctgatccggccggatgtcgctcttgagcttgcatggatgaacaacatggtggactttgccttcccgtacctgttacagttcattcgtgaatacactagcaaggtggatgatttagtgaaggacaagatcgagtcgcagaaggaagaaagagctaaggagaaggaggagaaagaccttgtggctcagcagaacatgtatgcgcagctgcttcctctcgctttgccggcgccaccaatgcctagcatgggtggccctccacctccgatgggtggaatgggcatgcctcccatggccgggatgggtatgctgccgatgggccctggtccgatgccagcattcggaatgggaggctactgaattgtggttttgcagggagcttagatgatgatgtgaattgttccattgcaagcataagtggaacctcattggagctgtacatggtttacagtttgggaaatcaatattctttattgtaccaggaaacttttttttgggcgagtcagtgaaatcagcctgacccatagcttgagaagcgcaacctatgatatgttttacaatgggatcggaaataggatgattaggttgtttcagca

SEQ ID NO: 146491 - DNA, 2166 bp, Zea Mays
ctaagccatcataaaagcctacttttcccatgcctctttcgtaaactcgaacgcagctgtgccattgcgagcacgattgcgtccaaactcggaatggcaaccccctagccgtccgatcgaccgccagccccgagtccgatcgaccgcggtctgcgccatcttgtcctcttcctcccttcctggacggctggagctggacctgctttattgattattgggtgcccacgcatcgggccgtgggaggcgggctctgtttcagcctcgtcagccgtgggcgatggcggcggcggctgggaaggcgcgggcggtgagcctggccgcggcggtgcgtgtggtggcggcgacggcgcggccggcgtctagcgcagccgcggcggcgggagtgggtgcgatggcattgatcgtgcagggggaggacacggccttcgggtctctggagtggtgggcgtacgcgggcatctcctgctttctcgtgctcttcgcagggatcatgtccgggctcacacttggactcatgtcgctcggcctcgtcgagctggagatcctccaacgcagcggcaccgacgtcgaaaaggctcaggctgctgccatccttccggttgttcaaaggcaacaccagcttcttgtcaccctgttgttgtgtaatgctgttgccatggaggcacttcctatatttcttgacagaatgtttcatcctattgttgctgtaatattgtcagtgacatttgttcttgcctttggagaggttataccacaagcaatctgtactagatatggtctagcagtgggtgctaactttgtatggctcgtacgcattctcatggtcatctgctatccaatttcttaccctattgggaagatcctggactgtgctcttgggcacaatgagtctgcactttttaggcgagctcagttgaaagctctagtttcaatccatagcaaagaggctggcaagggtggagagcttacccatgatgagactacaatcataagtggagccttggacctgaccgaaaagactgctgcagaagctatgacaccaattgagtcaactttctcactggatgtggattccaagttggattgggaagcaattggaaaaattcttgcccgtggtcatagtcgtgttcctgtatactctggaaaccctagaaacatcattggtctcctattggtgaagagtctattgactgttcgtgctgaaacggagacgccagttagtgctgtttcaattagaaggattccaagggttccttcagacatgcctctgtatgatatactgaatgagtttcagaaaggaagtagtcatatggctgctgttgtgaaggctaaacccaaaactgaaccaccccttgacaaaactgaaccaaacagggaagcagttggaccaacacaattgactgttcccttgttatctaatgctgaagaaagtgcagacaatgtggttgtggatatcgaaagaccacataacaggcagattaatgggaacacagcatcaaacgcagtgcctaggtcatcagaggatattgaggatggtgaggtcgttggaatcatcacacttgaggatgtattcgaagaactcctacaggaggaaatcgtggacgagactgatgaatatgttgatgttcataaaaggatccgagtagctgctgctgctgccgcatcatcggttgcaagggctccatccgttaggagattaacgggccaaaaggctgcaaaccttcagggagcacagaatcgccaaggacagcaacctcctggaattctcaagaaacctactgagggtgattcaaacccatcaaaacaagtgaaccttatggaacctcttctggaaaaggggaggtaactctaatggaacctcttctggaaaagaggaactctaaaatgcattgcgcaacgtagggaaccatgctggaagagcctatggttcttgctatattgtagcaagaggtaaatagagatgaactcattgttgcaaattccaacatgagcgaccgagcgatgtggttttggtgtcattatggacattacattagtgttgaattctttggatccccctccctttttttttgtgttttgggcttcgaaagtagagtcgccatttttgaatgtcaccgctaaccgcagtagcaagttagcaactgctttatatatgtgcttcaaatt

SEQ ID NO: 146492 - DNA, 285 bp, Zea Mays
atggcaccgtcggcgacgtgctggtgcggccactgcggcgctgtccgccgcctccgggcggagggcgagttcgcgtcctgcgcggtgtgcggcagggtgctcctggacctgcaggacgacgcggtggcggctccaccaccacggcagctgcggcgacgtcagaggagggctcgtgacggcgcggcggctcgtgacatcggcgcgaggcccgaacgcggagatatatcggacgctgaatccaccgtcaccagtaccggagaggatcgatggattgacgagaagtag

SEQ ID NO: 146493 - DNA, 2922 bp, Zea Mays
cccacgtctcatcctcgcgagtcgcgacctcgcaagcctctccgacccccagctcaacgagatcgggcgagcgatcccctcttccccgaccaccagatcgcagcaatggagccggatccggtcgccgctggggcatcctcctcgccgccgccttcaccagcgccggccacgtccccgccgtggcaaacgcgagatgacgatgagccgggagcggtggattgcgcggatcccggaggagacctgaatcccgcgccgccgccgtcgcttcagcagggtacagttgagaacgccgcggtgggcagcgaggtggagcaggaggaaccaaagaaggaggcgatggcaggagtaggggagactctccgcagcttcatggaggagtttggggatcaaggagaggactccattatcttgtcaccgcggctgaaggatattagtactcctgaccgccccgctgccctcggtttcctaggggagaagtataacaacctcatggagaggtacaagaagtacaagaagcaggtggtcaagtgttccgaggagtgtgaaccaagatataatggcctgaagaagaagtacacagacgagtgtgcagagaggcggcgtctgtacaatgagcttattgagctaagaggtaacattagggtgttctgcagatgcagacctctgagctccgatgaggtcaaccgtgggtgtttatctgttgttgagattgacccatcacaggagagtgagctgcagtttgtgcccagtgaaaaagaaaggaagccctttaagttcgatcatgtttttgggccagaggatgaccaagaggccgtcttttcagaaacagtgcatgttgttaggtcagtgatggatggttttaacgtatgcatctttgcatatgggcaaacaggaactgggaaaactttcacaatggaaggggttccagaaaataggggtgtaaattatcgggctttggaagaattgttcagaacgtcagagaaaagaagtgcatctgttgcatacacattttccgtaagcatcttggaagtttacaatgaaaagatcagagatcttcttgatgagagcaatgatcaatcaaaaaggttggatattaagcaaaatgctgatggaacacaagaagttcatggtttggttgaggctccagtttataacatagatgatgtgtgggagaaactgaagtttggtgctcaaaatagatctgttggctcaaccaattctaatgaactcagcagccgctcccacagtttggttagggtcactgttaggagcgagcatttggtgacttatcagaggagcagaagccacatgtggctggttgaccttgctggaagtgagagaatagctaaaactggggtagaaggagatcggctgaaagagtcacagttcatcaacaaatcactatctgccttgggtgatgttatatctgcccttgcctcaaaaaattcccatattccataccggaattccaagttgactcatttgctccaaagctctttaggcggcgattgcaagactctaatgttcgtgcagataagtccaagctctatggattcaggagaaactctcagttcactcaattttgccagtagagtccggactgtagaacatggccctgctcgtaagcaagtggatccagctgaaagtttgaagttcaagcagatgactgaaaaacttcggcacgaggaaaaggaaaatgcacagctgaaccaaagcttgcagctgatgcagctcaagtacgcttctcgtgagaatgtcttcaggacactaaacgaaaaggtgaaggatgctgaacaagcatgcagaaattatcagcaacggattagagagctggaaagtgaattaggcaatgagaaaagggtttctagggattctgctagatcctcaaggccgccacttgttcctacgagacagaagcagcctcacggaaggaacgcgccaccttcaggcccttctagatggaggctcaaagcccccacaatccacaacaaagagaacattccggtgatgatgaacaaatcaaatcctggggatgaccctaataaggctgttggcagagcaaggcgcgtttcacttactccggtgattcgacaaatccccatccagcccaagaggcggtcttcgatagcaatactaccatctgtgagagagcatctttctgtgctaaacgaaaagagagcagcgtctcgactgtcgcaagtcaacatgccaagaagatcagtcgcgacctttggtttgaatttgggtccaggaacaccccttgcaggacatggtggacctgttgacgccaccccagacggagcaaagttcaggagatttgatctaggaagcagcagcagcaagttcacgagccctcctccgaatgtcaccccgcagcggaagatgggaatggcaccggcgggaggtcctccaaacgcagccaagctgtgcttcagcatccagaaaagagttacgcctgcacatgttcgggcaaaacctggtatgggcatctttgacccagctcttcgtgagaatatggttgtggggagaaccggcaacgcgctgcgggtgctcaacggcaagaggagacagtccgttgtctaactctggtactgcaaacgtttggacgttcgaacggagctgcagtgtggtgagaatgatggtgcctttcagcttgttcttagtgaaaccgtgttaggacagaagatattcttctcagcatccgtaaatggattttgattggctcttactagttgataagaaagctatgttaacattgcccatggaagtcgttgattatatttgttcgtcacaaagaaagctatgttatggaagtcgtcgattgtatttttcgttactaagaaccgcttgctagtgcacttctaaaccatgttcacggaacacacccagattctgccgccgacataataataatgtttgtta

SEQ ID NO: 146494 - DNA, 2993 bp, Zea Mays
cccacgtctcatcctcgcgagtcgcgacctcgcaagcctctccgacccccagctcaacgagatcgggcgagcgatcccctcttccccgaccaccagatcgcagcaatggagccggatccggtcgccgctggggcatcctcctcgccgccgccttcaccagcgccggccacgtccccgccgtggcaaacgcgagatgacgatgagccgggagcggtggattgcgcggatcccggaggagacctgaatcccgcgccgccgccgtcgcttcagcagggtacaggttcgttctcttgcagcagatggccagtagggtttgctgcgtccgtctcatggtggggaaattgttcgtagttgagaacgccgcggtgggcagcgaggtggagcaggaggaaccaaagaaggaggcgatggcaggagtaggggagactctccgcagcttcatggaggagtttggggatcaaggagaggactccattatcttgtcaccgcggctgaaggatattagtactcctgaccgccccgctgccctcggtttcctaggggagaagtataacaacctcatggagaggtacaagaagtacaagaagcaggtggtcaagtgttccgaggagtgtgaaccaagatataatggcctgaagaagaagtacacagacgagtgtgcagagaggcggcgtctgtacaatgagcttattgagctaagaggtaacattagggtgttctgcagatgcagacctctgagctccgatgaggtcaaccgtgggtgtttatctgttgttgagattgacccatcacaggagagtgagctgcagtttgtgcccagtgaaaaagaaaggaagccctttaagttcgatcatgtttttgggccagaggatgaccaagaggccgtcttttcagaaacagtgcatgttgttaggtcagtgatggatggttttaacgtatgcatctttgcatatgggcaaacaggaactgggaaaactttcacaatggaaggggttccagaaaataggggtgtaaattatcgggctttggaagaattgttcagaacgtcagagaaaagaagtgcatctgttgcatacacattttccgtaagcatcttggaagtttacaatgaaaagatcagagatcttcttgatgagagcaatgatcaatcaaaaaggttggatattaagcaaaatgctgatggaacacaagaagttcatggtttggttgaggctccagtttataacatagatgatgtgtgggagaaactgaagtttggtgctcaaaatagatctgttggctcaaccaattctaatgaactcagcagccgctcccacagtttggttagggtcactgttaggagcgagcatttggtgacttatcagaggagcagaagccacatgtggctggttgaccttgctggaagtgagagaatagctaaaactggggtagaaggagatcggctgaaagagtcacagttcatcaacaaatcactatctgccttgggtgatgttatatctgcccttgcctcaaaaaattcccatattccataccggaattccaagttgactcatttgctccaaagctctttaggcggcgattgcaagactctaatgttcgtgcagataagtccaagctctatggattcaggagaaactctcagttcactcaattttgccagtagagtccggactgtagaacatggccctgctcgtaagcaagtggatccagctgaaagtttgaagttcaagcagatgactgaaaaacttcggcacgaggaaaaggaaaatgcacagctgaaccaaagcttgcagctgatgcagctcaagtacgcttctcgtgagaatgtcttcaggacactaaacgaaaaggtgaaggatgctgaacaagcatgcagaaattatcagcaacggattagagagctggaaagtgaattaggcaatgagaaaagggtttctagggattctgctagatcctcaaggccgccacttgttcctacgagacagaagcagcctcacggaaggaacgcgccaccttcaggcccttctagatggaggctcaaagcccccacaatccacaacaaagagaacattccggtgatgatgaacaaatcaaatcctggggatgaccctaataaggctgttggcagagcaaggcgcgtttcacttactccggtgattcgacaaatccccatccagcccaagaggcggtcttcgatagcaatactaccatctgtgagagagcatctttctgtgctaaacgaaaagagagcagcgtctcgactgtcgcaagtcaacatgccaagaagatcagtcgcgacctttggtttgaatttgggtccaggaacaccccttgcaggacatggtggacctgttgacgccaccccagacggagcaaagttcaggagatttgatctaggaagcagcagcagcaagttcacgagccctcctccgaatgtcaccccgcagcggaagatgggaatggcaccggcgggaggtcctccaaacgcagccaagctgtgcttcagcatccagaaaagagttacgcctgcacatgttcgggcaaaacctggtatgggcatctttgacccagctcttcgtgagaatatggttgtggggagaaccggcaacgcgctgcgggtgctcaacggcaagaggagacagtccgttgtctaactctggtactgcaaacgtttggacgttcgaacggagctgcagtgtggtgagaatgatggtgcctttcagcttgttcttagtgaaaccgtgttaggacagaagatattcttctcagcatccgtaaatggattttgattggctcttactagttgataagaaagctatgttaacattgcccatggaagtcgttgattatatttgttcgtcacaaagaaagctatgttatggaagtcgtcgattgtatttttcgttactaagaaccgcttgctagtgcacttctaaaccatgttcacggaacacacccagattctgccgccgacataataataatgtttgtta

SEQ ID NO: 146495 - DNA, 2043 bp, Zea Mays
cggtgacgagcttggactggcgatcgcgggagcgatgacgacggcggccggcatgccggggtcgccggtgggctcggccgcggcggctggcggtcccgcggcgcccgaggtggcggccatggacgcggtgatcgggtggttccgcggcgagttcgcggccgcgaacgcgatgatcgacgcgctgtgcggacacctggcgcagatcggcggcggcggcggggccgagtacgaccccgtcttcgccgcgctccaccgccgacgcgccaactggttccccgtcctccacatgcagaagttctaccccgtcacggacgtcaacgccgagctgcgccgcgtcgcggccgcccgcgccgccgcggggccctgctgctactcggaggaggaggtcgcgtccacggtgatccacgatcccatggaagacctcccctctgaggcggagcccgaacccaggccggagcaccagcaggatcctatacaccaggatccggctccggaggccgaggaggctgacggcaccgtcatcaaccccgccttggagtgtcacgaggaggcggacgcgggggctgactcctcgggagattcgtcggagcggaaggccccctctacggaagacgacaccgtcccagacggacatcatactgatcaaggatctcaaggggaacacatcctaccagagagctatcccatctgctctgaccacgaggagtgcattgcccgtcctgagaggatcaagatccagaaaggtttcgtggccaaggaatccgtgaaggggcacatggttaatgtcgtgaaaggcttgaagatatatgaagatgtttttacaacatcggagatcatgaaggttgcagatttcatcaatgaaattcgtcaggctggcagaaatggagaactttcaggtgagactttcatattcttcaacaagcagatgaaaggaaacaagagggagatcatacagcttggtgtcccgttatttcaacctaccacagaggaagctaattgtcacacagaaccaatcccccttgtcctgcaggctgtcattgaccaccttgttctttggcgtttaataccagaaagcaggaaaccaaacagtgtcatcatcaacttcttcgatgaggatgaacattcgcagccctacttcaagcctccccatctggacaaccccatttgcactcttctgctgtctgaaactacgatggcatttggcaggtcacttgtcactgacagcaacggcaactacaagggacctctcacactctcactaaagcaagggtccctattggtgatgcgtgggaacagtgccgacatggcgcgccacgtggtgtgcacgtcgtccaaccggcgcgtgagcatcacgtttgcaagggtgaggccatcgacgccggtggatctgagcccactcccgtcccccaccaaggccttgacgccctggcagccgcagccagccacggcctcccaggtgccggcgcccgcgtgcatgacgcagaagcccccggtcagcggcgccatcatcggttatgccccgaccccgcagaccgtgctggcgcccgcggcctggggcatggccatgcgagcgcccgtcatgatggtggccgcagcgcctgcgaggcccatggtgatggcctcgttgggcaccggaggcggcaacatcagcaagtggatgagccgcagcggcaccggtgtgttcctgccgtggacggtcgggccgaagcggtacaacaagcaccttccgccgcgcatccagaagcgccggttctctgcgatgatgtcgcccatcgaggcgcagggctgaggacctgcccgacttcacgtcgccgtcgaacctgtgttttttttttttccttgagggctttcggtccgcctgtaatttagccgggtttgtgacttgtgacaatgtgagtgagtagcggtttagcggagttcagaaccggtagaggagtacgagcgtagggataggtgaaggcagaatcagggcagggttttccttttgttttcatcctgtccccctattttccgttccgagtaaaacttatggatgttgttgtc

SEQ ID NO: 146496 - DNA, 2111 bp, Zea Mays
cggtgacgagcttggactggcgatcgcgggagcgatgacgacggcggccggcatgccggggtcgccggtgggctcggccgcggcggctggcggtcccgcggcgcccgaggtggcggccatggacgcggtgatcgggtggttccgcggcgagttcgcggccgcgaacgcgatgatcgacgcgctgtgcggacacctggcgcagatcggcggcggcggcggggccgagtacgaccccgtcttcgccgcgctccaccgccgacgcgccaactggttccccgtcctccacatgcagaagttctaccccgtcacggacgtcaacgccgagctgcgccgcgtcgcggccgcccgcgccgccgcggggccctgctgctactcggaggaggaggtcgcgtccacggtgatccacgatcccatggaagacctcccctctgaggcggagcccgaacccaggccggagcaccagcaggatcctatacaccaggatccggctccggaggccgaggaggctgacggcaccgtcatcaaccccgccttggagtgtcacgaggaggcggacgcgggggctgactcctcgggagattcgtcggagcggaaggccccctctacggaagacgacaccgtcccagacggacatcatactgatcaaggatctcaaggggaacacatcctaccagagagctatcccatctgctctgaccacgaggagtgcattgcccgtcctgagaggatcaagatccagaaaggtttcgtggccaaggaatccgtgaaggggcacatggcgagttccaacttcacaccactcggcaatctttctgtacaggactaggagatgctgtaggaagttaatgtcgtgaaaggcttgaagatatatgaagatgtttttacaacatcggagatcatgaaggttgcagatttcatcaatgaaattcgtcaggctggcagaaatggagaactttcaggtgagactttcatattcttcaacaagcagatgaaaggaaacaagagggagatcatacagcttggtgtcccgttatttcaacctaccacagaggaagctaattgtcacacagaaccaatcccccttgtcctgcaggctgtcattgaccaccttgttctttggcgtttaataccagaaagcaggaaaccaaacagtgtcatcatcaacttcttcgatgaggatgaacattcgcagccctacttcaagcctccccatctggacaaccccatttgcactcttctgctgtctgaaactacgatggcatttggcaggtcacttgtcactgacagcaacggcaactacaagggacctctcacactctcactaaagcaagggtccctattggtgatgcgtgggaacagtgccgacatggcgcgccacgtggtgtgcacgtcgtccaaccggcgcgtgagcatcacgtttgcaagggtgaggccatcgacgccggtggatctgagcccactcccgtcccccaccaaggccttgacgccctggcagccgcagccagccacggcctcccaggtgccggcgcccgcgtgcatgacgcagaagcccccggtcagcggcgccatcatcggttatgccccgaccccgcagaccgtgctggcgcccgcggcctggggcatggccatgcgagcgcccgtcatgatggtggccgcagcgcctgcgaggcccatggtgatggcctcgttgggcaccggaggcggcaacatcagcaagtggatgagccgcagcggcaccggtgtgttcctgccgtggacggtcgggccgaagcggtacaacaagcaccttccgccgcgcatccagaagcgccggttctctgcgatgatgtcgcccatcgaggcgcagggctgaggacctgcccgacttcacgtcgccgtcgaacctgtgttttttttttttccttgagggctttcggtccgcctgtaatttagccgggtttgtgacttgtgacaatgtgagtgagtagcggtttagcggagttcagaaccggtagaggagtacgagcgtagggataggtgaaggcagaatcagggcagggttttccttttgttttcatcctgtccccctattttccgttccgagtaaaacttatggatgttgttgtcataca

SEQ ID NO: 146497 - DNA, 763 bp, Zea Mays
atggcccctgccgcgcttctcccgctcgcccctttgccgcatcacccgaacccaccacggcgacccctatgccgctgcggggcctcacgccgcggcttcactgtccacaccgtcatcgccattgcctcggtctcggactccgcctccgaccccaccgcggccgcggaggcgacgtccccatctccgcccccctcgctgccaacgcaaacgccttcctctaaaccaggacccccggctttgggcggcatcgcgaacacgaggtcttggtcgcagtactacggcagcggcttctccatccgcgtgcctccgtccttcgacgacatcctcgagcccgatgactacaacgccgggatgacatactacggtgacaaggccaagccccgggcgtacgcggcccgctttgcatctccagataggtagggatgagctcatcagtgtggtgattaagccgtcaaatcagctcaaaatcacattcctagaggcaaaagatataactgatttgggaactctaaaagaggcatccaagatatttgtaccggctggtgcaaaaatattctcggctcgaacaattaaagttaaggaagaggaggatattaggacatattacttctatgaattcagtctggacaagcaacacgtagctctgatggctaccgtgaatagtgggaagacgtacattgccggcgctaccgctccagagatgaaatggggtgatgatggcgtgaagttacgttcggctgccgtatctctatcggtttcatga

SEQ ID NO: 146498 - DNA, 759 bp, Zea Mays
atggcccctgccgcgcttctcccgctcgcccctttgccgcatcacccgaacccaccacggcgacccctatgccgctgcggggcctcacgccgcggcttcactgtccacaccgtcatcgccattgcctcggtctcggactccgcctccgaccccaccgcggccgcggaggcgacgtccccatctccgcccccctcgctgccaacgcaaacgccttcctctaaaccaggacccccggctttgggcggcatcgcgaacacgaggtcttggtcgcagtactacggcagcggcttctccatccgcgtgcctccgtccttcgacgacatcctcgagcccgatgactacaacgccgggatgacatactacggtgacaaggccaagccccgggcgtacgcggcccgctttgcatctccagatagggatgagctcatcagtgtggtgattaagccgtcaaatcagctcaaaatcacattcctagaggcaaaagatataactgatttgggaactctaaaagaggcatccaagatatttgtaccggctggtgcaaaaatattctcggctcgaacaattaaagttaaggaagaggaggatattaggacatattacttctatgaattcagtctggacaagcaacacgtagctctgatggctaccgtgaatagtgggaagacgtacattgccggcgctaccgctccagagatgaaatggggtgatgatggcgtgaagttacgttcggctgccgtatctctatcggtttcatga

SEQ ID NO: 146499 - DNA, 1229 bp, Zea Mays
gagttgtcaaacaagcgctgtgccgatgtccagctaggctggcacggcaccttatccggctccagaatcctagccacccaatcagaatccagagcaggcggtcgcagcagaagctccggtgatcagcgccctcacaatgcgagcgtgattcctcccctccatcccggctcgagctccccgcggcagcaatggagaccctcctctccccctccacattgttcacgctaccactccgtggctccagcaggagaccgtctctggctgctagcgtctcgtccaggcccaccgtgtcctgctccagcgcgctcaagaggccacaggccggcgccgtcgctgcctcctcccatggagacggcgtcggcaggaactggatgtcgttcctgcaccacggcctggcggcggccgcgctgtcgctggccatcggcctgaccccggcgcccgcgccggcggtggcgtcggagttcgacgtgctgaacgacggggcccccgtggactcctacgtggtggacgacgccggcgtgctgagccgcgtcaccaagtccgacgtcaagcggcttgcccgcgacctcgaggcccgcaagaacatccgcctcaacttcatcaccgtccgcaagctcacgagcaaggctgacgcgttcgagtacgcggaccaagtcctggagaagtggtaccccacgattgaggagggcaacaacaagggcatcgtggtgctcgtcacaagccagaaggagggcgccgtcaccggggggcccgccttcatccaggccgtcggcgaccagattctcgacgccaccgtgtctgagaacctcccagtcctcgcgaccgacgagaagtacaacgaggcgatcttgagcacggcgaagcggctggcggcggcgatcgacgggctgccggacactggtggcccgtcgttcaaggagaacaagcgggagtccaacttcaagaccaaggaggagacggaggagaagcgcgggcagttcacgctcgtcgtcggcggcctgctcgtcatcgccgtcgtcgtgcccatggcgcagtactacgcctacgtgtccaagaagtgagcgaaccatgaatatggcgtgctgtgtacagtaaatcagtaatgttataccgaagagggttttttttttaatctcccaggttgaagttcttcgatctgttggaattcatagaaatggacggaaaaaaatgattattatgcttttacattgggttcattaaaatcgaca

SEQ ID NO: 146500 - DNA, 982 bp, Zea Mays
tgttgggcaacgctttagaatcagacctcaaggcatctggtctatgcttatgcagattaagttggacaaagagaagaaaatcctctccatttgggataggggtattggtatgaccaaggaagatcttattaagaaccttggaacgattgctaaatctggcacttcaggaacaggagctgctcgagtctcttgtcgaagctgatacggcaggaaagagctaaaaagatggaagaaaagaaagtgtatctgcaactgtacgaagcaatggaggcgctggtcaagatcgatctggagaccaacaagatcatggacttcatcaagtttgacgtcggcaacatggtcatggtgactggcgggaggaacaccgggcgtgtaggagtcatcaagaacagggagaagcacaagggcagctttgagaccatccacgtgctgcttggagctttttgctatgtctagttttctcgtatttgttgtataggaaaacatagaatagaattcaaatttggtggtcgcaaaagtgtgaatactttaattcatataaagttaggcttaacattagtgcaaacagttgtattttagtttagatttagagtacacttatgtatgcgttgtttgacaatgtttatttatgatatattgaatggtacttatttatattatattaattataatattgttcaatatatgtgtatgtatatttctctttcaaattattataacatgatatctgaaaaaatgattataaattgaagaatgtaccgccgtgtaagtcatttcatttaaatcttaataagacggttaccaaaatgtctaatatcagtctcttaaataagacggtttctaaaaacgtccattattagtcacctaaataagatggttttcatattgtaatcgtctattattgtaggatattcgagacggtttgataaatactttatgacttttaatgtttgtattctctacgattctttagaagcagtgt

SEQ ID NO: 146501 - DNA, 815 bp, Zea Mays
cgttcggggctgcgcaaaacagcgaacacacggcggcatcacggcgtgctgtccattggctccaccaaacagcgagccggcagcgcacgaagacgacggggttgctgcacatttcgtcgagcacctagcaagcaccatgggcactgcgcagcagcacgcaagcagggaggacaccgagtcgcaagccatggcggggctggaggagcggctgctgctgcaatttctgggcgccggcaaggggaagctgcagggggtggcgcccatgggaagaggctctctgctgaaaaaaaattctgggcgtcacggctgggagcagggggccgagcagcggcgtcgtgccatgaggagggaatagcagagccgctgctgggggaaatgcctgtgtgctatggaggccggctggtttccaggggagatgtagggcgcagggaaacaggggcgtcggcatggagcttggggacgtgctggaggttggagggtgcgtacgtgagagaagcaacaagcagccaaggccatgggcgagctcctgccatgaagaagaaaggggcgctgggcggcctggaagctcctgctccctgctgcagccgctcgccaggaggagcagggagggcgccgctgacctctgctggtcgtggagcaaggagcagggaaccggcggccaccacggctgggatgtggagcagaggacgcgcgcgcgtgctggagtcggcccaaggaagggggaggagacgccatggatggacagggagggagctccctgcgtgcttcgtggggaagaaaaagtggctggcggctgtgggaagtgtaggggtggg

SEQ ID NO: 146502 - DNA, 1307 bp, Zea Mays
acaggcgggcagcgcaacgaagcagcgtgcggcgactttgctccagcgatgacggaatccatgtatgtgtataaaataccggcagtccgcgccttacccggcagcaaagaccaaaggatgtcgacaccaggagccccgagcctggccacgacagcggcggctgtcctgtgcgtcctggccgcggcgctcgcggtcacggtcgcgagcggccagcagtgcgggcagcaggccggcggcgcaacgtgccgcgactgcctctgctgcagccgcttcggcttttgcggcgacacctccgagtactgcggcgccgggtgccagagccagtgcaccggctgcggcccgcgtcccgcgggccccggcgtggcatccgtcgtgccgagagacctcttcgagcggctgctcctccaccgcaacgacgcggcgtgccctgcgcgcgggttctacacctacgacgcgttcctggccgccgcggccgcgttcccggccttcggcacgacgggcggcgacgagcagcggaaacgggaggtcgcggcgttcctgggccagacctcccacgagaccacgggcgggtggccgaccgcgcccgacgggcccttctcgtggggttactgcttcaagcaggagcgcaacccgccgtcggactactgcgagccgcggccgcagtggccgtgcgcgcccggcaagaagtacttcggccgcggccccatccagatctccttcaactacaactacggcccggcggggcgagccatcggcgtggacctcctcaacaacccggacctcgtcgcgacggaccccgtgatatccttcaagacagcgctgtggttctggatgaacgcgcgggacaacaagccgtcgtgccacgccgtgatcacggggcagtggacgcccacggctgcggacagggcggccggccggggcgcgccagggtacggcgtgatcaccaacatcatcaacggtgggatcgagtgcgggcacgggacggacccccgggtcaccgaccggattggcttctacaagcgctactgcgatgtcttccgcatcggctacgggagcaatctcgattgcgacggccagaggcccttcaatagcggactggcggttgaggtggcggcgcagtgaaaacgtgtgtgtgtgtgtgtgactgtgtgttgcttcgtcggtttgaataaatttcatgtaaaaaccggtgcttcatccgaaaataaggcactttacttatgcaaagtatgtcatgttgtcttgtctctcaccgactcttcgtgggaaggtttcagaacaaggcaactagcagtctcattatgcat

SEQ ID NO: 146503 - DNA, 372 bp, Zea Mays
caacaacaacaacaaagcctttttgtcccaagcacgttggggtaggctagagatgaaaccccgtatgaaaacctcagagctcaacccccaaagaacagaaaagggaaacaaaggcaaaggagaaccgaaaacaacgaaacggggaaacacataaaagagataaaacccacaaggactagcaagatctaaaatggacacaagaaaaggtcaaacgattaaggaggaaaagcgaaactatcaatcagggttctggcacgtgaattgcacacttccaccccttcctatctgcggcgagctctttgtcaatattccactccttcaggtctctcttcacagcctctggatatgtatttagtaaataaataaaaaaca

SEQ ID NO: 146504 - DNA, 423 bp, Zea Mays
cagttattatgtctccatttcctcttcctcatgaccatatataatatatattattgttaaataaacgggcaaagagctgccacaaggaaggcgacgacctaatactatgccaacctgggcaaccagcgtcaagaagtatatacccagggccagacctgcccaacttgtctcacctgaaacatactacacaaatacctctggtttgtacaactacgaaggtgctcgccaaatagtagaagggcaccagacctgaataaatgcaagtccacaaccaggtctcttcagatgtagccatgttgtcgaggtgcatgcatgatgccggtgtagggcagggtacttcacgaaaacaacagggcagattatggcgccatagggtcgccagctgaaccagtgcgcatgtgtgtgtcggtcccgttagcttcc

SEQ ID NO: 146505 - DNA, 964 bp, Zea Mays
gtttgcacagtttgcacgagacgtgcagtttgcacctgatctgcagctgcaggcctgcagcccccgagtccgaaatcgttggacggggaaaggaaagcgaaacaagccacgctaagcaagatgcaccgaaaccctcgcgccgtcatccgcgccgccgtctccctcacccgccggccccccgccgttcctgccgcggaggctctccaaaccctgcctaaagcgacgccctcgcctgcgcttggggcgtggcggccagaccaggcggtggggcctttgggtagcgtcagccgccgccgcgccttctcctcctccgcggcagagtatggcaaggatgtggacgaggtgaaccgcaagttcgcggaggcgcgggaggagatcgaggcggccatggagagcaaggagacggtctacttcaacgaggaggcctccatcgcgcgtgacgccgccaacgaggcgctcgctgctttcgacgcgcttttagcgcgcctcccgcccaccgacgccgacgcgctccgccgctccatggggctaaagatggaacaactgaaggccgagctcaagcagctcgaggactagccgactaggctgcggaaaggtttgagttttgcgagaaaatttgggcggaatgtttggttatacacctgttcttttgagatagagattcctaggtgttccgcttggtgaataaattttagcacaacaatctgttgcattgcctgtttctgttggttcttggtgagaggagatccgaagctaatttgtaatgtgcctggtttaccaccttcacatgattggccactgttgaggccttaaattgatttgatagaagttagaccgatgcgttcctgtgttgttcggattaaacttcatttgcaatttttcttccttgattaatgttttggtgcaacatggatacttcattgttcagtatctgttgccatgacattgacaaaattttgagcta

SEQ ID NO: 146506 - DNA, 653 bp, Zea Mays
atggagcgtgcaggggaggggcacgcggctgggcaccagaggaccgagcagatgaacgcgactgcgcgcagggagcttcgacggcggcggcttgggatctccgaccatggggggtgggcatcagatagagagcagagggagcagggagaggggcgcggtgaaggaaaaccgagctggagcacgagcgcagggagatgggcgacctggcgtggttggggaaaaggcagggtgccggcgagctggaggaggagggagccggacgcggcaccagggagctcagcaagcgagttgagcgcgagctcgggaacgccaggctgggagccggcgcgcagaacagagaaccagggcgccgtggccatggggagagagaagctgggggagggagctgcattgctggagcaggacgccgagcaggaagcggaaggaagctttgggcgcgccagggagtgagatctcctagggagccgagtggtcaattgaagaagaagatcgcgcgtgaagataaaggaaccatggggcggtggctggatgttttcttccacgagcggcggcccgagaggataagcgcgggaggtggacgacgcgcgtcccaggagctggcgtgggggcggcagggatcagaacggctagacattttttttctttgccaggag

SEQ ID NO: 146507 - DNA, 2196 bp, Zea Mays
gaaagcacccaaaacacaggcggcgctcagcctccagctgtccgcctcccccacccggccacaccgttcgccacgcaccggaccaaccgaagctccaccaagctgcgcacgcaacgcaagcagaggaaatttccatagcctccttcctcgcatgagcttccgtccgggcacgtaagtttctcctgccccgcgccccgcgccccgcgcccctccgcgattcgacgccaccgaggttccccttgcttctgcggaatcgaggctaggttcttggttttgctgcgcgggagcattactagattctaggccgggaatgtagctcctgctgaatatttggaccgcgtgtttgctattttagtgtggggtagtgggccgatcggttcttggtctccagttatggtaaggcgttgacctgtgagcgcaacctgttcgttgatattactgaccggagcgccaatagagtcttgggtagtgaacctggagctgttgctactcttgtttccccatttcgtttcgaggaaagcgtggaaagagcttgctttggcttaggctcaggcccaggaccagaacttggtgtttatgcagtcgtagaatgtaacagcacagggcaaggaacctgagtggctctaatattttggatttggaatgacttcagtggttatcatatgtttcgtagatctgaaacaatgggctcaacttctgttatagagtaattgttagtatatatcgcaagcctggatggactcccttagatctagttcagttagagcagcgccagaaatatgcgttcaagttgataatcagtctaagattcctagtcaaacgagaatgcaagatgaacactcatactctcttagatctagttcagttagagtggctgttttcacatgtctgactatatagactgcatcgtttcctcatacataggataatgcatttggaacctactgacatttcatatggtgatggtgaatccattatatactatccatcatgaggaagatggccctttcaaatctgaagggtaaggcaaaatctaaatgccccaaatccattacagccaaagatcaccaaacctacagcaaacacttaacctgacaaaaaattattaaaccacaaatatagcatggcctccatccagaagtttacatgaaagatatcgataatttgtgcttacatgatcatgccaatgttaaacactgacaacagggtaaaagcgccttcaattttttctgtactgcatgtttattaattgagaaatccagtaagacatcatggtttgcatacactgagttgcctaagatatcaatttgttgaaatgtacttttctcctgcaaatttttcttttgagttttgacagattaggttcttttagattttcatgctaacatctcatgtatgatctgtgcaggtgccacatgagatgacatgttcttaacacctgttttcattaggcatttacaacagcagtgagatatctgcaaatgctgattagcttcaaggaagatcagatgaattttgtcgttgccaggcatgccttggtaagtacacactacttggagacgaagaaaatccacgattgtcaacatatgacagacggctcccctgctgtggctgtggaataggttggtcttgttttcttctaggtttcttgtgccctatcatttggtacgttgcagctcttctctattgctgcaagtactataatcgggatcctcgtgaacggactggactcgcagcttccgctgttctggcggttatcattacagctgtaactattgtaaccctgtctgttctgctgatatgttgtgtcaacaaacggttcttgaatagctgtgcagtttggcctaagtgatagcagcaagatatctattgcaaaacatcagcgttgaactactaactgaaatattctttagattctttagtcagtgcacttattgttggactgcaaaagggaaatcaacaaattatgtgtaacatgatccattatcacctgtgactgtacattacagattactggacctgtggaaattctgaagctatatgcagcaattccttctctcccctgaaacttttgaacaatgttgttactgataattggcctgatcagaacaatcagagttcagaacttgtatccaatctggctgaaattacatgagcagattaatctggaatggaaattgtgctgcattttttgtt

SEQ ID NO: 146508 - DNA, 1296 bp, Zea Mays
gaaagcacccaaaacacaggcggcgctcagcctccagctgtccgcctcccccacccggccacaccgttcgccacgcaccggaccaaccgaagctccaccaagctgcgcacgcaacgcaagcagaggaaatttccatagcctccttcctcgcatgagcttccgtccgggcacgtgccacatgagatgacatgttcttaacacctgttttcattaggcatttacaacagcagtgagatatctgcaaatgctgattagcttcaaggttattggttttatctttgccaaataactgtaatactgttgcagccaggggtttgcaccttggttttttatgaggggaggtaactttttttataccttatcatcatgttccatgcacaataattataacatgtttgttggaccttaaaattctcaatgtcattttagaagtgtggtcagtctttatggcgaagggtatttcaaatatctattagagccgttttgcattaacttcatttttcttctgaattgcacaggaagatcagatgaattttgtcgttgccaggcatgccttggtaagtacacactacttggagacgaagaaaatccacgattgtcaacatatgacagacggctcccctgctgtggctgtggaataggttggtcttggtgagtcaatttgctttggcaatgaactgcaatagtcttattcttgcttgtaaattctgtattgaacatgttgcattgcagttttcttctaggtttcttgtgccctatcatttggtacgttgcagctcttctctattgctgcaagtactataatcgggatcctcgtgaacggactggactcgcagcttccgctgttctggcggttatcattacagctgtaactattgtaaccctgtctgttctgctgatatgttgtgtcaacaaacggttcttgaatagctgtgcagtttggcctaagtgatagcagcaagatatctattgcaaaacatcagcgttgaactactaactgaaatattctttagattctttagtcagtgcacttattgttggactgcaaaagggaaatcaacaaattatgtgtaacatgatccattatcacctgtgactgtacattacagattactggacctgtggaaattctgaagctatatgcagcaattccttctctcccctgaaacttttgaacaatgttgttactgataattggcctgatcagaacaatcagagttcagaacttgtatccaatctggctgaaattacatgagcagattaatctggaatggaaattgtgctgcattttttgtt

SEQ ID NO: 146509 - DNA, 1038 bp, Zea Mays
gaaagcacccaaaacacaggcggcgctcagcctccagctgtccgcctcccccacccggccacaccgttcgccacgcaccggaccaaccgaagctccaccaagctgcgcacgcaacgcaagcagaggaaatttccatagcctccttcctcgcatgagcttccgtccgggcacgtgccacatgagatgacatgttcttaacacctgttttcattaggcatttacaacagcagtgagatatctgcaaatgctgattagcttcaaggttattggttttatctttgccaaataactgtaatactgttgcagccaggggtttgcaccttggttttttatgaggggaggaagatcagatgaattttgtcgttgccaggcatgccttggtaagtacacactacttggagacgaagaaaatccacgattgtcaacatatgacagacggctcccctgctgtggctgtggaataggttggtcttgttttcttctaggtttcttgtgccctatcatttggtacgttgcagctcttctctattgctgcaagtactataatcgggatcctcgtgaacggactggactcgcagcttccgctgttctggcggttatcattacagctgtaactattgtaaccctgtctgttctgctgatatgttgtgtcaacaaacggttcttgaatagctgtgcagtttggcctaagtgatagcagcaagatatctattgcaaaacatcagcgttgaactactaactgaaatattctttagattctttagtcagtgcacttattgttggactgcaaaagggaaatcaacaaattatgtgtaacatgatccattatcacctgtgactgtacattacagattactggacctgtggaaattctgaagctatatgcagcaattccttctctcccctgaaacttttgaacaatgttgttactgataattggcctgatcagaacaatcagagttcagaacttgtatccaatctggctgaaattacatgagcagattaatctggaatggaaattgtgctgcattttttgtt

SEQ ID NO: 146510 - DNA, 529 bp, Zea Mays
ataaataattaatcttaacttatgttaattcgaacgaaatgtgcggatcctgatgcttctccagcaacaaaaaaaaacaagtagaccttttacaatcaaagtattaaacaaacacgaaaaattcggaatcgccatttacgaagtgtaccctactgctctcatccttcaaccatccaaccacctccgtcaagaaacagaaataacgaaaaaacgtcccaacacacattctcaaatgtggcgaacaaccatcttgcttagttcacccccaaccaagtataaggtcaatcacacaaatgttccatcacctgcaaatctaagccgagggatctgtggctccctcaggtttgtctgtctccatccgctcggcaggaggctcctccgcagctccctcgctggttgtgctttcgccatttgatccctgctgctccggtgtctgaggctcaggagcttgggtttctgccggaggcggaataaagggggaataggaactggcttcggatatcatgatgttttgtacctgcagatcaag

SEQ ID NO: 146511 - DNA, 234 bp, Zea Mays
atgacaaccacaaccacaattatgccgcaacatccgcagaatcatcgggcctgtccatgtccatttgctcaccggaggcctgctgcacacctccctcactacccggctcaccagctgcaccagtcccgctttgttgttgttctggtgtttgagggtcagatgcttgggcttcaggctgtggaggtggagtatgtggtggcggagtctgtggcttcggagctggctttggtttag

SEQ ID NO: 146512 - DNA, 270 bp, Zea Mays
atggtgacatttgaacagaagggtgttgaggggtgggagaagaggatagagatgttggatcggttgggaagtagactggaggtgatggaggcagatcaatttcgactcaaggagcgggcggatcgtgcagccgcagcgacgagaaaggaaataaacctgcagctacgtcaaggtagaagaagctctcgtgtgcctatgacacgtgggcccggagtgaaggtagaagcacttgaatttgcagaatctgtgcttaactttaaaaattcgtaa

SEQ ID NO: 146513 - DNA, 138 bp, Zea Mays
ttttctttttttatttccctttttgttttctctttttcatttcaaattttctgtttcatttctttcttatttgtaaatttcaaatttgaattcaactgatgttgtgaacttattgttctcaattaaatacataatttg

SEQ ID NO: 146514 - DNA, 831 bp, Zea Mays
cccggaggtccccccaatgtcggacggacgacgggttcacccacaccccctgctggcggatcccccccctcgcctgcctgcccgcgcgccaagaactccattcacctccccccacactgccaggagcttcgcccggcccccgggtgccggacggccaccaggttcacccgtgcctgctgccggcggattcccccctcccccggtggctaggagctccatctgtgttgtcgtcgtgtgctgctgggcgtctcccccaatggcgttacagcatgggcattagagaactctatgacggatggggagctactctggcgcgcgtcgttcaccccggcggtacctattctgacgcgtatggaaggttgccttcatgttcctcacgcaagggcaggtgccgctcagggggtgcctcactactacatctacgtccacgcgctatcggccaatttcaccttcgaatcaatcttctcccaacgccaaatacctagtaagattgagtatactgcaatagagacaatgaaggcagatgggtttttgcagactcagactcaagtttgattgattgctatttgctaccaacaaaaaataggtctcgacaagaaagttttattgtacttcagatttgtatatatgatcaacatctctgtgtgcagtatgcttgagaatagctttaaggctgagtaacaaggttcatcatttttaatgcaccaacaccaatgagccccttctcagcacaatgaaattgtttacattatcttcagggccagtctacaaactttcacagcctgaagtttatgaacagttaatacacatcggttctaacttctgtgtttg

SEQ ID NO: 146515 - DNA, 1591 bp, Zea Mays
cccggaggtccccccaatgtcggacggacgacgggttcacccacaccccctgctggcggatcccccccctcgcctgcctgcccgcgcgccaagaactccattcacctccccccacactgccaggagcttcgcccggcccccgggtgccggacggccaccaggttcacccgtgcctgctgccggcggattcccccctcccccggtggctaggagctccatctgtgttgtcgtcgtgtgctgctgggcgtctcccccaatggcgttacagcatgggcattagagaactctatgacggatggggagctactctggcgcgcgtcgttcaccccggcggtacctattctgacgcgtatggaaggttgccttcatgttcctcacgcaagggcaggtgccgctcagggggtgcctcactactacatctacgtccacgcgctatcggccaatttcaccttcgaatcaatcttctcccaacgccaaatacctagtaagattgagtatactgcaatagagacaatgaaggcagatgggtttttgcagactcagactcaagtttgattgattgctatttgctaccaacaaaaaataggtctcgacaagaaagttttattgtacttcagatttgtatatatgatcaacatctctgtgtgcagtatgcttgagaatagctttaaggctgagtaacaaggttcatcatttttaatgcagcaacaccaatgagccccttctcagcacaatgacattgtttacatacaaagtacgtcaaaaggcaacgtctaagtaatatgttgatacacaaagcactgatccttagagacttcatccaacgagatagaaggttacatgtgcgttgttactatctcacgccaactcagacctctactggataacgttgcacaccatgcgactagacagacactaaatttgggccagttgcgagcaacatatgggttgttctcgtgaaggaagttgaacacctcgtccaacagctgcaacagaaaagctcaaggtcaaatttcaaaaaaaggcacaacacatgtttgcatattcccgtgctctaaaagaatacagaggacgatgaccaatatagaagttatcttaacaatgacagactgtcatcaccacctaaaaagtatgtggcacaaagcacatataggatcaaggctagccaacttcacaaacttcaatcagattttactgaccctgaaaacgataaccattagatcgttgtgaattacatgaagaacgtgggcatgagcgtgcgcaatacactagtgttgggaccatgcttcgtcgccgaaggtcctgcaaaaagaaacagcttcggctgaagctgcttgaacatgatgccgaagacaccgttcacgaagcttcggagctacaacatatccgaagacgaagggtcgaaccgacttaaagatagaatgaccatttagcccataagggtctgagtcattgttgtaaacttttatgaggggcataattgtaattcctcatgagttgtgtcctgtgcctataaatagtgaacagtattcctttactgttcacggattcctgtaattgccaacgcatcactcgggaattattgtttgtc

SEQ ID NO: 146516 - DNA, 1889 bp, Zea Mays
cccggaggtccccccaatgtcggacggacgacgggttcacccacaccccctgctggcggatcccccccctcgcctgcctgcccgcgcgccaagaactccattcacctccccccacactgccaggagcttcgcccggcccccgggtgccggacggccaccaggttcacccgtgcctgctgccggcggattcccccctcccccggtggctaggagctccatctgtgttgtcgtcgtgtgctgctgggcgtctcccccaatggcgttacagcatgggcattagagaactctatgacggatggggagctactctggcgcgcgtcgttcaccccggcggtacctattctgacgcgtatggaaggttgccttcatgttcctcacgcaagggcaggtgccgctcagggggtgcctcactactacatctacgtccacgcgctatcggccaatttcaccttcgaatcaatcttctcccaacgccaaatacctagtaagactcagactcaagtttgattgattgctatttgctaccaacaaaaaataggtctcgacaagaaagttttattgtacttcagatttgtatatatgatcaacatctctgtgtgcagtatgcttgagaatagctttaaggctgagtaacaaggttcatcatttttaatgcagcaacaccaatgagccccttctcagcacaatgacattgtttacatacaaagtacgtcaaaaggcaacgtctaagtaatatgttgatacacaaagatagaaggttacatgtgcgttgttactatctcacgccaactcagacctctactggataacgttgcacaccatgcgactagacagacactaaatttgggtacctctacaaagcacttaatttattgtgcctctttcgaaaaaggttcttttctttcgtaattacctaaccactgctatactatactaacattttgaattcacatatacaaactcggcttcattactactgacggaacatccgaagcagaattttttgtgtcatggagatacaaattaaaagttagtttattgtaatttccaaaaaaacagcagagagcacttaacaaggcaagggagtatcaatttaaattatgctaccaaaattgtgttgaaaacttacttttacacaaatccttgaaattaacaaaaaaaattgtcttccttgttcactcactgagaacttgtggtgataacggtcccaggccagttgcgagcaacatatgggttgttctcgtgaaggaagttgaacacctcgtccaacagctgcaacagaaaagctcaaggtcaaatttcaaaaaaaggacgatgaccaatatagaagttatcttaacaatgacagactgtcatcaccacctaaaaagtatgtggcacaaagcacatataggatcaaggctagccaacttcacaaacttcaatcagattttactgaccctgaaaacgataaccattagatcgttgtgaattacatgaagaacgtgggcatgagcgtgcgcaatacactagtgttgggaccatgcttcgtcgccgaaggtcctgcaaaaagaaacagcttcggctgaagctgcttgaacatgatgccgaagacaccgttcacgaagcttcggagctacaacatatccgaagacgaagggtcgaaccgacttaaagatagaatgaccatttagcccataagggtctgagtcattgttgtaaacttttatgaggggcataattgtaattcctcatgagttgtgtcctgtgcctataaatagtgaacagtattcctttactgttcacggattcctgtaattgccaacgcatcactcgggaattattgtttgtcaaggcaaaggtataaatgtacctaaacattgtgttcagatattcaaaattcatttaac

SEQ ID NO: 146517 - DNA, 1453 bp, Zea Mays
cccggaggtccccccaatgtcggacggacgacgggttcacccacaccccctgctggcggatcccccccctcgcctgcctgcccgcgcgccaagaactccattcacctccccccacactgccaggagcttcgcccggcccccgggtgccggacggccaccaggttcacccgtgcctgctgccggcggattcccccctcccccggtggctaggagctccatctgtgttgtcgtcgtgtgctgctgggcgtctcccccaatggcgttacagcatgggcattagagaactctatgacggatggggagctactctggcgcgcgtcgttcaccccggcggtacctattctgacgcgtatggaaggttgccttcatgttcctcacgcaagggcaggtgccgctcagggggtgcctcactactacatctacgtccacgcgctatcggccaatttcaccttcgaatcaatcttctcccaacgccaaatacctagtaagattgagtatactgcaatagagacaatgaaggcagatgggtttttgcagactcagactcaagtttgattgattgctatttgctaccaacaaaaaataggtctcgacaagaaagttttattgtacttcagatttgtatatatgatcaacatctctgtgtgcagtatgcttgagaatagctttaaggctgagtaacaaggttcatcatttttaatgcagcaacaccaatgagccccttctcagcacaatgacattgtttacatacaaagtacgtcaaaaggcaacgtctaagtaatatgttgatacacaaagcactgatccttagagacttcatccaacgagatagaaggttacatgtgcgttgttactatctcacgccaactcagacctctactggataacgttgcacaccatgcgactagacagacactaaatttgggccagttgcgagcaacatatgggttgttctcgtgaaggaagttgaacacctcgtccaacagctgcaacagaaaagctcaaggtcaaatttcaaaaaaagaacgtgggcatgagcgtgcgcaatacactagtgttgggaccatgcttcgtcgccgaaggtcctgcaaaaagaaacagcttcggctgaagctgcttgaacatgatgccgaagacaccgttcacgaagcttcggagctacaacatatccgaagacgaagggtcgaaccgacttaaagatagaatgaccatttagcccataagggtctgagtcattgttgtaaacttttatgaggggcataattgtaattcctcatgagttgtgtcctgtgcctataaatagtgaacagtattcctttactgttcacggattcctgtaattgccaacgcatcactcgggaattattgtttgtcaaggcaaaggtataaatgtacctaaacattgtgttcagatattcaaaattcatttaacaagatatgtgaatgatgtcgt

SEQ ID NO: 146518 - DNA, 1054 bp, Zea Mays
ttttctcttaatgtaggacaactagatttatatactctccatagtagctgctcttgacagaaaagaaagcaacagaagtgccattcatacatgtcaaaagattaatttgcagcaataaattataattccacaggtctgaattgtgtgtacatacatacatgtaaaaaaataatttgcaaggacaggtaataattccacatgtccgacttggtgggttacacatcctactatccccttgtttgttttttaaataatctggtcggatgacaattctactatttgcttctatattttctccaaatctccccttctcttgttctgttacagcttgttaatatcacttgctgcagacaaagtacgtcaaaaggcaacgtctaagtaatatgttgatacacaaagcactgatccttagagacttcatccaacgagatagaaggttacatgtgcgttgttactatctcacgccaactcagacctctactggataacgttgcacaccatgcgactagacagacactaaatttgggccagttgcgagcaacatatgggttgttctcgtgaaggaagttgaacacctcgtccaacagctgcaacagaaaagctcaaggtcaaatttcaaaaaaagaacgtgggcatgagcgtgcgcaatacactagtgttgggaccatgcttcgtcgccgaaggtcctgcaaaaagaaacagcttcggctgaagctgcttgaacatgatgccgaagacaccgttcacgaagcttcggagctacaacatatccgaagacgaagggtcgaaccgacttaaagatagaatgaccatttagcccataagggtctgagtcattgttgtaaacttttatgaggggcataattgtaattcctcatgagttgtgtcctgtgcctataaatagtgaacagtattcctttactgttcacggattcctgtaattgccaacgcatcactcgggaattattgtttgtcaaggcaaaggtataaatgtacctaaacattgtgttcagatattcaaaattcatttaacaagatatgtgaatgatgtcgt

SEQ ID NO: 146519 - DNA, 729 bp, Zea Mays
attgtgcctctttcgaaaaaggccagttgcgagcaacatatgggttgttctcgtgaaggaagttgaacacctcgtccaacagctgcaacagaaaagctcaaggtcaaatttcaaaaaaaggacgatgaccaatatagaagttatcttaacaatgacagactgtcatcaccacctaaaaagtatgtggcacaaagcacatataggatcaaggctagccaacttcacaaacttcaatcagattttactgaccctgaaaacgataaccattagatcgttgtgaattacatgaagaacgtgggcatgagcgtgcgcaatacactagtgttgggaccatgcttcgtcgccgaaggtcctgcaaaaagaaacagcttcggctgaagctgcttgaacatgatgccgaagacaccgttcacgaagcttcggagctacaacatatccgaagacgaagggtcgaaccgacttaaagatagaatgaccatttagcccataagggtctgagtcattgttgtaaacttttatgaggggcataattgtaattcctcatgagttgtgtcctgtgcctataaatagtgaacagtattcctttactgttcacggattcctgtaattgccaacgcatcactcgggaattattgtttgtcaaggcaaaggtataaatgtacctaaacattgtgttcagatattcaaaattcatttaacaagatatgtgaatgatgtcgtttattttca

SEQ ID NO: 146520 - DNA, 895 bp, Zea Mays
tcgacgtccccgtaggcgtcccctcgcccgccaccgtgcgccagccgccaaccctcccctcgtacccggagccccgcgccgctgatccactccggaactcaccatctatataaaccaccacctccccagggcccaggcacaagaaaccaacacttgagttcacttcacctctactacacaggacagcgcacacggcacaccccacccaccagggccactaccaggtcaccactcaggcactcaccaccaccgctctctcggaggccaaatcccccaagaccaagggaaaggagggagagaaagagaccgtcccctcccctcctttcctttcggtgaggtggtgagcaatggagccggcagcggcggtggagcggctggcgcagcgcctggtgccgccggcggagcccacccccaccggccctcacggcctgtcgtggctggaccggtacccgacgcagatggcgctcatcgagtcgctgcacgtcttcaagcccgacccggcgcgtgacggggcgagcccctcggagaccatcgagcgggccctcgcgcgggcgctggtcgactactacccgctggccggccgcctcgccgtttccgagggcgccgggggcctccacgtcgactgcagcgccgagggcgtctggtttatcgaggccgctgtgcggtgccgcctggaggacgtcgactacctcgagtacccgctccagatccccaaggacgacctgctgccgcacccgctgccgaggcctacccaccaggaggagagcaagctgatcctactcgtccaggtacgcgcacacgcacaggcggccgtccgtggattaattccatctgcattgtgcgggattgcgttgcttcgccgtggatttgcgactcccagctctctctctctctc

SEQ ID NO: 146521 - DNA, 2220 bp, Zea Mays
tcgacgtccccgtaggcgtcccctcgcccgccaccgtgcgccagccgccaaccctcccctcgtacccggagccccgcgccgctgatccactccggaactcaccatctatataaaccaccacctccccagggcccaggcacaagaaaccaacacttgagttcacttcacctctactacacaggacagcgcacacggcacaccccacccaccagggccactaccaggtcaccactcaggcactcaccaccaccgctctctcggaggccaaatcccccaagaccaagggaaaggagggagagaaagagaccgtcccctcccctcctttcctttcggtgaggtggtgagcaatggagccggcagcggcggtggagcggctggcgcagcgcctggtgccgccggcggagcccacccccaccggccctcacggcctgtcgtggctggaccggtacccgacgcagatggcgctcatcgagtcgctgcacgtcttcaagcccgacccggcgcgtgacggggcgagcccctcggagaccatcgagcgggccctcgcgcgggcgctggtcgactactacccgctggccggccgcctcgccgtttccgagggcgccgggggcctccacgtcgactgcagcgccgagggcgtctggtttatcgaggccgctgtgcggtgccgcctggaggacgtcgactacctcgagtacccgctccagatccccaaggacgacctgctgccgcacccgctgccgaggcctacccaccaggaggagagcaagctgatcctactcgtccaggtgacagcgttcgagtgcggcggcttcgtggtgggcttccggttcagccacgcggtggcggacgggctcggcgcggccaagttcatgggcgcggtgggggagctggcgcgcggggcggaccgggtctccgtggcgcccacctgggcccgcgacgccatcccggacccggccggcgcgctggtcggcagcctccccgagcccacgggcgccaagcgcctcgagtacctggccgtggacatctccgctgactacatcgaccacttcaagtcccagttcgcggcggccacgggcgggggccgctgctccgcgttcgaggtgctcatcgccaaggcgtggcagagccgcacccgcgcggcggggttcgaggacccggacacccccgtgcagctctgcttcgccatgaacgcgcggccgcttctcggcgcccgcctcccgcgtggcggcgccggcttctacggcaactgctactacatcatgcgcgtcgcatccacggccgacaaggtgtcctcgtcgtccgtcgccgacgtggtgaaggtcatcagggagggaaagaagcggctgccgtccgagttcgcgcggtgggccgcgggggaggaggacgccgacccctaccagatcacctccgactaccggacgctgctggtgtcggactggacgcggctgggcttcgcggaggtggactacggctggggcccgcccgcccacgtggtgccgctgacgaacttggactacatcgccacgtgcatcctcgtcaagccatgggcccacaagccaggggcgaggctcatcacgcagtgcgtgacgcccgaccgcgtctcgcgcttccacgacgccatggtggacatgaactagtgtcccgtcgaccacacggccttcgtctccgtcagccccccgtttgttcatcggtttcttgattttttttctctcgtctccgttactgtggtaattagcagtcggtaattagtaatcacgttgcagccttctggcgagtggtcaacaacaacaacaaaaatgcaaacagtaaactaatacgtatagcaataacaaaaaagatactaataacaaaggtggtggcgtacatacagacaagacaagcagccagctagagccaggagaggtgaaatgaaggacaggaggagaggtatggcgggacagctagaatagttgttgggattggtattggattccttattttctttgggtgtattctcttttgtcggtgccgggttttttctcttttgtgctcctttctggttcttgggggctttgatttgaaggaaatatcaaagctggacttggtgggaagccaccaactagtctgcccctaaatactataatcagattttatttgtaatatagtagtgttaactcttttttttgggtcaaattgtatacacatgaactacaagatatgtgatcttgcaaagaaaca

SEQ ID NO: 146522 - DNA, 642 bp, Zea Mays
cgacttaagagatttagctattcatatgtgtggattatatataggtttaatagttactacttcaattaaagtatttccagtcctaaaggaaagaatctctaagcatctgaaaaaaaataaaactctgagccgtccaattcccttcaattcctatctaaccaaacaagcccttagttgatttttttttgtttttagaaataacaaagcatggttgattaatggaagaaattagcacaaaatatcgctttcatggtcaagttttccttatcccgcaggggcagggcactgggaaggtgcctggaagcagccctcatatgctagctggagctgaaaccctatctataaagaaggctgaaggctccacacatacaactccgtagagctccctgctttgttcagacttcagagcccttcctcttgtgtccgtgcaaattggtgatacttgaacagggatctcctccatattagtgagcaggatgtataatcctcccagtgggcaggacatgtcctactacgatcatgtgcagaagcgccatgaggagaagggctgcctatatgcatgaaggaggaatcttgtattgagacttgatgttaaaagcttatccggagttcagtttcagaatattggttggtttagttgga

SEQ ID NO: 146523 - DNA, 2636 bp, Zea Mays
cgacttaagagatttagctattcatatgtgtggattatatataggtttaatagttactacttcaattaaagtatttccagtcctaaaggaaagaatctctaagcatctgaaaaaaaataaaactctgagccgtccaattcccttcaattcctatctaaccaaacaagcccttagttgatttttttttgtttttagaaataacaaagcatggttgattaatggaagaaattagcacaaaatatcgctttcatggtcaagttttccttatcccgcaggggcagggcactgggaaggtgcctggaagcagccctcatatgctagctggagctgaaaccctatctataaagaaggctgaaggctccacacatacaactccgtagagctccctgctttgttcagacttcagagcccttcctcttgtgtccgtgcaaattggtgatacttgaacagggatctcctccatattagtgagcaggatgtataatcctcccagtgggcaggacatgtcctactacgatcatgtgcagaagcgccatgaggagaagggctgcctatatgcatggtatggtactcgctaacctttctgttgtttctgttcttctcgattacacccatctctgttatacatgtgtgtgtggttttgttaacatagtttccaccatgatacccgtgatgaaaactaagaacactttgaactctgaaacttgtcttcattcatttctttgggaaacaaaagaaggaggaatcttgtattgagacttgatgttaaaagcttatccggagttcagtttcagaatattggttggtttagttggatagaaagaagtgtggagaataattcacaagtatactcctggccacacgggttcgaaacagcctctccgcgttgtttgcagagaaagccttactttggtttctgtgtcacaagatcagcctaacatgaacgagaataccttggaaagaccaaactaggaagtcatatgcaacatacaccttcatacaaaccaattatttggaggtctcgtcttctactttgaaattgagttaggaataccagcctaggtatattagtaaatattactcagcagcaacttttgaaaagcggtttgagttttcaaaagagaaaaccatgtacagtttgaggtttccagaaaaaaattgagtaaacatgaactgggaagatatccctcccatatggaaattaagggaacatgcagttctgagttctcctaagaaaacctcctaaagtattcttcgtgctcgctttcctcttggaccatgtgatgtgagtgagttcacggcattgctagttttcctcttctttattagtctttatttcggcacgtccattcaccctttttctttagcatctggccagccaaacagagcaagggtccatggctatcgttttcaaggtcccctactgggctataaatccacgacagcgaggctgtggtgcctttggctcatgtgaatgatcaaacgggaaatgtcaatttggttgttgctagttgctggtccttttcatgtgacatctgccttcgtctagatgcgatgtttgtccttggttcacatcgcttctgttggaacaattatcctctcgaccttgagcttcagctaatgatttaggtctgagttcagattttgagtaggctgttggctaatcaagcttcagttaacaaaggaagctttttttccccctctcttttcagcctgttcactgcgtgctgctgcttctgctgcttcgagacctgtgagtgctgcctcgaggctatctgctgctgctgctagttctgcttggagggcatgggcgtccatcatcgtggagatgtggccatgcgggacacccaccgccgaataaaatgctgtacttatatgcacgcacgttagaaatgcattagtgtctgtttgatgtgatcttttgtgtgtgtgtgcgcgcatcttcatttgcactggaaaatgctttattatttgtgaaggtctgtaaatctgttgtatgtatcttggtcagatgaactctattattgtgccatatatctcgcttgattggacaaatcctttcgaagtttcctcttgtccttgcttaccgatggcagggttagaaggagagagttcgaaaaacaaaagtatttgtgactgtttatttttcggatgcgtgaaagctgcagtaactttatgttggaatgcaattcctgctgtcaccagccatacgcaaactcaggcagatgtgtttctgacagatttgcatcatcttaactatgcgctaataatttgatataactgggaatagactagctgtagttaggagtcgaaacgagtccagccaaggctcgatcaagccccacgagtcaattttctagagtcttgttgtcttcatggaagggtcttaagggacttctctgaaacaaggcggcttcaggagtcaattccttataaatttttattatccctcggtggaaaaggtcgaaacattatagaatagcattttgatgagatatatgagagagactagaagaaaactaatgctttccggattcatgaaacagttgctggcgcgcacattatttcctctcagttcacctttatattgtaattaagattctatttaaattcattggttctcaggttagctagct

SEQ ID NO: 146524 - DNA, 1486 bp, Zea Mays
cgacttaagagatttagctattcatatgtgtggattatatataggtttaatagttactacttcaattaaagtatttccagtcctaaaggaaagaatctctaagcatctgaaaaaaaataaaactctgagccgtccaattcccttcaattcctatctaaccaaacaagcccttagttgatttttttttgtttttagaaataacaaagcatggttgattaatggaagaaattagcacaaaatatcgctttcatggtcaagttttccttatcccgcaggggcagggcactgggaaggtgcctggaagcagccctcatatgctagctggagctgaaaccctatctataaagaaggctgaaggctccacacatacaactccgtagagctccctgctttgttcagacttcagagcccttcctcttgtgtccgtgcaaattggtgatacttgaacagggatctcctccatattagtgagcaggatgtataatcctcccagtgggcaggacatgtcctactacgatcatgtgcagaagcgccatgaggagaagggctgcctatatgcatgcctgttcactgcgtgctgctgcttctgctgcttcgagacctgtgagtgctgcctcgaggctatctgctgctgctgctagttctgcttggagggcatgggcgtccatcatcgtggagatgtggccatgcgggacacccaccgccgaataaaatgctgtacttatatgcacgcacgttagaaatgcattagtgtctgtttgatgtgatcttttgtgtgtgtgtgcgcgcatcttcatttgcactggaaaatgctttattatttgtgaaggtctgtaaatctgttgtatgtatcttggtcagatgaactctattattgtgccatatatctcgcttgattggacaaatcctttcgaagtttcctcttgtccttgcttaccgatggcagggttagaaggagagagttcgaaaaacaaaagtatttgtgactgtttatttttcggatgcgtgaaagctgcagtaactttatgttggaatgcaattcctgctgtcaccagccatacgcaaactcaggcagatgtgtttctgacagatttgcatcatcttaactatgcgctaataatttgatataactgggaatagactagctgtagttaggagtcgaaacgagtccagccaaggctcgatcaagccccacgagtcaattttctagagtcttgttgtcttcatggaagggtcttaagggacttctctgaaacaaggcggcttcaggagtcaattccttataaatttttattatccctcggtggaaaaggtcgaaacattatagaatagcattttgatgagatatatgagagagactagaagaaaactaatgctttccggattcatgaaacagttgctggcgcgcacattatttcctctcagttcacctttatattgtaattaagattctatttaaattcattggttctcaggttagctagct

SEQ ID NO: 146525 - DNA, 1171 bp, Zea Mays
acagagcaagggtccatggctatcgttttcaaggtcccctactgggctataaatccacgacagcgaggctgtggtgcctttggctcatgtgaatgatcaaacgggaaatgtcaatttggttgttgctagttgctggtccttttcatgtgacatctgccttcgtctagatgcgatgtttgtccttggttcacatcgcttctgttggaacaattatcctctcgaccttgagcttcagctaatgatttagcctgttcactgcgtgctgctgcttctgctgcttcgagacctgtgagtgctgcctcgaggctatctgctgctgctgctagttctgcttggagggcatgggcgtccatcatcgtggagatgtggccatgcgggacacccaccgccgaataaaatgctgtacttatatgcacgcacgttagaaatgcattagtgtctgtttgatgtgatcttttgtgtgtgtgtgcgcgcatcttcatttgcactggaaaatgctttattatttgtgaaggtctgtaaatctgttgtatgtatcttggtcagatgaactctattattgtgccatatatctcgcttgattggacaaatcctttcgaagtttcctcttgtccttgcttaccgatggcagggttagaaggagagagttcgaaaaacaaaagtatttgtgactgtttatttttcggatgcgtgaaagctgcagtaactttatgttggaatgcaattcctgctgtcaccagccatacgcaaactcaggcagatgtgtttctgacagatttgcatcatcttaactatgcgctaataatttgatataactgggaatagactagctgtagttaggagtcgaaacgagtccagccaaggctcgatcaagccccacgagtcaattttctagagtcttgttgtcttcatggaagggtcttaagggacttctctgaaacaaggcggcttcaggagtcaattccttataaatttttattatccctcggtggaaaaggtcgaaacattatagaatagcattttgatgagatatatgagagagactagaagaaaactaatgctttccggattcatgaaacagttgctggcgcgcacattatttcctctcagttcacctttatattgtaattaagattctatttaaattcattggttctcaggttagctagct

SEQ ID NO: 146526 - DNA, 1208 bp, Zea Mays
ggacgagtgacaagtgctctcccaccaccacccgccagctcaagccgcaaaggccaggccaccactccttacctttacctctcttttttttccttcattcacgaatcccttcttccgccttcttcgtcgggccatcctcaccgacgagaagagatctcctcttcggcacgaggaggacagcaggggagaaagatgggggggcgggtggatcacgagtactcttacctgttcaagatggtgctcatcggggacagcggcgtcggcaagtccaatatcctctctcgcttcacgcgcaaccacttctccctcgactccaagtccaccatcggcgtcgagttcgccaccaagtccctacagattgacggcaaaacaataaaggctcagatctgggacacagctgggcaggaaaggtaccgtgcgattacaagcgcctactaccgtggcgccgtggccgccctgcttgtgtacgacatcacgaagaggcagagcttcgacaacgttcacaggtggcttcgtgagctccgcgaccacgctgactccagcatcgtgatcatgatggtgggcaacaaatccgacctgatccacttgagagctatctctgaggacgaaggcaaagcgttggctgagaaggaagggctgttcttcctcgagacgtcagctatggaggccatcaacgtggaggaagccttccagactattatcacggaggtgtatggcatcgtcaacaggaaagcgctggccgccaaggaagcagcagccacagctgccccattgccttcacagggcaaaaccatcagcattgacagcaatgcaggaaatacaaagaaggcatgctgctctacatgaataaaaaagatgtaacctttttaaaatatggtagaaaatggagcatatatagtcatcataaaatatggtgtggaggcgatattataactactgctattctattcttttcttttctttaatttttttttgtgtgtggacaaaatcgagtacatgcagtgtttctgaatcaaaagttagatattgtattaggattcataccttttatgttctccaagttgaatggtactactgcagaatcatagtccaatgttactgtagagttcaagtgtgaatttgtgattttatcacgcgttctaattgtaagacaatttgttttgcttttaattaattgccaaggccagcggccagcaatcatgtcgtct

SEQ ID NO: 146527 - DNA, 1764 bp, Zea Mays
tactttgtctcggattcctccttcactttcctggattttctctgccgtgcattggagtctgccttcattctcttgaacatttttcgttttttcaaggttttgttcttcctttccttgaaccttctcttctttgtcagcgtttggctccagtgcctctaacaatttacctgttttgcctaatatttctttgtaaccttcttgaaccccacctgcattatcttggattttctctgctttctcttggactttccctgccttctcttgctcttcaactgctttgtgtttgatcttcacgtcataacgagaaatcctttcagactttggcagtgccttagatccaacaactcttaccgtctggttcctccttaggagtaacactgcatccttttcaataagctcgctagtagcgcgcactgttcttgctctgctaatgccgaatctttggctggcaacgccatcgatccgggccatcaggtccaacagatttctcctctcccgagcccctgactcaggtaacactatcccgttctttagtggctggggtaacttcttggcaccgaccaatggcacctgatcctcgtccaagggctctgcatctgcttcctccttttcgtcatcgtcaaacgccaatgctgaactcgactccctctctgattcagctctgttgctggcagcagctcgcttcgagatggtctgaacatcaacaaccgcacaagggttccccaccacagcgagcccgttccacaccttggccgacactgctttgctgagaaccacgagacgctggacgatgtcggccatggagggccgccgctccctgcacgagcgcacacagctagcggccagcgcagcaaggtccttgcgggtgagcgggtcgcgcggcggcgccacacgcggatcgaacagcgaggcaaccttgcctttccgcaaaagtgggacggcccactcgacgacgaacggcggcgagtgctggacgtcgatggccttacggccgctcatgatctccagcagcaggatcccgaagctgaagacgtccgtcttggtgctgaggctctcgggcgtgacgtaggccgggtcgaggtagccgagcgtgcccgcgggcgccggcgtggcgacgccggcggccttgggcacgcggagagcgaggccaaagtcgccgaggcgagcgccgaggttggcgtcgagcaggacgttggcggacttgacgtcgcggtggatgacgggcgggtcggcgtcgtggagcgcgcgcagcgccctggccgtctggagcgcgaggcggaggcggcgaggccagcccggcgggcgcgggttgcggtggagcaggtcgtagagcgtgccgttgggcatgtactcgacgacgagcaggcgcgcggcgggggccggggcggggcccgggtcggagaagccgaggaggttgacgaaccgcgggccgctgacggaggagaggatgcggatctcgttgtccacctcggggcggcgcggggagggccgcttgacggcgacggcgcggcccgacgggagcacggccttgtacacggccccgtggctgccccggcccagcagcgccgcgtcggcgaagtgggacgtggccgcctccacctccgcgtagtcgaagcgttcgatggccgccggcgccggaggcagcgcgggcctggacgagccggcccccggccccgagcggcgcgaggttgggagcggcgggatggccgtgatggagcggcacgtcgccacagacgagtccgcgcggcaggagaggtaccccat

SEQ ID NO: 146528 - DNA, 791 bp, Zea Mays
atctcccgttcgtctctctccctgagttctctcacgtcgcgccgtgactccctgctcgctcgcgcacagctcggagcttcctcgccgcgctcgtctgccgcgcccgctgcttgctcctctgctgcgcgctccacctcgtctccatggccgagcgctccttcttctccacgcgttcagccagcgcctgatgcctctccctttctaacagcgcccacactcggagctcgtcggcatggtctgccgcggtgctcgccccagcctcgactcccgtccgggccttgctgtcgtgctgctatggtgcctaggtcctggcgcgctcgtcgtcggctcggcatctcctcgagctcgcccctgccttcctgctcggttacttgtgctcgcgtcgacctcagtcaccggggccgactgtccagcgcctgctccatccatggtcggctgcagctcgctagactgtctctgctcccttgccgcgacacccttgctcggtcgcgcctgaccggatcttcctgctgctcgccgagacccctcccatggatgctcccagccgaggcccttgtctcccatggccgccgtcgcccgtctgcagtactccccatgccgcgcccagctcgcgaagtccctgcgtgtcgccgttccgcctcccacgccggtgagaaccgttgttcacgctacgtcgtctcatcatacagcgtgttttcctcgctgttgaatatgtttaagtgtgtgatacaaggtcgaattaataatgcgaacaacaggtttcgggtctcgaacgtttagttgataggttg

SEQ ID NO: 146529 - DNA, 797 bp, Zea Mays
acggagaaaaggagtgcagtgtactcctagctagtagctcctcctatagagagcaccttgtgttcttgcgctttctagctaggaagctctccttccttccgcgtagcctagacgaccactgtgcctgatcctgtcagctcagaacgtccgctctgccctccacgagtaagcgtggcgtcgccgtcgccgtcggggcggcgcttcccgtcggacaccacggcgatcgcgagctggcttccgtcgcccgccggcgccggccggggggacgacctctcgctgggtttcaatgccggcgccgcctccgcctcgtctggcgcctcgctggcggcagggctctggggctccgcggcgtcgcgccaggccgcggctgctgccgctgccgccgccgccgccgcggcgctcggctacggggcgataggccccaccggcgacgtcgggatgctcgtcgtcgcgcctccgggctcgttccaccaccagtgggcagccgacgacgacgactcgtgctcccgctcgtcaccgcggcgcagcgcaccctcgtcaacgcagacgccgcctccggcggccacggcaatccgcccgtgtcgtccgcgggtgccatccagttttggcaccaggagccggccccggatgggcatgggtcccacggcgagaaggccgtcgccatgctggatcacgccagcggcgggcccgggtccgggcgtggcgacgtgccaggactggcggcaaccaggttaagtttccctccgcacagccgctgccgcacgtgctgcaacagccgtggctcgacgaatctctag

SEQ ID NO: 146530 - DNA, 229 bp, Zea Mays
ctttctttgtttcagctcattgtgactgctagcagcagtatagcagtgcagtggctcagcttcatgttactgaaagtgttgccatgtcgtgccaattggagttccttgttcacatcatcagccggaaaaagtgcatcttcgtgaaaactggaaagtcggggctgttgccctttggaactactactccagtagtgaatttcaaagaatttccatggaacctattggacat

SEQ ID NO: 146531 - DNA, 330 bp, Zea Mays
atgggcgttggcgagagggggcgcggaggatgggggcgcgatgcgggagctgctgacgcgagcgcggagattgggcagccggagccgtttgcgggtcgctgctggcgttggtctaaccgtaccatttgtttggtccatgcggcggtgctgagcgctgtctaccttcagggagcatggtcactgttgagggcgattcttttatttgatgccgtggagcgctacaatatggggccagaaaaatatattagggggagggcgcgggaggcggcattggggacgaagatggtgtgggggccgaagggaggcgggacagagaagtgcgtaggatag

SEQ ID NO: 146532 - DNA, 105 bp, Zea Mays
taaaatataatggctgcatgcattctagggttttgcttgtgtgcattcaaccgggaaatttgaacaccaaatcaaattggatttgaagcaaatttggaatttgtg

SEQ ID NO: 146533 - DNA, 919 bp, Zea Mays
gacatgtgagccctgtaggagagggccttcactcgtcacatgcgctgacgcgcatccccccggcgtggcgtgcgctttgatctagctcttcttctcgaatccagcccgaggcctttttcttctgcggtttcatccgtacccatcctgcacacgaagcctagaatagccctcccctgctccgccacctcctcggatcccgaccaccccacccccaccccagacaacaggttgatggaggctaagatgggacgcttcttcgagtccgtgagcaatttcttcaccggaggcgaccacatcccctggtgcgaccgcgacctcatcgccggctgtgaaggagagcttgtcaatgctgtaaatgaggaacaaaggaatgaaagccttatgaggttgtcatgggcccttgtgcactccaggcagacagacgatgtaaaccgtggaatcagcatgcttcaagcttctttggataattctgccagtcctctgcagactagggaaaagctgtacttgttggctgttggattctacaggattggcgactactcaaaaagcaggcaacttgcagatcgttgtttggagattcaagcggattggcggcaggccatatcgctgaagaaggcaatagaagataaaattgccaaagatggtctgattggaataggaattgcgacaactgcggtcggacttctggttggtggaattgcagctgctgttgccaggaagaagtgaggccaatatattggatcggcagctcattgaactaggggagctcctgtctctgtaattccaacttttctgttgttaccttggtgatattacagttgaattgccactctttatatgtacgaagtgatcgtatgataatgataacaccattgtgacattatagctttcatcgatctgtcgttttattctcgccaaa

SEQ ID NO: 146534 - DNA, 4863 bp, Zea Mays
gccccctgctcatctacaaggaacaagatgagctcgtcatccgaaggtcatccctgctcccctccttcccccttgtctgccccctgcactctgcagttttacattctgcgcagcacggcagtttcacattctgcgcagcactctgcagttctatacctctatgttctactgccttacttcaatagtacttagcttcatctctgccaaccagtttccatcagcccagcagtagcatatctagtgcctagtattgacttgacctctatctgttgacatgttcagagtttcatgctgccggtggacgaagaggtgctaatgttgaggtcttattccccgggtccaatgtggttggcagtggcagtgcaactgcaagtgattctgttcctcccgtgacctcaaatgttgatagcacaggccctgcttcggcattatcagctgctgcagactcaaaaagccttgctgaaaaggctattgcagcactccctcctgagcttagtgcacaagcaactgacccaaaaagaaaggcaaggtcacaggacccaggatggaagtttgggtggtggccagacacaacgaagaaggattttgttcagtgtattttctgttcgaagattgttccttccggaatcaaaaggttcaaacagcatcttgccggtgggtttggtgacaccatgaagtgtgctagagtaccagaactggtttcaaaggaaatgcacatgtatttaaaaaggaacatgagacttgtgattactgctaatactgaagaaggtgaagagggagaagagcgggatgatgaaggtcctgaaccaagttctgggacaaaaaacaagcaaacaaaaaagaaaattgcccaagctgccatgtcctcatttcttgtatctgctcctccaaaaccaaaagaagtagttgcagagaggcataaaaacaaaacttctcagtccacccttgagcactgcacaaagaaagggacacaagcacagcaaattgttgacgaccatgtagctgattttctgtatgagaacaagattccattgaatgtcgtaaactcaagaagttgggagattatgttggagtctattggtcagtacggtcctggatatcatggcccatcgtatcatgaggctagagtaccttggcttgaaagggcagtgaagagaacatcgacattgagagataagcacgaagaggcttggaaggaatatggttgctcaattatgtcagatgggtggaccgacacaagacaacgtcatttgatcaacttccttgccaacagtccagcagggacatacttcctaggttctgttgatgcatcaagtgaggtagcaaatgccaatatgttggcagatccgttggagaagcaaataatgaaggtgggcaaagaacatgttgtccaggtggtaactgacaatggagccaatttcaaagcagcagggcggatcctaatggacagaattccgcatctgttttggactccttgtgcagcacattgtttggatctattgttggaggatattggcaagatcaaggagttcaacacttgcatcaatatggcaaagaaggtttcgaggttcctatacaagcatgggcgacttcacagcctaatgagagaaaagctaggcggggaccttgttaggccgggtgtcactagatttgcaacatcattcttgactttggcaagcatgtacaagcataagaatagattacagggcttgtttgttagtgatgaatggaatggctctaagttttccctacttcaggaaggtgtacaagctgaaaatattgtcctttctgtatcattttggcaaactcttgaaaattgtctacgggcttcacaacctcttctcattgctttaaggattgctgacggtgatgagacgccagcagctccagagataatggcagctatggacaaagcaaaagccaccatacaagagtcactaaaagagaagccaagattacttgttgaagtcatctcatgctttgagaagaggtgggaaactcagatggagcagaaactatatggggcagccctttatttgaatccaggtaaattctttaccttgagggagaaagacagaaggcaagctgcaagacttagagctatgttcaatgatgttttgtggaagatggtcagtgatgaggatgagcaaacaaagattagtaaacaggcagatgactacgaaagatccgaaaggggaatgcttttcaaaggcaggagcaataagagaaagagagaaaaaaaagtcctatcctatggtggggtgcatatggaggactggcatatgaactacaaagcctagcaaaaagggttataagcctctgttgtgcagcttctggttgtgagagaaattggtcagactttgcagcaatggaaaataggtttcgcacactaagagagctgggatccaagggaaaaagaagcaacccactggtgcttgaagagtttatgtgggaaaatgaatgggttgaagaaaataatgaagctgatggtgatagcagcatatggcatgctgtggatgaggcattaggggcaactcatgctctccaaggcagaaatttgccaagattagctgctgcaggtgctgcttcaagttctcggcctcaacgaacctatgttaggacaaggaagcgttcaagaaatgcagcagcacaagatattggagaagatgatagtgatgctcaagaagatggtaatgctacagcagatgcagaagaacaacaagaacaaccactagaagcaactagagatatggaccaagatgaatctgaatctggaggagggaaagctgctgctaatgctttttgcttggatgctgatctgctctaggtagcagactagcaggtactctatattcagtatattgtttcacactttcacttatgttatattgttatgttacattcacttccaattgaaagctgctactgttatatttcagtaattcagttccgaacttccaatttaatttcagttctatatggcttatatgcctagaaatacatatatacatatatatatggcttatatgcctaggaatatacaaaggacgactagggacgaccagaggccgaccagaaccgattagtcggccgattagtcgccctaatcgcgattaggcgcctggtcggtcctgtcggtcgactagctggtcgcccgacttgaaatcagtggtcaccaagtcggtaccttgtcgactcgactcgacttaccgacttgaaaaccttgccaaacagattcaataacttttcttgtacatgcagtatagtaataccttaaagtccacagcgtccatcactttttcataataaggtaatgcttgtttaagccttccagtattcatcatctcatcaccttccctcaaggccttccatatgacaattttacaaatacgtaacaaatacatgtgcattaaagcaaagatgaaaactgcaaaagtccaagatgttagaaggactaggtacagaaaacagaaggagatcctcagtgcaaattaatcagacactggcatttaatacatattttatatactacacaaataactttataatattctggcaaccaaattcaaaactggcaaccagtttgaaaaatgctggaatttcaccaaaacagaccaatttccatggtaatcagaaaccattgatgagttgcaaatggagcctgaatgtggtaaaggaaaaacatgttgggcgttctctaggtcaaagtgggcgataggctcttattctctattctttttttctttttctaaacatcagtcaattttactacttatatgtcaagcatgacctaatatagccctcttattgtgtcccctctctgtttttaggcaagagccccacatacaaaactttccaacgctaacaagcaattgcttctcattgtcccaagttcatgagcgagcagtgcatataagcacatgaatcatctaaaaattcatatatgtgcagatgtaaaatcatactggaattaacatatacagaatcacaaaaacataaacagtttttctagtatgctgatcccattaactccagaatatagcactctcatgtattatgatctgcacttgaagcatttatatttacttttcagtttatgcttacattcactctctgttaattctgatccttcccaacaatgcatagtatgcatttctatgattgatgttgacatgtagtcaaataacaaaacaataaaaggttcaagcaatctaccagtaccctcacagttcaatagccagaataaaagttgagtcttgttgaaaacaatgaaacaagaacaaattgtactgaacaataagccatcatgcaaaataactaacataatataaacatgaaataaaataaaatctgaagattactcccatccattacatagaagtcctttaaaagtgcagtcattaaaggggtaactatataagaaaggtcaagctaaatcactggagtttcaacttaagtggagtaatgtttccatcagtaccttgatgcactctgcttttgtctttgcatcgattaccatgttctgtcgattcctatatgcagctattagctctttggtgcgcttatctttggctgccttttcttctgcactttgagtctctccaccaaggcgtatatttcttccaccgccatactagaaggaaaggttatggcaaaaccagaatcagggaaacacagcaagcccacaaagcatttcacaattaatcaagctccatcaggaattaatggcatatatcatagaacagccacagtttacaaacatgcagtatatcagtatcagctaactgaaaccaaagaaagatacgggggaaagcaatatatcatggaatgatttttaagtttatttcagatgttatctctcag

SEQ ID NO: 146535 - DNA, 1165 bp, Zea Mays
cccgcccacgcgtaaccgccgcccgcctcccgtcgacataacggaagttaaccaccgtaaccgcgtccgcttcacgcggcccgcctataaatcccgtcgtcctcccatctccgtccctccctcctcatcaaccagctgatttctccatcgaatcttgtcggcaaagccaataatcaatcaccagcgacatcaattccttgcccgaccgcccggccgcgcgtcgaggaaccgccgcacagttccatgggcaaggtgcgctccttcttctgccgcgcccgcagcggcaagcgcggtggctcccggccaggcttgtcgtcctcgtctctctcgtccccgtgcccctccgcgaggagggcgtcgccgccggccggggacgagacggagcgcgtcttccgcaagttcgacgcgaacggcgacggccagatctcgcggtccgagctggcggcgctgttcgagagcgtgggccacgcggccaccgacgacgaggtgtcgcgcatgatggaggaggccgacgcggacggcgacggctacatcagcctgcccgagttcgcggcgctcatggactcggcgtccggcgacgccgacgccgtcgaggaggacctgcgccacgccttctcggtcttcgacgccgacggcaacggcctcatcacccccgccgagctcgcgcgcgtcctgcgcggcctcggcgagtccgcctccgtcgcccagtgccgccgcatgatccagggcgtcgaccgcaacggcgacggactcgtgtccttcgacgagttcaagctcatgatggccggcggattcggcaggatcggtgcctaggaacaaggattctgccctgctccgctccccacaaaaaattggattcatttcattctatgtacatatatgcatgccctatagatttagatcacactggaatcacggagatgtttcctaggtccggattatttacacgcccagcggcagcacataaaaagcccccattttacttactagtttggatgtccaaacggattgttttggcttcatcaattgcaatattgagtttgcgctcatttgtggttccaaagtgacatttctcttctacatttccattctaatctaaattatataatctaggagagaaacaaataccctcttggatagggataatcttgggactagtttggga

SEQ ID NO: 146536 - DNA, 2692 bp, Zea Mays
atgaggccaaacaactctgttgtacctcacacacattggcaatgtatcccactccttgcccagcacgtcaacacagtgtttctccagaatatactgcagtctgcggcttggtcagttgccgaagccgtgcagtctgcggctcctgcctacagctacaggtgccgtgagcgtcgacgacgccgcctctcgtgctctgtctgtggcgcacatcaaatcctctcgcagaacagccaaaccaaccaccaaaatgtaagaacacacgcccggcgctgtgacgcctacgctactagtcagtactcagtacagtagtcacccccaaagctccgcctacgcacctcttcccactcgcccggccgcggctatggcggccaccacgtccacaacgccggccgtctccttctccctcccctcgcccccgcaccgccaaggggccccgcgccgccgcgcgcctttcctcctccgtgccgcctccaccgcggcgcccccctcccccgacctctccatccagctctcgccccgcgcgtccccgcccgcgtcgacaaacggcgccgccaccgcgcttggacgccccgtggccgcctccttcgcccgtgaccgcgccgaggacctgcaggccgaggcccgcgccatggcccgcgccgccggcgccacagtctacagccccgagctcctcgcctcccgctacggctcccgccccttcaaggtggcgctccgggcagcggaggtgctgtccaagctggcgtcgttcggggtgaaggtcctgctggacgagcggagaggggagtcgtcctcggagaggagacgcgccagagcggtggagttgcgcagcatcctcaccagactgggcccaaccttcgtcaaaattgggcagggtctgtccacacgccccgacctctgcccggtcgagtacctcgaggagctcgccgagctgcaggattcacttcccacatttccggatgaggatgcatttgcatgtattgagagagagcttggcttcacgcttgattcaatctactcggcaatttcaccttcccccattgcagccgctagtttaggtcaagtttataaagcaaagttgaaatactctgggaagctggtggctgtgaaggtgcagagacccggtatcgaggatgctattgggcttgatttttatctacttagaggactcgggtttcttataaataagtatgttgacattgtaaccagcgatgttgttgcccttatggatgaatttgcacggagagttttccaagagcttaattatgttcaggaaggccaaaatgcaagaaggtttaaaaaactatatgccgataagcaagatgtcttagtgcctgatatattttgggattacacaagtgctaaggttctaacaatggagtggattgagggtgtaaaattaaaccaacaagcagctattgaaagtcaaggattgaaggttctggatttggtcaacattggtatccagtgtagcttgaggcagcttctggagtatggttactttcatgctgaccctcatcctggtaatatattggcaacacctgaggggaagctggcttttcttgattttggcatgatgagtgaaacaccagaggatgcgagggtagccattataggacatgttgtccacttagtcaacagggactatgaagcaatggctcgtgattattatgcactagatttcttggaaccggatgtagatgtttccccgattgtgcctgctctcaagaatttctttgatgatgcactaaatgcaacagtgagtgagctgaacttcaagacaatagttgatggcctaggtgctgttctctatcagtacccgttcaatgtaccagcatactatgcattgatactacgatcgctcactgtactggaaggtttagcactctatgctgaccctgattttaaggtgcttgctgcatcgtatccttactttgcgaaaaggctactcactgatcccaatccatacctcagagacgctttagttgagcttctattcaaggatggaagattcagatggaataggcttgaaaatcttcttgttcaagggcgccaagatagagagtttgcagccaaagatgcattacagcctgttctaaagcttctcctgggtcctgatggggaggaattgcgtgtgttggttgtgaaagaggcagttcgtgtaacagaagccatcactattggaacactgatcgattcatacaatgcagctccagcgtttttgaagccattaatttccagtggcaatccagccggacccttcaagtttagtgaggctgaacaagaacagatgttggagctccgagaccaggttttcagagtatggggtcttttgagatcctcaaataactttgatccgagccttttgcaaccaatcgttcaggtgctacaagaaccagaggcccgcgtcttgggttctcgtgtcgcaggtggtgtaacacagcgccttgcggcacgtctgctgcaacagcttctcaggatcccttctcctggatcttcgtaacagattatatagagatgggctcgtatgaagcatgtaaattgacacgatacttttgacaggaaactgaggtgccatttgattcaagaaatgtaaatatagatatgggctcgtatgaagcatgtaaattgacacgatacttttcacaggaaacaggatgtcatttgattcatgaaatataacgtaaataacaac

SEQ ID NO: 146537 - DNA, 1354 bp, Zea Mays
atctagtctagtacacgaatcacgaacgcgtccacctgcgcgcatcgccacgcaggttctctccaccaaaccttaacctccccttccagaaaccctccaagaggcagctcaaaggaatagtgagccgccccgccgctcctcagccatcctctccatctcggtgtcacacactccgcatacgcacctacgagagtcgagtgacagcgagcgagcgagcgagcgaagccatggctctccgcaccctggcatcgaagaacgccctatccttcgcgctcggcggcgcggcccggccgtcggcggcgtccgcgaggggggtgacgacggtcgcgctccccgacctctcctacgacttcggcgcgctggagccggccatctcgggggagatcatgcgcctgcaccaccagaagcaccacgccacctacgtcgccaactacaacaaggcgctggagcagctcgacgctgccgtcgccaagggcgacgcctccgctgtcgtccagctccagggcgccatcaagttcaacggcggcggtcatgtgaaccattcaatcttttggaagaacctcaagcctattagcgaaggtggtggggagccgccacatgggaaacttggctgggccatcgatgaggattttggttcatttgaggcacttgtaaagaggatgaatgcagaaggcgctgctttacaaggatctggatgggtgtggttagctttggataaagaggcaaaaaagctttcagttgaaactacagctaatcaggatcctctggtgactaaaggtgcaagcttggttccgctgttggggattgatgtctgggagcatgcgtactacctgcagtacaagaatgttaggccggattacctgaacaacatctggaaggtgatgaactggaaatatgctggagaggtgtacgaaaatgttcttgcttgaattgtcttaatggacaatactcatctgcgcgggtttgttttcggctgtttgaccatgtgaaataaagatggacttgtgtacctgctggaccaagtgtacatttcgctaagatagactaacgcacaatggcctgccgattttgtccatcctgtattcctgcttgcgtgccactccactttctgctgctcgtagtggcaggcacatagtatgtgcttaacgttagactacggcacggccctttcagagttcgagcatggtgatgcccaaaagaaccatttctactcttgtctccattaataaaatctgccgaggtgccgatgtttgcttgaatttgttgccatgcgtttccagtttttggccttcacacttgttgcagcaaaatcttgcaaatcatcttcattaggcatcatgtttgtgttgagctc

SEQ ID NO: 146538 - DNA, 1361 bp, Zea Mays
atctagtctagtacacgaatcacgaacgcgtccacctgcgcgcatcgccacgcaggttctctccaccaaaccttaacctccccttccagaaaccctccaagaggcagctcaaaggaatagtgagccgccccgccgctcctcagccatcctctccatctcggtgtcacacactccgcatacgcacctacgagagtcgagtgacagcgagcgagcgagcgagcgaagccatggctctccgcaccctggcatcgaagaacgccctatccttcgcgctcggcggcgcggcccggccgtcggcggcgtccgcgaggggggtgacgacggtcgcgctccccgacctctcctacgacttcggcgcgctggagccggccatctcgggggagatcatgcgcctgcaccaccagaagcaccacgccacctacgtcgccaactacaacaaggcgctggagcagctcgacgctgccgtcgccaagggcgacgcctccgctgtcgtccagctccagggcgccatcaagttcaacggcggcggtcatgtgaaccattcaatcttttggaagaacctcaagcctattagcgaaggtggtggggagccgccacatgggaaacttggctgggccatcgatgaggattttggttcatttgaggcacttgtaaagaggatgaatgcagaaggcgctgctttacaaggatctggatgggtgtggttagctttggataaagaggcaaaaaagctttcagttgaaactacagctaatcaggtgaaaggatcctctggtgactaaaggtgcaagcttggttccgctgttggggattgatgtctgggagcatgcgtactacctgcagtacaagaatgttaggccggattacctgaacaacatctggaaggtgatgaactggaaatatgctggagaggtgtacgaaaatgttcttgcttgaattgtcttaatggacaatactcatctgcgcgggtttgttttcggctgtttgaccatgtgaaataaagatggacttgtgtacctgctggaccaagtgtacatttcgctaagatagactaacgcacaatggcctgccgattttgtccatcctgtattcctgcttgcgtgccactccactttctgctgctcgtagtggcaggcacatagtatgtgcttaacgttagactacggcacggccctttcagagttcgagcatggtgatgcccaaaagaaccatttctactcttgtctccattaataaaatctgccgaggtgccgatgtttgcttgaatttgttgccatgcgtttccagtttttggccttcacacttgttgcagcaaaatcttgcaaatcatcttcattaggcatcatgtttgtgttgagctc

SEQ ID NO: 146539 - DNA, 900 bp, Zea Mays
tatatatatatatatatataatttaaaaattgaacaatgaaatgaagcaaccgctagcaatcaatggccatctccctcatttcatgagcaacagaataaatgcaggtcagggacaattacacagagtttgctcaacgtaactcgtaatttcaatgaattcttaaatgaaaaccaagtgctcatcatgtccaagcattccctgcttgcggcgcgccgccacctcatgctggagtgtaagaacatgccaaacagtcgtccccggccgcatatgattcatatcatgtttgcaagcgtcatgcagttgttggccatctggctgagctccttatcgaacttacccatggggttggggacaccggcatgggtgaacggacggtcacacgagtcgaagtcctggacagcgagctgcagcatgatcttcgcggtgcccgtgtccttgaacgcgatggctcgctgtgccgcgccgatggcgtcctgcgtgttcatgtacatcgtgtcgcaggtcctgagggcctgtgcctgcggcggtggaatagtgcgggccgccaccgcgacgtgcttccgcgcctgcgctgtgcgcttggcgaacgcggccacctgcatgttcagcacggccaaattgtcgatgaccgggtacttggatgcatggcgcccggctgtggccgtgcaaacctctgggaatggggcgcgagagcagatgccggcaaccagcgggttgacggcaccgccgccatgcaccttgcccttgccgttccctaacgcctgcgggaagaggccggcagacaacaacgccacgagggcgaggaggacaagccgtgggtaggcttgccccatagtttattctgttaggtaaattgcgcgggcttgagactcgtgaggtggatttcttcttataggagg

SEQ ID NO: 146540 - DNA, 421 bp, Zea Mays
ggaagtgtcggttagttgacatactattcacttgtacctcatgcgatttcttatacatgtacttgtaattactgattaactagacgtataactcagatttataagaaggcagaaaatgatgcaaaatctaagtgttcttttggatctcaccaattgtcagcacgtctgcttatagcgaagttctagagaaggaaaagttggaatgaaactcaaattttggtggatgcataagtgtggagacttgaattcatatatacttaattaggctcaacgttagcgcaaacagttgatgaccaagttttttcattagtattttagtttggatttaaagtacacttatgtatgagttatttgacaatgcttatttatgatatattgaatgatacttatctatattatattaattataatgttattaaat

SEQ ID NO: 146541 - DNA, 1077 bp, Zea Mays
atggacggcggcagcagctggttgccattcctaggccgtggaattggcgacggcgtatcggggagcagtggctcggaggtgcagcggaaggaggacgacgacctgccgatcagctcgcaagtggaggaggagctccgacaggcaatgatcatgcacgcacgcacgcttgtaatctgcaattgttttacttttttcttctacttgctgatgggcatggagagaactggacacccagcagagcgagagacgacgacggcgttgcccccctcatcggaatcatccatgttccgctccttccctggaagcccggccgacgaggcctcgtcgctcaggccacggagcagcaacaacaatagtaccacggcgaactcctaccaccaccacccggcagaagtctcctcccagtcccatctgaccgagctctccccggtcacctacggcggcggccaccgccactgtgacgaccatcagtgctacgtcaatctcgacacgatcctaaagctggacgacgagttcaagcgctgccacgacgaacaaccccacaacgaaagagcgcagcacaagaacggcttccgtggcggcgcgttcgtgccctacacccgccacctcggccccaagaagaagcccaagccacctgcaggctccggcgggcagagggcgatcaaggcggccatggcagccttggcacgaatgcacatggtcaggctcgcccagtggcagtgctaccagatggaactggtggtagcgcctgcgccgcccaccggcgggatcaacggcaacaaccagcagcagcacgttttgtcggagcgcaagcgccgcgagaagctcaacgacagcttcaaggccctcaggacagtgctccccccttcttccaagaaagataaggcatccacactgatgagagcaagggactacgtcagcactctccagtctagagtgtctgagttagaggagaagaacaggatgatgctagtacagttgcagcaccgccgcaatgatgtttctcccaacaagattgaggtcgacatcagaagtaatagagaggaaattaggaaacatgacaggaatttcacctga

SEQ ID NO: 146542 - DNA, 973 bp, Zea Mays
agctcagcagcgcagcacatctacttaccgcacaagctagcgcgcgcaggagctcagctcaggcaggagcgggagagatggagaaggcggaggaggcggcggcggcggcggcgcaggagcagtggcagggcgtggtggaagccaacctgccgtcgaccccggcctctgccgcgtggccgcacatcgcgagcttctgcgcgctgcaccggtacctcccgggcatcgacgtgtgcgagctcgcggcgggggaggacgggcggcccgggtgcgtccgctacgtggcctccctggtgccgggcaccacgaccggggaggtccgcagctgggcgcgggagaagctgctggagatcgacgacggcgcccggcggctcggctacgccgtcgtcggcagcagcatggggttcggcagctacgtcgccactatgagcgtcgtcgctggcgacgccgacgaggggtgcaggctggtctgggcgttcgagtgccagcccgtgcaggggtggagccgcgacgggctcctcgcctacctcgacggcggcgtcagggccatcgccgcgcggatcgaggaagccgcccgtgccgcttacgccgccgccaatgcgacgccggaggaggcggcggcgtcggtcgccgccaatgcttgacaagtctagttccgagaggaatcgaatcgacagtcgacagatgcatgcatttctgtattgagatgagaatattactgtacgtcgtcaaacttaattaatgcgttgttaatcgcaaccggttgataagacattagtttgcttgcttgcttgtctgtctccactcctttcattgtctaccgtacctgacttgtattatgtcgcgtcgcgtcgcgtcgacagtcagctgagtgaacgaaagttagttaattaatttgaaagggactctgttgttggctcctgcttgtttattctggcgacgtccataccgatccatgtgtattgtgtactcaaat

SEQ ID NO: 146543 - DNA, 585 bp, Zea Mays
cttttcctcttcactctccatcgtcaccaaaaatatgtctccctatccaagcgattcgccgaaggaaccgcccacgatggcgccgatccaccgtgtgcacaagacgggtctgcctcgagcttcgcgctggtaggtcggtcttgtgatggctcctcgccgtcagcgcaggtgcggggtggcgacgactgcgggtcttaggcgacaccgtcacaaccactgcgtccgcaccgtccagaagtgacgcctccaccttcctctacgcgcagacgccaattcgaccaccttcctcgccgacaccctcagcctcaaggagaacgaggtgtgtgtctcgcgttcatgaaatccatcgtgcctggtgggattgcattcaagatgtacttctctgtcaagagaaatggcatgggatatggtttgtatctcgattcttctgtgtgcgtctaagtaggtcgtggtcatctgtacaggctaaagattggtgccttcttccaatctccccctatattagttccccaccctcttcgtcttccatttgtatattggagacctatatctgagatatcaccaggtctatcttttcattgcaga

SEQ ID NO: 146544 - DNA, 689 bp, Zea Mays
cttttcctcttcactctccatcgtcaccaaaaatatgtctccctatccaagcgattcgccgaaggaaccgcccacgatggcgccgatccaccgtgtgcacaagacgggtctgcctcgagcttcgcgctggtaggtcggtcttgtgatggctcctcgccgtcagcgcaggtgcggggtggcgacgactgcgggtcttaggcgacaccgtcacaaccactgcgtccgcaccgtccagaagtgacgcctccaccttcctctacgcgcagacgccaattcgaccaccttcctcgccgacaccctcagcctcaaggagaacgaggtgtgtgtctcgcgttcatgaaatccatcgtgcctggtgggattgcattcaagatgtacttctctgtcaagagaaatggcatgggatatggtttgtatctcgattcttctgtgtgcgtctaagtaggtcgtggtcatctgtacaggctaaagattggtgccttcttccaatctccccctatattagttccccaccctcttcgtcttccatttgtatattggagacctatatctgagatatcaccaggtctatcttttcattgcagacctcattgattttttctgtcatctgccaccgttgtaatggaattgctgctatagatgccgtttgtgacctgactctcgactaggcctccgtggatacatgtttg

SEQ ID NO: 146545 - DNA, 682 bp, Zea Mays
accgcagccacaccccaacatcaaaaccctcccatctcttcccctccgccgccgtctctgctctcaagatcgccatggcgtcagaaaagaagcagtcgaacccgatgcgggagatcaaggtgcagaagctcgtgctcaatatctccgttggagagagtggagatcgactcacccgcgccgccaaggtgttggagcagttgagtgggcagtctccggttttctccaaggcaaggtatactgtgaggtctttcggtattcgtcgtaatgagaagattgcatgctacgttacggtcaggggtgagaaggcaatgcagcttcttgagagtggcctcaaggtgaaggagtatgagcttctgaggaggaacttcagtgatactggctgctttggttttggtattcaggagcacattgatcttggaatcaagtaagatgatctttttatctcatatacaattcacgcaaatgatctattgaaatattgcactgttatatggtttggtttcctcaagtatagaaacccatgtttatttgaatctgtgtataatggaggtaactggctattcatgtgtcaagtttttgaattctatattagttcagtgtagttctaggtaaagataagataccgctggacaattcaaatttaaactgtgatgatggttttattcaccatgttcattggatc

SEQ ID NO: 146546 - DNA, 880 bp, Zea Mays
accgcagccacaccccaacatcaaaaccctcccatctcttcccctccgccgccgtctctgctctcaagatcgccatggcgtcagaaaagaagcagtcgaacccgatgcgggagatcaaggtgcagaagctcgtgctcaatatctccgttggagagagtggagatcgactcacccgcgccgccaaggtgttggagcagttgagtgggcagtctccggttttctccaaggcaaggtatactgtgaggtctttcggtattcgtcgtaatgagaagattgcatgctacgttacggtcaggggtgagaaggcaatgcagcttcttgagagtggcctcaaggtgaaggagtatgagcttctgaggaggaacttcagtgatactggctgctttggttttggtattcaggagcacattgatcttggaatcaagtatgacccgtctactggtatttatggcatggacttttacgtcgttctggaacgagctggttatcgtgttgcacgtcggcgcaggtgcaagtcccgtgttggcatccagcacagggtgaccaaagaagacgccatgaagtggttccaggtgaagtacgagggtgtcatcctcaacaaggcccaaaacacctcgtaatcattgatagtcatcaaacgacttgcccttaattctgtgtactatgaacaaaacaccccgtgtttggttcaagtataatctgtgtactatgaattctgtgtttgttggataccaaatgcactgccagttttgcgtctgtgcccgtaattccatcttgataatcagactagcagttaggaacaaataactgttgttttgattgtgttaatttgagctcgccagcaaaatctaaggaacatctatcaggtacttcgttcaca

SEQ ID NO: 146547 - DNA, 639 bp, Zea Mays
gatagaaaatgtagaactacaatctttttgaaatggagggagtgaagttcttttgtcagttcacttctatctgggatatgactctctcactatcttatgttcgaactggatatctttgcggacactggattacaggtatcaccacattgcttgtaaataacttgctcatctgttttttcccaggtatgacccgtctactggtatttatggcatggacttttacgtcgttctggaacgagctggttatcgtgttgcacgtcggcgcaggtgcaagtcccgtgttggcatccagcacagggtgaccaaagaagacgccatgaagtggttccaggtgaagtacgagggtgtcatcctcaacaaggcccaaaacacctcgtaatcattgatagtcatcaaacgacttgcccttaattctgtgtactatgaacaaaacaccccgtgtttggttcaagtataatctgtgtactatgaattctgtgtttgttggataccaaatgcactgccagttttgcgtctgtgcccgtaattccatcttgataatcagactagcagttaggaacaaataactgttgttttgattgtgttaatttgagctcgccagcaaaatctaaggaacatctatcaggtacttcgttcaca

SEQ ID NO: 146548 - DNA, 204 bp, Zea Mays
tttttttatttttttcttctaaaatttaaaataacgagaaccaatcaaaaaaatgttgcatttaaaatacgagaaccaatcaaaaaatgttgcaaggcaacatacagtcgactcaaaccgataaagatcagtaccgaccggttcaacaacgcccaaatcaacacctacagatccagttctaacatggttaaaatcatgtccagc

SEQ ID NO: 146549 - DNA, 1620 bp, Zea Mays
gtgaggtaatcccgcagtgcaggtgagcgaccggcgcctagcgttctgtggccgccgcccttctgccgtccgaccggaccaggtcgccgacgtcgcccctatcccgcacgcgtcatcgcagcgcctccgagtctccgccaagatctgcctcggccacggcgcggcgccgctggagctgcagccgtccagccgactgccttccgccgaccaccgaccaccgaccactggccgagccgccgcagctagctgcgctttgaagcatgggtcgttttgaacaagttactccagaaggccctgaaactaatcagcatgatgagcagcgctccatacgtttacatgcattttctgatctatcacacgtccctgcagccacttttatttatctcttaaaggactgctatggatatggtacgaacaaagcaacctcaaagtttaagatcctcatgcagctggtaaaagtggcattgcataatggtccacagccaggcccgttcacatatgttgtccagtgtatgtatattgtacctctgctggggaaaacttattctgaagggttcagccatatgttgacatcctctttaaagcacttgaaatctgtggaatcagcacagaaagatttcttggaggcaaagcaccttgccgcacaacttgttcttgatatccttgattctattgtaccccatgagaaccgcatattggtcaagcttcttgagacatttgaaattgagttgagagacatggcccgtgctttgtatgattcagagttggacgatggtgatctaatgaaagcacgtgaacatctcagacagcaagttaagcgctgtatggaatcagaatccaatgcacttgctgtgactctaataacacatttttccatccaatgctgtgatgagtccttcatcataaaattgattaaaaacaatcaattagagattgcagagcagtgtgctattttcatgggcaaggaaatgatatcgctagtcgttcaaaagtatctagatatgaaaatgctgaagagtgcaaacaaattggtcaaagaacatgaactcacagaagagtttccagatgttagctatttgtataaagagagttcagtaaagaagttggctgagaaaggatgctgggatattgcagaaactagggccaagaaggacacaaaactcctggaatacctggtatatttagcaatggaagctggttatatggagaaggttgacgagctttgcaagcgatactctattgaaggttatgttgattctttggttccggagaaggttttctgtgtatctgactacttagatctgaagaaattggatgtggaagaaattgtctgggttgatgagatcaatgggctgcttaatgcaacaagtgatattgaagcttgtaaaattattggcatggattgtgagtggagacctaatttcgagaaaaatactaaatctagtaaggtaacaccttggtttgtcttggtataagtttcaatgtctttttaattttctggctaaaactgtaatagtggcatggttgcatcggcctatgggcgaataaaaaatgacagttttgtcagaaaacatgtctgtgtaaactaggcaaaatgattgttttaggtttcccatgtgt

SEQ ID NO: 146550 - DNA, 104 bp, Zea Mays
atttttttgggaaatgtagaagagctgagttccatgtctctttgagtagaaaagtatgcctttatgaagagaaaaaaaataagagacaattctctgtatgccac

SEQ ID NO: 146551 - DNA, 1027 bp, Zea Mays
gattcgttgccactaacccaaaatcagaaagagtacgctgctcttgatgccgtggtccttgtgcatatattccatgaacacatgcggaggcaagcacagttcggtgtctctgagggaagcagagtcgagtggaggtctcacgttgtttcccgagtgagttgcacgcgtacgcccttgcgtttctagtggtggggttggacagcttggagtgaaattacttctagcatctgcatgtgccgtcttctaacatctatgatgacagttctctggcatggcatcataggctcacagttcatccccagaagttagtgctgcgacttcgttgctcttgccttgtgtatatacagtatattgttacctccaccggagtttttcctttcctgctgtatcgcattcagtgctgagtgcattattagatttggaacccgttttctgttatgaattagtgataatggaagtcaggaagtgtcgcgttatgaattagtgcagggggcaagaaagccagaggattatttccgtattatgtatgggacgtgaacttagcttaatagatagattggggttggagatgtagatgtagatgaatatcctaacaacttatttgggccaagtcctttctaactcggatttgggtgcttggttttcttttcttttttatttaactgcctacttctgcttaggttaggtcttgcatcttgcgctcatttaaacctgttttcttcttaattaattattaaagttgaagtaaaaaaacggatttggtcttcctaggtcaggttttgttttaaaactactaccgacctatttagtccaatttgatttccagcttatttacggtttcatgttcaagagttgctatttcggataatctgtccatctaggcgcctgagtttctataaaaagctaggtggtcgcagcttataatccaatgatgaattgctaatttgaaaagctaggtgatcgcagcttacaagccaatgccgttaatttgacaggtcataatagttgagttattttttagacgcac

SEQ ID NO: 146552 - DNA, 1350 bp, Zea Mays
acctagcttttgatttatggtaccgcaacacacatgttgctatccatgatggccatggttattgagtccaggaaaagaaaaagagatggtagaagagtcagtattacttatgggccaatggaggaaagggataggatgagacttgactatcttaacactaaaatatggatgagtgatacaacatgtgtgaacatgcttagacttagtaggtctagtttctttcgcttttgcaagggctttacataccggggttgacttgaagatacaatacacatgtgtgttgaggaacaagtgaccatgtttttgaacacagtgggacacaaccttaggaataggttggtgcgaacaaattatggtagatccggtgggactgttagtcgttacttcaacaaagtgctttgtgctattagagagctacgagctgaacttattaggccaccatcattggagactccatccaaaatagcaggaaatccaagatgggatccctactttaaggtgtgatgttcagctatccaatattctccttcaagaattttcactatttaaacccataaggcccttaagtgcattttggcttgtattggataagcatatgattgtattggagctattgatggcacacatatacgagcttcagttttcatagatatggaaccttcatttcatggtagaaagtcctatgcctctcaaaatgttatggcgaccattgattttgatctttggttcacatatgtcttggttggttgagggttcagcacacgatgctttagtactaatagatgctttagagcgagagaatggccttcgtataccacaagggaaattctatctagtgaatgctggatatcgagccaaacctggatttttgtcgctgtttcgtgctgtccggtatcacttgaatgaatgggggaataatccagtacaaaacgagaaggagttgttcaaccttaggcactcgtctcttcgtgtcacatagcgcgtgcatttggttcactcaagagaaggtttaaaatacttaatgatgccacaccattctttccattttctactcaagtagatattgtagtagccagttgcattattcacaattgggtcatacaagatggaggtgatgagttgatcattgaagaatctaattggccaattcataaccatgctacaacatcaagtgcccaagctagtgaacatgcatttatggttaatttgaggcaggaaatagcaaatcagatgtgggaagatcgtcaaaaccactatgctacctaacttgttattgtttttcttgctataatttttatttatggacattaatatatggacttaattaatgtattcatatattttaataat

SEQ ID NO: 146553 - DNA, 1927 bp, Zea Mays
aagttttcccgtccacgcacacggcatacggcacacaaagcgagtagagacatctcaatgacactgggtcaccgatccctgatctccggggcctcgtcgtcaaccacagcagccggcagcgcgtgcacgcagcgagggtagcgccacacatgccactgacactgggctcaacaaagtgacggatccgcaacccagtgggacgtcacctccctgcacgggcccactctgttccagcttccgtgtgtacacagtacaccacagcacacgggcctactcaccctcgcctccgaggcttcgagtccgagagagcgcttgagaagaagctcaggcgaggcgaggcaagggatgccgtgattgacgacggaaacgaagccgagagggagaagcgaagctagccttgcatacacccggccccgtcccaatgcccaccgcttccggctcggatcccaaaccctaaccctactcggccgtccgcgggcccgccgccggcgacgcgatcgggtgccgacgctgatgcgctctgtgccgcgtgcgtgattctctcgcgcaagtaagcgttggaaaaggggctccctggctgcagcgacgcgtggccgaggtgcggatcggggaggggaggacggtcggagcgagatgccgggggacgtcgcgacctcgccggcgccggcgccgccgtccgtgtcctcgtcgtcgcagaaccaccaccatcacggccccacgaccgcccgcggcctcctctgccacgctgtcgccggcgcctccgctggcgtggtggcggcgaccttcgtgtgcccgctcgatgtcatcaagaccaggttccaggtacacggatggcccaagcttaccacaggcacaattggagattgctcaacgggaaggttttcggggcatgtaccgtggcctctccccaactgttctagcgctcttgcctaactgggcggtctactttactgtgtatgagcagcttaaaagcttactttcttccaatgatggaagtcatcaactttctttaggggcaaatgttgttgctgcatcatgtgctggtgctgcaacaactactgtaacaaatccactttgggttgttaagacaagatttcagactcaaggaataagagccgggccaatgccatataaaggtacacttgctgccttgcgaagaatagcacatgaagaaggcatccgaggactatacagtggtctggtccctgccttggctggtatcagtcatgttgctattcagtttccctgcatacgagaagataaaagcttatctggctgagcgagataatactactgtagaagcattgagttttggtgatgttgctgttgcgtcgtctctggctaaagtagctgcatcaacattgacatatcctcatgaggttgttcggtcaaggctgcaagaccagcgagcgcactctgatgctagatacaagggtgtagtagactgcatcagaaaggtttatcataaagagggtgtggctggcttctacagtggatgcgccacaaatctattgcggacgacccctgccgcagtgataacattcactagcttcgagatgatccacaggttccttcttgatctattccctgctgaatctgaaccgcacatccaacctctcaagcattgatcatacaacatttgtaccctatccatgctgccattcgagtttaggaccccagcaaccatccagcaatgttgtttactgtgccagatggctgttgtaaaagagagaattgtttttttcccggatatgcaacagtaattcggaagttcaaacaatagtgttggctgagcattagcaacttgtatgtaatagatttgttagcatgcatttgcgggaggtatattgggtatgttttcttgatgatgatgaaaagaaaacaatcttaccacatatgaaagaatgattgctatatttttttccca

SEQ ID NO: 146554 - DNA, 1956 bp, Zea Mays
aagttttcccgtccacgcacacggcatacggcacacaaagcgagtagagacatctcaatgacactgggtcaccgatccctgatctccggggcctcgtcgtcaaccacagcagccggcagcgcgtgcacgcagcgagggtagcgccacacatgccactgacactgggctcaacaaagtgacggatccgcaacccagtgggacgtcacctccctgcacgggcccactctgttccagcttccgtgtgtacacagtacaccacagcacacgggcctactcaccctcgcctccgaggcttcgagtccgagagagcgcttgagaagaagctcaggcgaggcgaggcaagggatgccgtgattgacgacggaaacgaagccgagagggagaagcgaagctagccttgcatacacccggccccgtcccaatgcccaccgcttccggctcggatcccaaaccctaaccctactcggccgtccgcgggcccgccgccggcgacgcgatcgggtgccgacgctgatgcgctctgtgccgcgtgcgtgattctctcgcgcaagtaagcgttggaaaaggggctccctggctgcagcgacgcgtggccgaggtgcggatcggggaggggaggacggtcggagcgagatgccgggggacgtcgcgacctcgccggcgccggcgccgccgtccgtgtcctcgtcgtcgcagaaccaccaccatcacggccccacgaccgcccgcggcctcctctgccacgctgtcgccggcgcctccgctggcgtggtggcggcgaccttcgtgtgcccgctcgatgtcatcaagaccaggttccaggtacacggatggcccaagcttaccacaggcacaattggaggcagtgtaattattgggagtttacagcagattgctcaacgggaaggttttcggggcatgtaccgtggcctctccccaactgttctagcgctcttgcctaactgggcggtctactttactgtgtatgagcagcttaaaagcttactttcttccaatgatggaagtcatcaactttctttaggggcaaatgttgttgctgcatcatgtgctggtgctgcaacaactactgtaacaaatccactttgggttgttaagacaagatttcagactcaaggaataagagccgggccaatgccatataaaggtacacttgctgccttgcgaagaatagcacatgaagaaggcatccgaggactatacagtggtctggtccctgccttggctggtatcagtcatgttgctattcagtttccctgcatacgagaagataaaagcttatctggctgagcgagataatactactgtagaagcattgagttttggtgatgttgctgttgcgtcgtctctggctaaagtagctgcatcaacattgacatatcctcatgaggttgttcggtcaaggctgcaagaccagcgagcgcactctgatgctagatacaagggtgtagtagactgcatcagaaaggtttatcataaagagggtgtggctggcttctacagtggatgcgccacaaatctattgcggacgacccctgccgcagtgataacattcactagcttcgagatgatccacaggttccttcttgatctattccctgctgaatctgaaccgcacatccaacctctcaagcattgatcatacaacatttgtaccctatccatgctgccattcgagtttaggaccccagcaaccatccagcaatgttgtttactgtgccagatggctgttgtaaaagagagaattgtttttttcccggatatgcaacagtaattcggaagttcaaacaatagtgttggctgagcattagcaacttgtatgtaatagatttgttagcatgcatttgcgggaggtatattgggtatgttttcttgatgatgatgaaaagaaaacaatcttaccacatatgaaagaatgattgctatatttttttccca

SEQ ID NO: 146555 - DNA, 1245 bp, Zea Mays
attttaaatatttaaggtgtcgcctcgccttacgctttaccgcttaaaagttaaaaagggggtctgtcaccttactgctttaacaactatggtagcatgcagggtttacaatttcgtttgtactgttcgaaatttcgttttttgaccaaagtttgacttttgtatattttgaatttggaactgatatatatattttttcagactaaaatttcaattttgtatagtactgaaaatgagaaaaaatcaccgaaattcggtgaatctcagccgagatttgcaaccctggtggcatgcagatgcttcatcaggaaccaatgttaaaaaactgtcttgcactattttgtaacgagacatagtattgtagaagttgatgacatggaaatcctgttagcacatcaatatattccttttttatagactcaaggaataagagccgggccaatgccatataaaggtacacttgctgccttgcgaagaatagcacatgaagaaggcatccgaggactatacagtggtctggtccctgccttggctggtatcagtcatgttgctattcagtttccctgcatacgagaagataaaagcttatctggctgagcgagataatactactgtagaagcattgagttttggtgatgttgctgttgcgtcgtctctggctaaagtagctgcatcaacattgacatatcctcatgaggttgttcggtcaaggctgcaagaccagcgagcgcactctgatgctagatacaagggtgtagtagactgcatcagaaaggtttatcataaagagggtgtggctggcttctacagtggatgcgccacaaatctattgcggacgacccctgccgcagtgataacattcactagcttcgagatgatccacaggttccttcttgatctattccctgctgaatctgaaccgcacatccaacctctcaagcattgatcatacaacatttgtaccctatccatgctgccattcgagtttaggaccccagcaaccatccagcaatgttgtttactgtgccagatggctgttgtaaaagagagaattgtttttttcccggatatgcaacagtaattcggaagttcaaacaatagtgttggctgagcattagcaacttgtatgtaatagatttgttagcatgcatttgcgggaggtatattgggtatgttttcttgatgatgatgaaaagaaaacaatcttaccacatatgaaagaatgattgctatatttttttccca

SEQ ID NO: 146556 - DNA, 987 bp, Zea Mays
gcctccatggtcgagctcctctggtgcaggcacccagcctccctagctcggcacccctcaagcacacgggaccgcggcgcctctgctctcccatccaggcgccccttcccctaagcggatccgtggtgctaggaggatctcctcctcggcaggcgctccaacctggcgtccatggcgccagtgccctgcacagcgtccccctcccccaggctcctagcgcgcagagcatttctctgggtccgagctcgagcagccgctcccctcaacaactccctcaacgccgacctcctctgccccaggtccggcagccctccccaaccaagcttctcccatggcgctgctacctctaagatggagctcgacaccccaaagaaattcccccctgggcgatggaggtgccaagctcgcgctagagcatggcaaggcttgaccgacgccctttccatggctggctttgagcagtgggtcgagcccttcttcttgccgtggcacttgacccctgctcttctctgccccacgacgcccagcctttctacaagagcaggcgccctctgcatctccctggcgcaggaaatccccaagtgcaggcgcctaggactcccatggctgctagcctctccatgcaaccgaactcccttacttcctagccatggacgagcctccggtgtgcatcgagctcccccacagtcgagctcccctctgttgctgtggccagcgactcctttaggcgggtcttcatcctgtcgcgttggacgccgctccttttccccggccaccgtcgaaccagcgtggacccgatctgcgctgtgcagcagcgccggtccacagcagcagcctcgacatcccctctgcgtcgcaccctcggcgtgctcgatgtaatgccgcagcaagcagcagtagcgacgcccttcgctatgtcacgctcgccaagtcgggcctcacgtcgtcgctctgcgcagcgtttctgcgtcatcgtcaaaacccatg

SEQ ID NO: 146557 - DNA, 707 bp, Zea Mays
ccatggccgagctcctctggtgcaggcgcccagcctccccaactcggcacccctcaagcacacgggaccgcggtgcctctgctctcctatccaggcgccccttcccctaagcggatctgtggtgctaggaggatctcctcctcggcaggtgctccaacctggcgtccttggcaccagtgccctgcacagcgtccccctcccccaggctcctagcgcgtagagcatttctctaggtccgagctcgagcagtcgctcccctcaacaactccctcaacgccggcctcctctgccccaggcccggcagccctccccaaccaagcttctcccatggcgctgctacctctaagatggagctcgacaccccaaagaaattccccctgggcgctggaggcgccaagctcgcgctagagcatggcatggcttgaccgacgccctttccatggctggctttgagcagtgggtcgagcccttcttcttgccatggcacttgacccctgctcttctctgccccatgacgcccagcctttctacaagagcaggcgccctctgcatctccctggcgcaggaaatccccaagtgcaggcgcctaggactcccatggccgctagcctctccttgcaaccgagctcccttacttcctagccatggacgagcctccggtgtgcatcgagctcccctctattgctgtggccagcgactccttcagg

SEQ ID NO: 146558 - DNA, 180 bp, Zea Mays
atggagaacggtggaatcgaggaggccgacgacgcaccgccagtgccctcgccgcccaatgggcggcggtaccggccggtcgggtcgagcgaccgcgctgtgatccagatgacttccatggagccgggatcctcctcttccacaatcgatgccgtcgtgactccccagccgccaaggtga

SEQ ID NO: 146559 - DNA, 471 bp, Zea Mays
atggcgaggatgttgcaattaccattgggcgccccaaggttttctttcatttcaacattttctgctgtgtgtttgaaaattcctgttcctttaaaaaaagataaaaaattaagaattatcgataatagcaatcttaaagaaagtggacctaagttcggcaccatgatgggtgtctttgttccatgcttgcagaacatcttgggaatcatttattatatccgttttacctggattgtaggtatgtcaggtgtatggcagtcacttgtgttggtttcattttgtggtgcatgcacatttttgacctcgatatcattaagtgccattgcaacgaatggagctatgaagggtggtgggccatattatcttataggccgtgcacttggtcctgaagttggagttagtataggattatgcttcttcctcgggaatgcagtggctggatccatgtatcaccgtgaactcctcttctag

SEQ ID NO: 146560 - DNA, 1099 bp, Zea Mays
gagagtgtaacagttgtcaacaatacattagtgaatggtacagaaactgctggcacgtcaactatatctacacccagcttgcacgatcttcaagtgtatggtgttattgtgaccatactgctgtgttttattgtgttcggtggtgtcaaaattatcaacaaggttgcacctgctttcttaataccagtcctgttttctttgctgtgcatctatcttggtgtcttcattgcaccaaggcataatgctccaaagggaatcactggattgagtataaccacattgaaagacaattggggtgaaaactatcaacgtacaaataatgctggcgttcctgatccaagtggatcaatatattgggatttcaatgctttggtaggtctgtttttcccagcagtcactggaattatggctggctcaaaccgatctgcttcactgaaagatacacagcgttcgataccaatcggcacattatctgcaactctttcaacaactgctatgtacttgttctctgtgcttctgtttggagccttggccacacgggaagagcttctaactgataggcttcttactgctacggtggcttggcctgctcctgcagtgatttacattggtattattctgtccaccttaggtgcagcactgcagagtttgactggggctccaaggttgcttgcagcaattgcgaatgatgacattcttcctgttcttaattacttcaaagtttctgagggatctgagccacatgcggccactttattcacagctttcatctgtatttgctgtgttgttattggaaacttggatttgattacccccactatcacaatgtttttccttctgtgctatgctggcgtgaacctgtcatgctttctgcttgacctccttgatgctcctagttggcgccctagatggaaatttcaccattggagcctttcacttgttggggcattactctgtgttggtatggttcttaatactcttacaattttattttgtctatcatgatcttcagcatgaacagtttaaacttgagttaggtctttggtttgagactttgttcacttctattgtttttaatccaaccaccttatcttcacct

SEQ ID NO: 146561 - DNA, 1715 bp, Zea Mays
gtatcaatttcagtgattatgtttctgatctcctggtctttcactgttgtctcccttgcccttgcaagcctcatctattactatgtgagcataaaagggaaggctggagactggggagatgggttcaagagtgcatactttcaattggccctccgaagtctcagatcacttggagcaaaccaagtccatcctaagaattggtaccccattcctctggtattctgccgtccatggggtaaacttccggaaaatgttccttgtcatccaaaacttgcagacttcgctaattgtatgaagaagaagggtcgtggtatgtccatttttgtctcgataattgatggtgattatcatgaactagctgaggatgcaaagactgcctgccgccaactagatgcttatattgactacaaacgctgtgagggtgttgcagagatcattgtagctcctaatatgtctgatggtttccgtagcattgtgcagacaatgggcctaggaaacttaaaaccaaatattgttgtgatgcggtaccctgagatctggcgacgtgagaatttgacacagataccgtcaacatttgtcagcataataaatgattgcattattgctaacaaggcagtagtcattgtgaagggactcgatgagtggcctaatgagtaccagcgacaatacggtactattgacctctactggattgtaagagatggaggattgatgcttcttctgtctcagctcctgctgacaaaggagagttttgagagctgtaagatccaagtattctgcatatctgaagaggatacagatgcagaggagttgaaggctgatgtcaagaagttcttgtatgatcttaggatgcaagctgaggtcattgttgtcactatgaaatcatgggaatcacacatggagagcagcagtaacggcgctcagcaggataactcccatgaggcttacacaagcgcacagcaaaggatcaggacataccttgatgagatgaaggaaactgctcaaacagaaaggcagttactaatggagaatgggaggcaagttgtgaacgaacagaaggttgataaattcctttacacaatgtttaagttgaactccacgatactcaggtactccagaatggcagctgtagttcttgtgagccttcctccaccgccattataccatccttcatatttctacatggagtacatggatttgcttgtagagaatgtcccacgcatgttaatagttaggggatatacgagagatgttgtcacatttttcacatgattatacatacgaacttctcacctggagactctagtgccgtcaggctgttgtactatctcagcagagactggatacacaagagcgtggaatctaccactgaaatgacaagccctcaccttgaaggcaaccacgatgagatgtcagatgtgcagagctgttgttcgcatattggattcgtgaactattgaactgcagtgtcttcattcttttttctggatttaaaagatccacatagcgagctttgattcttacagattttgtagctatcatatgtaaacacttaccatcttgtaattgtaagcatacttacatgctggcccaaagacaaatgcaatccttaccttctcactgaaacatttatataggtattttttttgcatcacttgtatgcgtctaaaactgatggacttgttgagatgagcagagctgcgaattttgaatgg

SEQ ID NO: 146562 - DNA, 1391 bp, Zea Mays
atataaacccaacctcgaagattcgtctctcccgaaaccctagctcacttaacgccgccgcggagctgctccgcgcccccgacgccggtaagaaacaagagagaacatctgtccctcgtcttcttcctgacgcgatcgttcatcgctcgattttttttttggaaccgatggtggaaccacaggtgattaggagcaggagcaagaggggttcggaatggccaagtctaagaaccacacggcgcataaccagtcgttcaaggcgcacaagaacggcatcaagaagcccaagcgccaccgccagacctccaccaagggggtacgtgcttccctttcattgcagttgttcgcctctcaacatgctagtagatttgaattcgaaagctaccctttcgctgaaacatgatcatatttattatgtggcctgtggcctgtgcccgagtgcaaatgcagtagttttgtttgtagcatgccttgatgctatcattactagatgctcctatttatactagttttctgttgttccttcgaaattgccttgctgactgccgtgttatttttgacgaaatatgctgcaaatgtatttgttttatgtgtctaagattcattatcatccatttaagcatagacataaaaatcaagagctaaaacgactaatatttttggatgtgagtattttattgtattggcgtcttatttttaaaatattaccatgacatgaatgtctttatatattaatcttgttgcataccttctggtatcatcgaagttttgccagctacttagctattttagttgatatttgactgaattcttatgctacaactgatgtttgcctacagaatgagtgctattgacactttaaatctcaggctatgtactttgtttgaccaaaaaaattgtttgcacaacaaattagtatgtatgatgatctctagtattattggtgtttcatcttctgatttcaattgtgtgtttttttaataattttttacttattctttatctgctgaaacattataattgttttctgaggaaggtttaggtagtttaatattgactatttttacttgcatttttttgacataaatattgtactctgctgaaatttcatttttatttcctgtttgctgtgtctgtttgcttaatatgccgttttggactgggttttatgatctattaatgatctcttttgtgtgcttttagatggaccccaagtttctgaggaacttgaggtactcaaggaagggcaataagaagagttgtgaggctgagtcagaggagtgagatgatgcctgagtttgtggcgacaaatgcatctcttgtatcgttagggtcttagttgtgaacttaattttcacatctgtatgattaaaagagattcatcaattggt

SEQ ID NO: 146563 - DNA, 617 bp, Zea Mays
atataaacccaacctcgaagattcgtctctcccgaaaccctagctcacttaacgccgccgcggagctgctccgcgcccccgacgccggtgattaggagcaggagcaagaggggttcggaatggccaagtctaagaaccacacggcgcataaccagtcgttcaaggcgcacaagaacggcatcaagaagcccaagcgccaccgccagacctccaccaaggggatggaccccaagtttctgaggaacttgaggtactcaaggaagggcaataagaagagttgtgaggctgagtcagaggagtgagatgatgcctgagtttgtggcgacaaatgcatctcttgtatcgttagggtcttagttgtgaacttaattttcacatctgtatgattaaaagagattcatcaattggtactgaagtgttgtttttttgtcttgttgcctatctggagtttatttaactaaaatcatcagttgtgtccttgagaatcgggcacttaatgtatcattttcggttctctgtgacctgtgctgttatctccaatttacctgttgatttcttgccttacactgtcaatttcttgcctcttcatgtcggtagtttgtggctttggtgacaca

SEQ ID NO: 146564 - DNA, 951 bp, Zea Mays
agtgcattgcaagcgtgggaagggaggagatcattggaaggggagaaaagggaatggagcatgatgaagaggaggagctgccttcaccttcttcctccttgggctacctgatgctgtgtaggatctgccacgaggaagaggacggagggcgtgcgaccatggagtccccttgtggatgttccggctctctcaagtacgctcacaggcgatgtgtgcagagatggtgtgatgagaaggggaccgccatctgtgagatttgccttcagaatttcgagccagggtacacaatgcctccaaagaaaactccggtggttgaaacggcggtcacgatcagtgaacacgaggacatgcaatctttggaatctcgggagggcttgagtgggggtgcaggctacaccaggtgctcctacaccgcagatcaatgcgccacatggtgccggtcgctggcgatcacgttcaccattatgctgctggcatggcatctggttgcagtggtgacggttgaagcagcagctcactgcgcgttcagtctcctggcaatgtacttgcttcgcgctgctggtatcctgctgccgctgtgcgttgtcatgcgactgattcgcatcgtccagagtggtcaggagcagcagtatgggctgcagctgctggagcaccaaagaagaaatgtatcaactatatgaattatatgcgtgtccaggaggaggaccagcgagtaattaatattcattaagccaatgaatctcaatgcaagcttgcacaaatgtgcattaagtattaccgtggaaactttcaaacagaacatcatctgtaaacatttagtatacatacagttggtgcagggaaaaacagcaccattttattcctgctttttctgaacgttcattatgctattagggaatgttcaaacagatcattattgcatatcccaatgaaaatattggcggccaacca

SEQ ID NO: 146565 - DNA, 956 bp, Zea Mays
tgcattgcaagcgtgggaagggaggagatcattggaaggggagaaaagggaatggagcatgatgaagaggaggagctgccttcaccttcttcctccttgggctacctgatgctgtgtaggatctgccacgaggaagaggacggagggcgtgcgaccatggagtccccttgtggatgttccggctctctcaagtacgctcacaggcgatgtgtgcagagatggtgtgatgagaaggggaccgccatctgtgagatttgccttcagaatttcgagccagggtacacaatgcctccaaagaaaactccggtggttgaaacggcggtcacgatcagtgaacacgaggacatgcaatctttggaatctcgggagggcttgagtgggggtgcaggctacaccaggtgctcctacaccgcagatcaatgcgccacatggtgccggtcgctggcgatcacgttcaccattatgctgctggcatggcatctggttgcagtggtgacggttgaagcagcagctcactgcgcgttcagtctcctggcagtgagttcattgttggcatggccaagcagaaaaaagcagagttttaataggtaacctgattccatcgactaagagcagaggttatgtttctttgcagatgtacttgcttcgcgctgctggtatcctgctgccgctgtgcgttgtcatgcgactgattcgcatcgtccagagtggtcaggagcagcagtatgggctgcagctgctggagcaccaaagaagaaatgtatcaactatatgaattatatgcgtgtccaggaggaggaccagcgagtaattaatattcattaagccaatgaatctcaatgcaagcttgcacaaatgtgcattaagtattaccgtggaaactttcaaacagaacatcatctgtaaacatttagtatacatacagttggtgcagggaaaaacagcaccattttatt

SEQ ID NO: 146566 - DNA, 632 bp, Zea Mays
tcaaatcggcaaccattatctaaattttgtcagctgatcgtgtagtgaacacgaggacatgcaatctttggaatctcgggagggcttgagtgggggtgcaggctacaccaggtgctcctacaccgcagatcaatgcgccacatggtgccggtcgctggcgatcacggtatgatctgtttcaagtcatgcagcaaactgaaacaaccgtccttcaggatccatggctgcccacaggattctgacttctgcaatcctgtgcagttcaccattatgctgctggcatggcatctggttgcagtggtgacggttgaagcagcagctcactgcgcgttcagtctcctggcagtgagttcattgttggcatggccaagcagaaaaaagcagagttttaataggtaacctgattccatcgactaagagcagaggttatgtttctttgcagatgtacttgcttcgcgctgctggtatcctgctgccgctgtgcgttgtcatgcgactgattcgcatcgtccagagtggtcaggagcagcagtatgggctgcagctgctggaggttagtcctggctcctgttcactggtttcttgagggcgccgattatagccggattaaaacgtgctgagctttctcgtct

SEQ ID NO: 146567 - DNA, 1664 bp, Zea Mays
cgctacccttgggcccaaagcacacccgaccctaccccgcagggtggcggcgcccaccccacccgcttgtcctgtcctccgctccctcttgaagagcgtgccccgcgccccgccataaagaaacatcgagcaacgcgaagaaagctgccgctgcctgcctcctgctagcagttgcagcccccgccgccgcggaggcggaggaggtgaaatcaaccgcggttgtccccggtgggcgcaagcgaggccagcaggtcgcggaagtcccaattcccagctgcggccctccagtcggttccgtgccgcgccggtgccgatgcggatcccgcggcggaagggcggggccgggccgctcgctgtcggggtgcccagcaggcgggcacaggtggccgcggtcttcgcgctcgccacgctgctgggggtctccgtgctctacgacgccgcccacatcgccgcctcgctgcggaggcacggcggcccgacggcgtacgccaagctctcctcctccgacggcgccgcctccgtctccggcgtcgcgagggaggaggtggcggccgtagagacgctcgcgccgccggcgagggcagtggggtctgacggcgcggatcggaccgacccgcccccgcacgagcagcaggaggaggccgaggagggcgcggcgaagcccggtgcctccctgcagcaggacgcgccgctgaccgaggaggtggtggaagggggaagcgggggccacggcggcggcggctcgcaggagcaggagcaggatcaggcccaggggacctgcgacctgtacaagggccgctgggtgtacgacgagtcccgcgcgccgctgtacaaggagtccgagtgcagcttcctcacggagcaggtcacctgcacgcgcaacggccgccgcgacgacgactaccagaagtggcgctggcagcccgacggctgcgacctccccagatttgaggctaagttgcttctggagaagctaaggaacaaaaggctgatgtttgtgggtgattctctgaatcggaaccagtgggagtccatggtgtgcctggtccagtcagaggcaccatgggacaaaaaatctctcgtcaagaatggttctcttaatgtcttccatcttcaggagtacaatgcaacagttgagttctactgggctccgttcctagtggagtcaaactcagacgacccagacattcacagcatcagcgaccgcatgatcaagccgacatcgatcgcgaagcatgcggcaaactgggaaggcgtggactacctgatcttcaacacttacatttggtggatgaacacaccgcagatgaaaaccgtgcacggtggatctttctcaaggaaacacgtaaagtacgatgaaatagagcgtgtggaggcataccggaaggtcctcaagacgtggtccagatgggtagaggcgcacattgatcccaagagaagcacggtcctattcatgagcgtgtcaccggtacatatgcagtaagtatccatccgtaccttgcttgatatgcagaatttctgcccctccacagtcactcactgtcttgttgtggtccaggagtgaaggctggggcagccccaacgccgtaaaatgcttctccgagacgcagccggcgatcaactacacgaagaaactggaggtgggcacggactgggacctcttc

SEQ ID NO: 146568 - DNA, 2156 bp, Zea Mays
cgctacccttgggcccaaagcacacccgaccctaccccgcagggtggcggcgcccaccccacccgcttgtcctgtcctccgctccctcttgaagagcgtgccccgcgccccgccataaagaaacatcgagcaacgcgaagaaagctgccgctgcctgcctcctgctagcagttgcagcccccgccgccgcggaggcggaggaggtgaaatcaaccgcggttgtccccggtgggcgcaagcgaggccagcaggtcgcggaagtcccaattcccagctgcggccctccagtcggttccgtgccgcgccggtgccgatgcggatcccgcggcggaagggcggggccgggccgctcgctgtcggggtgcccagcaggcgggcacaggtggccgcggtcttcgcgctcgccacgctgctgggggtctccgtgctctacgacgccgcccacatcgccgcctcgctgcggaggcacggcggcccgacggcgtacgccaagctctcctcctccgacggcgccgcctccgtctccggcgtcgcgagggaggaggtggcggccgtagagacgctcgcgccgccggcgagggcagtggggtctgacggcgcggatcggaccgacccgcccccgcacgagcagcaggaggaggccgaggagggcgcggcgaagcccggtgcctccctgcagcaggacgcgccgctgaccgaggaggtggtggaagggggaagcgggggccacggcggcggcggctcgcaggagcaggagcaggatcaggcccaggggacctgcgacctgtacaagggccgctgggtgtacgacgagtcccgcgcgccgctgtacaaggagtccgagtgcagcttcctcacggagcaggtcacctgcacgcgcaacggccgccgcgacgacgactaccagaagtggcgctggcagcccgacggctgcgacctccccagatttgaggctaagttgcttctggagaagctaaggaacaaaaggctgatgtttgtgggtgattctctgaatcggaaccagtgggagtccatggtgtgcctggtccagtcagaggcaccatgggacaaaaaatctctcgtcaagaatggttctcttaatgtcttccatcttcaggagtacaatgcaacagttgagttctactgggctccgttcctagtggagtcaaactcagacgacccagacattcacagcatcagcgaccgcatgatcaagccgacatcgatcgcgaagcatgcggcaaactgggaaggcgtggactacctgatcttcaacacttacatttggtggatgaacacaccgcagatgaaaaccgcacggtggatctttctcaaggaaacacgtaaagtacgatgaaatagagcgtgtggaggcataccggaaggtcctcaagacgtggtccagatgggtagaggcgcacattgatcccaagagaagcacggtcctattcatgagcgtgtcaccggtacatatgcagagtgaaggctggggcagccccaacgccgtaaaatgcttctccgagacgcagccggcgatcaactacacgaagaaactggaggtgggcacggactgggacctcttcgcggccgcccagcgcgtgacgaggtcgatggagaaggtgccggtgcgcttcgtcgacgtgaccgcgctgtcggagatccgcaaggacgcgcacacctccgtgcacacgctgcggcaggggaagctcctgacgcccgagcagaaggcgaacccgaggaagttcgcggattgcatccactggtgcctccccggcgtgccggacacgtggaaccagttcgtttatggtcacatcgtgtcgagcccgccgccgccgcaggatcaacctcacagataacaacagctagaaatacttctcgtgcatcagtgtgtttgtggtcgacgccataagttatttctttttcccctaatagtaggtttagaagcctatgctgctggactggttcacctgagcatctgttggaaggtcagatcgcactagtgtagccaaaaaaagcagcagtaaatgtggttgtttgagcctgaggggaaatgcgcgcttctgtgcctcgtgtttctacctggcacgtgtacataattttttaccagaatcattcgtgaaattgtttctattcgtgtcgaaatatttctcttaaaa

SEQ ID NO: 146569 - DNA, 2240 bp, Zea Mays
cgctacccttgggcccaaagcacacccgaccctaccccgcagggtggcggcgcccaccccacccgcttgtcctgtcctccgctccctcttgaagagcgtgccccgcgccccgccataaagaaacatcgagcaacgcgaagaaagctgccgctgcctgcctcctgctagcagttgcagcccccgccgccgcggaggcggaggaggtgaaatcaaccgcggttgtccccggtgggcgcaagcgaggccagcaggtcgcggaagtcccaattcccagctgcggccctccagtcggttccgtgccgcgccggtgccgatgcggatcccgcggcggaagggcggggccgggccgctcgctgtcggggtgcccagcaggcgggcacaggtggccgcggtcttcgcgctcgccacgctgctgggggtctccgtgctctacgacgccgcccacatcgccgcctcgctgcggaggcacggcggcccgacggcgtacgccaagctctcctcctccgacggcgccgcctccgtctccggcgtcgcgagggaggaggtggcggccgtagagacgctcgcgccgccggcgagggcagtggggtctgacggcgcggatcggaccgacccgcccccgcacgagcagcaggaggaggccgaggagggcgcggcgaagcccggtgcctccctgcagcaggacgcgccgctgaccgaggaggtggtggaagggggaagcgggggccacggcggcggcggctcgcaggagcaggagcaggatcaggcccaggggacctgcgacctgtacaagggccgctgggtgtacgacgagtcccgcgcgccgctgtacaaggagtccgagtgcagcttcctcacggagcaggtcacctgcacgcgcaacggccgccgcgacgacgactaccagaagtggcgctggcagcccgacggctgcgacctccccagatttgaggctaagttgcttctggagaagctaaggaacaaaaggctgatgtttgtgggtgattctctgaatcggaaccagtgggagtccatggtgtgcctggtccagtcagaggcaccatgggacaaaaaatctctcgtcaagaatggttctcttaatgtcttccatcttcaggagtacaatgcaacagttgagttctactgggctccgttcctagtggagtcaaactcagacgacccagacattcacagcatcagcgaccgcatgatcaagccgacatcgatcgcgaagcatgcggcaaactgggaaggcgtggactacctgatcttcaacacttacatttggtggatgaacacaccgcagatgaaaaccgtgtgagtaattaattgtcttactcgcgaacaatggaaagggtgagctgctcatgccttacacgagctaccttcttgactacaggcacggtggatctttctcaaggaaacacgtaaagtacgatgaaatagagcgtgtggaggcataccggaaggtcctcaagacgtggtccagatgggtagaggcgcacattgatcccaagagaagcacggtcctattcatgagcgtgtcaccggtacatatgcagagtgaaggctggggcagccccaacgccgtaaaatgcttctccgagacgcagccggcgatcaactacacgaagaaactggaggtgggcacggactgggacctcttcgcggccgcccagcgcgtgacgaggtcgatggagaaggtgccggtgcgcttcgtcgacgtgaccgcgctgtcggagatccgcaaggacgcgcacacctccgtgcacacgctgcggcaggggaagctcctgacgcccgagcagaaggcgaacccgaggaagttcgcggattgcatccactggtgcctccccggcgtgccggacacgtggaaccagttcgtttatggtcacatcgtgtcgagcccgccgccgccgcaggatcaacctcacagataacaacagctagaaatacttctcgtgcatcagtgtgtttgtggtcgacgccataagttatttctttttcccctaatagtaggtttagaagcctatgctgctggactggttcacctgagcatctgttggaaggtcagatcgcactagtgtagccaaaaaaagcagcagtaaatgtggttgtttgagcctgaggggaaatgcgcgcttctgtgcctcgtgtttctacctggcacgtgtacataattttttaccagaatcattcgtgaaattgtttctattcgtgtcgaaatatttctcttaaaa

SEQ ID NO: 146570 - DNA, 2158 bp, Zea Mays
cgctacccttgggcccaaagcacacccgaccctaccccgcagggtggcggcgcccaccccacccgcttgtcctgtcctccgctccctcttgaagagcgtgccccgcgccccgccataaagaaacatcgagcaacgcgaagaaagctgccgctgcctgcctcctgctagcagttgcagcccccgccgccgcggaggcggaggaggtgaaatcaaccgcggttgtccccggtgggcgcaagcgaggccagcaggtcgcggaagtcccaattcccagctgcggccctccagtcggttccgtgccgcgccggtgccgatgcggatcccgcggcggaagggcggggccgggccgctcgctgtcggggtgcccagcaggcgggcacaggtggccgcggtcttcgcgctcgccacgctgctgggggtctccgtgctctacgacgccgcccacatcgccgcctcgctgcggaggcacggcggcccgacggcgtacgccaagctctcctcctccgacggcgccgcctccgtctccggcgtcgcgagggaggaggtggcggccgtagagacgctcgcgccgccggcgagggcagtggggtctgacggcgcggatcggaccgacccgcccccgcacgagcagcaggaggaggccgaggagggcgcggcgaagcccggtgcctccctgcagcaggacgcgccgctgaccgaggaggtggtggaagggggaagcgggggccacggcggcggcggctcgcaggagcaggagcaggatcaggcccaggggacctgcgacctgtacaagggccgctgggtgtacgacgagtcccgcgcgccgctgtacaaggagtccgagtgcagcttcctcacggagcaggtcacctgcacgcgcaacggccgccgcgacgacgactaccagaagtggcgctggcagcccgacggctgcgacctccccagatttgaggctaagttgcttctggagaagctaaggaacaaaaggctgatgtttgtgggtgattctctgaatcggaaccagtgggagtccatggtgtgcctggtccagtcagaggcaccatgggacaaaaaatctctcgtcaagaatggttctcttaatgtcttccatcttcaggagtacaatgcaacagttgagttctactgggctccgttcctagtggagtcaaactcagacgacccagacattcacagcatcagcgaccgcatgatcaagccgacatcgatcgcgaagcatgcggcaaactgggaaggcgtggactacctgatcttcaacacttacatttggtggatgaacacaccgcagatgaaaaccgtgcacggtggatctttctcaaggaaacacgtaaagtacgatgaaatagagcgtgtggaggcataccggaaggtcctcaagacgtggtccagatgggtagaggcgcacattgatcccaagagaagcacggtcctattcatgagcgtgtcaccggtacatatgcagagtgaaggctggggcagccccaacgccgtaaaatgcttctccgagacgcagccggcgatcaactacacgaagaaactggaggtgggcacggactgggacctcttcgcggccgcccagcgcgtgacgaggtcgatggagaaggtgccggtgcgcttcgtcgacgtgaccgcgctgtcggagatccgcaaggacgcgcacacctccgtgcacacgctgcggcaggggaagctcctgacgcccgagcagaaggcgaacccgaggaagttcgcggattgcatccactggtgcctccccggcgtgccggacacgtggaaccagttcgtttatggtcacatcgtgtcgagcccgccgccgccgcaggatcaacctcacagataacaacagctagaaatacttctcgtgcatcagtgtgtttgtggtcgacgccataagttatttctttttcccctaatagtaggtttagaagcctatgctgctggactggttcacctgagcatctgttggaaggtcagatcgcactagtgtagccaaaaaaagcagcagtaaatgtggttgtttgagcctgaggggaaatgcgcgcttctgtgcctcgtgtttctacctggcacgtgtacataattttttaccagaatcattcgtgaaattgtttctattcgtgtcgaaatatttctcttaaaa

SEQ ID NO: 146571 - DNA, 93 bp, Zea Mays
attcatttttgctcaattttagccacattttggatctagggtttcaccattggagagagagtgtatcctctctcaattttagccacattttag

SEQ ID NO: 146572 - DNA, 716 bp, Zea Mays
gggtctggcggcggacgtcggcagcaggagagcaagctacgggaggcactggaggtgttagaggacggacccttgccaagtccagcgacgatgcggccctcttcgatggaagggacggtgcggaggaggcgcttgtggggtggttctggtcgctggcgtggctccacgtgcagcatcgggacttcctgcgtgcgacgacgatggccgtagagtgcgcgttctagtcgtctgacatgctcccgatgatggaggaggcgcttgccaagttcctcaccatgtacccccacctatgtgtctgccttgaacatgggtcgtcttcacgtcgacgagtacccgctcctgagtcctgacaaggtatgcctcgactattgtgcctttggccttttctcctacctccaaagctacaactttgtcgagttgtcggcttcgtttcacgctctcgaaggtcaccgccaacctcagcaaaaccatgcgctctacggcgccgcggagaagggcaccgtttagcacgacatcaagaactgcatcatggattacctcaacatccccgagtcagagtactgcctcgtcttcacagtcagccatggttcggccttccggctgctcgctgagtgctacccattcagcaccaacatgcacctgctcaccatgtttgaccacggagcacaatccgtgaattggatgatgcaggccacgcatgacaagggagcaaggca

SEQ ID NO: 146573 - DNA, 783 bp, Zea Mays
ttaacatggccacatacacaagacaaactggctgagggtcagggagtggcctggcagagactcgactcgactcgacaatggcgaagctgcacaggctcatctccgccgtcctcaggctggccgcggcgggagccgcggccgccgcagccgtgatcatggtgactagccacgagaccaccagcttgttcggcatagagatggaagccaagtactcctacactccatcattcgtcttcttcgtggtggctttcgctgtgaccttcgcctacagcctgctcgcggccgtcctcgtgcgcccggggaccaccgcctccagattagtgctcctaagcgacgtgacggtagggatgcttctgacgggcgccgtggcggccaccggcgccatctctcaggtggggaagagcggcaacgagcacgccgggtggctgcccatctgcgcgcaggtgcaggcctactgcggccacgtgatgggggcgctcatcgccggcttcgtctcgctgctcctctacttcctcatcatcatgtactccctccacgcggtcgccgaacccctgtgctcctgccattagaacacggccaaacgcgcacactattcgttcgattatattcactaggtcatcgacgatgatccaatggtcggtccccagtgatacgttgttttccgtctcactactatatatatatctgccgcactgttgagtcgattaagggtcatttggtggtacaacactttactagcagctagctagtcgacaccagtttggggagctaactgctaatata

SEQ ID NO: 146574 - DNA, 2053 bp, Zea Mays
tcatcactgctactagtgctacgctagccgctgctcatataaggtactgctactgctagctccaggccgccagaggcgacaggccaatgggtttccgcggtggtttgaggccgcccgtgacgcgcgtctgcttcgtcctcctgtgcctgtgcgcctcgttgtccgaagccaagaggacgccgcagcctgcgcctactacgggcaagaagcagcagccaccggcagcgtcgtcgtcccagcagagcccagcggtctcgtatccggctctccccgtccgggcggtgtgcctcggcggttggctcgtcaccgagggctggattctgccctccctcttcgacggcatccccaacaaagacctcctggtacgtggtacagtacgtacgagtgcgtagcgtacgtagtgccttccttcctctgcctgctgacctgcgcccccgttcttcttggtcatcccattcccatcccgatccgacgaccacatgccaggatggcacgcagctgcagttcaagtcggcgctgcggaagacgtacctgaccgcggacaacggcggcggcggcgccgtcgtggccaaccgcacgcaggcctccgactgggagacgttcaagctgtggaggctgaacgacacgacgttcaacttccgcacgtccggcaaccagttcgtgggcatcggcgccagcgacggcatcatcgtcgcgacggccaccacgccgggcctgccggagacgttccagatagtgcggtgccccttcgacaagaacagggtccggatcaaggcggcgaacggctacttcgtccaggcgatagcgaccggcgaagtgatagcggactacggcgagcccacgcggtggtccgacttcgacgcgtcagtgttcctgatgaccaccgtcgggcagcagctgcaaggggagtaccagctctgcaacggctacggcgccgacaaggccgcgccgctgctgagggagcattggagcacgtacatagtggaggacgacttcaagttctttgcgtcgagtgggctgaccgcagtgaggatccccgtcggatggtggatcgccagcgaccccagcccgcccgctccgtacgtcggaggctccctccaagccctggacaacgccttcagatgggcagagaagcacgagctgggtgtcatcgtcgacctgcacgcagctcccgggtcgcagaacccctgggagcacagctcgtcccgagacggcacgcaggagtggggaaccacggacgccagcatcgcgcagacggtgcaggtcatagatttcctcgcgtccaggtacgcgacgagcccgaggctgctggcggtggagctgctgaacgagccgctggcgcctggagcgaccctggacagcctcaccaggtactaccgcgacgggtacgccgccgtccggaagcacgcgccggcggcctacgtggtcatgtccaaccgcctgtcgtcggggaactccacggagctcctctggttcgccggccgtgggttcccgggcgccgtcgtcgacgtgcattactacaccgtcttcaacagcttgttcggtaacttcaccgcgcagcagaacatcgacttcgtccggactaacttctccggcgagctcgccgccgtcaccacccgagatggcccgctcaccttcgtcggcgagtgggttgcggagtggaaggtgccgaacgcgaccaaggaggaataccagaagtacgcagcggcgcagatgaacgtgtatggacaggccacgtttgggtgggcctattggacggccaagaatgccaacaaccattgggatctcgagtggatgattagaaatggatacatctcgttgaaaggctaggacccaagccaacaggtttcagtctatataaaactctaatctctattggtagtacgtaggaacccgggcgagccagagatatttgctatatgtcgttgtaattaaattaaggccaagttcaatgaccttggcttcgtcagaacgaacccggccgggcgtactacttgtgccatgaacacttttgttggttgttgtgtgtacccgagcaaaccaatttaacgat

SEQ ID NO: 146575 - DNA, 1957 bp, Zea Mays
tcatcactgctactagtgctacgctagccgctgctcatataaggtactgctactgctagctccaggccgccagaggcgacaggccaatgggtttccgcggtggtttgaggccgcccgtgacgcgcgtctgcttcgtcctcctgtgcctgtgcgcctcgttgtccgaagccaagaggacgccgcagcctgcgcctactacgggcaagaagcagcagccaccggcagcgtcgtcgtcccagcagagcccagcggtctcgtatccggctctccccgtccgggcggtgtgcctcggcggttggctcgtcaccgagggctggattctgccctccctcttcgacggcatccccaacaaagacctcctggatggcacgcagctgcagttcaagtcggcgctgcggaagacgtacctgaccgcggacaacggcggcggcggcgccgtcgtggccaaccgcacgcaggcctccgactgggagacgttcaagctgtggaggctgaacgacacgacgttcaacttccgcacgtccggcaaccagttcgtgggcatcggcgccagcgacggcatcatcgtcgcgacggccaccacgccgggcctgccggagacgttccagatagtgcggtgccccttcgacaagaacagggtccggatcaaggcggcgaacggctacttcgtccaggcgatagcgaccggcgaagtgatagcggactacggcgagcccacgcggtggtccgacttcgacgcgtcagtgttcctgatgaccaccgtcgggcagcagctgcaaggggagtaccagctctgcaacggctacggcgccgacaaggccgcgccgctgctgagggagcattggagcacgtacatagtggaggacgacttcaagttctttgcgtcgagtgggctgaccgcagtgaggatccccgtcggatggtggatcgccagcgaccccagcccgcccgctccgtacgtcggaggctccctccaagccctggacaacgccttcagatgggcagagaagcacgagctgggtgtcatcgtcgacctgcacgcagctcccgggtcgcagaacccctgggagcacagctcgtcccgagacggcacgcaggagtggggaaccacggacgccagcatcgcgcagacggtgcaggtcatagatttcctcgcgtccaggtacgcgacgagcccgaggctgctggcggtggagctgctgaacgagccgctggcgcctggagcgaccctggacagcctcaccaggtactaccgcgacgggtacgccgccgtccggaagcacgcgccggcggcctacgtggtcatgtccaaccgcctgtcgtcggggaactccacggagctcctctggttcgccggccgtgggttcccgggcgccgtcgtcgacgtgcattactacaccgtcttcaacagcttgttcggtaacttcaccgcgcagcagaacatcgacttcgtccggactaacttctccggcgagctcgccgccgtcaccacccgagatggcccgctcaccttcgtcggcgagtgggttgcggagtggaaggtgccgaacgcgaccaaggaggaataccagaagtacgcagcggcgcagatgaacgtgtatggacaggccacgtttgggtgggcctattggacggccaagaatgccaacaaccattgggatctcgagtggatgattagaaatggatacatctcgttgaaaggctaggacccaagccaacaggtttcagtctatataaaactctaatctctattggtagtacgtaggaacccgggcgagccagagatatttgctatatgtcgttgtaattaaattaaggccaagttcaatgaccttggcttcgtcagaacgaacccggccgggcgtactacttgtgccatgaacacttttgttggttgttgtgtgtacccgagcaaaccaatttaacgatgtactaatactattagaccaactccagc

SEQ ID NO: 146576 - DNA, 1978 bp, Zea Mays
ccaggccgccagaggcgacaggccaatgggtttccgcggtggtttgaggccgcccgtgacgcgcgtctgcttcgtcctcctgtgcctgtgcgcctcgttgtccgaagccaagaggacgccgcagcctgcgcctactacgggcaagaagcagcagccaccggcagcgtcgtcgtcccagcagagcccagcggtctcgtatccggctctccccgtccgggcggtgtgcctcggcggttggctcgtcaccgagggctggattctgccctccctcttcgacggcatccccaacaaagacctcctggatggcacgcagctgcagttcaagtcggcgctgcggaagacgtacctgaccgcggacaacggcggcggcggcgccgtcgtggccaaccgcacgcaggcctccgactgggagacgttcaagctgtggaggctgaacgacacgacgttcaacttccgcacgtccggcaaccagttcgtgggcatcggcgccagcgacggcatcatcgtcgcgacggccaccacgccgggcctgccggagacgttccagatagtgcggtgccccttcgacaagaacagggtccggatcaaggcggcgaacggctacttcgtccaggcgatagcgaccggcgaagtgatagcggactacggcgagcccacgcggtggtccgacttcgacgcgtcagtgttcctgatgaccaccgtcgggcagcagctgcaaggggagtaccagctctgcaacggctacggcgccgacaaggccgcgccgctgctgagggagcattggagcacgtacatagtggaggacgacttcaagttctttgcgtcgagtgggctgaccgcagtgaggatccccgtcggatggtggatcgccagcgaccccagcccgcccgctccgtacgtcggaggctccctccaagccctggacaacgccttcagatgggcagagtaccacgagctgggtgtcatcgtcgacctgcacgcagctcccgggtcgcagaacccctgggagcacagctcgtcccgagacggcacgcaggagtggggaaccacggacgccagcatcgcgcagacggtgcaggtcatagatttcctcgcgtccaggtacgcgacgagcccgaggctgctggcggtggagctgctgaacgagccgctggcgcctggagcgaccctggacagcctcaccaggtactaccgcgacgggtacgccgccgtccggaagcacgcgccggcggcctacgtggtcatgtccaaccgcctgtcgtcggggaactccacggagctcctctggttcgccggccgtgggttcccgggcgccgtcgtcgacgtgcattactacaccgtcttcaacagcttgttcggtaacttcaccgcgcagcagaacatcgacttcgtccggactaacttctccggcgagctcgccgccgtcaccacccgagatggcccgctcaccttcgtcggtaatataattcacctccgttgaccgttgcctttcttacgtaccaataccatacgagatgtccgctcacggcaccttggatgtgtatgcaggcgagtgggttgcggagtggaaggtgccgaacgcgaccaaggaggaataccagaagtacgcagcggcgcagatgaacgtgtatggacaggccacgtttgggtgggcctattggacggccaagaatgccaacaaccattgggatctcgagtggatgattagaaatggatacatctcgttgaaaggctaggacccaagccaacaggtttcagtctatataaaactctaatctctattggtagtacgtaggaacccgggcgagccagagatatttgctatatgtcgttgtaattaaattaaggccaagttcaatgaccttggcttcgtcagaacgaacccggccgggcgtactacttgtgccatgaacacttttgttggttgttgtgtgtacccgagcaaaccaatttaacgatgtactaatactattagacc

SEQ ID NO: 146577 - DNA, 493 bp, Zea Mays
ttcaggctccctgtctcgcccgatttgtaactgactaccatgctctcgcagggaagccggtccaggctgcgctgctgctcaactacgccccctccgggccatctcggctccttcccgtcgtagtagagcaagagagaagacaactttcagcttttgatatgcaaccattcctggactttgtcaagaggggcaatctgcagactgaattcttttctgttgggccgacctatgtgtgaacttaattttgtttatatgacatgtcaaattgattgccattgttgtggccagcaatttgtgacagaaaattatgatttgtacatttggtcacgtcaatccatgagaactggttttgtgcctgttgcattaatagcacaaagtcaggaggtgaaggagtaatagctatgcagattggagcttacttgatagtctctatgtatgtactttttcttcaactttcaattcatggaaattggttgccatattttttaacata

SEQ ID NO: 146578 - DNA, 499 bp, Zea Mays
ttgagtgcgagcggagccacatgtcaatgcactccacacagatgctggcacaccggcagccgccgcaccacctcgccgacctgcaccagccccaggcatatgacgcactgcgcccaccccgccgcgtccccgccgcggcccgtagtggtagtaccaccctcccgcttgtacgcaaacgccgggatcgcggacaggacaagtgccgctgaagcttccgtccgcggcccacggctccgcgcagcgtgcagcagcagggcctctctacggtgcagggcgacgcgctggcgagcctttaggtagcagcaggagagcgcgactgcgcaggcggtgacgacggaggcgcatatcacgccggcgacgaggtagagtagggtgaaggagaagaagatgccgaaggtgaggagcaccgtgaggttgtggtccctgtcgtcgtcggacggagcagctgatgcgccgtcgcctggactgacagctggctgctggtggtacgagagcccag

SEQ ID NO: 146579 - DNA, 79 bp, Zea Mays
ggagtatgtggcagaaccacccgaattactcgatgcagtacaagggatcaagcagtctcattagctgcgagaagcagac

SEQ ID NO: 146580 - DNA, 2526 bp, Zea Mays
aagggtagagagaagttatagcctttcctccccgattcaccccccgcgtgttctcgacgaccgggcgactgccgccaccactctacgccaggtgttcgtcggcgatccgtaccaatcagatgtgtgcacccatatcctttacttctctacatcaattggcttctgcgggctcaagttcttgagctgtagttagttaagcttgaaattagtggtcttggtggcttttaggactgcaggagtcaggacaacaattatggataccgtgatctacaaacatgatgacatttcccaagaaggaaccctgccatttggagagacaatgaacatgggaggaagcaatgtagaaattctcacaagaatagagctcgatattgcatttgcctccgagaaattattaaatttggagatgctggtgatggaaattgctcgtcaggctactgactttgagccttctacgcttgaagatgagtccatttcttctgagatcgcagagaatgctttggaattggacatcttgtatggtattcttgatgcagaagtcaaggagctacataacttgattagttctctccaagctgatattaaaagtatagagcatgaggtttatgaagaagagtctggaggcaaggtaaaaactagaatggatgcagctaaattgtccttgaagcagatgcaagagctaattgctgatattcagaatgaatctgcaaagtttgagaaagtcgttgagttttcccaggataaggaagggaccattgaagctgttggatgtgataatgaccatctgtcatatcaaactggtgcgcagacagaagatcaacacagaaatgttttacatatgttagaacaatccatagcaagtgagatagatcttgaaaagaaactctctgattccatatctgtcatagaagacctcaggctgaagctccatcatcaggaagaggaaatctatttccttgaggaatcaactgaaacagtttcaggtagaatgtttgaagcagaaaacgcttcggagctactttttggaacttcaaaggaacttataaataggcttaataacatgcagtttcatgtaagtgaacaaaaatgtacagaagatgatctcaagtcaaaactagaacaaagcttaacaaaattatcttttctggaaaatagcccagagaaggtggaaaaaggaagtaacaaagctggagctggatcaccatcattgcaggataaaatacaagagttagaaaaacagttgaatgaatccaatttgcaactgcaattagcactggcttcagcagaaacaaagcaggaggagcaaaatgcattgcaatctgagctgaacacattggaaaacacaattaagaatatcaaagatgatgtctcacgagcagaaagcagagcgcaaaatgcagaaataaggtgtatggagctaactgtagctaatatagagcttaatggggaactaaatgcccttaaaagcgagaagtcagataaggccagtcttttggagaagaagcttacagagtcaaatacccaattagagcatgcaaaggcagcggttgatgccattgttgaacagcaaggtatgctgaaatgtacgatgtctgatatggaacatattattgaagatctgaagggtaaagtttcaaaaactgaaaccagagctgagtgtgctgagtcaaaatgcacactgttaacagacacaaatttagaacttagtgaagagctagcatttctaagaggtcgagtagaaagtctagagaactcgttacgtgaagccaaccatgcgaaggtgtccactgccaaggacattggtgtgaaaactaaaattattactgatttggtcagaaaattggcactggaaagagaacggcttcatctccagattgctacgttgacaaagaagaacaagatgttggttaaaaaacgtgcagagggtattaatggtagcataaaaatgagcaaaaagggtacttccaatcatactgaattccagtcaactcaaaaggctgaggaaatatgtccagattctttgccatcacaaactgtggtggagaaaccatcagatccaattgacaatgatgaatctaagaatcagagtgctgatgtttccacttcagaggatgattccatacgggaggacattcatgagacagtgtgcaccatagagccatcgctgctaaaccggaaatatatttttatggcatttctagtgttgttggctgctgccgttgtattcttgttacatgaagacggcagcccagcatgatagtatgattttgctgatgcagtctacaactctacactgtcacctaaacatctaggtcgtttactcccacttctttgtctgtcagttggggagcaattttgtgtattgtattgtagatttgtgctagactgctcgtgccttcaacttggacccacccggcatttccattgttgctttgcggaggaaataatgttagataacgaaaatgttttgtaactgtgtttacttgtcagagtgaaagaatatgcagcagtctttttttcttgtgg

SEQ ID NO: 146581 - DNA, 801 bp, Zea Mays
gcttttggattctggtttctctcgtctttctcctccctctcctgacttttcttctagacatctcgcgggtcttatcgactccaacaagaacacactacacaccagccagcgagatagcgaacgctaggaacccagtggccatctttggagcggccatgacgctggatcagaaccatgccatgccgatgcagcccccggccctgcagcccggaagagcatatggagcagagggcagtgctgtggtgcatggttccatcagaacagtaggtatgactgctttgatcacctcttgtgaaaaggaaatattgactgatatgagtccacactaggcctggccctataaaacacaatcacacaaataacaataacagtttatgtttcagcaggaggccctactcttgccttgaatgagtgccagattttggtacagcagaaaccccagggagattcacgactgctggcctctaatctgtggtgtgttttaactgttctatatctggttgctctctgctagagcatctgagctatcactagcagtctttgactgatagtgttgtgtgcttgatgagtgagttacccttgtgctgtggtgtgtttttacttgttctatatcgatctggctgctctctgctagagcatctgagctgtcacttgcagtctctgactgatagtgttgtgcgcttgatgagtgagttatccttgcgctgtggtgtgttttaactgttctatatctggctgctctctgctagagcatctcagctatcactagcagtctttgactggtagtgttgtgcgcttgat

SEQ ID NO: 146582 - DNA, 1499 bp, Zea Mays
gcttttggattctggtttctctcgtctttctcctccctctcctgacttttcttctagacatctcgcgggtcttatcgactccaacaagaacacactacacaccagccagcgagatagcgaacgctaggaacccagtggccatctttggagcggccatgacgctggatcagaaccatgccatgccgatgcagcccccggccctgcagcccggaagagcatatggagcagagggcagtgctgtggtgcatggttccatcagaacagtagcaggaggccctactcttgccttgaatgagtgccagattttggtacagcagaaaccccagggagattcacgactgctggcctctaatctgtggaagaagcgacctcgcagatcacgagatgggcctacgtcagtggcagctgtcatccagcggtgggctgagcgcaacaagcatttggagtatgaggaatctgaggaggcaaagcgaccaagaaaagcacctgcaaagggttcaaagaagggctgtatgaagggaaaaggggggcctgacaatactcaatgtggataccgtggagtgaggcagcgtacttgggggaagtgggttgctgaaataagagagccaaatcgtgtcgacagactctggctgggtaccttcccaaccgcggaggatgcagctagggcctatgatgaggcagccagagcgatgtatggagacttggcacggactaacttccccggacaggatgcaacaacctctgcccaagctgctctatcatcgacctctgcccaggctgctccaacagctgttgaagctcttcagactggcacgtcatgcgagtcgacaacgacatcaaatcactcggacatcgcatccacctcacacaagcttgaagcctctgacatctcgagctacctaaaggaaaaatgtccagctggatcatgtggtatccaagacggcacacccattgtagctgacaaggaggtctttgggccgttggagcctatcacaaatcttccagatggtggtgatggttttgatatcggtgagatgctgaggatgatggaaagcgatccacataatgcaggtggagccgacgctggcatgggacagccctggtatcttgatgagctggattcgagtgtcttagagagcatgctccagccggagccggagccagagccagagccattcctgatgtctgaagaaccggacatgtttcttgctggcttcgaaagcgctggtttcgtcgagggtctggagcggctaaactgaatttctgatgtttgaccgttgatcctcatcccacttcatgtctgagcttgtgaattcggaggcaaacattggcagaacttataagctctagcaattctaggctttacattcctctgtgatagttctctatgcatgggaactgggtttgcttcacaatttttgtaagaccagaagtgatgtaaatagttcccaccttgtggaaggacaagaaaaaaataaataaaaagagtgcttgctttc

SEQ ID NO: 146583 - DNA, 1411 bp, Zea Mays
gcttttggattctggtttctctcgtctttctcctccctctcctgacttttcttctagacatctcgcgggtcttatcgactccaacaagaacacactacacaccagccagcgagatagcgaacgctaggaacccagtggccatctttggagcggccatgacgctggatcagaaccatgccatgccgatgcagcccccggccctgcagcccggaagagcatatggagcagagggcagtgctgtggtgcatggttccatcagaacagtagcaggaagaagcgacctcgcagatcacgagatgggcctacgtcagtggcagctgtcatccagcggtgggctgagcgcaacaagcatttggagtatgaggaatctgaggaggcaaagcgaccaagaaaagcacctgcaaagggttcaaagaagggctgtatgaagggaaaaggggggcctgacaatactcaatgtggataccgtggagtgaggcagcgtacttgggggaagtgggttgctgaaataagagagccaaatcgtgtcgacagactctggctgggtaccttcccaaccgcggaggatgcagctagggcctatgatgaggcagccagagcgatgtatggagacttggcacggactaacttccccggacaggatgcaacaacctctgcccaagctgctctatcatcgacctctgcccaggctgctccaacagctgttgaagctcttcagactggcacgtcatgcgagtcgacaacgacatcaaatcactcggacatcgcatccacctcacacaagcttgaagcctctgacatctcgagctacctaaaggaaaaatgtccagctggatcatgtggtatccaagacggcacacccattgtagctgacaaggaggtctttgggccgttggagcctatcacaaatcttccagatggtggtgatggttttgatatcggtgagatgctgaggatgatggaaagcgatccacataatgcaggtggagccgacgctggcatgggacagccctggtatcttgatgagctggattcgagtgtcttagagagcatgctccagccggagccggagccagagccagagccattcctgatgtctgaagaaccggacatgtttcttgctggcttcgaaagcgctggtttcgtcgagggtctggagcggctaaactgaatttctgatgtttgaccgttgatcctcatcccacttcatgtctgagcttgtgaattcggaggcaaacattggcagaacttataagctctagcaattctaggctttacattcctctgtgatagttctctatgcatgggaactgggtttgcttcacaatttttgtaagaccagaagtgatgtaaatagttcccaccttgtggaaggacaagaaaaaaataaataaaaagagtgcttgctttc

SEQ ID NO: 146584 - DNA, 1408 bp, Zea Mays
gcttttggattctggtttctctcgtctttctcctccctctcctgacttttcttctagacatctcgcgggtcttatcgactccaacaagaacacactacacaccagccagcgagatagcgaacgctaggaacccagtggccatctttggagcggccatgacgctggatcagaaccatgccatgccgatgcagcccccggccctgcagcccggaagagcatatggagcagagggcagtgctgtggtgcatggttccatcagaacagtaggaagaagcgacctcgcagatcacgagatgggcctacgtcagtggcagctgtcatccagcggtgggctgagcgcaacaagcatttggagtatgaggaatctgaggaggcaaagcgaccaagaaaagcacctgcaaagggttcaaagaagggctgtatgaagggaaaaggggggcctgacaatactcaatgtggataccgtggagtgaggcagcgtacttgggggaagtgggttgctgaaataagagagccaaatcgtgtcgacagactctggctgggtaccttcccaaccgcggaggatgcagctagggcctatgatgaggcagccagagcgatgtatggagacttggcacggactaacttccccggacaggatgcaacaacctctgcccaagctgctctatcatcgacctctgcccaggctgctccaacagctgttgaagctcttcagactggcacgtcatgcgagtcgacaacgacatcaaatcactcggacatcgcatccacctcacacaagcttgaagcctctgacatctcgagctacctaaaggaaaaatgtccagctggatcatgtggtatccaagacggcacacccattgtagctgacaaggaggtctttgggccgttggagcctatcacaaatcttccagatggtggtgatggttttgatatcggtgagatgctgaggatgatggaaagcgatccacataatgcaggtggagccgacgctggcatgggacagccctggtatcttgatgagctggattcgagtgtcttagagagcatgctccagccggagccggagccagagccagagccattcctgatgtctgaagaaccggacatgtttcttgctggcttcgaaagcgctggtttcgtcgagggtctggagcggctaaactgaatttctgatgtttgaccgttgatcctcatcccacttcatgtctgagcttgtgaattcggaggcaaacattggcagaacttataagctctagcaattctaggctttacattcctctgtgatagttctctatgcatgggaactgggtttgcttcacaatttttgtaagaccagaagtgatgtaaatagttcccaccttgtggaaggacaagaaaaaaataaataaaaagagtgcttgctttc

SEQ ID NO: 146585 - DNA, 1362 bp, Zea Mays
gcttttggattctggtttctctcgtctttctcctccctctcctgacttttcttctagacatctcgcgggtcttatcgactccaacaagaacacactacacaccagccagcgagatagcgaacgctaggaacccagtggccatctttggagcggccatgacgctggatcagaaccatgccatgccgatgcagcccccggccctgcagcccggaaggaagaagcgacctcgcagatcacgagatgggcctacgtcagtggcagctgtcatccagcggtgggctgagcgcaacaagcatttggagtatgaggaatctgaggaggcaaagcgaccaagaaaagcacctgcaaagggttcaaagaagggctgtatgaagggaaaaggggggcctgacaatactcaatgtggataccgtggagtgaggcagcgtacttgggggaagtgggttgctgaaataagagagccaaatcgtgtcgacagactctggctgggtaccttcccaaccgcggaggatgcagctagggcctatgatgaggcagccagagcgatgtatggagacttggcacggactaacttccccggacaggatgcaacaacctctgcccaagctgctctatcatcgacctctgcccaggctgctccaacagctgttgaagctcttcagactggcacgtcatgcgagtcgacaacgacatcaaatcactcggacatcgcatccacctcacacaagcttgaagcctctgacatctcgagctacctaaaggaaaaatgtccagctggatcatgtggtatccaagacggcacacccattgtagctgacaaggaggtctttgggccgttggagcctatcacaaatcttccagatggtggtgatggttttgatatcggtgagatgctgaggatgatggaaagcgatccacataatgcaggtggagccgacgctggcatgggacagccctggtatcttgatgagctggattcgagtgtcttagagagcatgctccagccggagccggagccagagccagagccattcctgatgtctgaagaaccggacatgtttcttgctggcttcgaaagcgctggtttcgtcgagggtctggagcggctaaactgaatttctgatgtttgaccgttgatcctcatcccacttcatgtctgagcttgtgaattcggaggcaaacattggcagaacttataagctctagcaattctaggctttacattcctctgtgatagttctctatgcatgggaactgggtttgcttcacaatttttgtaagaccagaagtgatgtaaatagttcccaccttgtggaaggacaagaaaaaaataaataaaaagagtgcttgctttcgttcctt

SEQ ID NO: 146586 - DNA, 1256 bp, Zea Mays
tccttaatccactatctgatacgtactatgtctatttgtcttgtcttatcggtaatctatagagcatatggagcagagggcagtgctgtggtgcatggttccatcagaacagtaggaagaagcgacctcgcagatcacgagatgggcctacgtcagtggcagctgtcatccagcggtgggctgagcgcaacaagcatttggagtatgaggaatctgaggaggcaaagcgaccaagaaaagcacctgcaaagggttcaaagaagggctgtatgaagggaaaaggggggcctgacaatactcaatgtggataccgtggagtgaggcagcgtacttgggggaagtgggttgctgaaataagagagccaaatcgtgtcgacagactctggctgggtaccttcccaaccgcggaggatgcagctagggcctatgatgaggcagccagagcgatgtatggagacttggcacggactaacttccccggacaggatgcaacaacctctgcccaagctgctctatcatcgacctctgcccaggctgctccaacagctgttgaagctcttcagactggcacgtcatgcgagtcgacaacgacatcaaatcactcggacatcgcatccacctcacacaagcttgaagcctctgacatctcgagctacctaaaggaaaaatgtccagctggatcatgtggtatccaagacggcacacccattgtagctgacaaggaggtctttgggccgttggagcctatcacaaatcttccagatggtggtgatggttttgatatcggtgagatgctgaggatgatggaaagcgatccacataatgcaggtggagccgacgctggcatgggacagccctggtatcttgatgagctggattcgagtgtcttagagagcatgctccagccggagccggagccagagccagagccattcctgatgtctgaagaaccggacatgtttcttgctggcttcgaaagcgctggtttcgtcgagggtctggagcggctaaactgaatttctgatgtttgaccgttgatcctcatcccacttcatgtctgagcttgtgaattcggaggcaaacattggcagaacttataagctctagcaattctaggctttacattcctctgtgatagttctctatgcatgggaactgggtttgcttcacaatttttgtaagaccagaagtgatgtaaatagttcccaccttgtggaaggacaagaaaaaaataaataaaaagagtgcttgctttc

SEQ ID NO: 146587 - DNA, 150 bp, Zea Mays
atgtggcttggacatgtggcagtaggcacttcaaataatgcattccaacacttttgggggctcatgtctctctcttgttcagcaagctattttagtgacatgctaatttgtatcatcttaaacaaaaatgatgcttcatttacacaatga

SEQ ID NO: 146588 - DNA, 781 bp, Zea Mays
tccatctctatccattccccaagtgtccaagtcatgcatctctgtctccccttttaaagcccaccacctctctccctccatcgtcttcccgtctcccaatcccagctgcgcgcgcccgtggacttgtcctgccatggaaggcctcatcccgttcatctacagggccgtcgtgcggtacaggaaggaggaagggcgggtctccctcggcgacctcttcttcgacgagccctcctcgccgacgtcctacttccgtctcccgggcggcgccgactccgcccggtaccagcaggtgacgtcgagcgacctgttgacatcccagacgactacgtcgacggccagctccggtgcagccggcgtggcgcgacgacgctctccgatgaggtgcccgtcgcaccgccggcgcccggtctccccggacccgtgactcgatcgtgaagtgaagctagccgcccgtgaggcaaaaaaagaaaagcaagcgaaggtttgtttgctcatggcctcacgtagcagatggagcgtgtggtatacgtagtatgaggatgatgctgagtaattgtgaatattagcctctaagtagctgcgtgtaagtgtacataaattcttcatctttttttactgtggtcatctgtaatgtaatgtaatggatggatgggtgcaggaggtactccaaaaggagaggctttgtgccttggagtgaaaactgtgtgtaattcgttggaataaatatgccaggcaaacgatgaaacgcatggattttaattcagaaatccatgcttttttc

SEQ ID NO: 146589 - DNA, 706 bp, Zea Mays
ctccatcgtcttcccgtctcccaatcccagctgcgcgcgcccgtggacttgtcctgccatggaaggcctcatcccgttcatctacagggccgtcgtgcggtacaggaaggaggaagggcgggtctccctcggcgacctcttcttcgacgagccctcctcgccgacgtcctacttccgtctcccgggcggcgccgactccgcccggtaccagcaggtgacgtcgagcgacctgttgacatcccagacgactacgtcgacggccagctccggtgcagccggcgtggcgcgacgacgctctccgatgaggtgcccgtcgcaccgccggcgcccggtctccccggacccgtgactcgatcgtgaagtgaagctagccgcccgtgaggcaaaaaaagaaaagcaagcgaaggtttgtttgctcatggcctcacgtagcagatggagcgtgtggtatacgtagtatgaggatgatgctgagtaattgtgaatattagcctctaagtagctgcgtgtaagtgtacataaattcttcatctttttttactgtggtcatctgtaatgtaatgtaatggatggatgggtgcaggaggtactccaaaaggagaggctttgtgccttggagtgaaaactgtgtgtaattcgttggaataaatatgccaggcaaacgatgaaacgcatggattttaattcagaaatccatgcttttttc

SEQ ID NO: 146590 - DNA, 1500 bp, Zea Mays
aacgaggatgtactaatgttgtggtaaataatgatggacgatagtcgataacgtgaggtgtggttggtactggtagctagcgtgatgtatggtctgtattcagcctaactaatttgccagcgagtgatgcggtgacgtgctgctgctgttgtagtaggtggtggagcaagcccagtccccaatcccaccctgccacccaaccttgcttcttctccgatagctatttctctgctttctctccaatcttcccgggtttccctgattaaagatggctgaatcctttgttctcagtaccggctcgaggatcccatcggttgggcttggcgtatggcaaatacaacctgacgctgccaacgacgccatctacgctgctgtcaaggctgggtatcggcatattgactgtgcagcagcatacaacaatgaggaggaggtgggcctggctttgaagaaattatttgaagatggtgtggttaagcgtgatgatttgtttatcacctctaagctatgggctgctaatcatgcacctgaagatgtggaagagggaatcgacaccacacttcaagatttgcagcttgactacttggacttgtacctcatccatggtccaatccgcatcaaaaaaggaactagcacgatgacccctgaaaactttctccctacagatatccctgctacatgggcagcgatggagaagttatacgactctggcaaagctcgtgcaatcggcgtgagtaacttctcttgtaagaagctgcatgatttgcttgccgttgcacgagtgcctccagcagtcaaccaggttgagtgtcatccggtttggcagcaagacaagctccggaagctatgccaatccaatggtgttcatctttctgcattctcgcctttaggctcacctggatctccttggatcaatgggccaagtgtcctcaagaaccccattgtggtctctgttgcagacaagttgcagaaaacgcctgcccaggtcgctctacgctggggaatccaaatgggccatagtgtactcccgaaaagcgccaatgagtccaggattaaggagaacattgacatatttggctggtctattcctgaagatttgatggccaagttctctgaaatcaaacaggtcaggctgctgacagctgagtttgtagttcaccctcaggccggctacaatacattggaggacttttgggatggtgaaatataaaagcatacaaatttgttcagaataaaagagccaggcgaggaaacaaccacaaaaaaggggagatcgaatgcataggccccaatacgatgaatttgggggtttacgtgattgctgaacacaagtattgtgtgactaatctgtgttttgatgtggtaaatgtaattgggttagtcacaataagagataagtgtctttgccacaagacttttggttcattggttgaagcatgatgtaaaccgtaaaggatattcatgaaaactaaggacgctatagagcaaatgtaggttgtgtgc

SEQ ID NO: 146591 - DNA, 1116 bp, Zea Mays
gtttgattcgatttgaaatcatatttcataagtgctaagtaaatttaaatattccatctataggtgggcctggctttgaagaaattatttgaagatggtgtggttaagcgtgatgatttgtttatcacctctaagctatgggctgctaatcatgcacctgaagatgtggaagagggaatcgacaccacacttcaagatttgcagcttgactacttggacttgtacctcatccatggtccaatccgcatcaaaaaaggaactagcacgatgacccctgaaaactttctccctacagatatccctgctacatgggcagcgatggagaagttatacgactctggcaaagctcgtgcaatcggcgtgagtaacttctcttgtaagaagctgcatgatttgcttgccgttgcacgagtgcctccagcagtcaaccaggttgagtgtcatccggtttggcagcaagacaagctccggaagctatgccaatccaatggtgttcatctttctgcattctcgcctttaggctcacctggatctccttggatcaatgggccaagtgtcctcaagaaccccattgtggtctctgttgcagacaagttgcagaaaacgcctgcccaggtcgctctacgctggggaatccaaatgggccatagtgtactcccgaaaagcgccaatgagtccaggattaaggagaacattgacatatttggctggtctattcctgaagatttgatggccaagttctctgaaatcaaacaggtcaggctgctgacagctgagtttgtagttcaccctcaggccggctacaatacattggaggacttttgggatggtgaaatataaaagcatacaaatttgttcagaataaaagagccaggcgaggaaacaaccacaaaaaaggggagatcgaatgcataggccccaatacgatgaatttgggggtttacgtgattgctgaacacaagtattgtgtgactaatctgtgttttgatgtggtaaatgtaattgggttagtcacaataagagataagtgtctttgccacaagacttttggttcattggttgaagcatgatgtaaaccgtaaaggatattcatgaaaactaaggacgctatagagc

SEQ ID NO: 146592 - DNA, 2715 bp, Zea Mays
acacgggatcctgactgaggtaggttgttgccatttttgttccctcacccagtccgtctcaccacttcaaaaaccctctcctctctcatccgccttcctggcgattgcggcgacgaggtgacgatagagctgcccccgcaaggaaaacggacaagagaggcggaggctgatagggagaggagacggaggaccaagagcggcgtcgatctaaaagcgttggcggcggccatggccaccgcggaccggacccggactttcatgaaggacgtcaaacgcgtcatcatcaaggtgggcactgcagtcgtcacgaggggtgatgatgggcgactggctgtgggccggttggggtgtctttgtgagcaggtaaaagagctgaatgtcttaggatacgaggtgatccttgtgacctcaggtgctgttggtgtggggaagcagaggctcaagtacaggaagcttgtcaatagcagctttgctgatctgcaaaagccacagatggagctggatggaaaggcttgcgctgctgttggtcagagtggcctcatggctctttatgatatgctatttacccaacttgatgtgtcctcctcgcaacttcttgtgacagatagtgattttgagaatccaaactttcgggagaggctctgtgaaactgttgagtcactattagaccttaaagttgtaccaatatttaatgaaaatgatgccatcagcactagaaaggctccatatgaggattcatctggtatattctgggataatgacagtttagctggtcttttggctattgaacttaaagcagatctccttgttctactaagtgatgtagatggtctatacagcggtccaccaagcgaaccgggatcaaagatcattcatacctacattaaagataaacattacagtggaataacttttggggataagtcacgtgtaggtagaggaggaatgacagctaaagtgaaggctgcttttgtggcttcgaacagtggcacacctgttgttattacaagtggatttgcatctcagagcattgttagagttctccaaggagagaagattggtactctcttccataaggatgcaagtctgtgggagccatccaaggatgttagtgctcgtgagatggctgttgctgcaagagaatgttcaaggcgtctgcagaatttatcatcggatgaacgcaagaaaatattgttagacattgcagatgctttggaacaaaatgaggatctaattagaactgaaaatgaagctgatgtatctgcagcacaagatgctggatatcagaaatctttggttgatagattgacattgaagccagaaaagatagcaagccttgcgaaatccatacgcactcttgcaaatatggaagacccaatcaaccagatactcaaaagaacagaggttgctgaagacttagtgctcgaaaaaacatcttgccctctgggtgtgctgttgattgtttttgagtccaggcctgatgccttagtccagattgcgtctttagcagttcgaagtggcaatggtcttctcctgaaaggtggaaaagaagccatgagatcgaacacagtattacataaggttataactggcgcaattcctgacaacgtgggtcaaaaacttattggccttgttacaagtagagatgaaatcgctgatttactaaagcttgatgatgtcattgatcttgtcattccaagaggcagcaataagctggtttcgcaaatcaaagcatcaactaagatacctgtcctcggtcatgcggatggtatttgtcatgtatacattgacaaatcagctgacatgaatatggcaaaacgaatagtgatggatgccaaaactgattacccagcagcctgcaatgctatggagacattgcttgttcataaagaccttataaaggctccaggtcttgatgatatactcctatcactcaaaacagaaggagttgctatttatggagggcctgttgcacatgaagtactgtgtattccgaaagcagattcattccatcatgaatatagctctatggcctgcacaattgagttcgttgatgatgtacagtcagcaattaaccatatacatcgttatggaagtgcacatacagattgcattatcaccacagatgataaagtagcagaaacttttctgcgtcaagttgatagtgctgctgtatttcataatgcgagtacacgattctctgatggggctcgttttggattgggtgccgaggttggcataagcacagggcgtatacatgctcgcgggcctgtgggtgttgaaggtctcttaacaacacgctggatcatgcgaggaagtgggcaagtggtgaatggtgacaagaatgttgcatacacccataagaaccttcccttacaatgaggctgtttttgtgcttgatcaggattcgtgtctatccagtgatgtttgatagtttcatcaggcaggagcatagaatggtgaatcttttcgattgaggactgtgaatccatggatgttcagtcattgtttgtgtagacattgtggtgagcttggaggccaccccacctccccaataaagcagtgctgggagtaatagagcactgatgtactgagggtgcctaggttaaacaagaggaaccggttatatttgttttgcggtcgaacacaaacaatttttgttggtgacttgtttcttatgattctacatatttcaaggtttatgtgctgtcctaa

SEQ ID NO: 146593 - DNA, 2719 bp, Zea Mays
acacgggatcctgactgaggtaggttgttgccatttttgttccctcacccagtccgtctcaccacttcaaaaaccctctcctctctcatccgccttcctggcgattgcggcgacgaggtgacgatagagctgcccccgcaaggaaaacggacaagagaggcggaggctgatagggagaggagacggaggaccaagagcggcgtcgatctaaaagcgttggcggcggccatggccaccgcggaccggacccggactttcatgaaggacgtcaaacgcgtcatcatcaaggtgggcactgcagtcgtcacgaggggtgatgatgggcgactggctgtgggccggttggggtgtctttgtgagcaggtaaaagagctgaatgtcttaggatacgaggtgatccttgtgacctcaggtgctgttggtgtggggaagcagaggctcaagtacaggaagcttgtcaatagcagctttgctgatctgcaaaagccacagatggagctggatggaaaggcttgcgctgctgttggtcagagtggcctcatggctctttatgatatgctatttacccaacttgatgtgtcctcctcgcaacttcttgtgacagatagtgattttgagaatccaaactttcgggagaggctctgtgaaactgttgagtcactattagaccttaaagttgtaccaatatttaatgaaaatgatgccatcagcactagaaaggctccatatgaggattcatctggtatattctgggataatgacagtttagctggtcttttggctattgaacttaaagcagatctccttgttctactaagtgatgtagatggtctatacagcggtccaccaagcgaaccgggatcaaagatcattcatacctacattaaagataaacattacagtggaataacttttggggataagtcacgtgtaggtagaggaggaatgacagctaaagtgaaggctgcttttgtggcttcgaacagtggcacacctgttgttattacaagtggatttgcatctcagagcattgttagagttctccaaggagagaagattggtactctcttccataaggatgcaagtctgtgggagccatccaaggatgttagtgctcgtgagatggctgttgctgcaagagaatgttcaaggcgtctgcagaatttatcatcggatgaacgcaagaaaatattgttagacattgcagatgctttggaacaaaatgaggatctaattagaactgaaaatgaagctgatgtatctgcagcacaagatgctggatatcagaaatctttggttgatagattgacattgaagccagaaaagatagcaagccttgcgaaatccatacgcactcttgcaaatatggaagacccaatcaaccagatactcaaaagaacagaggttgctgaagacttagtgctcgaaaaaacatcttgccctctgggtgtgctgttgattgtttttgagtccaggcctgatgccttagtccagattgcgtctttagcagttcgaagtggcaatggtcttctcctgaaaggtggaaaagaagccatgagatcgaacacagtattacataaggttataactggcgcaattcctgacaacgtgggtcaaaaacttattggccttgttacaagtagagatgaaatcgctgatttactaaagcttgatgatgtcattgatcttgtcattccaagaggcagcaataagctggtttcgcaaatcaaagcatcaactaagatacctgtcctcggtcatgcggatggtatttgtcatgtatacattgacaaatcagctgacatgaatatggcaaaacgaatagtgatggatgccaaaactgattacccagcagcctgcaatgctatggagacattgcttgttcataaagaccttataaaggctccaggtcttgatgatatactcctatcactcaaaacagaaggagttgctatttatggagggcctgttgcacatgaagtactgtgtattccgaaagcagattcattccatcatgaatatagctctatggcctgcacaattgagttcgttgatgatgtacagtcagcaattaaccatatacatcgttatggaagtgcacatacagattgcattatcaccacagatgataaagtagcagaaacttttctgcgtcaagttgatagtgctgctgtatttcataatgcgagtacacgattctctgatggggctcgttttggattgggtgccgaggttggcataagcacagggcgtatacatgctcgcgggcctgtgggtgttgaaggtctcttaacaacacgctggatcatgcgaggaagtgggcaagtggtgaatggtgacaagaatgttgcatacacccataagaaccttcccttacaatgaggcaagctgtttttgtgcttgatcaggattcgtgtctatccagtgatgtttgatagtttcatcaggcaggagcatagaatggtgaatcttttcgattgaggactgtgaatccatggatgttcagtcattgtttgtgtagacattgtggtgagcttggaggccaccccacctccccaataaagcagtgctgggagtaatagagcactgatgtactgagggtgcctaggttaaacaagaggaaccggttatatttgttttgcggtcgaacacaaacaatttttgttggtgacttgtttcttatgattctacatatttcaaggtttatgtgctgtcctaa

SEQ ID NO: 146594 - DNA, 2872 bp, Zea Mays
acacgggatcctgactgaggtaggttgttgccatttttgttccctcacccagtccgtctcaccacttcaaaaaccctctcctctctcatccgccttcctggcgattgcggcgacgaggtgacgatagagctgcccccgcaaggaaaacggacaagagaggcggaggctgatagggagaggagacggaggaccaagagcggcgtcgatctaaaagcgttggcggcggccatggccaccgcggaccggacccggactttcatgaaggacgtcaaacgcgtcatcatcaaggtgggcactgcagtcgtcacgaggggtgatgatgggcgactggctgtgggccggttggggtgtctttgtgagcaggtaaaagagctgaatgtcttaggatacgaggtgatccttgtgacctcaggtgctgttggtgtggggaagcagaggctcaagtacaggaagcttgtcaatagcagctttgctgatctgcaaaagccacagatggagctggatggaaaggcttgcgctgctgttggtcagagtggcctcatggctctttatgatatgctatttacccaacttgatgtgtcctcctcgcaacttcttgtgacagatagtgattttgagaatccaaactttcgggagaggctctgtgaaactgttgagtcactattagaccttaaagttgtaccaatatttaatgaaaatgatgccatcagcactagaaaggctccatatgaggattcatctggtatattctgggataatgacagtttagctggtcttttggctattgaacttaaagcagatctccttgttctactaagtgatgtagatggtctatacagcggtccaccaagcgaaccgggatcaaagatcattcatacctacattaaagataaacattacagtggaataacttttggggataagtcacgtgtaggtagaggaggaatgacagctaaagtgaaggctgcttttgtggcttcgaacagtggcacacctgttgttattacaagtggatttgcatctcagagcattgttagagttctccaaggagagaagattggtactctcttccataaggatgcaagtctgtgggagccatccaaggatgttagtgctcgtgagatggctgttgctgcaagagaatgttcaaggcgtctgcagaatttatcatcggatgaacgcaagaaaatattgttagacattgcagatgctttggaacaaaatgaggatctaattagaactgaaaatgaagctgatgtatctgcagcacaagatgctggatatcagaaatctttggttgatagattgacattgaagccagaaaagatagcaagccttgcgaaatccatacgcactcttgcaaatatggaagacccaatcaaccagatactcaaaagaacagaggttgctgaagacttagtgctcgaaaaaacatcttgccctctgggtgtgctgttgattgtttttgagtccaggcctgatgccttagtccagattgcgtctttagcagttcgaagtggcaatggtcttctcctgaaaggtggaaaagaagccatgagatcgaacacagtattacataaggttataactggcgcaattcctgacaacgtgggtcaaaaacttattggccttgttacaagtagagatgaaatcgctgatttactaaagcttgatgatgtcattgatcttgtcattccaagaggcagcaataagctggtttcgcaaatcaaagcatcaactaagatacctgtcctcggtcatgcggatggtatttgtcatgtatacattgacaaatcagctgacatgaatatggcaaaacgaatagtgatggatgccaaaactgattacccagcagcctgcaatgctatggagacattgcttgttcataaagaccttataaaggctccaggtcttgatgatatactcctatcactcaaaacagaaggagttgctatttatggagggcctgttgcacatgaagtactgtgtattccgaaagcagattcattccatcatgaatatagctctatggcctgcacaattgagttcgttgatgatgtacagtcagcaattaaccatatacatcgttatggaagtgcacatacagattgcattatcaccacagatgataaagtagcagaaacttttctgcgtcaagttgatagtgctgctgtatttcataatgcgagtacacgattctctgatggggctcgttttggattgggtgccgaggtacgccctatctttggagtaaatgggattatttgattacatcggcatgcattatgttatcttttctggtgatcatttactgttcttatcttcatatttctaccttgaatatcttgagtaggttggcataagcacagggcgtatacatgctcgcgggcctgtgggtgttgaaggtctcttaacaacacgctggatcatgcgaggaagtgggcaagtggtgaatggtgacaagaatgttgcatacacccataagaaccttcccttacaatgaggtagcagaagcaaactaaacctatgcaactatgcaggctgtttttgtgcttgatcaggattcgtgtctatccagtgatgtttgatagtttcatcaggcaggagcatagaatggtgaatcttttcgattgaggactgtgaatccatggatgttcagtcattgtttgtgtagacattgtggtgagcttggaggccaccccacctccccaataaagcagtgctgggagtaatagagcactgatgtactgagggtgcctaggttaaacaagaggaaccggttatatttgttttgcggtcgaacacaaacaatttttgttggtgacttgtttcttatgattctacatatttcaaggtttatgtgctgtcctaa

SEQ ID NO: 146595 - DNA, 669 bp, Zea Mays
ctatgaatgatggcgctcaacctgtcccaccagaccggcgcggccgtggcggcggcaccggcggcgccacgcacggccgtcgtcgcggcggcggcaacggcgccacgctcggccatcgttgctgcggcggccaccgtggcgccgccgcccgcgtcggcgcccacccccgctccggcgctccagctgcagacgaagacggtggacccggccgccgcgcaggcgcccttggcgtgccaggcgctggtggaggccacgcccgaggcagagcacgccgacgtggccgccgagctccggagcagggccggggtgcccgtcttcgtcatgatgccgctcgacaccgtgcgcaaggacgacaactcgctcaaccggcgcaaggccgtggaggccagcctggcggcgctcaagagcaccagggtggagggcatcatggtggacgtctggtggggcatcgccgaggccgacgggcccgggcagttcaacttcaacgggtacatggagctcatggagatggccaggaagaccgggctcaaggtccaggccgtcatgtccttcaaccagtgcggcggcaacgtcgacgattcagtcacgtacgtcttctctaccttctcttcttcttcgtcgtctcttcctctagcactctctgacccactagtgcattctctcgactga

SEQ ID NO: 146596 - DNA, 966 bp, Zea Mays
gcaggacgccacgaggcgaacaaccaactgcttccttccccgccggccgccgccgcctacaactaacacttcacgtgcccccatccttttccgcctcaagtcaagtgttcacggtccatcctctcgagagtctaggcccttctcccgaagccgcagacgcagaaaacggctctgcatatggaggcgaagaagaagccgtcggcccccgccgccgtcggagccgcgccgccgccgccgggtaacgggtacttcagcaccgtcttctccgcgccgactgcgtgagctggtgcgatttgatgaaagagtccgttactatgttgcgatttgtggagggacttcaacggtttcccaatttaattctgatgaggggtgattttgataatagaggacctataggattatgcaaaatctatttggatatgacgttgacattttgactttgttttgcattcaagggaagcgcaagtgacgcaaagcatgcggacttgtacacgatgctgaacaagcagagctccagagggcagaatggcagagatggcaaatcccacagccgccctacttacaaggatggcaaacatgctcatccaaatgagccatcagaatctccttactttggctcatccgtgcattacggtggtcgggagttctacagcagcgttttacggaagcaaccagccaatgaaccccatacggattacaagggggacaacccggatggctctgctaccagaggtgattggtggcaaggttcactttattactgaataatctgctgggacctctcccttttgtgaacaaggtataccatatatgggacactttcatagtttccaattcgcgttttccattagttgtgtttaggttatgcttgcatcaccggtgccagtcactttgttggtgctcccattttgagttatgtcttgttgtcaacaacatcatacagttgtatttagtttgttaccagca

SEQ ID NO: 146597 - DNA, 1005 bp, Zea Mays
gcaggacgccacgaggcgaacaaccaactgcttccttccccgccggccgccgccgcctacaactaacacttcacgtgcccccatccttttccgcctcaagtcaagtgttcacggtccatcctctcgagagtctaggcccttctcccgaagccgcagacgcagaaaacggctctgcatatggaggcgaagaagaagccgtcggcccccgccgccgtcggagccgcgccgccgccgccgggtaacgggtacttcagcaccgtcttctccgcgccgactgcgggaagcgcaagtgacgcaaagcatgcggacttgtacacgatgctgaacaagcagagctccagagggcagaatggcagagatggcaaatcccacagccgccctacttacaaggatggcaaacatgctcatccaaatgagccatcagaatctccttactttggctcatccgtgcattacggtggtcgggagttctacagcagcgttttacggaagcaaccagccaatgaaccccatacggattacaagggggacaacccggatggctctgctaccagaggtgattggtggcaaggttcactttattactgaataatctgctgggacctctcccttttgtgaacaaggaataaaaggggtagagctgagaatggtttgttgtagtgttggaagtgttgacgcgagccgtcaagcatcgatcaatagtaatagttgtaatagttgaaagctgcgtcgtgactacaagcatcctgttggtggaggcagtattttagatccatcatcacgcctggacagatgtgggtgtccttttgtattcctgtttccctggtttaggtgcaggtgctgtactaaaatgatgaaactcgcagttcgataaaagcagttgccaaagagtcgcagctggcaggattacttgtctacaagccagctatatggcatggtttggcagccaccgtatctgaataaaatcatagtacaaaatctctgaatatatatgtcatacgcata

SEQ ID NO: 146598 - DNA, 124 bp, Zea Mays
taccatgtttcatacttttataattatacctatactacttattaagaaggtaagagtagtctgtcgttctgccctccccgtgttctgccgttctgccctcccccgttccgcgcgcagaaaaaaa

SEQ ID NO: 146599 - DNA, 1976 bp, Zea Mays
cacagcccctcgccgtccatcgacattctccctccggcctcacactctctttctcgcccgtcccacctcttttcgctgataagcacgccgccttctccagcccgtccacccccgccgctgcaggtcccgggcgctgctccccaccaccggcggaaaaatgtcgacggagtgttcggacctcggggacgagttctggctgccggaggagttcctggacgacgacttcttctccgaggaggagaaggcggccgtggcggccaggagcgagagcgacgaggaggacagcctggcggggctctcgcgcaggctcgcgggcctcctcggcgacgacggggagcggaagccgcctaccgccaaggcggaggtggcggtgattgggtcgccgcagtcgacgctgtgcgggctgcccaagtcgggccaggagagccccaacggcggggcgtccaaggggacgtcgccgccgtcgtcgccgcctctggagcagaagccggccgacccgtgggacgtcctgtacgaggcggcggggcaggtcgcgcgcatccgcgccgccagcagcgtgccggtgcaggtgccggccaacgcatacgccttcagcaagccatccccgccgccgccgccgccgccgcagatcgctccgccctccgccaaggtccctgccggcgccggcggtcactaccacccgctcgcgcacttggtttcgcagcggcagatgcaggctgctcagttccatctcctgaagcagcatcagctgctgaagctgcagaggcagcgccatctcgccgcgtggagcgcgcgccagagcgcctgtgccaagcccgtcggctgcggcggaggcgacgcgccgcttggcctgaacccggcggcgtggcctccgctccagaagccaccgccaccgccgccgccgcagcagcaccaggcgccggcgcatcctgcctccggcatgcgcgccgtgttcctgaccccgcctggcgccaagcgcgagcgtaacggcaccggggtgttcctcccgaggccggccggcgcgcccgcggcggagcccaagaggaagacggcgggggcgtgctcgacggtccttgtccccgctcgcgtcgtccaggccctcaacctcaggctcgaagacctcggcgcccagcctcgctactaccctggcggcttcgttctcgatcacgacgccttgattagccggagcaacgccatgctcgcgagccagaagcgccgcgcggctgccgctgcggcagtgtgccacagaagtacctgagtcgtccagtcgccggctggacttggaggggggacgcggacgggaatggagccgccaagattccgtcgacaacacccccgcccccctttcgtttggaggccggcagtcctgttgatcctaataatcgaagaaactagcttgggtaccttttgttaggtagtgtgttagcaggcagagttaggaaggcagtagcagcgttagcatcattgttaggtctgttcgtttcggatctggtgatacattcgttttatttttggtgtggacggaaagctgggggaggttgacgagcagtgaagaaaacccataatgtcgtccggtggtttgggggaagtgtaacaaataataagtggttagagagagagaggtcttagctgatgcaagaagagcctgcatagcaagtgttggatgattttctttctgagatgaaaagcaaataagaggtcatttccctcccatgcgcccaatcagtggctggctttgcttgctttgggcgctaccagcacggacccctctctcctgttttgcaacttttcttttttacttggaaaagaagcttgccgtgggctccatgaataagggcgtttgcttttagcctagagtgtattatgaaagcatttattggtttgtattgtgctgtgcctgtaccagtggtagctagtagtagcagtaaaaagtgtcccttgactttggttacaagtgatgaagtggtggtttacta

SEQ ID NO: 146600 - DNA, 1979 bp, Zea Mays
cacagcccctcgccgtccatcgacattctccctccggcctcacactctctttctcgcccgtcccacctcttttcgctgataagcacgccgccttctccagcccgtccacccccgccgctgcaggtcccgggcgctgctccccaccaccggcggaaaaatgtcgacggagtgttcggacctcggggacgagttctggctgccggaggagttcctggacgacgacttcttctccgaggaggagaaggcggccgtggcggccaggagcgagagcgacgaggaggacagcctggcggggctctcgcgcaggctcgcgggcctcctcggcgacgacggggagcggaagccgcctaccgccaagcaggcggaggtggcggtgattgggtcgccgcagtcgacgctgtgcgggctgcccaagtcgggccaggagagccccaacggcggggcgtccaaggggacgtcgccgccgtcgtcgccgcctctggagcagaagccggccgacccgtgggacgtcctgtacgaggcggcggggcaggtcgcgcgcatccgcgccgccagcagcgtgccggtgcaggtgccggccaacgcatacgccttcagcaagccatccccgccgccgccgccgccgccgcagatcgctccgccctccgccaaggtccctgccggcgccggcggtcactaccacccgctcgcgcacttggtttcgcagcggcagatgcaggctgctcagttccatctcctgaagcagcatcagctgctgaagctgcagaggcagcgccatctcgccgcgtggagcgcgcgccagagcgcctgtgccaagcccgtcggctgcggcggaggcgacgcgccgcttggcctgaacccggcggcgtggcctccgctccagaagccaccgccaccgccgccgccgcagcagcaccaggcgccggcgcatcctgcctccggcatgcgcgccgtgttcctgaccccgcctggcgccaagcgcgagcgtaacggcaccggggtgttcctcccgaggccggccggcgcgcccgcggcggagcccaagaggaagacggcgggggcgtgctcgacggtccttgtccccgctcgcgtcgtccaggccctcaacctcaggctcgaagacctcggcgcccagcctcgctactaccctggcggcttcgttctcgatcacgacgccttgattagccggagcaacgccatgctcgcgagccagaagcgccgcgcggctgccgctgcggcagtgtgccacagaagtacctgagtcgtccagtcgccggctggacttggaggggggacgcggacgggaatggagccgccaagattccgtcgacaacacccccgcccccctttcgtttggaggccggcagtcctgttgatcctaataatcgaagaaactagcttgggtaccttttgttaggtagtgtgttagcaggcagagttaggaaggcagtagcagcgttagcatcattgttaggtctgttcgtttcggatctggtgatacattcgttttatttttggtgtggacggaaagctgggggaggttgacgagcagtgaagaaaacccataatgtcgtccggtggtttgggggaagtgtaacaaataataagtggttagagagagagaggtcttagctgatgcaagaagagcctgcatagcaagtgttggatgattttctttctgagatgaaaagcaaataagaggtcatttccctcccatgcgcccaatcagtggctggctttgcttgctttgggcgctaccagcacggacccctctctcctgttttgcaacttttcttttttacttggaaaagaagcttgccgtgggctccatgaataagggcgtttgcttttagcctagagtgtattatgaaagcatttattggtttgtattgtgctgtgcctgtaccagtggtagctagtagtagcagtaaaaagtgtcccttgactttggttacaagtgatgaagtggtggtttacta

SEQ ID NO: 146601 - DNA, 198 bp, Zea Mays
atggcgcaacaacagcgtgaaggtttgaggggcggcggccaatggccggtgtggggaggcggaggagggcaggtaaggaagggcatggaggagagaggggccgatcggggtggctcggaggagtgcagcgtgaatgttcagctcctcgcgctctaccaaaagccacctgccatcaacgtctcccgaaatcgccattag

SEQ ID NO: 146602 - DNA, 375 bp, Zea Mays
atgagggagagcatgagcgccggcgtgcccgcgaagatatgctggaagagccagacgaaggaggcgtgcatctcgccctgcacgcgcgccaggacgccctgcaggtcgtcgcagaccaccgcgtcgcgtatctgctgcagcgcgaagctctgcagctcccgcacaatgagcaccatcgaggagaaggcgcggcccaccgactccccggcggcggagaccagcagcccctcgtcccagcgcggatgccgcgccgccgccaccagctgttgctgccttttccgcttcatcattcgcagcgacagcggcagcccgacgttgctcgcgctccgctccacgctcgcgggccagccgcagcccaccgcgcccgccggctgc

SEQ ID NO: 146603 - DNA, 1706 bp, Zea Mays
tcatcaccatttctgttcacgcgatcgagaggcaaaattaagcatggtgtcccgaaggttcaagccgatcgagctgtgcgactccgaggggcggtcgcgccagacggtcgccgccgacctcgacggcacgctcctcctgtcccgcagcgcgttcccgtactacctcctcatcgcgctggaggccggtagcctccttcgcgcggtggcgcttctcttgtccgtgcccctcgtgtacctcacctacgtgaccgtgtccgagaccctggccgtgcgcgcgttcatctacgtcgccatggccgggctggaggcgagggacatcgaggccgtcgcccggtccgtgctccccagcttctacgccggcgacgtccacccggagggctggcgcgtgttccgctcgttcggcaggaggtgcgtcgtcaccgccagcccgcgcctcatggtggagccgttcgccaaggcgtttcttggcgcggacgtggtgatcgggacggaggtggaggtggcccagtccgggaaggccacggggttcgttgccgggcccggggtgctcgtcggcgagcacaagaggcgggcggtggcgagggagttcggcgactcgctgccggacgtcggcatgggggatcgcgagagcgacttcgacttcatgtccatctgcaaggaagcgtacaccgtaacacgacagaagtaccgcgcgctgccccgggatcagctgcagggccgggccatcctccacgacggccgcctggcccgccgcccgacggcgaccaacgcgcttctcactttcctgtggatgccgctcggcttcgcgctcgcgctggtgcgcgcgcatctgcacctgctcctcccggtgcgcgccctcgcctacgcctacaagcttacgggcgtcaagctggtggtgcgcggcaacaggccgccgccgtccaagaagaagaagggcgaccagctaggggttctcttcgtgtgcaaccaccgtagcacgctcgacgccgtcgcggtgggcgtcgcgctgggccgcaaggtgagatgggtcgtcacagacggcggtgcgggtgcctccaggttctcggagcccgtagtgtcgcctatcatgacaggcgtgccgctgcccgtgcccaccagcctcgagggcgacgccgacgcggacgccgccccccgcatccggcggctgctcgaggagggagacgacgtcgtcgtcttccccgagggcgccatctgccgcgagccgttcctgctgcggttcggcgcgctcttcgctgaggtcaccgaccgcatcgtgcccgtggccatcgaacctagggagagcatgtttcacgggtccacggcgcgcgggctcagagggatggatccctacttctttttcatgaacccacggccgacgtacgaggtcacgttcctgaaccagcttccaggggagctcacctgcggcggcgggaggtcgccggtcgaggtggccagctacgtccaggaggtcctggccgcgcagcttggattcgagtgcacctgatgaagcagcaagtgcaaaagtggcatggtgacggttgcgtggcgttcaaaggtggactagggaacacagagcatgcaaccaactgtcaattgccgtgtgttgagagtggtgatcagttcatggtttcacgtttgctgttgatgtctgtgataagaaccatatgtatctctacaactattaagagcgttgtgtagaccgcccc

SEQ ID NO: 146604 - DNA, 1821 bp, Zea Mays
tggtcactcaaactcattaaagttggcaagcacttgatatctgctgaaagggtacaaatccagttactatatgtagctgcgcagcaacaagccacacattcactctgtcaccgcctcacggtgcaggggaggacacgtactgcaagaactccttgtcgaggaggagatgcgccatggtgtctggcgcgaggcacacctccacgtcgatgctaccgtccccagcctgtccggggaacgaagacatcttgccgtcgaatttgttcgcgcggccgctccgcacggcgagcgcgcggccccacccgaagtcgttcccgtcgtacatcgggaaccgaggcgagctccccatcgtgagggccgccccgtcggggttgcctagcgggaagcaacggggcgcggcctcccactccgccgcggcgcgccggatcgcgccgtccttgtgcgacgccacggtggcgttcagccgggcggccgcccagcccaggtcgttggacgccagctcggctacggtggccgtcgtcgccacgctctggatcgcgttgccgaagtagagcggggagatcgccgggcgcagacggtgccggcagttcacggccatgcggaacgtcgtcgtcttgtcggcagccagcagccggcgcgcgcgcgtcaccgccctccagatgtgcgcgcacagcgactgaaacgacgagatttcaccggaacgcccttcaagtctggagtcgtcgtgcgcgagcttgccgttagcctcggcttcctgacctgctcttttcgagcggttggccgtcgccttcagctcgctgattgcggcagcactgaagtggaggatccgctcgcggagcggcgcgtcggcgtcgaacgtcacggcggggctcgcgcctccggggaagcgtaggacggcggtggagtcgccgaagaagttgcggcggaagtcgggctcccggaccggcgcgccgcggcacagccccgcccacgtgttgaagaagtgccagaaggaggtgccgtccacgacggcgtggttggcgacgaagccgacgaacacggcgccgtcgccgagcacggtgagctggaacgccgtgagcgggcggccgtggccgccgtagctcaccgtccggtccatggggaacaggccgttcgtcaaacgggtcggcacgtcggcgccgggcaccaggaagtcgccgagcgacagagacggcgccaccgcgtggtagaactcgacggcggcgtcgtcgccgccgcaccgtatcacgatgctgtcgtcgtggagcgtgacgaggcggccggcgagcgcggggaagacgccgagcgcgcgggagagcgccgccacgagcgacgacaccagcgaggccgccagcacgccgggaggaggcggcgggaagaacagccccttctggatgtagtggcacgatagcatcggcatgtccgacaccgagagcctgaggtctccactgccgaccgccgccgacgcgccggcgggccggaccgtctgcttcgagacgacagagatggccggcgccggcgcgtccttgcaaagcattctgttcggcgcgatggctgggtacgcggcgacggccgaggcagcctccaccaaggcatcggcggatatcggtggggccatcatcggatcgtgcttatctggaataatcgtaattgaagtgtgtggtgatgtgtggtgctgcggacctttatataggcaaggcaaggcatccagagagcttggatccgtgcacatgcacttgttcatctgcatctcgcctgttcgcgtcgtattcttgggcccatttgcatggagcttcagcttgaggctaccgatgatggagttgaagc

SEQ ID NO: 146605 - DNA, 2421 bp, Zea Mays
cacctggtcctcctctccactctctcttctccctccaataattctctccacccctgcttgctgcagcttcaagcactaccgaatcagggcgagtgggagcagaggagggaatcccatgtctccgcccctcgctggagcagatcgttgtcgagccgacgtggagctgctgcggtagaaagctagcggagcctgcgagctagcctgatccgtccgcagtccgatcgggatcgatgggtggggaggcgccggagccgcggcggctgacccgggcgctgagcatcggcggcggtgacggcggctgggttcccgaggagatgctgcaactcgtgatggggttcgtcgaggaccccgcgcgaccgggaggccgcgtcgctggtgtgtcaccggtggcaccgcgtcgacgcgctctcgcggaagcacgtgacggtgcccttctgctacgccgtttccccggcacgcctgctcgcgcggttcccgcggctcgagtcgctcgcggtgaaggggaagccccgcgcggccatgtacgggctcatacccgacgactggggcgcctacgcccgcccgtggatcaccgagctcgccgcgccgctcgagtgcctcaaggcgctccacctccgacgcatggtcgtcacagacgacgacctcgccgagctcgtccgtgccagggggcacatgctgcaggagctgaagctcgataagtgcaccggcttctccactcatggactccgcctcgttgcccgctcctgcagatcactgaggactttatttttggaagaatgtcaaattgatgataagggcagtgaatggatccacgatctcgcagtctgctgtcctgttctgacaacattgaatttccacatgactgagcttgaagtgatgccagctgacctaaagcttcttgcaaagagctgcaagtcactgatttcattgaagattagtgactgcgatctttcagatttgatagagttcttccaatttgccacagcactggaagaatttgctggagggacattcaatgagcaaggggaactcagcaagtatgtgaatgttaaatttccatcaagactatgctccttgggacttacttacatgggaacaaatgaaatgcccattatgttccctttttctgcaatactaaagaagctggatttgcaatacactttcctcaccactgaggaccattgccagctcattgcaaaatgcccgaacttactagttctcgcggtatcatctcctgctcatgtaaattatgaagatactgaattggcaatcttttcatggtaattgacagtatattttttccgataggtgaggaatgtgattggagatagaggattaggagttgttgcggatacgtgcaagaagctccaaaggctcagaatagagcgaggagatgatgaaggaggtgtgcaagaagagcagggaggggtctctcaagtgggcttgacggctatagccgtaggttgccgtgagctggaatatatagctgcctatgtgtctgatataaccaatggggccttggaatctatcgggacattctgcaaaaaactatacgacttccggcttgttctacttgatagagaagagaggataacagacttgccactggacaatggtgtccgagctttgttgaggggctgcaccaagcttcggaggtttgctctgtacttgagaccaggagggctctcagatgcaggtctcggctacattggacagtgcagcggaaacatccagtacatgcttctcggtaatgttggggaaactgatgatggattgatcagcttcgcattgggttgcgtaaacctgcgaaagcttgaactcaggagttgctgcttcagcgagcgagcactggcccttgcaatactacatatgccttccctgaggtacgtatgggttcagggctacaaagcgtctcaaaccggccgagacctcatgctcatggcaaggcccttctggaacatagagtttacacctcccaatcctaagaacggaggttggctgatggaagatggggagccttgtgtagatagtcacgctcagatacttgcataccactccctcgccggtaagaggctggactgcccacaatccgtggttcctttgtatcctgcgtgagtgtaaatagactaagctggtgtctttccttagcctcctggtcaacaagaatggtgttgataactcgatatatgcggttattgtatggatctagatggctagctgctacgtactgtaataagctactagtagctgagagatgtcctggaataagcccttgctatttttgcctgtactgctttctaatcctagggagatgtatactgctaagcaacgatggaagatgtgagtctgcttgctcgccctgatttgatttgtaccactggaggtataagaatacctgggttttggccgcctgctttgagc

SEQ ID NO: 146606 - DNA, 2469 bp, Zea Mays
cacctggtcctcctctccactctctcttctccctccaataattctctccacccctgcttgctgcagcttcaagcactaccgaatcagggcgagtgggagcagaggagggaatcccatgtctccgcccctcgctggagcagatcgttgtcgagccgacgtggagctgctgcggtagaaagctagcggagcctgcgagctagcctgatccgtccgcagtccgatcgggatcgatgggtggggaggcgccggagccgcggcggctgacccgggcgctgagcatcggcggcggtgacggcggctgggttcccgaggagatgctgcaactcgtgatggggttcgtcgaggaccccgcgcgaccgggaggccgcgtcgctggtgtgtcaccggtggcaccgcgtcgacgcgctctcgcggaagcacgtgacggtgcccttctgctacgccgtttccccggcacgcctgctcgcgcggttcccgcggctcgagtcgctcgcggtgaaggggaagccccgcgcggccatgtacgggctcatacccgacgactggggcgcctacgcccgcccgtggatcaccgagctcgccgcgccgctcgagtgcctcaaggcgctccacctccgacgcatggtcgtcacagacgacgacctcgccgagctcgtccgtgccagggggcacatgctgcaggagctgaagctcgataagtgcaccggcttctccactcatggactccgcctcgttgcccgctcctgcagatcactgaggactttatttttggaagaatgtcaaattgatgataagggcagtgaatggatccacgatctcgcagtctgctgtcctgttctgacaacattgaatttccacatgactgagcttgaagtgatgccagctgacctaaagcttcttgcaaagagctgcaagtcactgatttcattgaagattagtgactgcgatctttcagatttgatagagttcttccaatttgccacagcactggaagaatttgctggagggacattcaatgagcaaggggaactcagcaagtatgtgaatgttaaatttccatcaagactatgctccttgggacttacttacatgggaacaaatgaaatgcccattatgttccctttttctgcaatactaaagaagctggatttgcaatacactttcctcaccactgaggaccattgccagctcattgcaaaatgcccgaacttactagttctcgcggtgaggaatgtgattggagatagaggattaggagttgttgcggatacgtgcaagaagctccaaaggctcagaatagagcgaggagatgatgaaggaggtgtgcaagaagagcagggaggggtctctcaagtgggcttgacggctatagccgtaggttgccgtgagctggaatatatagctgcctatgtgtctgatataaccaatggggccttggaatctatcgggacattctgcaaaaaactatacgacttccggcttgttctacttgatagagaagagaggataacagacttgccactggacaatggtgtccgagctttgttgaggggctgcaccaagcttcggaggtttgctctgtacttgagaccaggagggctctcagatgcaggtctcggctacattggacagtgcagcggaaacatccagtacatgcttctcggtaatgttggggaaactgatgatggattgatcagcttcgcattgggttgcgtaaacctgcgaaagcttgaactcaggagttgctgcttcagcgagcgagcactggcccttgcaatactacatatgccttccctgaggtacgtatgggttcagggctacaaagcgtctcaaaccggccgagacctcatgctcatggcaaggcccttctggaacatagagtttacacctcccaatcctaagaacggaggttggctgatggaagatggggagccttgtgtagatagtcacgctcagatacttgcataccactccctcgccggtaagaggctggactgcccacaatccgtggttcctttgtatcctgcgtgagtgtaaatagactaagctggtgtctttccttagcctcctggtcaacaagaatggtgttgataactcgatatatgcggttattgtatggatctagatggctagctgctacgtactgtaataagctactagtagctgagagatgtcctggaataagcccttgctatttttgcctgtactgctttctaatcctagggagatgtatactgctaagcaacgatggaagatgtgagtctgcttgctcgccctgatttgatttgtaccactggaggtataagaatacctgggttttggccgcctgctttgagcattgagttgttctctgccgtatgtggtggttgctcatgagttgacgatgagacaaccaggactgattttgtatgctgtacgaactgagtgtatgaagttactgtgccagggcggccatgaactctctttatg

SEQ ID NO: 146607 - DNA, 2239 bp, Zea Mays
atgggtggggaggcgccggagccgcggcggctgacccgggcgctgagcatcggcggcggtgacggcggctgggttcccgaggagatgctgcaactcgtgatggggttcgtcgaggaccccgcgcgaccgggaggccgcgtcgctggtgtgtcaccggtggcaccgcgtcgacgcgctctcgcggaagcacgtgacggtgcccttctgctacgccgtttccccggcacgcctgctcgcgcggttcccgcggctcgagtcgctcgcggtgaaggggaagccccgcgcggccatgtacgggctcatacccgacgactggggcgcctacgcccgcccgtggatcaccgagctcgccgcgccgctcgagtgcctcaaggcgctccacctccgacgcatggtcgtcacagacgacgacctcgccgagctcgtccgtgccagggggcacatgctgcaggagctgaagctcgataagtgcaccggcttctccactcatggactccgcctcgttgcccgctcctgcagatcactgaggactttatttttggaagaatgtcaaattgatgataagggcagtgaatggatccacgatctcgcagtctgctgtcctgttctgacaacattgaatttccacatgactgagcttgaagtgatgccagctgacctaaagcttcttgcaaagagctgcaagtcactgatttcattgaagattagtgactgcgatctttcagatttgatagagttcttccaatttgccacagcactggaagaatttgctggagggacattcaatgagcaaggggaactcagcaagtatgtgaatgttaaatttccatcaagactatgctccttgggacttacttacatgggaacaaatgaaatgcccattatgttccctttttctgcaatactaaagaagctggatttgcaatacactttcctcaccactgaggaccattgccagctcattgcaaaatgcccgaacttactagttctcgcggtgaggaatgtgattggagatagaggattaggagttgttgcggatacgtgcaagaagctccaaaggctcagaatagagcgaggagatgatgaaggaggtgtgcaagaagagcagggaggggtctctcaagtgggcttgacggctatagccgtaggttgccgtgagctggaatatatagctgcctatgtgtctgatataaccaatggggccttggaatctatcgggacattctgcaaaaaactatacgacttccggcttgttctacttgatagagaagagaggataacagacttgccactggacaatggtgtccgagctttgttgaggggctgcaccaagcttcggaggtttgctctgtacttgagaccaggagggctctcagatgcaggtctcggctacattggacagtgcagcggaaacatccagtacatgcttctcggtaatgttggggaaactgatgatggattgatcagcttcgcattgggttgcgtaaacctgcgaaagcttgaactcaggagttgctgcttcagcgagcgagcactggcccttgcaatactacatatgccttccctgaggtacgtatgggttcagggctacaaagcgtctcaaaccggccgagacctcatgctcatggcaaggcccttctggaacatagagtttacacctcccaatcctaagaacggaggttggctgatggaagatggggagccttgtgtagatagtcacgctcagatacttgcataccactccctcgccggtaagaggctggactgcccacaatccgtggttcctttgtatcctgcgtgagtgtaaatagactaagctggtgtctttccttagcctcctggtcaacaagaatggtgttgataactcgatatatgcggttattgtatggatctagatggctagctgctacgtactgtaataagctactagtagctgagagatgtcctggaataagcccttgctatttttgcctgtactgctttctaatcctagggagatgtatactgctaagcaacgatggaagatgtgagtctgcttgctcgccctgatttgatttgtaccactggaggtataagaatacctgggttttggccgcctgctttgagcattgagttgttctctgccgtatgtggtggttgctcatgagttgacgatgagacaaccaggactgattttgtatgctgtacgaactgagtgtatgaagttactgtgccagggcggccatgaactctctttatg

SEQ ID NO: 146608 - DNA, 91 bp, Zea Mays
gcaactaaactcttttgtagaaatcgctatataattcaagtgagattcctatgctgggaagtcggaccccgacccatgttcgtgtagatca

SEQ ID NO: 146609 - DNA, 112 bp, Zea Mays
cttctttacaaaatttctgcctgcctagtttcagtagtttgctcctcgtcggcatggtccaaaatagcagcggccaaggttggggcgcatggaaaaccatttgccaccaaac

SEQ ID NO: 146610 - DNA, 795 bp, Zea Mays
acaacaccgccgacgcaaccgtcaccgcccggcctctgcatcctccctctcctcatcacagcagatgtcatcgcaagccccactatcccaatctagatcctcggccataagcagcagcaccactccaaacctagccgagctcgcagcggaagggggaggctcactattttgccatggcgctggtcgcgcacctccagggcttgctgcccctgcgccgagggagaggggagagctcgccggttccggtgatggctatgtcttcgccgtccaacatgacgccggcatcacgctcctcgacgcctgcaacaccatcgtcgcacgcctccaccgcctccttgcgtgcctcgcggtcgacctccttttttcctcctaacgtctgggcgagctcccgtcgcctgaggccactcgcgcccgcgacgacaacccccggcacaacgctgctggtgcgcgaaactgcctgcaaacttgatagaacttcatagatctggcaaaactttcatttgagtgtacgtctccactgaccactgcatgcctccattgttaccctcgtggtgcaacactgaattgaactgaacatgtgcgcaaagctgtaaaggtcgattgcaaagttgacctccaataccctccagctatgaaggcaaagcgagcgcactgtccgtagtgtgctcgagcaggaatgtttcttctctcgtgcttcacttccagtccaaccttgtctgccctcagtgatctcagtgatatgtgtgttgtattctacaagcttaatgcatctgaggaaatacaagacaaacaaaa

SEQ ID NO: 146611 - DNA, 1666 bp, Zea Mays
cacccctgcactttgatttttttcctcccttgcgtgtcgtctctctctcccttgcgtgtcgtctctctctcggccactagctcgctcgcctctgcagctttcttctccaccgcgccctggctgagctcggcgtcctcctctaccacggctcccagtccttctctgcgcggcgctcctgtgttccaagctcgtcgtggagctttgtctctccagtcgtcgcgctcgggagtccttgttgtgctcgcctcagcgctctggccgagcccctcacgcgtgctcgtctctctcctctgcccggccccaagctcctgcgcgtggctccctgctcgcgtctccggccatctccagctcgctggccgcgacccccccgaggtttttcccatggccggctcactgctcaacccaagccgaggtcgtgtacgaagcagcaagcctcagattcttccgcgccgcgtgcgtcgactcgatttgcaaccctgtgtcatcgatctgtgcagccccgacgtcagccccaacatcgatctgcgcgcgtggatccgacgtcgcgtctcgctctctggtggtcgagctcacccagctcgcctcctgtcttcaactatggatggcagccaccttggattgttcataaactccgccgctcagtgccgcgtctccagcaccagcgtccctgctccttgttcctccatggctgcgtcgcgcgcgttccgttgttcctacgcgtgctgccgcaaagctctctgttctgttcgctttcgtcgcattgtcgtgcgcgcgaaactgcttgcagtcgatatcgagtccgtgacgcgcgcgttggacacggtgaaacgctacgtgtgcttatgtccgagcccgaccgtgacctcgctttgctcctcgcgtcactgctcaccgagtctttcctcagcccgtgatctctccctgcctgtcgttgcgtcgttcgtcgtcctttggtcctagtctgacccatccgtgcgttcgctcctcatccatcgggcttcacgcgtgctcgcgtttgtcgtcgagctgttgaacccgtcctcccttgctcgtaacttcgtcgtcgctagaatcctcactagattcgtgtcctcgccagcccgctccatattcaatctcgtcgtcgttccgcgcgtcagcaaaagatcctaagaatcgggtgaagacgaagctagcagcatggtattcaccaagtgcgtgataggaagctcgagccaggatttatcagcattcgtacgagatttgggtcgtgtttgatgctggtgagccgatttataatttttgtaagtttatctgatgattggattaactagaattattagtcgtaataatcctcgtatttagcgcaggcgcgttatggtagtgttaaaaataagtgaagaacgatgggtttagtaatgtgaaaggtagattaatttagggatatctaagcgaggtgacgacgtaaaggatagatttagtatttcatataaccatctgatgaattttgtcgttgtcaattgcattaaataaataacataaagaaatgtttgattaattgttgacatgtaaaatatgtgaggagtgaaataaaattaaaatagttctttgtgagccatgcagtataatttataaaacaaggaataaggttggcaattaatcaattagttggtgagttgtgtaggct

SEQ ID NO: 146612 - DNA, 1449 bp, Zea Mays
ttgccggctatcagcgatgtcatgctgctgaggttcagggccatctagaccagagtttatcacaacgatatagttcgctactgtgacacagtttgttttgtagtgtatcgaatcctcgtgcaagacccttctcatgtttatccttactgcaggaggcttctggatacttcttctgcctagaggaccgtgcactactttgtagagactgtgatgttgctatacacacagtgaattcctttgtttcagtacatcagagattcctgctaactggagttcaggtgggtcttgatcctgctgatccagttccacctattgctgaaaagcacgttaatgctgctggtggatcagtaaatcaaccagtgagacatcagccaaagagaagcccgacagttcaattttcagttgaagggagtgcttctgttcctactaaaaatgtaacaaatggagattgttcaaggcagaattttgtcccaacagccaggggagaagtggttgattggactatgaataatagtacaattcggtcagtagaatctccgcctaagtacatttcagaggaaagcccgacacttctgcaatctagccagaccacaacagtcttctccaaccaaattaatggcaacagtgatggggcctaccacttgtcattctcaggtggtaatgtgacagacagcctaccagattggcccgtggatgagttcttcagtaactcagaatatggtccaaactttggcttctccgagaatggttcttctaagggtgataacgctaagctggggggcgctggtggatctccacaatgccgtttggctgaaggctcagttgctgaggaactattagggcaggtgcctggattgatcaccgatgaatatatgagccgagtacctgagaattcatggacagtgcctgaggttccctctccaccaacagcctcggggctcaactggcacgggaatttgtgtttccctgcgtatgacagcaccatgtttgttcctgaaattacctcccttcagaactccgaaagtcacttcaccgtaccttccagtttcaagcgccggagaagagagtactgagaggcgacaagaagatcactagacaccactgtccggtctaggctatcttgagaaaggcttcttggtgggctaaatgacgaaagaaaatatccaggactgggtggtcattcaaacatcaactgagctatccagtagccaggttttaagtgtgttgtaatgcttcaatgtgtttcattttccaaagacctgagcttcgcttgtgatttgttccgagctgtacggtgtcgattttgtgtatataatataatataacgaaataaagggtacccagtatgagtatgatcattccgaaataaagggtatccagagtatgagtatgagcattcgcgagtacatcgcacactggtggtggcacatgaagttacttctgcaatac

SEQ ID NO: 146613 - DNA, 525 bp, Zea Mays
cgttattcaagaaaagctcaatgaagacgagtcagtgaaattacgcctaagggaactagacaacctcgaagaaacacgactacgtgcgttgcaaaacttagaggcataccaagctagaatgtctcgagcttttgacaaacgcgtaaaaaggtcgttcaaagaaggggatttggttctcgcggtaattcggcctatgaatattactcataagatgcaaagcaaatttgaacctaaatgggaaggcccgtacattgtaaaagatgtatactctagcagcgcttatcggatcatatctccggatggcgaatattgtccaccgccagtaaatgggaagttcttaaagcgctactttgcataaaagaatgttgtgctccaacgctatacgagcctaaactgttagcaacaaaaaataataataataatcatcatcatgctccaatgctatacgagcctaaactgttagcaacaaaaaataataataataataatcatcatgctcgcactataggagcctaaaccgttagc

SEQ ID NO: 146614 - DNA, 793 bp, Zea Mays
gtccctcacccccacgtcggcattcagcagtcagcaagtaacacgagagtgctagctcccttctccagctagccgtgtggctcgctcttcagatcgctgatctcaggcaagattagcctgcccgcccccaatggcttcttcctctgccgctttcgcaatcctcctcttcttcttcgccgtcgcggtgcagtccgctcgcggtggccatcagctggcgtgcgaggagctgccgccggacgcgtgcgcgttcgcggtgtcgtcgggcgggaggcggtgcgtgctggagcgcacgcccgagggcgcgcaccggtgccagacgtcggcggtggtgggcatgcagatgcagggcgggtgggtcgagactcgagaccgacgcgtgcgtgcgcgcctgcggggtcgaccgcgccgcgctgggcctccccgtcgccagcgccgcggccgaggaccgccgcgccttccgcgcgctctgctcgccggcgtgccgggacgggtgccccaacgtcgtcgacctctaagccacccttgccgcggctgaaggtgtgtcactgccggcgctgtgcgaggcggagaagaaggctgggaaccgccgcatgatgactgggaaggccccgctcggtgctcctgtcgccgctccggaggctgcgccagctccgtgtgaagaatgatgtaggctcgatttgtactgcagcttcagtagttgatgcacaccgtgtttgggatatgtgtaccacacccagatagtttgcattattttttatgaaataaagctgtacgggtattgtttgttgttcca

SEQ ID NO: 146615 - DNA, 1377 bp, Zea Mays
ctgattctttcagccgcggtactcctctgctccagcgcaccatgcccagagcctgcctgttgctcgcgtctccggccatctccagccgtccggccgagctctccctactatttccctggcgcgtcttgctccagcttggtttttcttctcccctgtacgcgctcagcagccggcgtttctccctacgcgtgccgcatccatggcttggtcctagttcggtgcccaagctcccctgcagccgcgcccctacgctcgtcgctgaaactcccatggcgcccggatttatgttcgcccggctctgctccttccccggctacagacgccagttcccatggtggcttcccttgtgtcgcgccttgttccctgcgcacgtgccgtgccgagctcgctccttcccatggtggctgagctctttggctcggtcctgcttgtcccaaagcgacgtgaattttcctgtgcgcgcgtgtctccttacgcacgcgtcgccgtcgaattccctggtgtttgcgcgtcatgaggttcctccagcgcccttgccctctcgcccgtggcgtcagctactcgaccaactctatccctggctgtgctcgtgcctgactcctgcgtcgcgcgcgagttcgacgctcatctccctatttatccatggcgcgcgcctgactctcggttatcggtgccctgtcaggccgtcctggatttcgcgagctccttccagttgccgtcgctcgccgtcgtctcttcgtgctggtcgactagtttgccgtggtcgtgcgtagtcccctgctcgacctcgtcgtcgaacttcgccttgccggtcgtcgttcttcgctcagcaaggtttcgttctaagctgcgccgcccttcaagttcgcgatcttggcggactcgcacctctgtgtcgtgtctgctcgcccatgctcgtcgacctcgacgatctatctttcaactgcgcgctacttgtgtttgagctctgaagccccctatcgagctctttccctggaagtcgccttcgagcacaacccctaccaagtgttcgctgggaggtctaaaccaatactcatcatcgatctgcgattatcaaatcattttggtcacagtaagctgataatttattcagaatagttcgatcattgaataaattaatgtgttagtgcgaggttcattagcgtgctcgataaattgtgtaaatcacgaaactctcgtcgacttcgcaattcttgcgattaccgagccaaattcagtatggcgagttatttcgctatttccggttaattagctgaattaatgtaccgagtagaatattagtaggcatgtgtgataaagaaatgtttgattaattgtggacatgtaaaatatgtgaggagagaaataaaattaaat

SEQ ID NO: 146616 - DNA, 98 bp, Zea Mays
aaaatcaacaaaatttaagcatagaccatatcatatctctagaaatttaagcatagaacatgttatctatctagaaatttaatcatgccatacaatta

SEQ ID NO: 146617 - DNA, 108 bp, Zea Mays
agggatctagggtcatgggccacaacatgccaccaccggtgataccagcaccaggaggagcttatgcaggagagggagctactccaggagagaatccaaacccgttac

SEQ ID NO: 146618 - DNA, 1394 bp, Zea Mays
tggcgctccgaaccggcgtgaggtacaaccggagcatgccgctgtcggcggtgcccggccccggcgagtgccgcgcgctgcggttccgctccagcgccgcgccctcctcgcgcctccgcttcgcgtggccgtgggcgtccacgacgtagctgcgcctcgagctgcccagcccgccgccgctgttgctgctgaaggagctccgcgcgcacgcgttgctgttgcaccgctgcatcctgccgctgtgcccgcggacgcgcagctccggccacggctccgagaacgcgcggtccgcgccgttcccgcgccccgcggcgcggcggtggatcaggccccagaggctccacgccttgcgccaccgccgcggcggcttcttcgcggggccggggaaggcggcgtccaggctggcggagaagtcctcgacgagtgagttggtgctgaaccggtggtcgaacaggtcttcggcgtggtggaagtggtagaactccgagctgcccattagaggggattccttgccgttgaccatggcggccggtgcggtcgctggaacaggtactggtactggcactgccactggctttgggtcggtgacttcgaaggacctccgcacagagctggacctgtcaaggctccggcgcctccggctcgacgtgtccatgtagtagtctcgcgtctgggccgagcccccagggacgttcgcgtcggggtcgggctccggctgggagtcatcctccacggggatttgaccgtcggagcgctccacgatgccggcgggggagtcctccatagccgagaggatgggaggcaggcgggagagcggcggcggcgcgcggccgagggcaatgccggcgccggcgccggcgccgaacagatagccgtcccacgacgcacggggttggtcccaggcgaagcccatgccgtcgacggacatgcgcccggcgtcgagggagaatcttagatcggtgtcacacgagcgccgcccgccggcgaactcagagccggcttcaccacggcggaagcggctgcgccggaggaacgatggcttggagggcttctccggtgggggcattgccgccgcagcagccttgctgcccgcggcctcctgcttcttgagcttctgcttgcgcctccagttctgccacttcttgctgaacaccgaggcagcaagccagaagctcccggcgatctccatctccttgggcggcggcttcttgggctgctgcgactgcgaagactcgagatctatgtgatccttcatggccctaacatcccgcgccgcattcacccccgtctccatctcctcagaggtgtcggccaccaagacgggctccatcaccggaacaatctcgtcggaatcctcggcgacagcaatctcctcctccaagaacatctcagcg

SEQ ID NO: 146619 - DNA, 243 bp, Zea Mays
ttttttcctgccgctcactttcattcggccgccaggaagcaccagcggctggctctggccgactgcgccctgcacagagccacacagccgcccactctctgtttgctttctgtttttttcttcatttctacttactgcactattactcggccgctaaggagaactagacatttgcactgtgcaattgaactcgaatctagtcctcttttactcgaatcccttactgtgtgtttaaatgtatga

SEQ ID NO: 146620 - DNA, 1334 bp, Zea Mays
cgcttccctcggaaatggttcgatgtctcgatttgacgcctgcaaacctttctcttgcttcatttcttcgttatcttttcgactgactcggttccatttcgtgtcttagattcttgcatgtttttgtaggtcttcaacgagtcttctaatgtcttttttgaggtgttgatcatctggatcaccactttgcctttgtccaagtctactctgcattctttgaactataaccaaagacactagcaaataatgttagtccaaatggttatgatgttgtttgaaagtaacattttatcataatgtttgtgcaatccctttcgggtgttttgagtgcaattatagactgtaagaagtgcttctttgttctgtgatcaatctggaaaagggtattaaaataattctatcttctggattgcagcctcttgctcgaatgggtgctacggttactgcaattgatgttgttgacaagaatataaagattgcaagtattcatgcggcatctgatccaacaactgcttcgattgagtattgttgtgcaacagctgagggactggtaaaagagaaaaggttgtttgatgctgtaatttctcttgaggtgattgagcatgtcgccaatcctttggagttctgtgaatccctctcggctttgacaattcctaatggtgccactgtgatttccacaatcaaccgatcaatgcgagcatatgccactgcaatagttgctactgagtatatcctcagatggcttcctagaggcacacatgagtggtccaaactggttaccccggaggagcttgtcctaatgctgcaaaaggcttccgtctccgtcgaagagatggcagggttcgtttacaatccgttgagcggagaatggtccctgtcagatgatatcagtgtgaactacattgcttttggcgtcaagaagggcgaggcatcatcgacaaatgacagagaagcaaatttatcatagctgaagaaaaacacgtgaccttgaattgtcgggcatcattttcagaggaccaattcatgtcactgaaatcttactgctaaggatgcaaccaagtagcagaagataattctcttgctctttttagtcttggaaactggagcttgtggagtgatgcttcctggaagcgccattgagaagtcaagttgacaacacgtgactgctaacaagtagagctatctgccttttttgggtaatgtttcaggcagtttttctcaattttgtggcaatcactgatctaaataaaaatactactacactgctgtacgtgaaaactgaacagatttgctgtctggaaatgtaactatttttaacagttaagaggtgtttg

SEQ ID NO: 146621 - DNA, 133 bp, Zea Mays
gtatattttgttaaggacactctttaaatgttggaggtgtgtagtagtagaaggtgttatttgtaaattaaggattaaggacaccctctaaacgttggaggtgtttagtagtagaaggtgttatttgtaaatt

SEQ ID NO: 146622 - DNA, 387 bp, Zea Mays
atggctgactatgggctatggcattcgagaataccagcacattacattacgattgtagggaacagacaacccacaaagtccattattagcaagacaagactacaagatgaaatgggaatggttctgcagtttgtaggctatgttctgttcccagatgtacagacatattcagttgtagctgtagtaatcccatcagatggctatttgaaaggtgtgagagacttttgttctaaacacaacgttttgatgattgctgatgagatccaatttggcgtaactagaactgattctgtgttggagttattccagtcagtgcagttcttgcagacaaggatgtcatgctgtgtatcagaccatgggaacatggaaggtgtttatgacagttaa

SEQ ID NO: 146623 - DNA, 118 bp, Zea Mays
atagtatatgtataggaccaaataaatttggaatgaaaactctaacgcctacaaagccaatttttggtgactttaacagcgaacgggttaactaaataacattttttcactatatcat

SEQ ID NO: 146624 - DNA, 373 bp, Zea Mays
acagaagtcatcagctacaaccgccgcggtaaacgaagcgcttacggtgtcaggagctgcatcaacggcagcggagcacttcagagcacacgcacacagctcagccgccgcatccatggagccacgaacaggagacagtgaagctagggttacagaccagggaaaattgggaaacgatgttgcaaatcttaccgcacaggttacatggatgagaatgggggagtggggggagggagggcgagggggagaagagaagtcgcgatggggaatacggggaggagggaggagaagaacaaaccctagagccgacggcgcaaacggacggtggcgcggcgggacggatgaagaccacagccaggggagttatttgtga

SEQ ID NO: 146625 - DNA, 2740 bp, Zea Mays
cgagacgaccgtcaccccgcgccgccgccgccactggcgctactcctaccggcgggggcctgaagaatatggcagccgcctccgcctccacgcgacaagcgacggcggaggcgtgcagtagccacgtccaccacgcgcacctcgcggctctcctcaacgcttccgcgcgcttgcctccgctccctctcagccgcctccacctcccgctctcgctccccacggcctcccgcctcgtcgcgtccttccctccactcccgctcctcgtctgcttcctccgcgcgctccgcctcctcccctcctcgccgccgcgcccctttgactcgctcatcaagtcatatgcctcgctccccaaccgcgcctccctcgctgctgcggcgctcgcgttcgccaggtcagccgggtacgtgccctctgtgctcgcctacaacgccgtcctcctcgcgctctctgacgcgtcgctcacctccgctaggcgcttcttcgactccatgcttagcgacggcgtggcgcccaacgtgtacacctacaacatcctcatccgcgcgctgtgcggccgcggacaccggaaagaggcgctcagcatcttgcgtgacatgcgcggcgcaggttgcggccccaatgtcgtgacttacaacacgctcgtcgcggcgttcttcagagccggggaggtggatggcgcggagaggctggtcggcatgatgcttgacggcggcttgaagcccaacctggtgactttcaattcaatggtgaatgggatgtgcaaggctgggaagatggaggacgcacgcaaggtgttcgatgaaatgatgagggagggtttggcgccggatggggtcagttacaacaccttagtgggtgggtattgcaaggcagggtgctcgcatgaggcattgtctgtgtttgcagagatgacacagaaagggatcatgccagacgtcgtgacatttacgtcattgatccatgtaatgtgcaaggctgggaacttggagtgggcagtgacattggtgaggcagatgagggagaggggcctccagatgaatgaggtcacttttacagccttgatagatgggttctgcaagaagggattcttggatgatgcattgcttgcagtaagggggatgaggcaatgcagaataaagccttcagtggtgtgttataatgcacttattaatggttattgtatggtaggaagaatggatgaagcaagagagttactccatgaaatggaagctaaaggactgaagcctgacgttgtgacatacagtacgattatcagtgcgtactgtaagaattgtgatacacattctgcattcgaattgaaccaacagatgcttgagaagggtgttcttccagatgcaatcacctactcatcactcataagggttctttgtgaggagaaacgactcagtgacgctcatgtgctcttcaaaaatatgattaagcttggcctacaacctgatgaatttacatacacatctcttattgatggccactgcaaggagggtaatgtggagagggctctttctctgcacgataaaatggtaaaggcaggagttcttcctgatgttgtgacttacagtgtgcttattaatgggcttagtaaatcagcacgtgctatggaagcacaacagttgctcttcaaattgtaccatgaagagccaattccagcaaatactaaatatgatgccctgatgcattgttgtagaaaagctgagcttaagagtgtgttagctctcttgaagggattttgcatgaaaggtttaatgaatgaagctgataaagtttatcaatcaatgttagacagaaactggaatcttgacgggtctgtctacagtgtgcttattcatgggcattgtagggcaggaaatgttatgaaggctctcagcttccataagcaaatgctgcagcgtggttttgctccaaattcaacaagcacgatttccttgattaggggtctatttgaaaatgggatggttgtagaagcagatcaggtgattcagcagttgttgaactgttgttcccttgctgatgcagaagcatcaaaggctcttattgacctcaacttaaatgaaggtaatgtggacgcagtcttagacgttctgcatggcatggcaaaggatggactgcttccaagtccaagatgagggtgattttcaacattcaagaaccaccctctctgtggaatactggagacctgatggtcatgtttggtacatattgtctcatgagtcataacacgagcatctgaatcagtgttatgtggtaagaacggtctgccctaaatcatgatgtgctccatatggaaaaggctgaaagaagttgcctcatgctgcattattgtgtaaagtgagcaaccatttctatctcattaaccgctctgctcttaacaagtgaaatgaattttggttcttgataaatacttgattttgaagggcaggctggtttagtgatgagagttgtttcactaagtcaccggatcttaggtttgaagcaacctctctgcatttgcagaggaaggctggtattgatttatcctttttctaggccccactcacgtgggagtctctggcactaggtctggccccttttataaatacttgattttgtattagcagctttttgtattgttgtttataataattattaggttagagaaggttgtactgatattttatgatgtattacttattgtcttacttttagacactataataaaagatcttgatatatgtagttagtg

SEQ ID NO: 146626 - DNA, 1125 bp, Zea Mays
cccttgcaagttggagaaaatttccactccctacccctagccgccacaacctttctccctctcctcctttcagccgacgcacacagccacttctcgctgttcacaagcgcatggagcagctgcggctccacctccctgctcctctctccgtggtgacgtccagcacctttccatggacgcctccctccccaagctccaaggcgcacagggcagcagcaccttcattccccatggatccatggtgctgggagttttttccccattgctagaatttgttgcagccttcccatgcacaggttccagccatggccgacctcctttcttcctccctattcccggcagtagcacgccagcacagggacaacgacttccatggccggcgccccaagctccagcccctccctgcgagctccctcctcccgctgctcggtaccctgagctcctgctcttctcccatggagggcgtccagaaatttttccagcgccttcactattcatcttcctcccagcaggcccagcttgctgttcccctgctccatggcacccctgcaatattccccttcctccccctcggctcccccatccgggcacccaagcagcgcctttccttgcccctctctgtccccagcgacaagcagcggcactccctcccaaggacagcgcccctatttccctctctcggcagcgcagctcctcgcaaccgagcttcccccgcagcccctcaacatcgacgtgtcataggtgttcgacggaatgctcgtgggaaatattatgttgtacgcagcagccccgacgtcttcgcgcgctgtcggctcgctgttgcgtgaagcccagtggacagcacgtcgtcgacgttcaccggtgggttgctgtttttgcgcagccccaatgtcatcgtcgttcacccccggtgagaccgcgacgatccttgttcgattccgcatcggcgttattttcatatgattaattgtgtatgtgtgctgttttatttttgttttgtggaggaggggcaccccgtgttttgcgaggagaaggcaagccgctcaacactcgtcggatgttcggagcgatgcacaaatcggaatcgtcatcgtccttacaaacaccgattgggtttgtttatgg

SEQ ID NO: 146627 - DNA, 786 bp, Zea Mays
aaaagcaaatgtcgacgaagatgcagagatgcgagtggccgagacctatttcagctagtcctacggaccatccagatccagcacacccaaacccagcagctgattcgcccggccgcatcgcccgagccttctaacagctgactcgtcctcgtcgctccggcgcggcgacaaggcacgcagccaccgcgcgatggccgacggcgccagcagcagcggcggggcgcagaacgggggtgagtcggtggtgattgactacggccggcgccgcactacctgcggctactgccgatcctccgggcccacgagcatctcccacggtatgtgggctaacagtctgaaagctgatgactatcaagggccttcagcaagtttttgggccaatcgagaggcgacacctcaatgcgctagaaaggcaactgagcagatacgtcaaggttgttgggaaggagctgtctgatcgaatggtgtattgtctttcttgatatgcagccggtcccgagatctcaattctactgtgaaaggtgcacatgagagttaaactagtttcattcagaaagaaaggtcatattgctgcgtgtttctgcatggttttcgttgtaaaggtacgagagctgaggctgacatagaacattctccggtcgattttgtatgtgtattttggcactaaagtcttcatggatggcttatactgaagagaagtggcgattcggtacgcctaattgtgcttatagggcaattgaaccggcacagtaataaagttgcagcgaatgggcttctgtcgaaaca

SEQ ID NO: 146628 - DNA, 2420 bp, Zea Mays
aaaagcaaatgtcgacgaagatgcagagatgcgagtggccgagacctatttcagctagtcctacggaccatccagatccagcacacccaaacccagcagctgattcgcccggccgcatcgcccgagccttctaacagctgactcgtcctcgtcgctccggcgcggcgacaaggcacgcagccaccgcgcgatggccgacggcgccagcagcagcggcggggcgcagaacgggggtgagtcggtggtgattgactacggccggcgccgcactacctgcggctactgccgatcctccgggcccacgagcatctcccacggtatgtgggctaacagtctgaaagctgatgactatcaagctcttcttgatcgtggttggaggagatctggttgttttctttacaaacctgagatggaacggacatgctgcccctcatatacgatacgcttgaaggcaaatgatttcatttgttccaaagagcaagctcgggtacttaaaaagatacaaaggttccttgatggcgagctcgatccacagattggaagccctcagtgtaaggcaagtccaacaaagcgctcactgggtgaacctctgaattcaccaacctcgaaagtatcaaaggtatcagcggaagagtttcaaaaaggcacaagtccaaatatattgaaagaagatgacatcatttgttgcctggcaaacaaaatcaatgaggccacagctacatgcttccgaggtggggtatttggttctgttcaactccccaaagctgttgtgaagaccgttaaacctcaagtcaaaaggaaagttggagaagcagtgcaagaaaagaaagtaggagaagcagtgcaagctttggtttatacgtgtaatataagtttccaaatagtggcagcagttagacgggcattgcctaaagaaaatggtgctactcaaactgaagtaccagcagatctttctccaaattctgttgcagaaaagctatccgtggcaatggaacgtcttggagaactagctggttttgaagtaaaagcttgtaatgggcatctaaatttctatttggcctccaatcaggcaatgcagaaccataccagcgttgttgtacctgtgcaagcttcagacaaatctagtggttcaaagccaagctctgtgaaccaaactaatgcaaaatatcctctgaaaaggaaaaacctggagattaggttgagcacatctcattttgatcctgaggagtttgctctgtaccgaaggtatcagacaaaggtgcataaggagaaggcagttacagaaagctcatacaagagatttctagtagatacaccaatcctgtttgtccccccaaagactggtgataatacagttccaccgtgtgggtttgggtcttttcatcagcagtacaggattgatggaaaacttgtggctgttggtgtagttgatatccttcctaaatgtttgtcaagcaagtacttgttctgggatcctgaccttcctttcttatctcttggaaagtatactgctctgaaggagatagattgggtcaagacgacacaggagcactgtcccagccttcagtactactatctcggttattatatacattcttgcaataagatgagatacaaagctgcatatcgaccatcagaacttctatgtccactccgttatgagtgggttcgctatgatttagccaagcctctactggatgccagtcaatactccgttctatctgattatgctacaatgcaaggtgaagtgccccagcctcagatttgtggtccctctgatgactcttcagcaaaagttgaccaccatgagtctcccagcgatgaggatgaggacgacgacgatgaagatttcgacaactatgaatcagatatgatggtcgatgaagagacaattcattcagaaaaacccgatacagctgaaggcagttccgagataaatgacataaacaacatcaccctggacctgaaaggctcgagggttaaatttaagggccttcagcaagtttttgggccaatcgagaggcgacacctcaatgcgctagaaaggcaactgagcagatacgtcaaggttgttgggaaggagctgtctgatcgaatggtgtattgtctttcttgatatgcagccggtcccgagatctcaattctactgtgaaaggtgcacatgagagttaaactagtttcattcagaaagaaaggtcatattgctgcgtgtttctgcatggttttcgttgtaaaggtacgagagctgaggctgacatagaacattctccggtcgattttgtatgtgtattttggcactaaagtcttcatggatggcttatactgaagagaagtggcgattcggtacgcctaattgtgcttatagggcaattgaaccggcacagtaataaagttgcagcgaatgggcttctgtcgaaaca

SEQ ID NO: 146629 - DNA, 192 bp, Zea Mays
cgtgtatttttttaaattgattctcgtatggagccgaaagattgggagtcgtttttgtgaagaaaggtgggatctaaaaaaacctgctccaccctcccttaaaacagctcctcaaccaaccaaatatggacctccccttaaagtttgatcgaaattacccgcaattgccattggacaaaaacataacgagcc

SEQ ID NO: 146630 - DNA, 80 bp, Zea Mays
atcttctaatttctattttaaattcaaatcaaactcaagtttgaaatccaaacttttacttttagatgcacaaataaaat

SEQ ID NO: 146631 - DNA, 1951 bp, Zea Mays
caatttaaaggcaaaaactctcctggaattgattgttgaggcatcacagattgcatttgccagtgcaagcaaatttcagagataaggatggcagcacaactacttttctccaatgcttccagttgccactgcccattaggcatttcaaggataaacgttgggaagacacttcttggtgaaagtgcaagttttcagagaaagaagtcgttttctggtggttcctatcgcttttctcgatttgattgctctgcgaactcccgccgagctgggccaaggcgcaccaaggatactttatatgaccttcaccctgagatctccttgctttatggagaagataatggtgcagctaccttatccagcaaagagcagggtattgacactacagctgaaagattggtggacacttctccctcttaccgctataatgagcccaggattaaagtcataggggttggaggtggtggctccaatgctgtgaacaggatgattgaaagctccatgaagggtgtggaattctggattgtgaacactgattttcaggctatgcggatgtcacccattgaaccagaaaataggttacagattggccaagaattgacacgtggtcttggtgctggtgggaacccagaaattggcatgaatgcagccaaggaaagccaggagttggtagaacaggcagttgctggtgccgatatggtttttgtgacggctggaatgggaggtgggacaggcactggtggagcacctattattgcagggattgcaaagtccatgggtatattgactgttggaattgtcacaaccccattttcatttgagggaagaaggcgggctcttcaggcacaagaaggaattgcatcgttgagaagcaatgttgatacactgattgtaattccaaatgacaagttactgactgctgtgtccccaaatactcctgtgacagaagcattcaatttagcagatgatattcttcggcaaggtgttcgtgggatatcagatataatcactgtgccaggtctggtgaatgtggactttgctgatgttcgatcagttatgtcagatgctggctcatcattaatgggcattggaacagcaacaggcaagacacgagcaagagatgccgcactcaatgccatacagtctcctctacttgatattggtattgaaagagcaactggaattgtatggaatatcactggagggaatgatctaaccttgacagaggtgaatgctgcagctgaagtaatctatgatcttgttgaccctggtgcaaatctgatttttggctctgttatagatccgtcatacactggtcaagtgagcataactctaattgcaactggtttcaaacgccaggaggaaagtgagagccggtcttcacaggctggagaagacagcaaccgcggtcgctcgggctggttttctcccacttcccaggaggaaggtcatgcattgcagatcccggagttcctacagaggaaagggcgtccagggtttccacgagtctgaacacactttggttcaatgtttttcttgtcatagtttggtacgatgtaggtttggtttctgggtctcttagttagcaaggtagagcagatgttcctgaaccgcatactaatctgtgtgcaaacttcgtcgcctgagtacattggctgggctgctttgcttctcaggaacctgcagtaggtctcaatttgctagttattatgattaaaagacatcgctgagaccaaattataacgttccgtgtgaagaattactggctcactgccaatttcctttcctttgcggcatacattgtttcattagtcgttattttggtttcgttcaatgttatgacaccaaaataggattataagggttagtttggaaaccattttctcaataaatttctatttttcgagggaaattagttcattttcctttgaaaaataggaactacttgaaaaaa

SEQ ID NO: 146632 - DNA, 835 bp, Zea Mays
tttttttttttgatgagataacatgcagttctcttgcgttattacggatgacttcttgaatagtcagttacattctaactgaatcccacttgccgtcgttttctacaggtgaatgctgcagctgaagtaatctatgatcttgttgaccctggtgcaaatctgatttttggctctgttatagatccgtcatacactggtcaagtgagcataactctaattgcaactggtttcaaacgccaggaggaaagtgagagccggtcttcacaggctggagaagacagcaaccgcggtcgctcgggctggttttctcccacttcccaggaggaaggtcatgcattgcagatcccggagttcctacagaggaaagggcgtccagggtttccacgagtctgaacacactttggttcaatgtttttcttgtcatagtttggtacgatgtaggtttggtttctgggtctcttagttagcaaggtagagcagatgttcctgaaccgcatactaatctgtgtgcaaacttcgtcgcctgagtacattggctgggctgctttgcttctcaggaacctgcagtaggtctcaatttgctagttattatgattaaaagacatcgctgagaccaaattataacgttccgtgtgaagaattactggctcactgccaatttcctttcctttgcggcatacattgtttcattagtcgttattttggtttcgttcaatgttatgacaccaaaataggattataagggttagtttggaaaccattttctcaataaatttctatttttcgagggaaattagttcattttcctttgaaaaataggaactacttgaaaaaa

SEQ ID NO: 146633 - DNA, 842 bp, Zea Mays
ccgttggggtcggagccagccagccagctgccgagcccaacgggaggagggccagaggacgctcgctggcgctgccctttataaatccgccgtgcgcgtgccccgcccccgcagtagtagtacacagcatcatcaatcgacgcaagcgcaaccacctcctcccctcgtgatccagccctgccccgcttcgtctagttgacatcatttcccttgcgccttcttgccagcaatccatccaatccatccatcgtgatcacctggcaaccaaaatgtcaaccgccaccgccccaagattgtccgtccccaaatcctccggggcaagctaccggaccgccgctccggcgcccaagacggccctctccttcgtcgccggccacaagaggcagcaggcgctgccccgcgcgcgtctgtccagcaggaggttcgtcgtggcgcccgcggccgtgcacagggtgaggctggtcgggccggacggggcggagcacgagttcgaggcccccgaggacacctacatcctggaggcggccgagagcgccggcgtggagctgcccttctcctgccgcgccgggtcctgctccacctgcgccgggaagatgtcggccggcgaggtcgaccagtcggagggctcgttcctcgacgacggccagacggccgagggctacctcctcacctgcatctcctaccccagggcggactgcgtcatccacacccacaaggaggaggagctgtactagtagagttttgggtcgcttatatatgcgacagtcagtgtttgtggcgaatgcagtgaactgatttgtataccatacgaggaataattgattccaacaattccatacaaa

SEQ ID NO: 146634 - DNA, 1357 bp, Zea Mays
atgtcgcgcccctacgtccttgctccctcggcgcccctgctcccatggcgtctgctcggccttgcccttctccaaccgcgcccggccaagctcccagcaccacgcccctggtctcggtcctcggcgcgcctgctccctggaactcgcccatggcgcgccctccagctcatctctgccctctcatgcttgctgagcttttctcagatggctgctcgtgagtttgttcctccccaacgccatcagcttgccgcgtccatggccgaggcctccttcctacgcgcgcagatttctttccctgagctcggtctctggctgcctgcgcgcctgctcccatggccgcttctctctgatttcctggctcgccggccatgctcctctgcttgcgcagctcggccgaccgtttctactcgtcgcgcccctgctccccatggccggcgtcgagctctggtgattttcctccgtgtccctggctcagccctgctcgctccctatgcgcgcgcccagccgaagtcccttgcacgcagccgtggatttctctgcgcagcgttcctgcaccctagcctctgtcgtgctcgacaacatgtaattcatgtcgaagcaacaactgcgatcccttgcgtcgcgatcgtcagatcaagtctcgcgtcgtcgatctgtgcagatcctgttcggccatcggttttgctagttgtcgatttcctattcgacatggttatcacgtcggctgttcctatccgagctagtctcgctcgccagccgtcacgccctctttacccattgagccgtgtgttgtcgcgttcaccttgttgtgtcgttgtggctttatcggtgtactgctgtggtacctggatcgcgctcgcctcaactcaaacgagtcatactgccatcatcgtcgtcaaatggaaatcgttgcgctggcacgtcgatatcgtcgatcgccatcctcgtctacgccaagtcccaagccgtgaagacgctcttgtgctggccacgcgtcaccagctcgacaaaaaggaattccatgagtatctggtcaagagtagaagtggtgtgcatcgttcgccagacgtgtgtgatcgaagacatcaaccaaaaaccgtcgtcgtgcttccgactatctcgtcgaattagtcagggtacattaattaatcgcgtgatgcggaagatgagtcaagtcgaccccaagcgcgggctactccgcatggtgacgctgatggacgaacctgttgtggcagaaccgcccgaattattccagcttaagtgcctaagtcatgcctcaagggctacaacacacttaaatcggaataactcgttagtcccttagatctagtctgatcaagccacttaaccaggatca

SEQ ID NO: 146635 - DNA, 427 bp, Zea Mays
tcggttgttcctatccgagctagtctagctcgccagccgtcgcgccctctttacccgttgagccgtgtgttgccgcgttcacctcgttgtgtcgttgtggctttatcggcgtactgctgtggtacctggatcgcgctcgcctcaactcgaacgagtcatactgccatcatcgtcgtcaaatggaaatcgtcgtgctggcacatcaatatcgtcgatcgccatcctcgtctacgccaagtcccaagccgtgaagacgctcttgtgctggccacacgtcaccagctcgacaaaaaggaattccatgagtatctggtcaagagtagaagtggtgtgcatcattcgccagacgtgtgtgatcgaagacatcaaccgaaaaccatcgtcgtgctttcgactatctcgtcgaattagtcagggtaagcaaatt

SEQ ID NO: 146636 - DNA, 237 bp, Zea Mays
atggcctggagtccccctccacagacaaagagccacggtggcggcagctcggctgctcaccccgcgcactccggcaacgaaggtcgacgcctgctcgtgtatagtagaaacgtcatcaaactgccggtggctagaccggcatcgcttacggctagtgcgaccacacgcaccaagcgtcgcacggaggaggaagagaagctaaggcggtcgtgggctcgtggcgctagggacgcctag

SEQ ID NO: 146637 - DNA, 1018 bp, Zea Mays
gcaccacgcaaatcctatgaccagacctgacctgatcgatcgcctacgccccacacaacaccacgagcccacgacgcaccccgcaagcgaagcaaagcaagccccaggcggcgccgccgatggaggatgcgatggggaataagatcgtgcggacgacgcaggcgtcggcgacggagtactacctccacgacctgtcgtccacctacaatctcgtgctcctcgacgtcgtcagccgcggccgcttcctcaagtccgtccgctgcaagcacgacgaagggttgctcctcgtcaaggtctactttaagcgcgccggcgagtccatagacctcaaggagcacgagcggaggctggagcggattaggaatgcattcaaggggatcgaggggtcccacgtatggcccttctaggtttggctgcaaacagataaggcaacatatctcttgagacaatacttcttcagcaacttgcaagatcgactgagtacacgccctttcctcagtcaggttgcaaagaaatggcttgcctttcagataattcatgcagtggaacaaagccatagtaagggaattttgccatggtgacataaaatgtgaaaatgtgctcgttactttttggaattggttatatcttgcggactttgcatcattcaagccaacgtatatctcggatgatgatccgtctgatttctcattctatttccacactggaggaagacgacgatgctatctagcacctgaaagattctatgaaagtggtggtgaatcacaagttgcagcagacgcacctctgcaaccatctatggatatattttctcttgggtatgcacattcatgttaatttttagttttgtttcatgtttgaccttttcacctggtatggcagtatatgcttcccatgccaaatagttttcctatgatctgtcagcgtcgtcattgtaatatttagtgttacagtgatattttgctacacggattttgcataacatagtgatgtttatcgtcccgtatctatgttttac

SEQ ID NO: 146638 - DNA, 2769 bp, Zea Mays
cccaaacccagaaactgaagactgttgcagccgcgactcctgaatcccgacagctccagcgcctccgctggtccccactgcttcggccatggcggtgcgagccacggtctcccgcttcccggccacgccggaggcgctggagtcgtgcgccgtccagtggggcgtcgccgtgacgcccttcgccgccgcggacgagcacggccaacccccgaccaccggcgccggcggggaccgcgtcccacgctgcgagcactgctgggcgtacttgagcagccactgcgatctggagcgctggggctggacctgcgcgctctgtggcacgctcaacggattcgacgacgaggccgagcgacggttccagcgtcccgacgtgtgccccgagctcaagtcctctttcgtagacctcgaaatcctagtggatgaggcagagggcggaggagacggtgtgcaggcgctgcctgtctatgtggccgcagtggatctcgcatgttctgaagagttcctggaactcgtcaagagtgcgcttcttgcggccctagaagctcttgttccgggctccctatttgggcttatgacattcagccacaagattgggttgtatgatgtccaaggcccgattccactcgtgaagaatgtttttattcctccggacttagaagaagatggtctgcctgttgcccttgaagatgccatgcccctactttgttttttggctccagttgacacatgcaaggatcaaattgctgctgtcctggagacactgcgacctacatcttcatgggagagaggggttgcttctgggcaggaagaggatactgttttgcttggcagacgtggttttgggacagccatgtctgctttaattgagtacctaagttcagaatatggttctacttttgctttagctcgggtatttgcttttctgtctggtgctcctgattatggagctggtgtgctagataccaggagatatggggagcaatatgctagtaaaggggtagacgctgatcttgcgttgctccctgaacagatacctttctacagagacctagcagctgttgctgttcagtcaggagtatgcatagacatatttgctgtaactgatgaatacactgatttggcttcactgaagtttttaagtatcgaaagtggtggatctttatttctttatgcaagtacagatgattcaacagttccccaagacatataccgattgctaagtcgaccctatgcatttggttgtgttctaaggctgagaacatcttcagattttgagccgggcaattcttatgggcatttcttccctgaccctcaatatgaaaatgtgcaacacatcatctgctgtgattcatttgccacttatgcatatgactttgagtttgcccataacgacggtttctccaggcacacagatcctgctgttgtacagattgcttttcagtacagcgtgattgaacctgtcaaggaaacatcaggcaatggatcacaaccatctgcaagttacaagttctgtctgaagagacggttgagaataagaacattgcagtaccgtccaactaataatatcagcgaaatttatgacagtgtagatccagaggttgtcctgcatatccttgttcataaggttattttagaatccttggataaaggggttagagaaggcaggcatcaagtgcatgcttggctatccctccttgcagcccggtataatcaggccctgagttctgatgtgcgaccgctgtcaagcatagacattgacttctcacagtgcccacagcttcaaacgatacctcagcttgtttttgcattgttgagaagtcctcttcttcgcttgcatgaggaaggcgtgcacccagattacaggatatatctacaatgccttttcagtgcactggagccatcatctgtagctaaagccatatatccggttttaatctcgtattcctcgcctgacaagcaagcattcccacggcacactctgagccatgctgctctaatcatgagcgagagcccaatatttcttctcgacacatttaccaaccttattgtttactattcctcaactgctgatccttcagttccttttcctccaccccatgactgccttttgagaaaaacaataaatggactgaagcaggacagatgtataacccccaagcttacattcatccatggagggaaagatgattcaacattgtttgagagctatctcattgaagagcaagatgttgatggatcgggcttaacaactggttcaggttttgtagccttccgtgagagcgtgaggaacgttgcaggagagatcatacaggaagaaattggaagttagttccagctcgattacctttttggttctgctgcagagggtatcgactaggatgttttagccttaattaatgccgtagcagttaactgaaacgtagatagccaaaatggagagacaattcaatgaataataaaaggaggccacttgatgtatagttgcttctgtcaacaactgctttaggcttgactaggcagagcagcctttctggtacagcggcactgtctgtctctatgctaaaacagacgagttttactacacaataatacaccgtcggaacctggcagactgaaatttgagagaattcaatcccttaatgctcggtttggatattggagggcaaggaattgaattgagttcaatactaaatcaaccatggtattgaaatgagatgtagtttcaattgtatcgtttgaatgttactgaattagagtttggaatcgtgc

SEQ ID NO: 146639 - DNA, 941 bp, Zea Mays
ctccctcagccgtggcgggggccgacggcatagcgctcatcaccatcaccaaccttcctgtggtggatgcgccattgcctgatgcgagccgcggggaaatgagggatccttggaggcagagcaacgcggccccgtctccgtctctggccccagcgacgccgccggcccccgccacctcgtcccccgcggcgctgctccgcccgcagcgggaggcgttcgagcatgggctcctgcccatccctaagctcatcttcccggagggcatgctggcgcagaccctcgcccagctcaaggagaagctcgccgcctcagtccctgacgggcgcgtgcgcgctgcggccctggctaaggcgcagcagatcccgcaggagcaggcggcgctcgccctcggcacgctcgcggcgatgctcccggccgaggaccccgtgcttggggacggcgccatggatggtgctgccgccgacatccgcgacgtgctgctcttcctctatatccagtcttacaagcgcctcgtccacctccgcgttcgatgggtacctctctgcgctctccccgatccagcttgttcgcagcaacagccgccgttttatgccttctcaagctaatgaagaaattcatcagttgtcctttctgcaaaagcatatggcgaatattcttactctcttggcagattctgttgagggtgagggtgacgattcactggtcttcactccaagtataatatgagaacaaccagaaccaaacacagatgctctgtattttcctcagggttattggcaaaactttacgatcggcattgttcctgggtttcatgaattgcagcatcttacgtcttctctggcttcataatcgtgagagatgatgcctgtgtggtggcggtgggtgtactgggcggatccggcggcatggacggttcatggcagagcgccccttgtttgtgg

SEQ ID NO: 146640 - DNA, 873 bp, Zea Mays
ggacgggcgagccactccgccatggccgagccagcgccggggttccgcttctacccaacggaggaggagctgatctgcttctacctccggaacaagctcagcggcacccgccgcggcgacgacatcgagcgcgtcatccccgtcgccgacctaacgacgacgatggctctccgtcacaccacccatgcatatgcagatgaggcgcaccgtggcgcgtactccggcgacgaggagccgtggttttacttctgcccgcggcaggagcgcgaggcgcggggcgggcgccccagccggaccacgccctccggctactggaaggccgcgggcacgccggggctggtctacgccgccgacggccgccccatcgggaccaagaagaccatggtgttctactgcggccgcgcgcccggtgggaccaagaccaaatggaagctgaacgagtacaaggctttccagtacgaggatgacgacgaggtcgccgtcgtcgctgctccggcgccgccgacgacgccgagccatgctctccagacgaggagcgagtacagcctgtgccggctctacaccaagtccgggtcgccgcggcagttcgaccgccggcctagcagcagtgcggccgtggtggctgccggtggcggcggcagcgagcacccggcgcggccgccgtcggctgctgcgttgccagacggtgagcagacgaggcagaggaggaaaagggctgcgccgccgagtgacgacgacacgtcgtcttcgagttacgacgacggctccacgcagcagcagcagctgctgctggcggacagagggaccgataatgacgggatcgtcgaggacatggccgactggtcagagttcttggacggctggattatttga

SEQ ID NO: 146641 - DNA, 759 bp, Zea Mays
atgtcgccttcgtcggtggtggcgacaggtggttctggggaatccacggtgtcggcgccacagagtcaaagtttcccgaccccatcgccttcatctctcgcgcggacatgggcatggctgcctcatccacggacgcgggcgtggctgcctgggacctctggatcggcgcagaggacatccgccatagtcccaatattctatgcctccgggtttcaagttgaccaaacagagtggatacagtcatgctcagagttggcaagctgtgtcaacaagcagacccccatctgctactcgcttcatgggcatgcagtaaagccttcagccgacgcagcttgggaaggatgcacctgcaacaaaagaattctgagaactgttctatatattagggttaaggacttggtgtttcctgttaacatgcatcttggccagcacttcactaaaccaccaccacgttattctgagggtgcattgattaaaaagctagaagaacttggaattgggaagccatctacttatgcatttataatgaatgtattactgactgcagtagggagaccaaggccagacttctggcgatgctttcctgatggaaagcagttatacgatcaagtgactggtgatgtgatttgccatggtgagaaaaacttcttacaagatgggcgcaagagctttcctagtggccacacttcgcggagtagggaagccactgtcgatctcttcttgaagtcagctgaatatttggactatgcagttcatcat

SEQ ID NO: 146642 - DNA, 600 bp, Zea Mays
atgcagacaatatgccgaataagtgatgtggtaacccccttcctggacaaccagtatttgcccattgcaatggcgatcagccaggcgcctcattatttgtccaattttcctgtagccttccatggtcaagcactgtcttccattgggatcaaacgcactggaatcttggccgaccacaagaaacaacagttgaggctgaaacttatcaatcgatggaacaaccaactcgttcatcgcatattcatacccagcatctccacttccattaggcaaaggtatattgagattgtacccaagccccttgccctcaccaatctcatcgacggagccactctgcggatgcgatggcccccaagaaccatgcatcatgtgaagagacatcgtcaacacggtgtctgtccgatagaagccctccgcggtgccattcccgtagtgcacatcaatatccacaacggcgacctttgcgcgcccggaatccagagccagttgcacagcaagtccggcattgttcagaaagcagtagccatcggcgtggtcgggctgcgcgtggtggccaggggggcgaaccaacgcgtaggccaggttcccctgcccgtctag

SEQ ID NO: 146643 - DNA, 744 bp, Zea Mays
acgtccgattcccagcctttgtctcctacacgcgcttgccctcccctgctcgacgccggtgatggctgccgttagtccctgtgtccttccccggccgccacacctccactcgacgcccctgctttttcccctagctccggcatccgtcgcgtcttgcccttccctcagcttccgcccctgaccatgaatgccggtagtccccggctcccttccatggtcgcgtgtagctctcccaggtggccgagccatccccctagacacgccccttcccttgttacttcctatggttgccctagccgacctctcccatggcatagggaacaacaacacctccctccatggatgcctcgttgtcgacttgtgcagttcatagtcatcggtgaggtccctttgtcttgtgctacttatctccttaattgatacatgtggtttgtggttgattgtgattatgtgtgtgcttatgtgtgagatgtgagggggaaatcccaggatttggtgatgaagaagcatggtccaatatgacgcccgccaggtgttcgacgaaatgttcgaattgggattcgttgttgatattgtggatctgagtagcattttgtattggtgagctggttcactatttctcttcttggttggacagatggattagttggatgttttaattatgttggtcctcttgacagtagcatgtgtgtgtcatggttgtaggtataatacttattgaaatgcatgtgtcacttgcagtga

SEQ ID NO: 146644 - DNA, 779 bp, Zea Mays
aaactgcactcacaacactaaaattcagattcaggttattgcactaagtctgaaaaccacaatttctatcagctcgtgcttggaccagtttttctcctagtttcatatggttttagggctatcacatttcataaacattgttatcctatagttactctataggtttgttataacaactgtttccaaaatactcatggattaaaagttacagggattcaaaaacagataaacaaaactgctttgggttgattccaactgacccaaatctgaatttttgcaaattacttcaaattctcccacatcacttggagagctccaaatatgaaaattgttcacttttccaagtgtccacaactttgatatatggacttttagcaaaacttagctaaatcttaaaatccacttttgggctagtttagagttgaaattggacttgatctgcttcaagcatttcatcaatttattgcatcctactaaaaacaaggttaactttaagttcaaacccaactttagtgtatagatctcatgtacaaatttccattggtttaaaatttgttttcttgtactagatttcaaacaaggtctctgaacttctcttgctctcttcgaaacgacacaacctcacccttttgcaaatttgttaccctagtgaatgcattctaggtgtatcaagcaagttaatgcaagtgcatatgatgaaatgtcaaatttttagttctcgtaacaccaggggtgttacagcgtgcccgcgcgtgcccgcgtttctgatcttgcgaaaa

SEQ ID NO: 146645 - DNA, 104 bp, Zea Mays
cgagcatgtgtaccctgtcatcggcccacggcatgacccacaattagttatgtgtgccaggccggcccaaatagcccaaatgccttaatgtgtccgaccggtcc

SEQ ID NO: 146646 - DNA, 1780 bp, Zea Mays
aaaaagcaagcattaaataagataatttgctactgaagttcaaaatgactggtagccaaccaaaaacagtacttatttttaaaaaaggaaccagctaaaagcaaactctgaggcaacacgttacaccagtgcggcgcggtgacgaatatacgagtgggatccatttcatacagcagggcgcaccagactcatcttcaggaattggagccagtgctactgttatttctgcttataaccttatcatggcagttcatgtattggttcacaatgagccggtaacgcctgacgtaccatgtcgaacttccccagaaacttctttttttttttggaaaaatttcccaaaaaaacttagaagcacttcatgtggacaatgcccggaccagtttcgtcatactctcccttggagatccacatctgccaacacatgctgagagaagccaaaatagagccaccgatccagacactgtacttcctttcaggtggcgcaatcactttaaccttcatgctgctaggagccagggacgtgatctccttgctcatacgatcggcaatcccagggaacatggtagatcccccactgaggacaacgttaccatacaaatccttcctgatatcaacatcacacttcatgatggagttgtacgtggcctcatggacgccaggcgattccatgccaacaagggatggttggaacagcacctcggggcacctaaacctttctgacccaatggtgatgacctgaccatcaggcatctcgtagctcttctcgacagaggagctgctcctggcagtctccagctcctgttcataatcaagggcaacgtaggcaagcttctcctttatgtccctgacaatctcccgctcagcgctcgtagtgagggagtaccctctctctgtgaggatcttcattaggtggtcggtgaggtcacgccccgcaagatccaaacggagaatagcatgaggaagtgtgtatccttcatagattggaaccgtgtggctcacaccatcaccggaatccatcacaatacctgcacacagagatatttgacaaagagaccgtgtcaggattgccgtatgtatgtatgatctttgtagtgcatatcactatatatatctgaggcgacagccatcttaccagttgttcgcccactagcgtacaacgaaagaacagcctggatagcaacatacattgctgggcattcgaaggtttcaaacataatctgcgtcattttctctctgttggccttggggttgagaggggcctcggtcagcagcacagggtgatcttcaggcgaaacacggagctcgttgtagaaggtgtgatgccagattttctccatgtcatcccagttgttgacaatgccatgctcaatcgggtacttcagtgtcaggatgcctctcttggcctgagcctcatcacctacgtaggcatccttttggcccatgccgaccatgacaccggtgtggcgtggtcttcccacaatgctggggaagacagctcttggcgcatcatcaccagcgaaaccggcctgtaaatattgaggagttgagcaacaattaggtcacaggagtagagttgctttgttggaaaagacttctgaacgagataacaaccttgaccattccagtgccattgtcacatacgataggctggatatcctcgtcagccattctcaactattctgtaacagaccaaagttcagcgttcagtacacattcatagaaaaatgcagttatgcagcctggtcggggaatcaaaatacactttctgctcatggtt

SEQ ID NO: 146647 - DNA, 276 bp, Zea Mays
acgaatctcttagttactcttttgtgtgtgtaagcttcctttcttttcttttactaggtttcaaaattcatggcatgctaatgtctgtttttagtgtcacatacttgataagttgtttgtgttgcatacctgaatgactcatgctcggaaatgtttgttaatactattatgcttatcatttctcttccctcaattcagttgcagatagaaaagacaacactgacgatcaaatggaaccatcgattttggcacttgatcgcaacaacacatgtgtaa

SEQ ID NO: 146648 - DNA, 512 bp, Zea Mays
gctgggattaacggtgaaaaggagcatgccgaagagctagcagaactacttcatatgtgtggaggtggttaccatgtgaacctgattccctataacccaattgtaggctcggagtacaagagaccttacagaaaagtggtatgtgtgctttatgtcctataataaacaaatataaactattatttcgtaaccagttactgatcttatttacactattatactgcaaattaggtccaagcctttgttgatgctttagaagcctgtgggcagctgaggaatgagtttcagaagaatccactacttgagattgaaccatcaccctccacagagcggaccctcataactgcttaattcaaacacctatcaggttgatgcagcatgttcaagcatacggaattgtcatttaatttatgttcaagcataacgctagagaattttggaacgttctgtccgtgcccatctgatgtcatgagtggcaattacggaattaccacacttgtctcagatattat

SEQ ID NO: 146649 - DNA, 1429 bp, Zea Mays
cgacggcagctccacgcgctggcatagccgtctgttctcagcaaacccacccgtctgttctcgtcgtggcggccgccctgtccccattccccaatccctgtcgccgtgtccctaatccggctccgacaatcccacgcccagcagtccagctccagcaccaccagcgccgccctgccccacgcggccacacccaggacccagcggccagcactactgccaggctggcagcgcgcggaggtccagcgccagccgccagcaccaggcttccaggtctctagtgactcgatctcaaggtactcagcgcgctggcagccgatctaggtctctatgtgtcctttgagtcttctctccgtataaattcatcataaaagctcaagacctagatcggcttttcccccttgttcagcaaaggcgtttcgggatgtttatcatggatcgatcgatcatggcggatggggagacatcggcggaggaaaagaggaggtggacggggccaccagaggcgcaggagttggaggagacaaagaggaggcggacggggccaccagaggcgcaggagttggaggagcgcctggactctctcagggacaaaattgcggccgcaagtcttgtcgctggcagccgattcggcgaggagcagcgacggtccttgttgcaggagtggttgcgcctcgcatctgccaagttggatctggatctctcaggcataagcgagtttgacctatcagcagaggcgttgccttggttgatgccgccggaggaggcagacaagaggacgacgcacacgcggcaagaggcgcaggagttggaggagcgcatgacctgtctgcggttgctattcgaggacgcagcagatgacagaattctcgccagaagggagcttggagcagcagccgacgagttcctgctccgcttgacgacgcgtcaacaggccttgacgcgcgagtactcgcgcctcgccaacctgaagaggcctctggatctctccggcatgactgaggccgaccgggcggcggaggcagagaggctgagggaggagaagctgcagaaggcgcgtcaactccaggaccagggggacatgagcggcgcccgcgagtgtgaaggtctggcacgcatcatcgacttcgatgtcaagcagggcggcgaatacctcaacagtatctgctgtgtcggcaacatctacaccttcgaccacacagaggagtcgcccgttggtccgatgagatttaccaacagaccctggcaagacaagatgtgtgtgaattgtgcgtcgataaacatcctatctgtcaagattgcatgctcggatatcgacttccccatccaagtctatggcaccgttgttgccagggactgcatcgactacaagtgtgtttacctcttccgccgagataatgaccattgccaactcatcagctctaatgtacgt

SEQ ID NO: 146650 - DNA, 1243 bp, Zea Mays
cattccccaatccctgtcgccgtgtccctaatccggctccgacaatcccacgcccagcagtccagctccagcaccaccagcgccgccctgccccacgcggccacacccaggacccagcggccagcactactgccaggctggcagcgcgcggaggtccagcgccagccgccagcaccaggcttccaggtctctagtgactcgatctcaagcaaaggcgtttcgggatgtttatcatggatcgatcgatcatggcggatggggagacatcggcggaggaaaagaggaggtggacggggccaccagaggcgcaggagttggaggagacaaagaggaggcggacggggccaccagaggcgcaggagttggaggagcgcctggactctctcagggacaaaattgcggccgcaagtcttgtcgctggcagccgattcggcgaggagcagcgacggtccttgttgcaggagtggttgcgcctcgcatctgccaagttggatctggatctctcaggcataagcgagtttgacctatcagcagaggcgttgccttggttgatgccgccggaggaggcagacaagaggacgacgcacacgcggcaagaggcgcaggagttggaggagcgcatgacctgtctgcggttgctattcgaggacgcagcagatgacagaattctcgccagaagggagcttggagcagcagccgacgagttcctgctccgcttgacgacgcgtcaacaggccttgacgcgcgagtactcgcgcctcgccaacctgaagaggcctctggatctctccggcatgactgaggccgaccgggcggcggaggcagagaggctgagggaggagaagctgcagaaggcgcgtcaactccaggaccagggggacatgagcggcgcccgcgagtgtgaaggtctggcacgcatcatcgacttcgatgtcaagcagggcggcgaatacctcaacagtatctgctgtgtcggcaacatctacaccttcgaccacacagaggagtcgcccgttggtccgatgagatttaccaacagaccctggcaagacaagatgtgtgtgaattgtgcgtcgataaacatcctatctgtcaagattgcatgctcggatatcgacttccccatccaagtctatggcaccgttgttgccagggactgcatcgactacaagtgtgtttacctcttccgccgagataatgaccattgccaactcatcagctctaatgtacgtatctacaactt

SEQ ID NO: 146651 - DNA, 921 bp, Zea Mays
aattcagtaagggggatcgtgaggatccccaggcacagcaaatcaagtgtttgacaaatgtgagcctgaaacagtatctcttgctaccaggctcagtactgtggatgtgacatatgacgtttgtggaatgtgcggtggaggcaactgttgcagctgaagttacacagggggaattctttggagcaatgactgcccacaccactagaagcaagaggaggattgtgctgtttgatagccaagtaggaggtgataaatgtcatggtatgattcaattgatgcgacctgttgtatcggtctctgtgatggacaagctgaaaattttcgtaacgaccgctgctggtgtctctacaggcattgaagttactcctagatggaatggtggacacgaatttgtactcactttaggtgacgctacgatttgtgtgaaggttacttggtcgatggtagatccacggctttaaatgggttcgcctgttcgttgttaagcatcatcggtggaagtgtagtagtgctcttgctctggtttgttgtctgaggctgttggagtctagataagtataacagtgttcacactatcatgcccgtcctgttatttagtgaaccttaatttgtctaatgttgctactcttgttatttattgaaccttagtttattctagttgcattggaagggtttattctactcttgttatttgtctaagtgcatcaattttttgtgtggtggtggtggggttctgttgctgggttctcaggtaatattttaaataaaacctgaaaatccaggcagatctcaccttttggtgcggccatggtggtcttcaccttttgctggattctcatgcttgtttgaggcagatatgatgagtggctacaaacaaactggagcgttcaggtgtgcgagcatccagagctgaacggaatt

SEQ ID NO: 146652 - DNA, 601 bp, Zea Mays
atcgtgaggatccccaggcacagcaaatcaagtgtttgacaaatgtgagcctgaaacagtatctcttgctaccaggctcagtactgtggatgtgacatatgacgtttgtggaatgtgcggtggaggcaactgttgcagctgaagttacacagggggaattctttggagcaatgactgcccacaccactagaagcaagaggaggattgtgctgtttgatagccaagtaggaggtgataaatgtcatggcattgaagttactcctagatggaatggtggacacgaatttgtactcactttaggtgacgctacgatttgtgtgaaggttacttggtcgatggtagatccacggctttaaatgggttcgcctgttcgttgttaagcatcatcggtggaagtgtagtagtgctcttgctctggtttgttgtctgaggctgttggagtctagataagtataacagtgttcacactatcatgcccgtcctgttatttagtgaaccttaatttgtctaatgttgctactcttgttatttattgaaccttagtttattctagttgcattggaagggtttattctactcttgttatttgtctaagtgcatc

SEQ ID NO: 146653 - DNA, 90 bp, Zea Mays
gcctttgtttaagacagactgcttatcacaaagctaatgatcactgtgattcaacattagttttgttcatggtttgttctgtctaatgat

SEQ ID NO: 146654 - DNA, 1555 bp, Zea Mays
ttttcttttttattaaatggccaaaaaggcattttggcatatgcgatgtggatgacgataacatccggatgaaacccatcaatttgacggaaattctgtaaaactcaatttatatagcggcacaattccaattttctctcagcacagcccgcggccgcggtgcgcatgcacgaatctgaacccggaaattttttcattaattcatcccaggctctctgactcactcgcagtcgcttctgtcttgctcgcttgattccgtgctctcgcccctcgaacttcacaggcgaccagaggcttgtgcccctccctctcccgggaggccgggacaagaggcaacgggacacccgcaaggccgcaagaagaaacagcgcagcaacaaatacgctgaagagtggaaagcgagagccgacacgacctcgcccgacctgcgctggtcgactgtgagtttttcccccctgtcgcctcccctgctgggccgtgggccgcggcctcggcgcatggcgtcgtcacgggtgatggcgtcgtcgtctccgccgcagcacgccggggcgggctcgtcctcggacctcgcgcgattcaagagtagcggcgtcggatcgatgaacatggacgacatcatccgtaacatctacggccccgaggccgtcaacgccgccgccgccgaaagcgccggcctcggcccggcggagccctccctggcggccccggaggctgcggcccggcggacgtcggaggaggtgtggaaggagatctccgccgctggagggctccccgcgcccgtcctccatatccctcccgccgccagctccggcgccggggccagaggcggcggcggcgccgcggagatgacgctggaggatttccttgccagggattcctgcggcagggcggcggtgatggaggggaacatggcgctggggttccctgacggtgacggagatgcggcagggagcgtggcggggggagtgggcggcgtgaggggaggcgggaagcgggcgcttctggatcccgcggaccgcgccgtgatgcagcggcagaagcgcatgatcaagaaccgagagtccgcagcgaggtccagggacaggaaacaggcatacgtcgcggagctggaatcgcaggttatgcagctcgaggaggagcagacagaactgttaagggagcaggaggaccgacgccaaaagagacttaaggagctaaccgaaagggcagttccagtcatcaggaaaaaatcaccacaagatcttagaagaaccaactccatggaatggtagaaatgaccctgagccctgatgttcttctcttagaagttacagggtttgtttttctttgacttctgtttcttctagttttctttgatagctatttaggaatagtggaacgtgcgtgatcaagaagtcacgccatttagaattgatctgttgtcagattgacggttttcttgtgaatgtggccgggtgttgtataaataagaacaataaggttagcttgaagagtggaccaaaatatcctaattacaggcatctattttgacatatcccaatatctgatacaacgt

SEQ ID NO: 146655 - DNA, 1682 bp, Zea Mays
atggaaatgcagtcgacggccgctggaactttggcacaatcgcaggctgcagcagctgggactgggaatagcttcacgtacgcggacctgcacgccatcacggatggtttctctgatgaaatcggccgtggtggtttcggagtggtttatcgggggaaactgccgcagcctgatggggaagaggtcgccgtgaagaggctgacgacgacgacggacaacaacaaccccaagcaaccggccggcgacgacgatgatgagcagttcgagaaggagctcggagcggtcaggagcatccagcacgagaacatcgtggagttcgttggctactgcaacgggtatacaccgtcgtccactgttctgcctgacggacgccctgtctacagaaagataagagccctctgcttcaagtacatggagaagggaagcctgaggaagcatgtcgctgatgaatcacttgattggcagtcacgctatgagatcatcaagggggtctgcgagggtttgaaccacctccacagcaaaggcattgttcacagggacttgaagcttgacaacatactcctggacggtgccatgaagccgaagattgcggattttggtctgtcgagattcatgggcgcgcaagaaaccacccggatcacgagaaacattgtagggacgtttggatgcatgccacccgagttcttctgcgatgggcaatactccaagtcgtttgacgtgtacagtctgggcactgtgatcaaagaaatactagcaggacctgctgctgccgacgacggctccatctacggctactacgatcccctcaaaaaggcaaggagattatctctgttcgtcgccatatacatgcataagcaggcaagtgagtactgggagcaaaggctggtggaggatgcagatgtgcaaagagtgaaggcctgcatcgagctagtgccactatgctggggtctggacaggaagaaaaggcccacgatagagagggttctcgatacgctgaattatacagacatttcagttcagaaagaacagcactactactgttcccggtcgtctggaccgcagcctgagaagagcaggctggagggaggagcaggaggcgagctccgcgacatcgacatggaggtgacgccgccgccgcaccgcctcaaggcggtgtggctcaagcacggcgcggtcatcgactcgctccagttctcctacaccgactgcgacgggcgtgaacaaggcgcaggtccatggggcagccaagacgcctgggacaaggttcttcagctcgagccctacgagttcctggtcggagtctccgggacgacgggcgggtacgcgggcctgccgacgagcgtcataaggtcgctgacgtttgtcaccaacgtgaggacctacaggacgcgcggggcgcccgtgggagaccccttcgcgttggaagcgcctgccgggtcctgcatcgttggcttccacgcgcgcgctgggcacttcctcgacgcgctcggtgtctaccatcgccctatctaagtacacgcgcttcgttaaattcattcgtcaacgctggctggctggctgctagtactgctctacttcgtcgtccagcatccgcctccgatccaatgcaagatttgtttgcttttcgtctcgaaattacaatgaccgtaccgccggctgcatgcatatatgcagagtcctgt

SEQ ID NO: 146656 - DNA, 228 bp, Zea Mays
caagtcttgagcacctgaacacctttttagccaccaacatcactttcacaagcgtcatccttgctccattttaggccttgttcggttattcccaatacacatggattagatgggattggaaaaaattcttaagaagtttgacttgtttgggattcaaacccatccaatctcactcaatccacatggattgagagctaaccgaacaagcccttacgctggatataatcc

SEQ ID NO: 146657 - DNA, 1516 bp, Zea Mays
gtttccaacgccagcgcggcaccgcatcggcaccgagacccacgtgcagcctacgcctcagtcacgtcgaccaggcccccacccacacctcccccaccaccaccacaccacgcactggcctccggcgctcgctcgctcgctcccctgtcccctctggcctcctctgctctctctctctatatatatgcgcgcgggccgcggcaatgtttgccccatccgaccagcgtttactcctaactagtttgccgatcgagcccgggcgacgtgagatacgagcggcgtcgaccggcgccggcgagcctccgcagccgcagccgcccgatctgggttttctttcgtagcggtagcggaagatgagccaggaccaggagaacggaggcaccaacgggcagcacgccgccgacgtgatggaggtggagccgaagcgccgggcgccgcggctgaacgagcgcatcctgtcgtcgctgtcgcggaggtccgtcgccgcgcacccctggcacgacctcgagatcggtcctgaagctccggccgtcttcaacgtcgtcgtggagatcaccaaggggagcaaggtgaagtacgagctggacaagaagacggggctcatcaaggtggaccggatcctctactcgtccgtcgtctaccctcacaactacggcttcgtgccccggacgctctgcgaggacaacgaccccatggacgtcctcgtgctcatgcaggaacccgtccttcccggcgccttcctccgcgccagggccatcggcctcatgcctatgatagatcagggagagaaggacgacaagatcatcgccgtctgcgccgacgaccccgagtaccgccactacaacgacatcagcgagctctcccctcaccgcctccaggagatccgccgcttcttcgaagactacaagaagaacgagaacaaggaggtggccgtcaacgacttcctgcccgccgccgctgcccgcgaagccatccagtactccatggacctgtacggccagtacatcatgcagaccctgcggcggtagagcgtgtcctaccagatcccatgcgagctgagctgacgcaagagcacagatcgacagaatccttgtggtctcgtctcatgcatggatagccaggtcacatggcttgtcgacgaccatgcatctcttcttcccagcgattttagcctgtatcttcccttatttatagtcttttgggtttggtggaatctgtccacagtgtggtttgatctatgtactcctcttctacatttctaccagaacgaatcgatgagattaataataatgttactactaccctgttgttttgtcgacctacttgtggcctgcacatctgcatactgctgctgttggtcacggagtttctgctttaaagttgggctgtcgtgcaacttgggatgtgctagctgttagggtactctaccttctcgaatatttatcgtcaggatatttatcatccggtagtttatttttaaactaatcagccacaaataaaaaaaagaacggagaaa

SEQ ID NO: 146658 - DNA, 1679 bp, Zea Mays
gtttccaacgccagcgcggcaccgcatcggcaccgagacccacgtgcagcctacgcctcagtcacgtcgaccaggcccccacccacacctcccccaccaccaccacaccacgcactggcctccggcgctcgctcgctcgctcccctgtcccctctggcctcctctgctctctctctctatatatatgcgcgcgggccgcggcaatgtttgccccatccgaccagcgtttactcctaactagtttgccgatcgagcccgggcgacgtgagatacgagcggcgtcgaccggcgccggcgagcctccgcagccgcagccgcccgatctgggttttctttcgtagcggtagcggaagatgagccaggaccaggagaacggaggcaccaacgggcagcacgccgccgacgtgatggaggtggagccgaagcgccgggcgccgcggctgaacgagcgcatcctgtcgtcgctgtcgcggaggtccgtcgccgcgcacccctggcacgacctcgagatcggtcctgaagctccggccgtcttcaacgtcgtaagtatctgacgaatcccattccccagacccctcaccccagcaagcaagcaagcaagcagccaaagttgttctcgatcgacatgtgtgaatatggagcgtgtctgacgatccttccggtgcgcgtccgtccgtccgttacgtacgtggtgccgacgagcaggtcgtggagatcaccaaggggagcaaggtgaagtacgagctggacaagaagacggggctcatcaaggtggaccggatcctctactcgtccgtcgtctaccctcacaactacggcttcgtgccccggacgctctgcgaggacaacgaccccatggacgtcctcgtgctcatgcaggaacccgtccttcccggcgccttcctccgcgccagggccatcggcctcatgcctatgatagatcagggagagaaggacgacaagatcatcgccgtctgcgccgacgaccccgagtaccgccactacaacgacatcagcgagctctcccctcaccgcctccaggagatccgccgcttcttcgaagactacaagaagaacgagaacaaggaggtggccgtcaacgacttcctgcccgccgccgctgcccgcgaagccatccagtactccatggacctgtacggccagtacatcatgcagaccctgcggcggtagagcgtgtcctaccagatcccatgcgagctgagctgacgcaagagcacagatcgacagaatccttgtggtctcgtctcatgcatggatagccaggtcacatggcttgtcgacgaccatgcatctcttcttcccagcgattttagcctgtatcttcccttatttatagtcttttgggtttggtggaatctgtccacagtgtggtttgatctatgtactcctcttctacatttctaccagaacgaatcgatgagattaataataatgttactactaccctgttgttttgtcgacctacttgtggcctgcacatctgcatactgctgctgttggtcacggagtttctgctttaaagttgggctgtcgtgcaacttgggatgtgctagctgttagggtactctaccttctcgaatatttatcgtcaggatatttatcatccggtagtttatttttaaactaatcagccacaaataaaaaaaagaacggagaaa

SEQ ID NO: 146659 - DNA, 1995 bp, Zea Mays
atgaataaagacatccttgtagcagccgatgaccacgaaggtggtctctgcctgcccaaatcaagcgctcgcctgactcaggagtcaggagtcgggtacaacaaggcgtcatcactatccttttctgctgaatccagaagacaaatacactactgccgtgcccccctcccttctctctctcttcgccgcagcgtcagccgacggcaaaaccctagatctctctccctcttaaaccctctcaacaagtgcgggaggatgtcagagccgtccaaggtaatccacatccgcaacgtcgggcacgagattgccgagtctgatctccttcagctgctgcagccgttcggcatggtctccaagatcgtcatgttgcgtgccaagaaccaagctcttctgcagatggaagacctccatgcttccgtgagcgcgctgcaatattacacttctgttcaacctagcataaggggaaggaatgtatacatgcagttctcatctcaccaagagcttaccactgaccagagctctcatggaaggaattctgatcaggggtccgaacccaaccgaatacttttagttactatccaccatatgatctatcctataacagtggagattctacatcaagtattcaaagcttatggatttgtggagaagattgtcacatttcaaaagtcagctggttttcaagctcttattcagtatcactcgcgccaagaagctgtggaagcatttggttctttgcatggaaggaacatatacgatggttgctgccaactagatattcaatattcaaatctcagtgaactgcaagtccactacaacaacgaccgatctagagatttcacaaatccatcgttgcctacagaacaacgtcctagggcctctcagcaaggttatcttgacccagctaatctctatgccttccaacaagctggagcttcatatgcacagatggggagggttgcaatgattgcggctgcatttggtggaactttacctcatggagtgactggtaccaatgaacggtgcacactcatcgtcagtaatctgaatactgataaaattgatgaggataagcttttcaatctgttttccttgtatggaaacatagtacgaatcaagatactgcgtaacaaaccagatcatgcacttgttgagatggctgatgggttgcaggcagagctagctgtgcattatttgaaggggtctatactatttgggaagaaactggaagttaactactcaaagtatcctaacatcacacctgctcctgacgcccacgactacttaaactcaagcataaaccggttcaacagcaacgtggtcaagaactaccgacattgctgctctccaacgaagatgatccacatttctgccctccctcaagatatctctgaggaagcaatcctgaaccatgtgtctgagcacggcactgttctcaacacgaagctattcgaggtgaatggcaagaggcaggctctcattttgttcaagagcgaagaggaggctaccgaggccctcgtgtcaaagcatgccagcacgctcgagggtaacacgatccggatctctttctcccagatgcagagtatataagccacctcaagggaaagcccctgccgtcctcactcgccccacttcgagctctatttaggaagcatttcagactaagatgtgaatcctgtgcaccattctccaagactgatgctgtctgagctgtacctcccctgaccttgttttttttttcacgcaacactggactttcaccaaaaggtttgtgtttctttccaaatcctgttggttaggatatcatttactccttaatcttcatgtcctgacattctaagttggaaggcctgttaattgcgtgtgaattatattatccttttgcctgtttggcatgtttaatgtaccctctagtgcagctgaaacttacctgcaactgcgattgcgattgacttattatgagcaattgcgatggtaggctaggtgttacaagag

SEQ ID NO: 146660 - DNA, 1996 bp, Zea Mays
atgaataaagacatccttgtagcagccgatgaccacgaaggtggtctctgcctgcccaaatcaagcgctcgcctgactcaggagtcaggagtcgggtacaacaaggcgtcatcactatccttttctgctgaatccagaagacaaatacactactgccgtgcccccctcccttctctctctcttcgccgcagcgtcagccgacggcaaaaccctagatctctctccctcttaaaccctctcaacaagtgcgggaggatgtcagagccgtccaaggtaatccacatccgcaacgtcgggcacgagattgccgagtctgatctccttcagctgctgcagccgttcggcatggtctccaagatcgtcatgttgcgtgccaagaaccaagctcttctgcagatggaagacctccatgcttccgtgagcgcgctgcaatattacacttctgttcaacctagcataaggggaaggaatgtatacatgcagttctcatctcaccaagagcttaccactgaccagagctctcatggaaggaattctgatcaggggtccgaacccaaccgaatacttttagttactatccaccatatgatctatcctataacagtggagattctacatcaagtattcaaagcttatggatttgtggagaagattgtcacatttcaaaagtcagctggttttcaagctcttattcagtatcactcgcgccaagaagctgtggaagcatttggttctttgcatggaaggaacatatacgatggttgctgccaactagatattcaatattcaaatctcagtgaactgcaagtccactacaacaacgaccgatctagagatttcacaaatccatcgttgcctacagaacaacgtcctagggcctctcagcaaggttatcttgacccagctaatctctatgccttccaacaagctggagcttttgcaataccagatggggagggttgcaatgattgcggctgcatttggtggaactttacctcatggagtgactggtaccaatgaacggtgcacactcatcgtcagtaatctgaatactgataaaattgatgaggataagcttttcaatctgttttccttgtatggaaacatagtacgaatcaagatactgcgtaacaaaccagatcatgcacttgttgagatggctgatgggttgcaggcagagctagctgtgcattatttgaaggggtctatactatttgggaagaaactggaagttaactactcaaagtatcctaacatcacacctgctcctgacgcccacgactacttaaactcaagcataaaccggttcaacagcaacgtggtcaagaactaccgacattgctgctctccaacgaagatgatccacatttctgccctccctcaagatatctctgaggaagcaatcctgaaccatgtgtctgagcacggcactgttctcaacacgaagctattcgaggtgaatggcaagaggcaggctctcattttgttcaagagcgaagaggaggctaccgaggccctcgtgtcaaagcatgccagcacgctcgagggtaacacgatccggatctctttctcccagatgcagagtatataagccacctcaagggaaagcccctgccgtcctcactcgccccacttcgagctctatttaggaagcatttcagactaagatgtgaatcctgtgcaccattctccaagactgatgctgtctgagctgtacctcccctgaccttgttttttttttcacgcaacactggactttcaccaaaaggtttgtgtttctttccaaatcctgttggttaggatatcatttactccttaatcttcatgtcctgacattctaagttggaaggcctgttaattgcgtgtgaattatattatccttttgcctgtttggcatgtttaatgtaccctctagtgcagctgaaacttacctgcaactgcgattgcgattgacttattatgagcaattgcgatggtaggctaggtgttacaagag

SEQ ID NO: 146661 - DNA, 204 bp, Zea Mays
atgcatgcctcatacagtcatactgtcctcactctgtccaaacggacgttctggctcttccgaggtgttggttccagtgacatgatcacctgcggcatagtcattcctcctgaaacaattatttctatgccttcacgaatagacaaattgggccttataatttcggcggagtttaccaaaaagatgtcaccaatatataaatga

SEQ ID NO: 146662 - DNA, 260 bp, Zea Mays
gtgacagattataacaatgcatgctacgccccatcaactttatctcatgcagaagcaaggcgtaaacgtaagcgagtgttacatcagcgaaaactagcatcagcaggtaagacaatgaacacacctttttccccaatagttttatccaatattgaggaatgagtacaactgtaccaggatccagcatgccctctcatcatactcccacattgcaatgcggacacttcgatccagatttcgtaaaaacgatccaaggtaaa

SEQ ID NO: 146663 - DNA, 2040 bp, Zea Mays
ctcatcactactagtgatcagaccagtgagctagcgactgtaccatgcagcagctgtaggagagcctggtggtaggtaggataggagtagcgccagccgccaagtgcgcgtccgggctggctgcttcggcgagcaggagggagccgcaccgccgggctcccgcaatgtcgcctcctccgcccccgccgctgctgcgcaacgagctgtcgcgcaggacggcggtgctgggcctgcgcctgtgggtgctggtgggcatcgccgtcggggccgccttcgtgctgctcctcgtgctcatctccctccacctcgccgcggcgcggcggaggcggcccaggaagggcgtcgcgcacgcgcccgcgcacgcgccggcgggggcgccgccgctgtccccgtccaccatcccgcccgtgtccaaggagatccaggaggtggccgtccacgtcggctcgctccgccactacctcgagacggggcacgcgttcctcaaggacggcggcggcggcgacggtgagtccgtggcgtacgggtcgcagcgcgtccacatcgaggccggcaagggccagcgcatggtcgcggcggcgtccgacgcgctgtcggcggccgtgggccccgaggtgtcgcacctcggctggggccactggtacacgctgcgggagctggaggaggccaccgccgcgttcgcccccgagcacgtcgtcggcgagggcgggtacggcatcgtctaccgcggcgtcctcgccgacggctaccaggtcgccgtcaagaacctcctcaacaacaggggacaagccgagcgggagttcagggtggaggtggaggccatcggccgcgtccggcacaagaatctggtccggctactgggctactgcgccgagggcgcccaacggatacttgtgtacgagtacgtggacaacggcaacctcgagcagtggctgcacggcgacgtcggggcagtgagcccgctcacctgggacgtccggatgaacatcgtgctcggcatggccaaagggatcacgtacctgcacgaggggctggaacccaaggtggtgcacagggacatcaagtcgagcaacatcctgctggacaggaggtggaacccgaaggtctcggacttcggcctcgccaagctcctgggggcggacagcaactacgtcaccaccagagtgatgggaacgtttggctacgtggcgccagagtacgctagcaccggcatgctgaacgagaggagcgacgtgtacagcttcgggatcctgatcatggagatcatctccggccgaagccccgtcgactacgccaggcctgccggagaggtaaaccttgtagagtggctcaagaacaaggtgaccaacagggactacgaggccatcgtggacccgaagctgccggagaagccgtcctccaaggctctcaagaaggcgctcctggtcgcgctgaggtgcgtggatcccgactcgcagaaacggcccaagatggggcacgtaatccacatgctcgaagtcgacgacttcccgtatcgagaggaccgtcgaactcttcggccgggcaacggcagccccctggagaaggcgaggaatccggcggcggggtcatgcgacggcagcagctgctacgggggcgacacgaccaccgcgagcacgccgtccagactagtgcaggacatgtagtagtgatgtgtttgtagccagctgctgctggccttctgagctctgcctgcgggctgcggggcaacatggagatggacatgctgcaactctgctccgtcgttaattaaaggttcccttcctaggtgttgattttggactcaacagtgacttgacgtaagttttgccgcccgatggccaactgtttgtatagggaactgctgctcttcatctcaggccctaagtttgactgttctttgattcgcgtcatgatgtaaaaataaaagcgtgcgtctgtattggtcagctcctacagtcttcagacagaagtgctagaccaaggattgatttttgaaccatcgtagaatagtttcgttaaatcgtctccaccagtggagct

SEQ ID NO: 146664 - DNA, 2629 bp, Zea Mays
accacatcttacgtgccgtgccccccaatcgttaaatagccgcctgtgcgtgcgtacgtgcacgccgtcatagcgccgcacaaccttgtgccggagtaatataatggcgtccattgtagccacgctccgttgcatggcgtggccgtggctggcgtttgcgtgcctcgtcgccctcgcgacgccgcgcgcgtcggctgatcagacgtccccggcggcggaggcggaggcgtacattgtgcacatggacaagtcggccatgccgcgcgcgttctcgagccacgagcgctggtacgagtccgccctggccgccgccgccccgggcgccgacgcgtactacgtctacgaccacgcgatgcacgggttcgccgcgcggctgcgcgccgacgagctggacgcgctcaggcgctcccgcgggttcctgacgtgctaccccgacgaccccaaggtggtgcggcgcgacacgacgcacacgcccgagttccttggcgtcagcgcggcgggggccggtggcgggggcgggctgtgggaggcggccggctacggtgacggcgtcatcgtgggcgtcgtggacaccggcgtgtggcccgagagcgccagcttccgcgacgacgacgggctgggccccgtgccctcgcggtggaagggcctctgcgagtccggcacggccttcgacggcgccagggcgtgcaaccggaagctgatcggcgcgcgcaagttcaacaggggcctaatcgctaacgagaacgtcaccatcgccgtcaactccccgcgcgacaccgagggccacggcacgcacacctcgtccacggccgccggcgcgccggtgcccgccgcgtccttctttggctacgcaccgggcgccgcgcgcggcatggcgccccgcgcgagggtcgccatgtacaaggccctctgggacgagggcgcgtacccgtccgacatactcgccgccatcgaccaggccatcgccgacggcgtcgacgtcatctccctctccctcggtttcgaccgccgcccgctgtacaaggaccccatcgccgtcggcgcgttcgccgcgatgcagcggggcgtgttcgtgtccacctccgcgggcaacgaaggccccgacctcggcttcctccacaatggcacgccgtggacgctcaccgtcgcgtcgggcacggtcgaccgggacttctccggcgtcgtcaccctcggcgacggcaccaccgtcatcggcgggtcgctgtacccgggcagcccggtcgacctcgcggccaccacgctcgtcttcctggacgcgtgcgacgactccacgttgctctccaagaaccgtgacaaggtcgtcctttgcgacgccaccgcctccctgggcgacgccgtttacgaactgcaactggcccaagtgcgcgcgggcttgttcctgtccaatgactctttcagcatgctctacgagcagttctcgttcccgggcgtcatcctgagcccgcaagacgggcccctgctgctccagtacatacggagcagccgcgcgcccaaggcggcgataaagttcgaggtcaccatcctgggaacgaagccggcgccgatggtggcggcgtactcgtcgcgcggcccgtcggggagctgcccgacggttctcaagccagacctgatggcgccgggctcgcagatactggcctcgtgggcggagaacatcagcgtggccttcgtcgggtcaaggcagctgtacaacaagttcaacatcatctccggcacgtccatggcgtgcccacacgcgtccggggtggccgcactgctcaaggccgtgcacccggagtggagcccggcgatgctccggtcggcgatgatgacgacggccagcgcgctggacaacacgggggcgtccatcaaggacatgggaaaccgcaaccaccccgcgtcgccgctggcgatgggctcgggccacatcgacccggcacgcgccgtggacccgggcctggtctacgacgccgcgccggaggactacgtcaagctcatgtgcgccatgaactacactgctgcacagatcaggaccgtcgtcgcgcagtcgccgtcgtcgtcgtcgtacgccgtggactgcaccggcgcgtccctcgacctcaactacccgtcgttcatagcgttcttcgaccccaatggcggcagcgtcgagcggacgttcactaggaccgtgaccaacgtcggcgacgggcctgcgagctacagcgttaaagttttgggcttgagcggcttgacggtgatcgtgagtccggacaagttggccttcggcggcaagaacgagaagcagaagtacacgcttgtgatccgggggaagatgacgaacaagagcggcgatgtgttgcatggttcgttgacatgggtggacgacgcgggcaagtataccgtgagaagtccgatcgtcgcaaccacagtgagctcagatcggttttagagtcctggcaactaaaacctagattgacaacaactgagcatacagaactgttcagtatgaaaattgctttgcataaaacagtacatcgtttatgagcttcatgccaagctagagactatagtcgttggccttttaatcatcatatatacgtccatgtcatgattgtttaactgtattcaaataactgtacgtgcttctttc

SEQ ID NO: 146665 - DNA, 1714 bp, Zea Mays
cgccctcgcgacgccgcgcgcgtcggctgatcagacgtccccggcggcggaggcggaggcgtacattgtgcacatggacaagtcggccatgccgcgcgcgttctcgagccacgagcgctggtacgagtccgccctggccgccgccgccccgggcgccgacgcgtactacgtctacgaccacgcgatgcacgcgttcgccgcgatgcagcggggcgtgttcgtgtccacctccgcgggcaacgaaggccccgacctcggcttcctccacaatggcacgccgtggacgctcaccgtcgcgtcgggcacggtcgaccgggacttctccggcgtcgtcaccctcggcgacggcaccaccgtcatcggcgggtcgctgtacccgggcagcccggtcgacctcgcggccaccacgctcgtcttcctggacgcgtgcgacgactccacgttgctctccaagaaccgtgacaaggtcgtcctttgcgacgccaccgcctccctgggcgacgccgtttacgaactgcaactggcccaagtgcgcgcgggcttgttcctgtccaatgactctttcagcatgctctacgagcagttctcgttcccgggcgtcatcctgagcccgcaagacgggcccctgctgctccagtacatacggagcagccgcgcgcccaaggcggcgataaagttcgaggtcaccatcctgggaacgaagccggcgccgatggtggcggcgtactcgtcgcgcggcccgtcggggagctgcccgacggttctcaagccagacctgatggcgccgggctcgcagatactggcctcgtgggcggagaacatcagcgtggccttcgtcgggtcaaggcagctgtacaacaagttcaacatcatctccggcacgtccatggcgtgcccacacgcgtccggggtggccgcactgctcaaggccgtgcacccggagtggagcccggcgatgctccggtcggcgatgatgacgacggccagcgcgctggacaacacgggggcgtccatcaaggacatgggaaaccgcaaccaccccgcgtcgccgctggcgatgggctcgggccacatcgacccggcacgcgccgtggacccgggcctggtctacgacgccgcgccggaggactacgtcaagctcatgtgcgccatgaactacactgctgcacagatcaggaccgtcgtcgcgcagtcgccgtcgtcgtcgtcgtacgccgtggactgcaccggcgcgtccctcgacctcaactacccgtcgttcatagcgttcttcgaccccaatggcggcagcgtcgagcggacgttcactaggaccgtgaccaacgtcggcgacgggcctgcgagctacagcgttaaagttttgggcttgagcggcttgacggtgatcgtgagtccggacaagttggccttcggcggcaagaacgagaagcagaagtacacgcttgtgatccgggggaagatgacgaacaagagcggcgatgtgttgcatggttcgttgacatgggtggacgacgcgggcaagtataccgtgagaagtccgatcgtcgcaaccacagtgagctcagatcggttttagagtcctggcaactaaaacctagattgacaacaactgagcatacagaactgttcagtatgaaaattgctttgcataaaacagtacatcgtttatgagcttcatgccaagctagagactatagtcgttggccttttaatc

SEQ ID NO: 146666 - DNA, 694 bp, Zea Mays
atctcgaactgtagggaattcgtgatctcaattccgtgctctcgagaaagttcatcccctttcacctctgtcccgagagccaatccgcctacagatcaagccttacaaaaccccacttaccacgataccacctcgaccctaaccggctaatcgacctgagatcgatctcgagtgacgaaattgacgacaggaagtaagatccggcaagatgttcttcttcttcgtaggcggcgtagagcagggggccgggcgggtgctcaaggaagcggcggggcggtgcctccggtgcggcggcgcggcggacctggtggagacggagaaggtcctcaagctcttcttcgtccccgtctggcggtggccggggaaggaccccgcgtacctctgtcgcgagtgcggcctcctcgcaccgggctccctcggcgcggagtcgggaccctcgctgctgctccgggaggcaaggtgcggcgcgtgcagccgcgctgtcgatccgcagttccggttctgccccttctgcggctccgccctctgaagtgattgccggtggcgaactggcgatggcgactacatagcagaggtgacgccttttgccaatttggttttactagtttgtacactcaggttttactcgtgtaaaaactatgtatattatcgcaaaaaataaaggaaaaacaccaccaccatttcatttttttgt

SEQ ID NO: 146667 - DNA, 281 bp, Zea Mays
ggttgcagagattaattcagtaactgccaccaatattgagcttttatttcttgtttgtgtatttaaaaaggctaaattgtcattctcggaaggaataattcataaaaaaaatcaagtatgtgtttttcttgtatatgtgttttccttgtgacatgttgttggtgaggagcttgaagttttaactcgaatggagtcaatctgtttagcttagctcttcaggaactcctaaacgtttctcaactggaaggattaattaatatccagaatttgatgtggttgtg

SEQ ID NO: 146668 - DNA, 1795 bp, Zea Mays
cccaccttccgtccttcccagcaccgccgcggaccataatccccttcgtcttccccagcacactgcacaccttcactcccgcatcctaagctatggcggcgctgagctggatccggctccggccgccccgtgctgccattctcattttgctgctcctcgccctcaatatctccccctcctttgccgctaacttcgagggcttcgactccgacgaccttcctgtcgcggccggcggcctagatgctgacgatgacgagggcctcgacggcgtctacctcccgccccctccgcccatctccctctccacctccgctccttcacctcccgtcacgacgacaccggcgccgaaccctaacccggctacgcctacgcctcgggatcccaccccggcgctcgacctctgggacgaagacgagttcgagggcatccccgtgcccgaagcgatcccctctgacgactccgccgcgccggccgaggtcgacccatcagatccctccgcggaggcaccggtggaggtggcgccggctgcgaagaggagcccggctgagctcctccgcgcgttctccttcgagatcgcgtgcgccagcttcctggtctgttacgtgctcaactacttcactgggaagcggcaaaacgagaacatcgcgctggcctgggccaccaagttcgccaccagggactctatcttcgacaagaacttcagccttcttggcacaggcgacggcaaggacacgccactcctgctgaaggaggggcaggacgtgttcaagttctatgcaagtgggagacggttctgccaggggttgcttgccaccatggagatgcgagcgcggtacgatctgctgtcaaagttcgtcgagttggtcttccctaggaaggacaccatcacattcgaagtgataatgaacgaagaggccatggaccatgtggttctggctgtagccaggaagaaggcggccaagacaatgcacaaagaagagagggatctgcaaaggtttgccagtgttctcacttctgcacctgcggggaggaagtgggtgtcagatgagcttgctgtggtggctgagtcaaaggaggttgctggggatatgatcactgaagctgtgcttgatcaggttcttggtgagaagacgttcgagaaatttggaaagtggttcatctcgcttcatttttcggaccagttggcaggatcctacaagaaggtccttacattcaagtttgtattgccagatgcaagcaacatgtcagagatgacaagattggtttctcttgtgccatactacattgatttggttgggcgttataagctcagctctcatgctcgctctaaaactgatggagctagaacgaaggctgctcaggaagcttttagggaactacagagtgccaggcaggaggccctgcaaaggaaaaaggctgaaaagaagaaactcatggaggagacagatgccaaactaagcgctgaggcactccggaggaaagatgaaaaggaaagggctaggcaactgaagaaatctgggcccaaagtgaagatgctccgctcttgaatctaccacgggttggcttttgctattcaccttttgagtgtctgctagactcatttacattccaattttgggccacgatgtttcccttgagaatgagcaaaaaggatcgaggagaaaagaatcctcactggcgttttggcttttattggatgtgtgcccgaaatatctgtagtcacattcgcccacgtaacttcgaaaaaattgttatgcataagctttgctgtatgagaaatagaacttgcatgatt

SEQ ID NO: 146669 - DNA, 1832 bp, Zea Mays
gcgaaccaaacaagtttttgacaccaacccagcagcagcaggcgcagccaggagcggaggagccagcacttgctttccagcggcgatccccacctaccacccccaccttcccgcttaccaagcggagcagtataacgcaggggcttggtccagcgacttctcagaaacgcgccaccagccaacgagcaagggccgcagccggagctccaatggcctccttctcctccctctctgcctcctcctccacctccaccccgtccttcaacctccccgcaaaaacctccgctggcacaggctccctgtcattccacagggcgagggagtcgcagaagtccagggccaggatggtgacggtgcgggcggaggcggttgacacgaccatcagcccgcgggtgaatgcgctcaggccgtccaagaccatggccatcaccgaccaggccacggcgctgcgacaggccggcgtgccagtcatcggactcgccgctggggagcccgacttcgacacgccagccgtgatcgccgaggctgggataaatgccatcagagatggggccacaagatacacgcctaatgctggaactctggagctgaggaaggctatctgcaaaaagcttgaggaggagaatggtctatcatactccgccgatcaggtgctagtaagcaatggagccaagcagtgcattacacaagcagtactcgctgtctgctcacctggcgatgaagttttgatacctgcaccatattgggtcagctaccctgagatggctagactggctggtgcaacgccagttattctccctacaagcatatcagacaattacctgctaaggccagagtcacttgcctcagtgatcaatgaaaattcaaggatcttgattctctgctctccatctaatccaacagggtctgtgtatcctaaggagttgcttgaggagattgctgctatagtcagaaagcaccctagactcctagttttatccgatgagatctatgagcatattatctatcaacctgctaaacacacaagctttgcttcattgcctggaatgtgggaaagaacgttaactgtgaatggattttctaaggcttttgctatgactggttggagacttggatacttagctgcccctaaacattttgtcgcggcctgtggaaagatccaaagccagtatacctctggagccagtagtatatcacagaaggcagggcttgcagctttgaacctaggttatgctggtggtgaagcagtatcaaccatggtgaaagcattccaggagcgtcgtgattaccttgtaagaagctttagggagctgccaggtgtcaagatatcggaacctcagggagccttctatttattcatcgacttcagctcgtactatgggtctgaggtggaaggttttggtaccatcaaggactctgagtccctctgtctgttcctgttggagaaggcacaggtaagaagttacttcaattttgggaacatcagtataagatacaagaacattatagtgcttattgttgattgcattataggttgcgcttgtccctggggatgcatttggcgatgacaagggtgttcgcatttcatatgctgcagctatgtcgacactgcaaactgcaatgggaaagataaaagaagcgatggctctgctcaggccccctgttgccgtttaacaaaaccaacgtatcgctaatcagttgtggaccaaaggcttctgcaatgcactatcatattaaatacattcagttgacatgatctatcttcttccctttatggaaaaaaatgttgctgctgtcatttggctttggtttgtatctgaagatttatatgt

SEQ ID NO: 146670 - DNA, 1990 bp, Zea Mays
gcgaaccaaacaagtttttgacaccaacccagcagcagcaggcgcagccaggagcggaggagccagcacttgctttccagcggcgatccccacctaccacccccaccttcccgcttaccaagcggagcagtataacgcaggggcttggtccagcgacttctcagaaacgcgccaccagccaacgagcaagggccgcagccggagctccaatggcctccttctcctccctctctgcctcctcctccacctccaccccgtccttcaacctccccgcaaaaacctccgctggcacaggctccctgtcattccacagggcgagggagtcgcagaagtccagggccaggatggtgacggtgcgggcggaggcggttgacacgaccatcagcccgcgggtgaatgcgctcaggccgtccaagaccatggccatcaccgaccaggccacggcgctgcgacaggccggcgtgccagtcatcggactcgccgctggggagcccgacttcgacacgccagccgtgatcgccgaggctgggataaatgccatcagagatggggccacaagatacacgcctaatgctggaactctggagctgaggaaggctatctgcaaaaagcttgaggaggagaatggtctatcatactccgccgatcaggtgctagtaagcaatggagccaagcagtgcattacacaagcagtactcgctgtctgctcacctggcgatgaagttttgatacctgcaccatattgggtcagctaccctgagatggctagactggctggtgcaacgccagttattctccctacaagcatatcagacaattacctgctaaggccagagtcacttgcctcagtgatcaatgaaaattcaaggatcttgattctctgctctccatctaatccaacagggtctgtgtatcctaaggagttgcttgaggagattgctgctatagtcagaaagcaccctagactcctagttttatccgatgagatctatgagcatattatctatcaacctgctaaacacacaagctttgcttcattgcctggaatgtgggaaagaacgttaactgtgaatggattttctaaggcttttgctatgactggttggagacttggatacttagctgcccctaaacattttgtcgcggcctgtggaaagatccaaagccagtatacctctggagccagtagtatatcacagaaggcagggcttgcagctttgaacctaggttatgctggtggtgaagcagtatcaaccatggtgaaagcattccaggagcgtcgtgattaccttgtaagaagctttagggagctgccaggtgtcaagatatcggaacctcagggagccttctatttattcatcgacttcagctcgtactatgggtctgaggtggaaggttttggtaccatcaaggactctgagtccctctgtctgttcctgttggagaaggcacaggttgcgcttgtccctggggatgcatttggcgatgacaagggtgttcgcatttcatatgctgcagctatgtcgacactgcaaactgcaatgggaaagataaaagaagcgatggctctgctcaggccccctgttgccgtttaacaaaaccaacgtatcgctaatcagttgtggaccaaaggcttctgcaatgcactatcatattaaatacattcagttgacatgatctatcttcttccctttatggaaaaaaatgttgctgctgtcatttggctttggtttgtatctgaagatttatatgtacttgctataatatagatgaactgtgcaacgctttttttacctgcaagaatagaaatggtaaacatgactttattttgacaatttgagtcgtgaatgtttcatattatttgtggagttttttacttgtttgaagcgataaggaatttctcatgtagaagtgcgtccatttatgtagttcatatatcttattatggagaatacaagaaagaaaccatgaacataatctatgaaataaa

SEQ ID NO: 146671 - DNA, 85 bp, Zea Mays
ggtgttgcagctttatgttgggctatctggataaacccgaatgacttattgtttaacaaagaccccatggttacttatttgcagg

SEQ ID NO: 146672 - DNA, 2151 bp, Zea Mays
aattttacaaagcctccgccgccgctaccgaggcggcaatccactcccccccgccgtccaggttggttggtgggtttgaattcgagctcaacgagcgacggcttgcccctgccgtttctctgctcagcgtgccagagctagttcatctccagcatctccggccgttacttgctctgagccaacaacagtatcaaaagccccgacccccccatcctccggcgacgatgccttccggcgacgattccgaccccctgctggcgcccgccgacggcatacgcttcgcggcgctggactaccgcgaccaccccgccgaccgcggcgccaccggcggctggcggtcggcgctcttcatcatagcggtggagatctcggagcggttcacgttctatggcgtgtcgtcgaacctgatcaactacctcacgggcccgctcggagagggcaccgcggcggcggcggcggccatcaacacgtggaacggggtggcgcagctgctgccgctgctgggcggggccctcgcggacaagtggctcggccgctaccgcaccatcgtcgtcgcatcgcttctctatgtcatcggtgcaggcatgctggccttctcgaccttgctctcctccggcagcggccaccaatgcaccaccgccgggggccagacctgtgcgccgtccaccattaaggtgaccttcttctacgtctccctctacatcgtggccgtggcgcagggcggccacaagccgtgcgtccaggcgttcggcgccgaccagttcgatcagagcgaccccaaggagaccgtctccaggagctccttcttcaactggtggtacttcggcatgtgcgccggcaccgccgtcacgctcctgttcctcaactacgtgcaggacaacatcggatggggcctcggtttcggcattccgtgcgccgtcatggcagctgcgctcgccgtattccttctcggtacaaggaggtaccggtactacgtcactgccggggagcggggcctgttcgctcgtgccggcgaggcttttgttgagtggcggagcaggcgaaaggctcttcagcatggtgatcgacctgtagcagagggggcgccgggattcagcgctggtgtcgacgaggaggagcaggctgcagtcagccatgacgcaggcctcgtcaaggagaccaaggacatcctccgtctattcccgatatgggcgacgtgcctgctctacgcggtggcgttctcgcagtcgtcgacgttcttcacgaaacaggcggcgaccctggaccggcgcgtcgggcggcacttgcaggtaccaccggccgcgctgcagagcttcatcagcatcaccatcgtggtcttcatccccctctacgaccgcgtcctcgtgccggtggcgcgccggtactccggcaacccatccggcatcaccatgctgcagcgcatcgggacggggatgttcctctcgctcttgtccatggtgatcgcggcgctcgtcgagaagcaccggctccgcgtggcagtggacgctggcctcgtggacaagccaatggtccccctgccgatgagcctatggtggatggtgccgcagtacgtgctgttcggggccgccgacgtgtacaccatggtcgggctgcaggagttcttctacgatcaggtgcccgacaagctgcgcagcctcgggctggcactctaccttagcatcttcggcgtcggcagcttcatcagcagcacgctcgtgtcgatcatcgacagtgtgacgacggccaggggcgggagctggttctccaacaacctgaaccgtggccacgtggactacttctactggctactcgccgcgctcagcgccctcgagctcctcgcctatgtcttcttcgcggtgacatacaagtacaagaacaaagcaaccgtgcatgcaactgttgttggtcagtcgctttagttcaaaaatgaattagcggcaacaaatattcgagaatggagttagtacatcatcctacgacatagtataggtgatatgacacacaactaaatgtaaatggtaccttttctccgttagggtttgtggtccatacttatctttgattttgattcccatttgtatctgttgggacttgggagggtcaatgctatcattcaattcttaaggcaagggttcatccgtaatcagcaaa

SEQ ID NO: 146673 - DNA, 1353 bp, Zea Mays
cgaccttgctctcctccggcagcggccaccaatgcaccaccgccgggggccagacctgtgcgccgtccaccattaaggacaacatcggatggggcctcggtttcggcattccgtgcgccgtcatggcagctgcgctcgccgtattccttctcggtacaaggaggtaccggtactacgtcactgccggggagcggggcctgttcgctcgtgccggcgaggcttttgttgagtggcggagcaggcgaaaggctcttcagcatggtgatcgacctgtagcagagggggcgccgggattcagcgctggtgtcgacgaggaggagcaggctgcagtcagccatgacgcaggcctcgtcaaggagaccaaggacatcctccgtctattcccgatatgggcgacgtgcctgctctacgcggtggcgttctcgcagtcgtcgacgttcttcacgaaacaggcggcgaccctggaccggcgcgtcgggcggcacttgcaggtaccaccggccgcgctgcagagcttcatcagcatcaccatcgtggtcttcatccccctctacgaccgcgtcctcgtgccggtggcgcgccggtactccggcaacccatccggcatcaccatgctgcagcgcatcgggacggggatgttcctctcgctcttgtccatggtgatcgcggcgctcgtcgagaagcaccggctccgcgtggcagtggacgctggcctcgtggacaagccaatggtccccctgccgatgagcctatggtggatggtgccgcagtacgtgctgttcggggccgccgacgtgtacaccatggtcgggctgcaggagttcttctacgatcaggtgcccgacaagctgcgcagcctcgggctggcactctaccttagcatcttcggcgtcggcagcttcatcagcagcacgctcgtgtcgatcatcgacagtgtgacgacggccaggggcgggagctggttctccaacaacctgaaccgtggccacgtggactacttctactggctactcgccgcgctcagcgccctcgagctcctcgcctatgtcttcttcgcggtgacatacaagtacaagaacaaagcaaccgtgcatgcaactgttgttggtcagtcgctttagttcaaaaatgaattagcggcaacaaatattcgagaatggagttagtacatcatcctacgacatagtataggtgatatgacacacaactaaatgtaaatggtaccttttctccgttagggtttgtggtccatacttatctttgattttgattcccatttgtatctgttgggacttgggagggtcaatgctatcattcaattcttaaggcaagggttcatccgtaatcagcaaa

SEQ ID NO: 146674 - DNA, 3571 bp, Zea Mays
cttcccctgaccgccgccgtcaccgccgagcacacctctagtcagcttccactggagcacgccaccccgaattttctcccggagtcgttgccctcctctcctacccccgtacactaaagctggttcgcagatccatccggacttgatcggttccttcttttatttcttgcccatagagcccaaacattattggatggactctgtcacttgctgcgacggcggcaaggaattggaataggacgaggtggggatcacgggctgcgacggcggcaagaaattggaaaaggacggcgtggggatcagggtattcgtcttgggaaaggggatggggggtctctgctcgaaggtctcagctgtagacaagtcaccgagcgacaccgcgcttggccggaaccaggtcgccgatcatgagccaggggcgtcgttggagttggagaagccaccggtgtcccgagagtcagctgcgccggcaaagcggctggacgagcagctgcagtctttctcgttccttgagagcgtcgtccctggggttgcttttcatgccggggctaacacgggcggcgaagcggggtccaggacctcgccgcagctgaccaggtcgctgtcccagagggctggtgtgggcaaggcaaaagccggcgctgccaaggtttcagaagtgagctcaattttaggtagagctagcactgctgggcttgaaaaggcagtggaggttctagatacacttggcagtagcatgacaagtttaaattccagcagtggttttgtgtcaagttctgcagcaaagggaaacaaaatatccatgctggcttttgaggtggcaaatactatagttaaaggctctaatctgatgcgttctctatcggaacctagcataaagcatctgaaggaggtggtgcttcattcagaaggtgttgaaaaccttatatccaaagattttgatgaactgctcaagatggcatctgctgacaaaagggaagagttagaagtattcacaagagaggttgttcgctttggaaaccgttgcaaggatcctcaatggcataacttggaccgctactttgaaaaactggcatctgaacgaaccccacaaagttatctgaaagaaaaggcagaatcagtgatgcagaaactggtcacctgcgttcaaaatacagttgtaaggataccctgatttgtttagcttcaatggcttatttgctagcctatcttaacttgcttgagagtaaagttcatgttgtttccagtgacttattttcataatacacaatgcctatctgaacttgcatgagagtaaaagaattgtgttcatgttgtttccagtgacttatttacatcatacagaatgccattttggcttattctatactgcatcttgaaccaataaataatttaaagactatcgtggttgacagtcaataaaatatagtgctctctttgggctgctgacctgctgtagttgtcaacgtttcattttggttccatctggccgatttttttggttcctctgaagtttgtagccatcatgacatttactgccaattgcagtatgttcatgccagctatgctttgtacccccaccgtttcaaaatgtttgtcaacttgtaatgtggagtgacacagttaagttttgatcatcagtaggtgaagatgtttctagttttgccagatgaagttttaccattatattcttcttgaagctttcataatgtacaacttttctgttttgaaacaatacattacacaaaaactagtggtcaaaagtcataccaaatgttgtatacctatatttttctgaagtggctaggagcagtataattgtattattttaagtaatgaatccctacatcctagcaccattgatgaatttgtatgtttttgtcatctgccaatttggtcttcttattctggttattagtttcacattacttgtctattttgttttcctacttttttgcactcaggaattatatcatgaattgcatgctttggatagatttgagcatgattgtcgtcttaaacagaaagaacaggatggcttgagttcaagaggtcagtttcatcaacttcaaatacggaactaaataaatattatggctgtagcataaacaaattgtgtctcagattctgctcaatttccacaggcatttaagcagtatgatataaaagtgtctgcacttttctgaatgatacattgacatttacttctatatctcatcccactctgtgaatagagttagcttgaacttttgatgaattagagaccagtgattcctttgcaggagacaacctggatatactgaagcaggaattgaaggtccagagtaagcatgttaagagtctgaaaaagaaatcactttggtccaagaatttggaagaggtgatggtaaagcttgtagatattgtccacttcttatatttggagatatataatgccttcggtcgtcctgacagtgaagagccacaagaacctgccaaacaccataatagattgggaccagcaggccttgcattgcattatgctaatatcatcaatcagattgacaatcttgtttctcgatcatgtgcaatgcctccaaatgcaagggatacattatatcatagcttaccacctaccatcaaatctgctttccgttctaagctacaatcttttgaagtcaaggaagagcttacagcttctaggatcaaagcagaaatggaaaagactttgcgttggcttgtcccttttgctagtaacacaaatagggcacaccatggcttcggttgggttggagagtgggcaaatacaggatctgaattaaactgcaagatatcagggcagatggacatgtcccgaatggagaccttgtatcatgctgacaaggagaagaccgaagcacttatcctggagctagtcgtgtggcttcatcatcttatcagcaaatcaggaaacgccagtggaggtgtaaggtctcccatcaaatctccagtcagctcaccaacacaaaagggtgctgcaatcacactgttgtcgggcaaaacaaacaatttgccaccgattctcacccaagaggaccaggatatgctaaggggtgttaagtacaggaaatttgttccaggaataagcaaaagccaagagtttgacacaaagtcaagtcacagcaaacatagtaggttgagcaagagcaacagccactctccggccagtggcagcagaaaagacttgctcccagttaggaggtcttccatgcttccagttattgacttcgagattgacaggaccaaggctttggatctaattgacaggcttgacaacctaaaagtacaatgagcatgaagcttattgtggtcatccgcagttcttgaaaccccagccgcgatataaacagttatcgtgtatcagcagcaagaccgcccgttaggctctgcggttacaagataacaaacagtatgataagttggtgtctcagatcctgtaccgaatagaataggaaaaaatgttgtaaaaattacctgtcgtttctacctgtacaagaaatggaaagtgcagtttttaagaaaaaaaggagggtgaaagggatctaggtgttct

SEQ ID NO: 146675 - DNA, 2878 bp, Zea Mays
cttcccctgaccgccgccgtcaccgccgagcacacctctagtcagcttccactggagcacgccaccccgaattttctcccggagtcgttgccctcctctcctacccccgtacactaaagctggttcgcagatccatccggacttgatcggttccttcttttatttcttgcccatagagcccaaacattattggatggactctgtcacttgctgcgacggcggcaaggaattggaataggacgaggtggggatcacgggctgcgacggcggcaagaaattggaaaaggacggcgtggggatcagggtattcgtcttgggaaaggggatggggggtctctgctcgaaggtctcagctgtagacaagtcaccgagcgacaccgcgcttggccggaaccaggtcgccgatcatgagccaggggcgtcgttggagttggagaagccaccggtgtcccgagagtcagctgcgccggcaaagcggctggacgagcagctgcagtctttctcgttccttgagagcgtcgtccctggggttgcttttcatgccggggctaacacgggcggcgaagcggggtccaggacctcgccgcagctgaccaggtcgctgtcccagagggctggtgtgggcaaggcaaaagccggcgctgccaaggtttcagaagtgagctcaattttaggtagagctagcactgctgggcttgaaaaggcagtggaggttctagatacacttggcagtagcatgacaagtttaaattccagcagtggttttgtgtcaagttctgcagcaaagggaaacaaaatatccatgctggcttttgaggtggcaaatactatagttaaaggctctaatctgatgcgttctctatcggaacctagcataaagcatctgaaggaggtggtgcttcattcagaaggtgttgaaaaccttatatccaaagattttgatgaactgctcaagatggcatctgctgacaaaagggaagagttagaagtattcacaagagaggttgttcgctttggaaaccgttgcaaggatcctcaatggcataacttggaccgctactttgaaaaactggcatctgaacgaaccccacaaagttatctgaaagaaaaggcagaatcagtgatgcagaaactggtcacctgcgttcaaaatacagttgaattatatcatgaattgcatgctttggatagatttgagcatgattgtcgtcttaaacagaaagaacaggatggcttgagttcaagaggagacaacctggatatactgaagcaggaattgaaggtccagagtaagcatgttaagagtctgaaaaagaaatcactttggtccaagaatttggaagaggtgatggtaaagcttgtagatattgtccacttcttatatttggagatatataatgccttcggtcgtcctgacagtgaagagccacaagaacctgccaaacaccataatagattgggaccagcaggccttgcattgcattatgctaatatcatcaatcagattgacaatcttgtttctcgatcatgtgcaatgcctccaaatgcaagggatacattatatcatagcttaccacctaccatcaaatctgctttccgttctaagctacaatcttttgaagtcaaggaagaggtatgtctggttggagtctcaaatttgctaattcctattattatgaatgcacagtaggaatctaaataccatgctgtgcacttgaacataattctgctaaatgaatgcagcttacagcttctaggatcaaagcagaaatggaaaagactttgcgttggcttgtcccttttgctagtaacacaaatagggcacaccatggcttcggttgggttggagagtgggcaaatacaggatctgaattaaactgcaagatatcagggcagatggacatgtcccgaatggagaccttgtatcatgctgacaaggagaagaccgaagcacttatcctggagctagtcgtgtggcttcatcatcttatcagcaaatcaggaaacgccagtggaggtgtaaggtctcccatcaaatctccagtcagctcaccaacacaaaagggtgctgcaatcacactgttgtcgggcaaaacaaacaatttgccaccgattctcacccaagaggaccaggatatgctaaggggtgttaagtacaggaaatttgttccaggaataagcaaaagccaagagtttgacacaaagtcaagtcacagcaaacatagtaggttgagcaagagcaacagccactctccggccagtggcagcagaaaagacttgctcccagttaggaggtcttccatgcttccagttattgacttcgagattgacaggaccaaggctttggatctaattgacaggcttgacaacctaaaagtacaatgagcatgaagcttattgtggtcatccgcagttcttgaaaccccagccgcgatataaacagttatcgtgtatcagcagcaagaccgcccgttaggctctgcggttacaagataacaaacagtatgataagttggtgtctcagatcctgtaccgaatagaataggaaaaaatgttgtaaaaattacctgtcgtttctacctgtacaagaaatggaaagtgcagtttttaagaaaaaaaggagggtgaaagggatctaggtgttctatgttttcatggccattagactggaatggtgtgtatgaaccatagtactcccgtcccaaaatattagtcgttttagctcttgatttttatatatctatattcaaatggatgatgaatctagataaatatataaaacaaatacattgattattgtatgaatcaactaaaaagataaataaattttattttgagatgaagggagtatctttttttgcagaaaaaaataaaagca

SEQ ID NO: 146676 - DNA, 1050 bp, Zea Mays
actccttcaatactaaggaaaagaaaacgtgataaagcaacacctgcttcgggtaaatgagttaaagacaggtggagtaagcaatgatagcttttacactcctaatggaacgaatgggaaggatactacttctccaaggtcgtttaaaaactgctgcatcttttttgtcgctgggttctgttaatgggttattgacttctgcaaggagctttgattcttcaccaccctatcagaagaaaaggtcaaaaagaatggccatcatcaaatcagttgagaaacagctagatttttcagcagatggactggatacttctggttctgagattatgaactctccttgccataattcccaaggtgcaaattctaacaggatgtagcaactgatttgattgcaatctaattccataatgtgcaggaattgatctcaatcttatgaagccatacaggacttagaatcccgtcctaactaaccagcctcatgcaaatgtcctggttcatgccaaaatccaaatcaaacaccttcagtggggacaagaccttaccgacagttaccctgtcatctcatgtaatcaggggtgtacaaaatactgtctaaattgaaagcacattccatagaagattacattgtttgctgcattttgtgaacttatagctagaagttcagattatagaaacccacagctgtgtacaaagaagaaaaacatagctttagaaacatatagagcttcccagtggaatgtcaaattgttcttagtttcttttattgcgcgcgtcccacatgttgcgaaacagcaagggtctgctcattttgtaacaataaagcctgatttgtggcctttcttgggatgctataatagtaaggaagaataatgacccacggtgcttgacgcccacttgcgttgtaggcatggaacgggggcacctagcttgttctacaacgctgtatattttgaattggtgcgactttgttgttcttttttcctcccccttatatcttatgaaacaagatcctttttgatctgtgctctgaaataaaataattcaattatg

SEQ ID NO: 146677 - DNA, 2253 bp, Zea Mays
acagctggacctggacagcccacagctcacaagggatgaccaaaacccccaacccaaaaaccctagcgaccagccacattgataacctccgccgccgccgacgtcgatgcccaggctctccctcaccgtcactgacgccgccgctgccatgccctttgcgctccggcttggtggttccccagcgctccgcccgggcccgcggtccccgtcgtggctgcgctttggcggcatggccggggcgcggagggcgctgttctgctccgccgaggacgccaggcggtgtggctcggacgactacgcggaggcggaggagggtcggaggggaggcgggagccgcgtgccatcggagaggaggataaggggcgggaatgcggccgccgcggtggggacgagcgtcgagctactggggattcctggtgtggggccgcgcaaccttaggaagctcgtggacaatggcttcgagggcgtcgcgcagctcaagcagctctacagggacaagttctttggcaagtctagtgggcagatggtggaattcttacagtgttctgttggcattgtacataagaatcatgctgagagtataacctcattcattaaagagagtattgatgaggagctgaaagatacagattcatctaaacccactcagaagaagaggctaaccttttgtgtggaagggaatatcagcgttgggaaaaccactttcctccaaagaatagctaatgagacaattgaactgcgtgatcttgtagagatagttcctgagcctattgataagtggcaagatgttggccctgatcacttcaatatattggatgccttctacgctgagccacataggtatgcatacacttttcaaaactatgtgtttgtgacgagagtcatgcaagaaagggaatctcaagctggaataaagcctctcagactgatggaaagaagtgtattcagtgataggatggtattcgtccgtgctgttcacgaagctaattggatgaatgagatggagatcagcatctatgattcctggtttgatccagttgtgtcatcactcccaggtctcatccctgacggatttatctatttaagagctagtccagatacttgccacaaaagaatgatgcataggagaagatcagaggaaggtggtgttacacttgattacttgcaaggtttgcatgagaagcatgagagctggttgcttccttcgaaagggtcgggtcctggtgtattatcggtcagtcaactccccatgcatatggagggctccttgcctccagaaatacgggatcgtgtattttacctggaaggaaatcacatgcactctagcatccagaaggttcctgctctcatcatggattgtgaaccagacattgatttcagcaaagacatagaagctaaacggcaatatgctaggcaagtcgcagagttctttgaattcgtgaagaaaaagcaggaacgagctccatctgggcaaacaagcaatgacaaggaccggatgaacccacaggtattgcttcctaacagcggccgcctgtgggcccctaaaggcaacccttttgcaggctcccccgtgaatctggatttcaaaagagccatgtcttcgtacctctcaacttaggactcccagctgctataagaaaatcagctgtcctcgctcactgaccttgcaaacagcctatgcatttaggtactatgcatttaggtagtgtttggtttcggagtatggtaggacagagtcgctctgcttttaatttgttgctgtctggattgattctacataggacagagtggctctaaaaaagaaacaatatgtccaaatgttgaaccaactggttttccaaaatctcccagacggagccgctttctagtatagagccgctctatcccaactggctctggaaccaaacactatattagttcacccttaggtcgcccgatgctagctactgatgtaaaataggatgcttccccttgtgtaaattatgatcttagcgctagttccacgttttgcagcactagcatcagcctttatcaggccagatcggacgacaggtctaatctgtgtcgtagtttctttgcttgaatcattctgtggaacatatttgtgtagcgcgtgtgctgcgtcgacttgcactatgtgtggaacattcctggtgatatcatgttatgcgtttgttcaccttgtgtcatgttatggaagattcacctgctttgggccgcctcgatgattgaccgaggagccgttcaaaattg

SEQ ID NO: 146678 - DNA, 1175 bp, Zea Mays
gttgcgacgcggagcgagtggtggcctggacgcctggtgtgcgctattttcccccgcgcgcgcgtcccaactccaggagctctcgatggtgcccgcggccgcggctgtcgcagcggcgagcccggcagcgctccctcgttcaacgtccccaaggggcagacgtcccagggcccgtgcctgctcgtttcggtgcgctgggccgagcgcacgctcctcagcacttgtgtcctcctataagtcgggttccgccggccatggccatccccggattcggcagctgcgcggacggccggactgcagccggcaggcggaagtgatgggcagcaccgtcgacgacgacgaggcgtgcgagctggtgagcggctcggacctcgtcatcggcgagggagacgacagcgtcagcgcgtaccttttcaaggccgtcaagaacaacaatggcaccggcatcctcctgctctccgacatcttcggcttccaggactccgccacgcgggacttcgcctaccgcgtcgcctgcaatggctacaatgtcctagttccggacttgttccgtgggaacccgtggaagctgaacgtcccgttcgacggcgacagcttcgagcggtggcgggcggggcaggccccgggccgggtgtccggcgacatcgacgcgtgcacgaggtggctggtggacgagttcaaggccgcgggggtgtccaagaagctgggcgtgatcgggttctgctacggcggcgggcgcctcgtggagacgctggcgcgcgacgccgagagctgcttcagcgcgggggtctgcttctacgggtcccggatggacgcgtccctgggcgaccgcgtcgcggcgcccgtcctgttcgtgtgcggcgacggcgacccgctgtgccccgtggagacggtgcgggagctggaggggcgcgcgagaggcgcccgggcggcggtgtacgccggcaggggccacgggttcgcgcaccggccgcagtcggtggaggaggacggcgacgccgaggacgcgttcaacgcgatgcgggggtggctgcacgaccacctgctcgcctgatcggacgatcagacgctgtacacgggtttgggtgttttgtacatacgtactaatatgttatttgaccaagtctcctggtcatcctataataaagagcaaaatccaccattaaaaaaataaa

SEQ ID NO: 146679 - DNA, 1083 bp, Zea Mays
gcctggtgtgcgctattttcccccgcgcgcgcgtcccaactccaggagctctcgatggtgcccgcggccgcggctgtcgcagcggcgagcccggcagcgctccctcgttcaacgtccccaaggggcagacgtcccagggcccgtgcctgctcgtttcggtgcgctgggccgagcgcacgctcctcagcacttaagtcgggttccgccggccatggccatccccggattcggcagctgcgcggacggccggactgcagccggcaggcggaagtgatgggcagcaccgtcgacgacgacgaggcgtgcgagctggtgagcggctcggacctcgtcatcggcgagggagacgacagcgtcagcgcgtaccttttcaaggccgtcaagaacaacaatggcaccggcatcctcctgctctccgacatcttcggcttccaggactccgccacgcgggacttcgcctaccgcgtcgcctgcaatggctacaatgtcctagttccggacttgttccgtgggaacccgtggaagctgaacgtcccgttcgacggcgacagcttcgagcggtggcgggcggggcaggccccgggccgggtgtccggcgacatcgacgcgtgcacgaggtggctggtggacgagttcaaggccgcgggggtgtccaagaagctgggcgtgatcgggttctgctacggcggcgggcgcctcgtggagacgctggcgcgcgacgccgagagctgcttcagcgcgggggtctgcttctacgggtcccggatggacgcgtccctgggcgaccgcgtcgcggcgcccgtcctgttcgtgtgcggcgacggcgacccgctgtgccccgtggagacggtgcgggagctggaggggcgcgcgagaggcgcccgggcggcggtgtacgccggcaggggccacgggttcgcgcaccggccgcagtcggtggaggaggacggcgacgccgaggacgcgttcaacgcgatgcgggggtggctgcacgaccacctgctcgcctgatcggacgatcagacgctgtacacgggtttgggtgttttgtacatacgtactaatatgttatttgaccaagtc

SEQ ID NO: 146680 - DNA, 873 bp, Zea Mays
atgacggcgcgtgcactagggtgcgttgaacccctagtcaccgaccgccatactccgttgcagccgccggttcctttcctcgccagaacacctcgccgccgccaacccaaaaccgccgggaaagccgagccatctcccacagccggagccgcgccgacctacacccgtgacgtcagccaccgcgctactgccatcctccgcgaccacccctgttcggcggcgcgcccgctcctcccctccatccccggcctcgccagggactcccacaccgtggcgcgcatgctcaagacccacccgccgctccagaaggccttcatcttcttcctcctggcggtcaccgcgtcgcgcaccttccgccacgaccgcttcacctacacctccatgatccagctcggggaggccggccgcgtgccggccatgctcggcctcctcgccgagatgctccgcgccgtgtcgcgcccaacgccgccaccttcaccaccgtcatgcactggctcgcgcgggctggtgacgtcgacggtgccatgcgggtgtgggcggagatgaaggcgaagagcaggcctaccgtcgtcagctacaccgcgtgcgttaagattctgttcgacttcgggagggcagaggaggcgcggagggtgtttaaagagatggtggctgaagggctgcgccccacctgcaagacctacactttgctcatcgagaatctcgccgacacaggttagtgttcgaccagatgcctgaactgaactcgctttcaattttctcatcattagtttcacttactttgaccttattatcagagtaagaatgaagtcatggcaaccattccactttgtagccttgagaatgtatctattagtgcacatcattgaagaa

SEQ ID NO: 146681 - DNA, 1380 bp, Zea Mays
atgacggcgcgtgcactagggtgcgttgaacccctagtcaccgaccgccatactccgttgcagccgccggttcctttcctcgccagaacacctcgccgccgccaacccaaaaccgccgggaaagccgagccatctcccacagccggagccgcgccgacctacacccgtgacgtcagccaccgcgctactgccatcctccgcgaccacccctgttcggcggcgcgcccgctcctcccctccatccccggcctcgccagggactcccacaccgtggcgcgcatgctcaagacccacccgccgctccagaaggccttcatcttcttcctcctggcggtcaccgcgtcgcgcaccttccgccacgaccgcttcacctacacctccatgatccagctcggggaggccggccgcgtgccggccatgctcggcctcctcgccgagatgctccgcgccgtgtcgcgcccaacgccgccaccttcaccaccgtcatgcactggctcgcgcgggctgattctgttcgacttcgggagggcagaggaggcgcggagggtgtttaaagagatggtggctgaagggctgcgccccacctgcaagacctacactttgctcatcgagaatctcgccgacacagtaagaatgaagtcatggcaaccattccactttgtagccttgagaatgtatctattagtgcacatcattgaagaatggaatggttatttaacaatattagaagaactagcattctattttgaatcttggacctggctgactccagaaaattttgaagctactcttgacaatattgacaagctgaaagaagcatgtgtaaaaccagataaagcactctgcaacattttagtacagaaatgttccagggcttgtgagacatcagttcttacttgcattcttcagtacatgaaggagcatttcaatgttctttgtcgacctttttttttggaagcactagaagctttaaaatctagtggtgatactaatgaacttcttcgggaaactgcagaccgtagaccgtcttgtgggctcgcagttatgcgttatggtttaggagttggctgtgaccttggtaggtatattctgctcttcttgtctgcatgcgcacctcatatttttggattgttgactgcagacaagaatgtagttttgtacacagcccttatcgatgcatatttgcaagctggcatagttgatggtgctcttgatctattcacacaaatgagaactaacagaatatctgcttgcttgggtacatatgaagtcctgatacatggcttagaaaatgcaggcctgaaacaggaatcaggttactaccgaagagaaagaatgaatatgaaatggcatcttcagtatcatggtcagtgctcatga

SEQ ID NO: 146682 - DNA, 582 bp, Zea Mays
atgaagaagaacaactccagcattgagagcacgggcggcggcggcggcacggtgtcgggatccggctccggctccggctccttcaacctccggaacctgtccaaggtcatcctcccgccgctcggcgggccgtccggcggccaaagccagtcgcatggcgggtcggacaagtgggtcgtctcgccgctcgactccagatacaggtggtgggatacgttcatggtggtcctggtggcgtactcggcgtgggtgtacccgttcgaggtggccttcatgaacgcgtcccccaagggcgggctggaggtggcggacatcgtcgtggacctcttcttcgccgtcgacatagtgctcaccttcttcgttgcctacatcgacggcaggacccagctcctcgtccgtgacaggaagaagataacactcaggtacaccgtacacacacaacagtacaacaccatgtctttgcctagttgctccatcatcctctccgccatgactggtcaaaaagtaggtaggaaccacacatgtggctatgatgaaccatttactatcacctttttccagtacaatactccagcagcgtag

SEQ ID NO: 146683 - DNA, 2310 bp, Zea Mays
atgcgggaaccctcacctcggccttcttggggtctctcgctggtgctcgaccagcattgggctatgagggttgggattgctgggttggtctttggagaaaccttgcttggttggtaccaggcgggcgacgacggcttttcgacgtcgtttctccctctcgaaggcgcggcccagaagacctcgagtttgtacctatcgacgttcttcatcatggacgtggcatcgacgatcccgttccagggccttgcctacctcatcaccggcgaggtcagggaaaacgccgtgtacagtatgctgggcgtcctacgcctttggcgtctgcgaagggtcaagcagttcttcaccaggctcgagaaggacatccgcttcagctacttctggatccgcagcgcgcgtctcgtcgcggtgaccttgttcctggtccactgcgccgggtgcctgtactacctgatcgccgaccggtacccggaccggcagaagacgtggatcggcgcggtgatccccaacttccggcaggccagcctgcggatccgctacatctcttccatctactggtccatcaccaccatgaccaccgtcggctacggcgacctgcacgcccagaacaacgtcgagatgatcttcaacattttctacatgctcttcaacctcgggctcaccgcctacctcatcggcaacatgaccaacctcgtcgtcgagggcacccgccgcaccatggagtttaggaacagcatcagggcggcgtcgagcttcgtgggccggaaccacctgcctccgcggctgaagcagcagatcctggcctacatgtgcctcaagttcagggcggagagcctgaaccagcagcagctcatggaccagctgcccaagtccatctgcaagagcatctgcgagcacctcttcgtgccggtcgtcaaggacgtctacctcttcaggggggtctcaagagaaatgctcctgtccctggtcaccaagatgaaaccggagtacatcccgcccaaggaggacgtgatagtgcagaacgaggccccggacgacgtgtacgtcgtcgtctccggcgaggtggaggtcatactgttcgacggcatctacgagcaggtgcaggccacgctgggggcgcgggacatcttcggcgaggtgagcgcgctgagcgaccgggcgcaggccttcacgttccggacgaggactctcagccagctgctgcggctgaagcaggctacgctcaaggaggccatgcagagcaggcccgaagacagcgtcgtcgtcatcaagaacttcctcaagcatcaggtcgagatgcatggcatgaaggtcgaggacttgctgggagacaacaccggcgagcacgacgacgacgcgaatgtgctgacggtcgccgcgatgggaaacagcggcttactcgaggacctcctcagggcaggcaaggacgccgacgtcggtgacgccaagggcagaacagcattgcacatcgcggcgtccaaggggtacgaggactgcgtgctggtgctactcaagcacgcgtgcaatgtgaacatcagggacgcgcagggcaacacggcgatgtggaacgccatcgcggcggggcaccacaagaccttcaacctcctgtaccaattcgggcgcgcgtcgaacccgcgcgccggcggagacgtgatgtgcctcgcggcgcgccgcggccacctcggcgcgctccaggagctcctcaagctcggcctggacgtggactcggaggaccacgacggcgccaccgcgctgcgcgtcgcgatggccgagggccacgcggatgcggccaggttcctgatattgaacggggccagcgtggacaaggcgagcctcgacgacgacggctcaggttcaggctccggctctggcgccgcgcggctagcaatgtcgcccaccgagctgcgcgagctgctgcagaagcgggagctcggccactcgataacgatccacgactcgccagcggtggtcccgaacggcggctcgtcggggcacagccgtccaggaagattacagagcacaagttcggacagccagcgctggcctcgggtgagcgtatacaagggccaccctttcctcagaaaccgcacctctgaagctggcaagctgatcaacctaccaggcaccatggaagaattcagagccatcgtcggtgagaaactgaaagttgacgcggagaaggcgttgatcgtgagcgacgaaggagcggagatcgactcgatcgacgtgatccgggacaacgacaagctgttcatggtcaccgaagaagatctgaggcggctggcatcaatggactggctgtcgtgcgagtga

SEQ ID NO: 146684 - DNA, 1400 bp, Zea Mays
ccaaatataaaacaagaaagaatggttgcatcacgcgcacacgcgcaccaaagccaagcccagctctcgacagtcgacaccaccacagagcgcgcacgcaccaagccgcgcgcacacacgcacctcgcggcggtagcgggagtggatcgatggggagcagcgggggcagctgcgagcacttcctggggcagctgagctcgagcgacggcggcagcgcgccgcaccagctgctgcagcgggagtgggactgcggcaccggcaccggcagcaggcgtgggtcgcggcgctggtccaggaagaagggcagggcgcggggacaccgccgcggcggcgggttctgcaggactgaggaggccgcggcggcgtcgcggaagcgggtggtggtggtggtggaccagagctccggcgccaagcacgccatgatgtgggcgctcacccacgtcgccaacaggggcgacttcctcaccctgctccacgtcctgccgccgcacagcgggagcggcggcggcggccgcggtgctggggaggaggacgcctccgcgctcgccaactccctcggcgcgctttgcaaggcctgcaagcctgaggtggaggtggaggcgctcgtgatccaggggcccaagctgtcgaccatcctcagccaggtgaagaagctggaggcgtccgtgctggtgctcagccaacgcaaaccctcgcctttctgctgcttcctgcggagcaggagcagcagcgaggaggaggagctggtggaggagtgcataaaccgggcggagtgcctgacgctggcggtgcggcggcggagcaagggcgtgggcggctacctcgtgagcacccggtggcagaagaacttctggctgctcgcctgaccggtccacgaggactccccctcctcatcctcatcctttgacgcaacgcaagagttttacttacttcccgggctaatcgtttttacaaagtccaataataagtaaccaccaccaccaccactactgcatctgtttgttgatctgtaacctccagtgtcctagggtgtgtgccagccagtgtgcgtgtgcctgatcctctctctctccccacgatgtggtgctgtattctatgtatcgtcttggtttagctgtgctgctgtagcctgtagagtgtaagctagctgttgtgtagtgaaggcacgcagaagctgagccgatccgtttgccctgtctgttctgcgggaatctgtctgttttgcagagcggggatgcagaggcgcgggacggggacgtcagtacactgcgttgcgttgcgttgcgttgcataaactacgacttgtgtattgtgcttgtgcgatgtgtttgtttgcttgcttgcttgctacaatggttggtacagagttccataatgaagtgatgatgcgttttgactaa

SEQ ID NO: 146685 - DNA, 2337 bp, Zea Mays
gcggcggagatagtcgtcgtcgccgtcgtgaccttgcttctcgggctaacgtcgtgcatggcagagagttcggtatggagggaggaggaccggcgcgtccgaggagaggtgacgtacgagcagagggccctggtgctggacggcgccaggaggatgctgttcgccggggagatgcactacccaaggagcacgccggagatgtggccaaaactcattgctaaagcaaaggagggcgggcttgacgtgatacagacctacgtattctggaacgttcatgagcctatccagggccagtacaacttcgagggaagatatgatcttgtcaggttcatcaaggaaattcaagctcagggtctctacgtaagcctcaggatcggtcccttcatagagtctgaatggaaatatggaggatttccattttggctacatgatgtcccaaacattaccttccgaagtgataacgaaccctttaagcaacacatgcaaagatttgttacagatatagtaaatatgatgaaacatgaaggactttactacccacaaggaggtcccattataacttctcagattgagaacgaataccaaatggttgagcctgcatttggctcaagtgggcaacgttacgtcagttgggcagctgcaatggctgtagaccttcaaacaggtgttccctggacgatgtgcaagcaaaacgatgctccagatccagttgtcggtattcattcctatactattccagttaacttccaaaatgatagcagaaactatcttatatacggcaacgatacaaaattgaggtctccacaagatatcacctttgcagttgcattatttatagcaaggaaaaatggaagctatgtgagctactacatgtatcacggaggaacaaactttgggaggtttgcttcttcatatgtaacaacaagctactacgatggagctcctcttgatgaatatggtttgatatggcaaccaacatggggtcatctcagagaactgcatgctgcagtaaaacagtcatcagaaccactactatttgggacatactccaatctttctataggtcaagaacaagaggcacatatcttcgaaacagaaactcaatgtgtggctttcctagtcaactttgatcagcatcatatatcagaagtagtatttcgtaatatatcactggaactggccccaaaatcaatcagcattctcttagattgtaagcaggtagtttttgaaacagctaaggtaaatgctcagcatggatcaagaacagctgaagaagtgcagtcttttagtgacattagtacttggaaggcattcaaggaaccaattcctcaagatgtgagtaaatctgcatacagtggaaaccgactctttgaacatctatcaactactaaagatgctaccgattatctatggtacattgttggtcttttccttaacattttaggtagaatacatggaagccatggtggacctgccaatataattttcagcacaaatatttctctacaggaaggaccaaacaccatatcattgctaagtgctatggttggatcaccggattcgggtgctcatatggaaaggagagtatttggaattaggaaagtgagcatacaacagggacaagagccagaaaatctgctcaacaatgagctatgggggtaccaagttggcttattcggggaaaggaataacatctacacacaagattcaaaaattactgaatggacaactatcgacaatttgacatatagcccacttacttggtacaagactacattttccacaccagtgggaaatgacgcagtgacactgaaccttactggtatgggtaagggtgaagtatgggtcaatggagagagtatcggacgatattgggtctctttcaaggctcctagtggcaatccttcgcaatcactgtatcacataccacgagaatttctaaaccctcaagacaataccctagtcctttttgaggaaatgggaggcaacccacagctaataacagtgaacacaatgtcggtatcaagagtgtgtggcaatgtgaatgagctctcagctccatcacttcaatataaggataaggaaccagcagtagatctctggtgtccagaaggcaaacatatatcagcaattgagtttgcaagctacggaggtcctacgggtgactgcaaaaaatttggtttcggaagatgccatgcaggatcatcagaatctgttgtaaaacaggcttgcttgggtaaaagtggatgctctgttcccgtaacacctatcaaatttggaggcgatccatgtcctggaatccaaaaatctcttctagttgtggcgaactacaggtga

SEQ ID NO: 146686 - DNA, 2638 bp, Zea Mays
tagtacaataatttatttttttttcttaaaagttagtacagtgatttaagaaaaataaatttcagactatgggagagctaaaacaaggccgtgaacacgaccagtagaaaacggacaaacaaattcagcgtggacacaaacgcaacagctaaaataaggccgcgtgcatccatccatccatccgaccgtctatttacacatctcagtctcaaacactcaactcacaagaggcccctccggcgtacgaccggccgggtcagtcccacacaatagcagacttcttcggcgtcaccatgtcgctgtgcggcgccggtcctcccctcgagagcggcctggcagcgggcaccatcggcgccaggtagttgcctacccggacgtacccgcgcgcgtcgtaccgcccaccgtggtgcggcacgggcacaggcacgggcacgggcacgggcgccgtcgggtactggtgctggtagtggtggaaattgttctgcaacagcatgggccccgcgccggcgtgccttggtgagccgctcacgtagcccgatatgctgccgtccacgccgtgctgatgcaagcgccgcgccgccgcgtccagggtgctgaggttcggcgagctccggacgcgctgcatcccgaacccaacgcccaacgcgttggcgcgcggggagttgcccgccgagacggcgccgtgcggctgggcggagaacggcgggctcccgtcgggcgaggctggtacggtggccacgtagcgctccggctggaattggcggtgctgctgatggtggtggtgatgcgggtggaggcgcgacagaccagcgtagcgggtagacgagggcacggtgggtgcggcggccgacgggtggggcgcggtggcctgcggcgtgaagacgtagacgcggaagcgcggggacgtggtcggcgagcgcttcgcctcgaggcggtcgtactcgtccagcatgtggaccaggtcctcgtcgcaggtgacggagacgagcacgtcgagttcctcggcgagggagagcagctggtacttgatggccgcgacctccgtcttgaacatgtcctccaccttcttcttcaactctgcacagggcaacgacagacatctcggcctgctgagagccaaacggcggcaggtcacgcagcgcggcacagcgcatggagaaagcgaacaacacccaccgcggaagcagatggagcgaggcacggcgaggacgcgggtctccccgccgacgtacttgagcacgccgtcgtgcgggcggggcacgatgcggccgccgaagctgcagaggatcttgatgcggcctcccccaccagctccgcccgcgccgccgcagatgcaggtcggcgaaagatgcacgtcctcatctgtggtcgtgccctcggactccgtcgtcgtcaccattggcggcgcacccatcgcgtcttctatctcggccatggggtgccttcacttgaatcccagcagaagcagagcacgcgaaggaatatcccgtaaatatcagacctgcgcaggaaccgcaacacgctttaatatcaacttgcacagatgcccctccagagtcgaggcgaatccatattggtatttggagcacacaacaacaacatgaagatccagttttttttttactttaactgcagtatgagcccatatcttggggagaaaaaattgcaaatactgaaatgcgagatgaactcacaccagaacggtcaaagaagtagcgtttccctagggttacgaaaagacgatcccgaaagcaacaacagcttccagcatcaagccaggcgtgtggacatgaaagcgccccccacgaatacgacagagacggtgtcatgtctggctgagcgattaatcacgctcaaactaatgagcgacagcagatgagatgccagccttgcaagttatgggtttccaggccagcattatccttccgacggctaccagaataaaccagcaaaagaaaaggcgtgcattttctttggagcagcaaggaatcagtacgcggcagccaacctgttcagaaaccgcctgggctggctgacgacgacctaacagattccaaaacactagatcggaacttgcagaagagaacaaccatccagatgagcaaaaaaaacaaagaaacgcgtaggcagatcggggaggaagacaccggtccaatcggcagtgagaagaggctcaccagagataacggaacgaagcgggagtggagtactaatccaaccaaccggcggcggcggcggtacgggcgacggacgaacagccgccgagcgacccagatcgagccggacaaaggaacaacaacaagggggcggaagcaagcgaagggcgacccccgagaaacttagtagaactaagttattattcgtccgggtccgggacagaggccgatgaatcttccattcgggagtggctgatcaatcttcgcctctcctcaccggcgggcgtggccggatttagggaggacggacggacggacgcgcaggtcgggggctcctagattcgaggaccagccgctagcctattcttggggcggggggggatgggatggggtggggcgattgccgatttcttcctccctccgcgcccgcggaggacttggaactggaactcacacggcggctgcggcctcgcccgcgaggc

SEQ ID NO: 146687 - DNA, 1524 bp, Zea Mays
cgaccaccaggggtccagtcgtccagggcaccacgcacggaggcaccaggcgtctaggcaccaggccagccgccagcccgccagacggagtgacggaccatccagaattctagattccaggcgtccaaggctccaagccatcctccggtcctcccatccaccaccggtccaccgccactccgccagccgaccactaggtcaccaggccgcaccgctgcagctcgcaatcggcggtcggaggtcggccagtcgccctcgcccaggtctccactctcccgcacccagtgacccaggtctcccgtctcccaggtatgctgtcgctgctgatgtcttcgtcggtatcggctacgtcgagcccacagtccatagagaacggtgaccatgacccaagctctaggccagcagcctcgtcccctcctctgcagattcaggcaggggacttatcatcctctccggagacgaccagctcagacaacgcaaggtgagctgtgagcactgagcacaatctgttcgtttgatttttggtatatttgattcaatatatggttgttcttgttgtgtttgttatctgtgcgattgtactgaacaccgattgtgagtaaactttcattgaactaacatcgtgacggcgacctcgcgaaggggcgccgctgctgctaccgttgtcacggccggcgccactactaaagataatctaatgggtaaaacagtggcctcgccattcaagaagagtcgtcgcgtcaccgccaatcgaagtcgcctcgctgttgaaggaccaccagctacgcccgctaaagattcttccaccatctccagcgtagagttgttgaaatcaacggggttcgatgcacgcaaacccctctttttttacttgaatgtgttctttatttatcaggattccatgtaatatttttttatcacatctcaatgtataattgtatgctagaatttaatccgttgctaattttagattcatttgatgttagtttcagattatgtttgttaatatggtagtagtacttccaattatattttgtagctatgcattcactaatttctacatctgtagctatccattccaattagcacagttgcctcagagtccgcttttagcacaagtggttgtgttcttagcgagcaccgcagccgacttactccagagatcttggaggcgcttatgtgctcacaagattggatgcgacgcaagtatctagatgcatctaatgctgaccaacctgaaacattttggacttgccttcaagagatgtaggaagggatgcagaagcttttactctgagcaacaagactggaattggaagagaagggtgcccttaagctccaacagcttagaagtcttatatattcaaatattaagtattgtgtattgaacaattagatttgaaggcatgattttgtccacagttttgtagaatcaatgctatgttttgtgtgatttgaaggcatgatattgccatttaatgttgaatattgttgaacatgtgataaaattatgttgggttcgat

SEQ ID NO: 146688 - DNA, 1244 bp, Zea Mays
ggcgtccaaggctccaagccatcctccggtcctcccatccaccaccggtccaccgccactccgccagccgaccactaggtcaccaggccgcaccgctgcagctcgcaatcggcggtcggaggtcggccagtcgccctcgcccaggtctccactctcccgcacccagtgacccaggtctcccgtctcccaggtatgctgtcgctgctgatgtcttcgtcggtatcggctacgtcgagcccacagtccatagagaacggtgaccatgacccaagctctaggccagcagcctcgtcccctcctctgcagattcaggcaggggacttatcatcctctccggagacgaccagctcagacaacgcaaggggcgccgctgctgctaccgttgtcacggccggcgccactactaaagataatctaatgggtaaaacagtggcctcgccattcaagaagagtcgtcgcgtcaccgccaatcgaagtcgcctcgctgttgaaggaccaccagctacgcccgctaaagattcttccaccatctccagcgtagagttgttgaaatcaacggggttcgatgcacgcaaacccctctttttttacttgaatgtgttctttatttatcaggattccatgtaatatttttttatcacatctcaatgtataattgtatgctagaatttaatccgttgctaattttagattcatttgatgttagtttcagattatgtttgttaatatggtagtagtacttccaattatattttgtagctatgcattcactaatttctacatctgtagctatccattccaattagcacagttgcctcagagtccgcttttagcacaagtggttgtgttcttagcgagcaccgcagccgacttactccagagatcttggaggcgcttatgtgctcacaagattggatgcgacgcaagtatctagatgcatctaatgctgaccaacctgaaacattttggacttgccttcaagagatgtaggaagggatgcagaagcttttactctgagcaacaagactggaattggaagagaagggtgcccttaagctccaacagcttagaagtcttatatattcaaatattaagtattgtgtattgaacaattagatttgaaggcatgattttgtccacagttttgtagaatcaatgctatgttttgtgtgatttgaaggcatgatattgccatttaatgttgaatattgttgaacatgtgataaaattatgttgggttcgat

SEQ ID NO: 146689 - DNA, 458 bp, Zea Mays
aatctgcactcctgcagcgcgtgtccgcctcttgccgccatcggcgcctccgcactcggcctccgcggctccaccctccggtccattgccgatacgctccacagatccggcgagcggcctgcgccatcacatccaccggtcaccggcccacgcctccacgggcacggtcgcacggatccgccgctgccgtgccatccaccccttgccggcggctcggccagctccactccacgccgcggtggccacagtatcgcgccgggcgccggcctctcctccttgttcggctgtcccaaggctccggccgccggctgccggctgtcgctgtacgactgtcactgtccgcagtgcacagtgacccgctggccgccggcgcacggatccaactagccaactgttcaaggccgcaggtgcacagtgagtgattctccctgttccagtgttacatgtacagttcggcc

SEQ ID NO: 146690 - DNA, 1703 bp, Zea Mays
gccctatcctctccctcgccctaacctcccgtcaatccggctacctgacatcagtctcctctcatgtattaagctttgaaatgagtctccttaattgacgagtaatttggttctatactcgatgccctatgatgcaatcccccgaattgggcttactactttaattactacacttctgcagttctggaattcggaggcctggaattcggaggcccaggaatcatgatgcagcaggctcaggcgcacacctcggcacttgcgggagcgccgtcggcgtcggcggtggcaccgacggtggctcacccgcacgatccggtgggcggggatgcgccgccgaagcaggtggctcaggcgatggagcggctgggccgtgctggccggttcatcgcggacatccggctcggcgcggaccgcctcctcgaggctcttttcgtctccggcgacgcgcccccgtacagcgtgcgccagcacgtcgacaggatggagcgtattatcgtcaaggaggatgccgccatgcgcctccactttcaggacctacgcgccctcggcaggcaattagaggagtctggagttcttaacggggcccttaaagctcaaggcaattcatggggcttgcacatgccactcgtttgtccagatggtgctgttgtagcttatgcttggaagcgtcaactagcaggtcaggctggtgcatctgctgtggacaggactaggttagctctcaaggctttcactgaccagaaaagaagattctttcctcatctagaagatgaagttgttagccatctccatgatggtcaacctggtgacaccaaaaagtcaaagttgtttaccagcaatggatatctagaggaaaaatctttgtctgaaatactgaaaaatttagaacatgaagtacctaacataaaaatattcacatactggcatctggattggtcaaaaagagcttcatcattagcatctctgttggatgatgactttgtggatccatctaaagagctgaacctgcaaaatatggacaaatcgagatctgatgctctgacaactaccatagaccaagttgctgttattgaattgctggttccttcaatatttagagctgtagtgtcattgcatcctgctggatctactgatcctgatgcagtggcattcttctctcccactgagggaggaagctatcttcatgcaaggggcacatcggtacatcatgtgtttaagcatgtaaaagaacatgctgacaaggcattgcagtacttcatcaatgcggagccgagtaaagcactacctcttcttttgcgttggattgccagctatcagactctgtttacgaaggtttgcagcaaatgcagacggcttctgatgatggacaagtctttggctttgctgttgcctcctgtccaccgcccctatcaccagacttcaaatgttggaccagatcttcaagaggcctaccacattggatgttcctcctacgatggctagctgatgcttctaagatgttcctgacattgtcattgacatagtacgtgtacaacagtcctgtgtgaaacaatgttcttttttttttggaatgtatccaacccattaggtgacatatgtatagaaacgttactggttgcttaggtacttgaagttctacgctcttgctcaaattaacctacagattaattcagattaacaaaatccagaactggtccaaacaa

SEQ ID NO: 146691 - DNA, 1589 bp, Zea Mays
gccctatcctctccctcgccctaacctcccgtcaatccggctacctgacatcagtctcctctcatgtattaagctttgaaatgagtctccttaattgacgattctggaattcggaggcctggaattcggaggcccaggaatcatgatgcagcaggctcaggcgcacacctcggcacttgcgggagcgccgtcggcgtcggcggtggcaccgacggtggctcacccgcacgatccggtgggcggggatgcgccgccgaagcaggtggctcaggcgatggagcggctgggccgtgctggccggttcatcgcggacatccggctcggcgcggaccgcctcctcgaggctcttttcgtctccggcgacgcgcccccgtacagcgtgcgccagcacgtcgacaggatggagcgtattatcgtcaaggaggatgccgccatgcgcctccactttcaggacctacgcgccctcggcaggcaattagaggagtctggagttcttaacggggcccttaaagctcaaggcaattcatggggcttgcacatgccactcgtttgtccagatggtgctgttgtagcttatgcttggaagcgtcaactagcaggttagctctcaaggctttcactgaccagaaaagaagattctttcctcatctagaagatgaagttgttagccatctccatgatggtcaacctggtgacaccaaaaagtcaaagttgtttaccagcaatggatatctagaggaaaaatctttgtctgaaatactgaaaaatttagaacatgaagtacctaacataaaaatattcacatactggcatctggattggtcaaaaagagcttcatcattagcatctctgttggatgatgactttgtggatccatctaaagagctgaacctgcaaaatatggacaaatcgagatctgatgctctgacaactaccatagaccaagttgctgttattgaattgctggttccttcaatatttagagctgtagtgtcattgcatcctgctggatctactgatcctgatgcagtggcattcttctctcccactgagggaggaagctatcttcatgcaaggggcacatcggtacatcatgtgtttaagcatgtaaaagaacatgctgacaaggcattgcagtacttcatcaatgcggagccgagtaaagcactacctcttcttttgcgttggattgccagctatcagactctgtttacgaaggtttgcagcaaatgcagacggcttctgatgatggacaagtctttggctttgctgttgcctcctgtccaccgcccctatcaccagacttcaaatgttggaccagatcttcaagaggcctaccacattggatgttcctcctacgatggctagctgatgcttctaagatgttcctgacattgtcattgacatagtacgtgtacaacagtcctgtgtgaaacaatgttcttttttttttggaatgtatccaacccattaggtgacatatgtatagaaacgttactggttgcttaggtacttgaagttctacgctcttgctcaaattaacctacagattaattcagattaacaaaatccagaactggtccaaacaa

SEQ ID NO: 146692 - DNA, 106 bp, Zea Mays
atcgaatattttgagttgcggagtttttcatagaatggggtgtaggcatataccaacgtcaatgattatagggaaatagatggtggggaacccggtcatattgcca

SEQ ID NO: 146693 - DNA, 1689 bp, Zea Mays
ttaggacccagcaccttctctttattggcgcttctcccttattgctagtccatctttattttaaagtttcaaacagctgtaggatagaaaattcatgtaacaataatatatttagatgcaaccgcgtgcatagcgacatcgccgccggtactaacaagtactcaaattgacatgctcctgcatgcagttggaaaatgtcagacgcgctccaaaggtaatcctccgacactccatggatcggaaacagtcagcgcgcgtgcccttcgctagctcgagactataaaagcttgagcatccagccatccctctcgcatccgcctctctcttctctgcaactgcaagctccgtcttcagcaagcatcaggctgtagacgtagccatcaagcagctgccttggatcccggccctgcgcgtgtagcaacactcacatcagacctgcatggaggacgcttcctctcgcgtctcgtctctcctcgggttgctgttagccgcccactgcgcactcttgctcttgctccgtttggctggagctgctcacggccacggttacgctcccgctcctggcggcggcgtggcgctgagctccgcgttctacgacgagtcgtgccccagcgcctacgacgtcgtccggcgcgtcatccaggatgcgcgcgtctccgacccgcgcatcccggccagtctcatccgcctgcacttccacgactgcttcgtcaacggttgcgatggctcgctgctgctggacgacgatctcccggcgatccagtcggagaaacacgtgcccgccaacgacaaatcagcgcgtggcttcgaggtggtcgatggcatcaagagcgcgctggaggaagcgtgccctggcatcgtctcctgcgccgacatcctcgccctggcagccgagatctccgtcgaactcgctggagggccacgatggagggtgctgctcggccggcgagacggcacgacgactaacatcgagggcgccaacaacctacccagcccattcgacccgctcgacaagctccaagagaagttcagaaactttaacctggacgacaccgacctcgtcgccctccaaggagcacacacttttggtaaagtacagtgtcaattcacacaagagaactgcacagctgggcagccagaggaaacactagaaaacctagaccaggtcacccccaacgtgtttgacaacaagtattacggtaacctcctgcatggcgccgcacagctaccctccgaccaggtcatgctgtcggcggaccctgtcgcggagatgacgaccgctcccattgttcatcggtttgcaggcaaccaagaagacttctttagaaactttgccgcatctatggttaagatgggcaacataagcccgctaactaggaacgatggagagatacggaaattttgccgaaggattaatagcgaaggctattgaaaacttctttttcaatttgatcgatttggattccttaatttttctgtgaccaattgtgaagtatgtgtaaaaattcattcgatctttcagtttttttttcttctcattctttgtttttcttatgaggttttcctcattgtttgtaaaatgttccgcttttatctttctagaagtaaagcaaatgtgaaaatgttttacctgcttccggcctcctaaatagcggagagaataaaatggatatggataaattttggata

SEQ ID NO: 146694 - DNA, 2105 bp, Zea Mays
cagcaggaccaccccgaccaatctatcgcgagcagcggggcgatcgacctcctcgaggacgacggaaacgtgcgtaccataccatggcgccgagcaagctgcgccaggcgctgggcgcggtgaaggaccagacgagcatcgggctggccaaggtcggcagcggcggctccctggaggcggacctggacgtggccatcgtcaaggccaccaggcacagcgagtcgttccccgccgacgagcgccacatccgggagatcgtcacgctcacccgcctctcccgggtgtacgtcggctcctgcgtgtcctcgctgtcgcgccgcctcgggcgcacccggagctgggcggtcgcgctcaagaccctcgtcatcgtgcaccgcctcctcgccgaaggggacccggcgttcgagcaggaggtgttctacgccacgcgccgcgggacgcggatgctcaacatgtccgacttctgcgacagctcccgcgccgacgcctgggacttctccgcgttcgtccgcaccttcgccgcgtacctcgacgactgcctcgagtgccggatgcagggcaagcagcagggtggtggtggtgccgccccgcgcggcggtggcaggccgctccacgaggagatgtacgcatcccccgggaaccgcttcgcctgcggcatcgccgccttcaacgggagacaagaggacgcggcggacgccgaggcacagaggacggtggctctcgtggccagggacccgcccacgagagagatgacggtggatcagctgctcgtcaaggccaaccagctgcatcatctcctcgaccggttcatcgcctgccgccctgtaggcgcggccaaggcgaaccgagtggtgggggtctctctgtacccgctgatcaaggagagcgtgcagctctactgcgagctcacggaggtgacggccacgctcatcgagcagttcgcggagatggagaccgcggactgcgagcgcgtgcacgccctcttctgcggtctcgccaagcagatggaggagctcgagacgttctacgcgtggtgcaaggtcgcctgcgtgtgccgccagtccgacgtgccggaggtggtggaggccgtcacgcagaagaagctggaactcatggacgagttcatccgcgacaggcacgccgcggactcgcagcagaggctctcgccgccggatccggagccgatggcaagcccagagccagcccccgtcgaagaggacaacgacgacatgaacgcgaccaaggcccttccagcgcccgaggagccggcggcggctgcggcgcaagaggaaagcacagccgggaaagccgagccagatgcctccctcatcgtggccgacgacccggtcgaggaggaggccgacttcctgaacctcagcgcggacgccatgtccggccaagagcacgggcggcagctggagctggcgctgttcgacggcaacgcagcgccggaaggcagcgtgttccaaggctcctcggcggactgggagacggagctggtgcattccgcgagcgcgctcgcgaatcagcgcgcccaactcggcggcggcctcagcatgttggtgctggacgggatgtacaaccacgcggcggcggcgaccaacgcgcagacgacgttctccggcagcgccagcagcgtggctctgcggccaccaccagggccgcacatgctcgccttgccggcgcctccaggaggcggcagcgccgtagcgggtgcggaccctttcgcggcgtcggcgctggtgcctccgccgacgtatgttcagatgtccgacatgcagacgaagcgccagcttctgacgcaggagcagcagatgtggcgacagtacggcaagaacggaatgcagcagggggcattggcaatgccaaaccagaatcaacagttgctaccacacgtggggcacaattacgcagggtatcggactacatagattaatgacctgcagatgtaattcctcctgcgaccacatttcctccagtgttcgaagaaaaggcttcggagtatcagatagtcaaattctgtcaatttccctaacgccgggtttacatctattcattttggaggaatttaaatttacttaataaagtaacctgaaatttaatat

SEQ ID NO: 146695 - DNA, 117 bp, Zea Mays
gtgataacagaattcatatactcatttttaatactcatttttttgatattaatacaatttgaacttatgtgcgtaatggaaaaataaagttatttatttctagaaattttataaaaa

SEQ ID NO: 146696 - DNA, 125 bp, Zea Mays
ctttatctgaagtggaacatgtggccttctgctaccacgttgttgttagggtttgctaccacgttgactttatctgaagctcagtcctcctcccctcctcgaccatgccattgacaatacttgcc

SEQ ID NO: 146697 - DNA, 1612 bp, Zea Mays
attcttcagccgccagcgatccagctctagcgtttcttttttccagccccagaagctcgacgccggcggtgctccacgggagccaccagccccacctccatcggaggcagccaccggccacgggagcagcacgcctcctgcatcaactgctggcagccaccagccacctccatcgttggctacttggctccctcctccttggtagaagatggccccatcctcgtcctccagctccgatggacatggccatgctgctccgcgccctgggactggtagagttcaagtggcgttgcctaacgcagatgctgctgctgaagctgatgcagaggttagtggtggttatgctgaatctaacgagccaaattctactggtgctccatcatgtgggtctggtgtcgttcccaatgattctgagtctatagttgccaaaacattagagaagttgccaccagagcttgctgcactagctaaagatcctaagaggcatgctaaatctaaggaccctgggtggaagtatgggttctggccatatgaagggaagaaggatatggttcaatgcatattttgcaaaaaggtggttcctgcaggaatcaagagattcaagcaacacatcgcaggtggttatgcagtcgtcgagaggtgtccagctgcacctgcaatgatcaggaaagaaatgtttgattttttggtgaaaaatgcaagaaaagaactgaacttgcagcaaggaagggaatgggattctgaaagtggaggtggagtgcaagaagtacctgttgtgccaagttcagggacaagagttaaggaaaataaaaggaaggttcaagcatccattggttcttatatggatccagtcaagcaagggtcacagaagtacaccaaaaatgttgcttcaatgttgtgcaaatcacctgaagaagtggtcagtgagagacataattcaaagagttatcaaccttcaatggagcagtgtacacagaaatctaaggaatcaaagcaagtagttgatgaccatgttgcggatttcttgtatgagaatggaattccattgaatgttgttaactcaagaagctgggaaataatgttagagtccataggacaatatggtcctgggtatctgtcaccttcgtaccatcagttgaggaattcattacttgagagggcagtagacaagacaaatgaggtgagaaagaagcatgaggaagcatggaaaaagtatggctgcactctcatgtcagatgcatggactgacacacggcaccgtcatctcataaacttttttgtcaagagtccagtgcttgttgaaaatgaagaaaatgaggaagacgttgacatggaagatgaagaagatgatttcaatgaaatgcaggacgacgaagatgacgaagaggatgaggatggtggaggtggagctgcaggggccttccgagtggatgatgctttactttgagcatttactcattccatttcgtttccaggaattcagacaatcatacttgttagtttagttaatttcagtttcagaattcagactccttttttttatcaatgttccatgctgtgtaatgtactatccaagtgttctactgttctggagtggaacagccaagcagca

SEQ ID NO: 146698 - DNA, 710 bp, Zea Mays
gttagaatgtggaaattcattcttgaatgccatcggaagcaattccataccatacttcaaactaaatctcatattctcatccctaagaatggacccgaaaaaagttcctccaaggttacactggaactggaaatggaacttctgaactggtgttcttgttgcaggaattggaccctatcccaaaaaaaacatatatcgaaaccctcaatggctggctagtcaaatggcttcctcaggaaaaggacggcattgcacccttcaagagttatgggagctcctgctgtgttcattacagctaatgattggtgtcaagccatgaaaaggataccagaaggcagcgtgtagctacaatggaggctcttgctgtcaatgtacatacgttatgggaggcggcaggacaaaggagcagcagcagcagcagaagctgaaagctgaccacctctctagagaccttgcagagcggctcacatatcatcagaaggaacatggcttgcaagggcattttgaagatgatagggcagtgttgcccattgctgacaacggcagggcagttgataaccgcatagttgcactggatacgttgcacaagagattggatcatgaacaaagatctcggcacgaggaaactgtgagacagacccgataatccacaaagttttattaccagtttggtcttcattctttgtgtttatcatttctcattctccgtg

SEQ ID NO: 146699 - DNA, 1154 bp, Zea Mays
gcataataatatagttataaaatcataacttttacatatgaaatcgaaagataaagtttatatgaaaattatagagctcgaagagatctataactttgtagtacaacacatttttgtttaaacatatctttaggccaaaatcattgaaataatgtctaaatttatatcaaaataatagactttatcattttcatgtggggacttaagattatctccatgtgggaacttaggattatctttatataaactatttattaatatggtaacttatttgcaattttcggtcgacgccataatatttttatgaatttaattgtattttgatgattttctacaacaagaaattaataatacaccaaatagcctaaaaaattcatgaatttttacggggacacaacatgtatccacatatagttctcaaaaatatttggactataaaattcacaagatgttgggtaccgtttggttcaaatatttgtaacgtaatgggtaagtgattacgttaaatcatgtttgttttagtccaaccgtaatcagataccgtactaaaatttgataccggactattcaaacttgttaccgcccgtaatcaagtgtaaaccattaccattaccctttacgttacatttcgtgaaccaaacagcaccttggtgtttcttccatttcactcccacttattgcgtgagttacacgtgaaatcattttatgtatcgaagtttcaacataattaatatttcacttatcattttcatgtggcgacttgaggttttatttgaatagaatgtttatttattttggtaagctttttgcaattttggatcaaaactagtgtatttatgaattttatttatattttgatgattttttgtagaaagaaattaataatgtacaaatagcctcagaaatctatgaaattatacgaaggtacaacatatggccacatatagtcataaaaaataataggaccataaaatccacataatatcaacgtttcttctattttatttccacttattgcgtgagttacacgtgaaatcactctaagtatcaagttttcaacataattaatacatcactttaccatttttatgtgggaacttgagattatcttctattaaatgtttattagtattaatttacttgcaatttcatgg

SEQ ID NO: 146700 - DNA, 2122 bp, Zea Mays
ttccacgacttccatccattccaaaggaccaaaacagcggctcggccgttggcaaggtagccaaaccacggtaggcgcctaggcggccacggcgcggcgcacgcgaccacagggcacgagcccaagcgccgtgcggcgtgtccaaagaccaaaggctaggaaacacaaacacccacgccacgcggacccgggcacccgtccggcgggcccctcgctccgccctcatcctggggaccggacgacgccgtcgtcgtcgcccgtcgacccttttcccgcacaacagccgcgccgctctcccgttccacacgaccacatacggtagctagcctagcttcttcgtcacagctcaccacggcgcagcaaccgcagcccacgaaggcgacgaaaagctgccgaaccaccagcagaggagagcgagggaccgcgcaaccgagccactccctagtccctccttctccctctctctctctctcttcgcctccggatctcgcatgcgcggtggccaccgccgcgcccgacggtggagggtgaggagttagcgaggggccctgaccctgagtgctggacggcggcgtgatggggggagcgcagctggtggggagatgggtggagtcgtacacggggatgtcgacggacaacatcaagggcctgctgctcgcgctctcctccagcctcttcatcggtgccagcttcatcgtgaagaagaaggggctcaagaaggccggcgcgtccggcgtccgagcaggcgttggtggctactcatacttgcttgagccactgtggtgggcaggaatggtaacaatgattgttggcgaaatcgctaactttgcagcttatgcatttgctcctgctatcttagtcactccacttggtgcacttagcataattatcagtgctgttcttgcccatataatgttgcgggagaaacttcatacatttggtatacttggctgtattctttgtgtggtcggttcgacaacaattgtgcttcatgcccctccagagcgtcaaattgagtctgtggcagaagtgtgggatcttgcgaccgaaccagcattcctgtgctatgcagctgttgtgcttgcagcagcttttgtgctcatattccattttgtccctgagtatggtcagacacatatcatggtatatgttggcatatgttctcttgtgggatctttatcggtcatgagtgtcaaagctcttgggatagccttgaagctgacattttctgggatgaaccagctagtctatccacaaacatgggtgttctcatccgttgtaaccttatgcattgtaacacagatgaactatctgaacaaggccctcgacacattcaacactgcagttgtttcacccatatattacacaatgtttacatccttgaccatcttggctagtgtaataatgttcaaggattgggatcgtcaaaatccaacacaaattgtaacggagatgtgcggcttcgtcacaatcctttctggaacttttcttcttcacaagacaaaggatatggtggatggtatgtctacatttacgccccttttgacctgtaactactcacgttcataatgtcttattggttcgcgtcgtgacaggtctcccaccaaatttaccgattcggcttcctaaacatgcggatgaggacggctacgctgctgaaggaattcctctcagatccgctgctgacggtattccgctcaggtcaccaagggctacagattcatttcgctcgtcatgatgccccgctgagatttgcatgcgcactcaaatcgtgtcacttgaaggctcatacccagcaggcgtcagtcctatatatacatgggaagggaatgataatcctccattcactcggttcgatacacaacgtaggttttagctgtaggattcaaaaggtaacagctcggctgcccccttgtaaattctgaggcattggtacagaattttgaggattatatcagttatactcgtccgggtaagatcaccaggatgaccaagagcccaagtttttgggttgtatacttgtatgtatattgcggtgagccatataggtcactatcttgaattgctgtattttttcaacacaactctcagagtacaggatgttgaacaagcacatcatgcc

SEQ ID NO: 146701 - DNA, 2075 bp, Zea Mays
ttccacgacttccatccattccaaaggaccaaaacagcggctcggccgttggcaaggtagccaaaccacggtaggcgcctaggcggccacggcgcggcgcacgcgaccacagggcacgagcccaagcgccgtgcggcgtgtccaaagaccaaaggctaggaaacacaaacacccacgccacgcggacccgggcacccgtccggcgggcccctcgctccgccctcatcctggggaccggacgacgccgtcgtcgtcgcccgtcgacccttttcccgcacaacagccgcgccgctctcccgttccacacgaccacatacggtagctagcctagcttcttcgtcacagctcaccacggcgcagcaaccgcagcccacgaaggcgacgaaaagctgccgaaccaccagcagaggagagcgagggaccgcgcaaccgagccactccctagtccctccttctccctctctctctctctcttcgcctccggatctcgcatgcgcggtggccaccgccgcgcccgacggtggagggtgaggagttagcgaggggccctgaccctgagtgctggacggcggcgtgatggggggagcgcagctggtggggagatgggtggagtcgtacacggggatgtcgacggacaacatcaagggcctgctgctcgcgctctcctccagcctcttcatcggtgccagcttcatcgtgaagaagaaggggctcaagaaggccggcgcgtccggcgtccgagcaggcgttggtggctactcatacttgcttgagccactgtggtgggcaggaatggtaacaatgattgttggcgaaatcgctaactttgcagcttatgcatttgctcctgctatcttagtcactccacttggtgcacttagcataattatcagtgctgttcttgcccatataatgttgcgggagaaacttcatacatttggtatacttggctgtattctttgtgtggtcggttcgacaacaattgtgcttcatgcccctccagagcgtcaaattgagtctgtggcagaagtgtgggatcttgcgaccgaaccagcattcctgtgctatgcagctgttgtgcttgcagcagcttttgtgctcatattccattttgtccctgagtatggtcagacacatatcatggtatatgttggcatatgttctcttgtgggatctttatcggtcatgagtgtcaaagctcttgggatagccttgaagctgacattttctgggatgaaccagctagtctatccacaaacatgggtgttctcatccgttgtaaccttatgcattgtaacacagatgaactatctgaacaaggccctcgacacattcaacactgcagttgtttcacccatatattacacaatgtttacatccttgaccatcttggctagtgtaataatgttcaaggattgggatcgtcaaaatccaacacaaattgtaacggagatgtgcggcttcgtcacaatcctttctggaacttttcttcttcacaagacaaaggatatggtggatggtctcccaccaaatttaccgattcggcttcctaaacatgcggatgaggacggctacgctgctgaaggaattcctctcagatccgctgctgacggtattccgctcaggtcaccaagggctacagattcatttcgctcgtcatgatgccccgctgagatttgcatgcgcactcaaatcgtgtcacttgaaggctcatacccagcaggcgtcagtcctatatatacatgggaagggaatgataatcctccattcactcggttcgatacacaacgtaggttttagctgtaggattcaaaaggtaacagctcggctgcccccttgtaaattctgaggcattggtacagaattttgaggattatatcagttatactcgtccgggtaagatcaccaggatgaccaagagcccaagtttttgggttgtatacttgtatgtatattgcggtgagccatataggtcactatcttgaattgctgtattttttcaacacaactctcagagtacaggatgttgaacaagcacatcatgccactaaaccatttaccagttttgtctgagc

SEQ ID NO: 146702 - DNA, 297 bp, Zea Mays
atggcgcggtgcagggcggccggcttgagcgcgcgggctgcacggctgctgctcctggcgaggtcgtggcacaggggctgggcgagcgtggcctggcggctgcaacgcaggaagagaaaggggagagaaagcagagtggggcccgcgcaagagagagaagagggatggagaaggaagaagcctggcgacggcttgctgtccgtaagggagaagaaaggttgggggaggagagaggtgcggtggggcccacatggaagtgagacaaaaagggagggagagaaaacgtgggccgcctag

SEQ ID NO: 146703 - DNA, 112 bp, Zea Mays
cttatatttactgggcgattacaatttttacaaagacggtaccattaaaaatccctactctctgtcttttttacgaagaaccccgtaaggaaaaatggtgttatcttgaaac

SEQ ID NO: 146704 - DNA, 564 bp, Zea Mays
cgccgtccacggtccactagttgcatcggctagctcccgcataaagatccacaccacttgagcagcagctagctcaagggaaggagaaggctggaagtggaaagaagtgggttcttgcttgagctgagctcttgctgcccttggatctgtttgggagtggagaacgcagtatggggcgcggcaagatcaagatcaagaggatcgagaactctaccaaccggcaggtgaccttctccaagcgccgggccggactggtcaagaaggcacgggagatcggcgtgctctgcgacaccgaggtcggcgtcgtcatcttctccagcggcggcaagctctacgactactgctcgcccaggacctcgctgtccaggatcttggagaagtaccagaccaactccgggaagatactgtggggtgagaagcacaagaacctgagtgcagagatcgacagagtcaagaaggagaacgacaacatgcagattcagctcaggccagtgtttctgattcagatctgctccggatctctagctgcgcgcgcacttcactagctcgctgttcgtgtgtgtt

SEQ ID NO: 146705 - DNA, 1976 bp, Zea Mays
cgccgtccacggtccactagttgcatcggctagctcccgcataaagatccacaccacttgagcagcagctagctcaagggaaggagaaggctggaagtggaaagaagtgggttcttgcttgagctgagctcttgctgcccttggatctgtttgggagtggagaacgcagtatggggcgcggcaagatcaagatcaagaggatcgagaactctaccaaccggcaggtgaccttctccaagcgccgggccggactggtcaagaaggcacgggagatcggcgtgctctgcgacaccgaggtcggcgtcgtcatcttctccagcggcggcaagctctacgactactgctcgcccaggacctcgctgtccaggatcttggagaagtaccagaccaactccgggaagatactgtggggtgagaagcacaagaacctgagtgcagagatcgacagagtcaagaaggagaacgacaacatgcagattcagctcaggcatctgaaaggcgaggacctgaactccctacagcacagggagctgatcgctattgaagagggcctccagaatgggcagaccaacatgcgcgagaagcaggcagtaatccttactcttccagttgctcctgagcttatttagtcgcttgcagcacacaagcacggcatagttcattaggggaagggttttgtttctgatgttgctttattccactgttgctgtagatggactactggaggatgcacaagacgaatggaaagatgctggaggacgaacacaagatactgacttttaggatgcaccaacaggctgttgatctgagcggccgcatgagggagctggagatcggataccatcaggtccagcacgacagggatttcatttcccagatgccgttcaccttccgggtgcagcccaaccaccccaacctgcaggaagacgagtagctacagcctgctggatagtgatctgcatgccgctctgaactgaagctcctcacctgcagcttctatctcgcgtttcatcattcagcgttagctgggtatctttcttttcatggcaccctggatgaagtctgtcagtacgatgtggtctttgtcttgtgcgtctcttttgactttgctgggctgatttccgtgcatgtagtgatgatgacagcgttaattaagactgaaatgtgcaattaagttgtagcccgtgcttgcttggtctctgttctggttggtgatggttgatgaaaaacagaagcagcaaacaatcgatgtgaatgtcgttcatttgccaattcaacgtatactacaaaagatgaatttcaatcaatcaacaaacagcaacccttaacagaataacagctatctacaacacctgtgattcttatctagtttctgcaatcgaacgaactcggcctgcttcatcaatcacctcagcatgtccccattgtctatgaacggggccaacggaccactgaacgccggtgagatgctgaaggtactaccagcttcgctgaacatggcgttgtgtccgtacggcagcggccggtccggcagctccggcacgtccatgtctccctccagcatcctcactgcgtcgccgatggtcggccggagcgccaccatcacgtgcgcgcacaggattccaaccagtacgaacctttccatgaccccgctccgcgggctctcggcggtggacagcgcctcgtcgagcacctccctcgcctgcccggccttgacgagagtccacgcccagtcagtgatcagcacgggacccgctggcgccgtcatgtccaggactcgccgcccgctcatgatctcgagcagtagcacgccgaagctgtacacgtcgctcttctccgtcagctgcccatacagcgcgtactccggcgccaggtagccgtgcgtcccggcgacgcgcgtcgtgaggtgcgactgcccctcacggctcctccgggcgaggccgaagtccgccacgcgagcgcgcatctcgctgtcg

SEQ ID NO: 146706 - DNA, 1851 bp, Zea Mays
cgccgtccacggtccactagttgcatcggctagctcccgcataaagatccacaccacttgagcagcagctagctcaagggaaggagaaggctggaagtggaaagaagtgggttcttgcttgagctgagctcttgctgcccttggatctgtttgggagtggagaacgcagtatggggcgcggcaagatcaagatcaagaggatcgagaactctaccaaccggcaggtgaccttctccaagcgccgggccggactggtcaagaaggcacgggagatcggcgtgctctgcgacaccgaggtcggcgtcgtcatcttctccagcggcggcaagctctacgactactgctcgcccaggacctcgctgtccaggatcttggagaagtaccagaccaactccgggaagatactgtggggtgagaagcacaagaacctgagtgcagagatcgacagagtcaagaaggagaacgacaacatgcagattcagctcaggcatctgaaaggcgaggacctgaactccctacagcacagggagctgatcgctattgaagagggcctccagaatgggcagaccaacatgcgcgagaagcagatggactactggaggatgcacaagacgaatggaaagatgctggaggacgaacacaagatactgacttttaggatgcaccaacaggctgttgatctgagcggccgcatgagggagctggagatcggataccatcaggtccagcacgacagggatttcatttcccagatgccgttcaccttccgggtgcagcccaaccaccccaacctgcaggaagacgagtagctacagcctgctggatagtgatctgcatgccgctctgaactgaagctcctcacctgcagcttctatctcgcgtttcatcattcagcgttagctgggtatctttcttttcatggcaccctggatgaagtctgtcagtacgatgtggtctttgtcttgtgcgtctcttttgactttgctgggctgatttccgtgcatgtagtgatgatgacagcgttaattaagactgaaatgtgcaattaagttgtagcccgtgcttgcttggtctctgttctggttggtgatggttgatgaaaaacagaagcagcaaacaatcgatgtgaatgtcgttcatttgccaattcaacgtatactacaaaagatgaatttcaatcaatcaacaaacagcaacccttaacagaataacagctatctacaacacctgtgattcttatctagtttctgcaatcgaacgaactcggcctgcttcatcaatcacctcagcatgtccccattgtctatgaacggggccaacggaccactgaacgccggtgagatgctgaaggtactaccagcttcgctgaacatggcgttgtgtccgtacggcagcggccggtccggcagctccggcacgtccatgtctccctccagcatcctcactgcgtcgccgatggtcggccggagcgccaccatcacgtgcgcgcacaggattccaaccagtacgaacctttccatgaccccgctccgcgggctctcggcggtggacagcgcctcgtcgagcacctccctcgcctgcccggccttgacgagagtccacgcccagtcagtgatcagcacgggacccgctggcgccgtcatgtccaggactcgccgcccgctcatgatctcgagcagtagcacgccgaagctgtacacgtcgctcttctccgtcagctgcccatacagcgcgtactccggcgccaggtagccgtgcgtcccggcgacgcgcgtcgtgaggtgcgactgcccctcacggctcctccgggcgaggccgaagtccgccacgcgagcgcgcatctcgctgtcg

SEQ ID NO: 146707 - DNA, 1235 bp, Zea Mays
caacaagtgagtcgtcggagagaaaatggaagtcgatgtcccccagtcaagtccatgacctgaaccatgtcggggagacggatgaagcgccgtcgtgcacgctgtagcttcttcatggcggcttggtgctgctttatccggctatccccgcgattcgtggacaccgtcgccacctgcacggccagaggtttctcctcccaaatgctctccaccctcttcttcgtcccctcccagtcccctcttcctagctacagctccttcagtccaatcgattagttcaatgagttgagatggctggagaggtgactgtatccggttcactcccctgttccatggacgtgctatggtctgtgaggttgtgcgagttagctagccattttgagtggagttgagtgctggaagaagggattggagaatacagtaaaaaatgtgtgtttcgtcgtactgattcttttctaattcttcaattctcctttgtgattgagtagattccttttaagagttaaaactttacaatgctaacatgatattgggaaagcaaaatattttttaagcatctacgcctaatgtggtttacttcttctttacgccttgcggatggttaagatgttggacattctgttcttgcagaatacctctccctttgaggatttcattttgagaggcttgatggtagtacaagagatggaacattttaatgctcctgaaagtgacgacttctgtttccttttatccacacgtgctagaggacttggtattaatcttgcaactgtagatacagtgataattttttagtccaattggaatccgcaaaatgatctgcaggtctttctctctcatactctctccctcttagaagtgagcgtgtacctaacttgcaaaggtttatttatctttattatgttttttatggtacataggattgtccaacaggaaactgttaatatctaccgcttcgtcacatgcaaaagtgttgaagaggataatttggaacacacaaagacaaagatggttgtcaaagtgcataattcatgtatattctttagtatgattattgatctgttctttttacctatttttttttcctatttcaggttcttgatcacttggaatgaggaaagactgaactgagcgttatgttcggcagcagatagcactagcaaggcacgccagccctctcctcccctcccaatgtactccctcattgccattcgaaacaaaagtttttttcattc

SEQ ID NO: 146708 - DNA, 411 bp, Zea Mays
atgtcggtgcgcgccacggcgacggtctcatccgggaaagccgcgtcgaggccgcccaggaggatggaggccgtgagcaccatgggccagccggtgctgccgttccacgcgcagtacgtcactgccccctctgtgcaggcctcgagcctcgccatgtcccgcgtgcagcagagtgcgcgcccgccggcgatggagacgtccgcacccccaacggtgtcgcaatcgccggccttgaagatgaccgttgtgaccgtggtcgtgcagatgccgtcctcctcggtcgcggtcgccgactcgggcatccttctgaacgtgactttctcgaagctacaaacacacacacaccgcgtcagcacaagcgtcagccacatcccctccactacccgagaaggcaaagaagcgatgagttga

SEQ ID NO: 146709 - DNA, 185 bp, Zea Mays
ctttcttgatgtctgttcatcaggtagttctggtcaggcccatcgggtccctgttgtttttcagtgtcagtagttgcttcttgtgcaggctatttaagttgtgtggggttttgtttttcctcctttgtctctttccctccctcattttcttcctttagtttgtgtcagtttgttaagtttttcgg

SEQ ID NO: 146710 - DNA, 732 bp, Zea Mays
cggaaaaatgccaagagagcgcaaacgtaacagaacacccgcgacaaccactgagccgagcgggggtggatatggcagcggtcgccgcccaccaccacctccacccctcctccgtcgctgcccgaactccaacacttggccgacgccaccgtttctcgtcgcttcctctcgccgcgcggccgtcctcccaaggccgtttcagcttccgagccgcgacccgcgtcctcacgcgcgccggaagcactggcgccagcagcgccgcctcgcccgccgcgacgacggcgtcgtcgttgtcgctggaggagctgcgcgggggctgcaccacctggacgtggcgagggatgcgcgtgaactacctcgccagaggacaggggccgcccgtactgctcgtccacggcttcggcgcctccgtcgcgcactggcgcaggtgagccggccttgtccgtccgcccccttgatcgatcataatcttctgatgaaaccttacctgggctcaacgcgcgaccgttggtgcacgcacgccatgtgctcgagcttgtgcctctgcatgcgccaaccattgctgggaacattgatcaactcgcttggtaggaacattggggtgttgtctgaatcctataccgtctacgcgatcgatttgctggggtttggcgcgtcggacaagcctcctgggttttcttacacgatggagacatgggccgaggcaagtgttgtgctctcagtctgatataa

SEQ ID NO: 146711 - DNA, 1376 bp, Zea Mays
caaacgtaacagaacacccgcgacaaccactgagccgagcgggggtggatatggcagcggtcgccgcccaccaccacctccacccctcctccgtcgctgcccgaactccaacacttggccgacgccaccgtttctcgtcgcttcctctcgccgcgcggccgtcctcccaaggccgtttcagcttccgagccgcgacccgcgtcctcacgcgcgccggaagcactggcgccagcagcgccgcctcgcccgccgcgacgacggcgtcgtcgttgtcgctggaggagctgcgcgggggctgcaccacctggacgtggcgagggatgcgcgtgaactacctcgccagaggacaggggccgcccgtactgctcgtccacggcttcggcgcctccgtcgcgcactggcgcaggaacattggggtgttgtctgaatcctataccgtctacgcgatcgatttgctggggtttggcgcgtcggacaagcctcctgggttttcttacacgatggagacatgggccgagctgatactggatttcttggaggaggtggtcaggaggcccacggtgcttgtcgggaactcggttggaagcctcgcgtgcgtcattgctgcatcagagtccagcagagaagccgtccgggggcttgtcctgctgaactgcgccggtggcatgaacaacaaggcgatcgtcgatgactggcggatcaagctgctcctgccactgctctggctgatcgacttcctgctgaaacagcggccgatagcatcagcgctctttaaccgcgtgaaaaacagggacaatctgaaggacatcttgctctctgtttatgggaacaaagatgctgtggacgatgaattggttgagatcatacgcggaccggctgacacggagggcgccctggacgcgttcgtgtcgacggtgaccggcccgccggggccaagcccgatagccctgatgccgcggctggccgacctgcccgtgctggtgctgtggggtgaccgggaccccttcaccccgatcgacgggcccgtggggaagttcttctcgaagctgccgtcggagctcccgaacgtgacgctctacatgctggagggcgtggggcactgcccgcacgacgaccggccggacctcgtccacgacaggctgctgccgtggcttgaagcgctcctgccgcccgccgccggcgcggtgactacgacgacgacgacggttgtctaaggctaataataatacgccttattgctgactggatctttgaagtctagttggactcttcatttttaactctctagttatctctttataaaaaataaattctataaatcttatagattttgtttagaaccaactcagtttttaaaaaattggcttttatttttt

SEQ ID NO: 146712 - DNA, 348 bp, Zea Mays
tcaagatttggggaggcgtttcaagaacctgcttcgtttattgctataaaacctttgttcgaggatgagaggtatattgttacatataacccgacaaaggacaaggtctatgctttgctcaaggaccaagcaaagcctgatgacattctcaaggccgcttttcatgcacatgtgctactgcattttatcaatgctacacatgctaaccggaatgcacggaagcgcgcgaactccaatctgtcacaccagtataacccactgaacatggacttcttaccacacatcgaagagtcgtgcaagatcgttatgtcgtcttatggagttttcaagaagaaatcaagagaacag

SEQ ID NO: 146713 - DNA, 808 bp, Zea Mays
ccacatctgaatctcacccacccacccccgcgccccccgccaaagcatggcgccggcgatggggctgaagcggcctgcggctgcggcggcggcggcgggagcgggggcagcagcagcgcagacggtcacgctgtccgcgccggccgtgcgggacgcggtgcgcgccgccgtgagggatgccgaggccaccgccccggccgccagggtcccggcgacggcggcagccacggcggagatcgctagggacggggtgctgtgcctggaggaggtcgacgggaggcggtggagctacgtggtcgacgccgccggcgccgcggtcaaggccaagggaagggcgtccgtcggcgcctccttcaaggtcgtcccgctccagtccccgctgccgcccgtcgaggaaataatgtcctttataagatcatatgttgtgcccgaaggctttccagatagtgtcacaccttcatatgttccatacatgacatggagagcattgaagcatttctttggtggagcaatgggtgtgtttacaacaagaaccttgctcaattctgttggagtctcccaaagcagggccgcatctggtgctgtggctatcaactggatactcaaggatggggctgggcgtgttggaaagatgttttttgcccgccaagggaagaaatttgattatgacctgaagcagcttcgcttttctggtgatctcttgatggagttaggagctgggatagaactagctactgcagctttcccccagtttttcctaccaatggcatgcatagcaaatgttggttcctttcctactgatttgtag

SEQ ID NO: 146714 - DNA, 87 bp, Zea Mays
attcattcagccttctgcaaaattttaagttcaaactccattttcacaaggagtagaaaaggcagacaatatgagatgaaagtaaat

SEQ ID NO: 146715 - DNA, 576 bp, Zea Mays
cgttctcttagaaaagtgagaaagctttcctctttcatcaataagccattgggttaccttgtacgaggtcgagcatggcaagctcattctcagagctatcaaagacaaaaacaaagtatagtgtgggccaaatgcttgtagaccatttttgttccctgcaaagcgcaaaaaaagaaaatcatatctttggaaccttcatcaactctgttgataatatgagcaaattaacctagatagatcagcttaaccattgggcagttagcacaaggagacaaatggcatctgaccaattaactttttccattcattaattggtagcatttgcacaccagctgtctcatatgtatgcattaaaaaaagttacccatatgcaatttcagcccaagcaaatttctagctcaagcattaaaatccaagttctccatatgcaatttcagaccatgcaaaattctagttcaagatggaagcagtatgctgaaatttaaaaaagaaccataattttgcaaatgagatcacaatccaaccaatgacgtctaaaattttaaaaagaatcatacttttgcaaaggagatcgca

SEQ ID NO: 146716 - DNA, 1453 bp, Zea Mays
atccgccttcatcgcaactcgcgacgacccagccatacattcatccatcacttgcggactcgcctcgtgcgcttccatttccactccgacccggccggcgacccgccccccggtccccggagcgaccgaggcctcgctcaccgacatgtgggccctcaacaacgccaaggccggcggaccctgcctcacgccgcggcacccagcgccgccctcccttgcgtcgccgtcgacggcatcggctgggcggaggttctggaggcgcagccccgtgtgggcgcccctggtggcggtgcgcgcgtcggggggcacgaggaaggacggctccgtcggtggcgaggccagcggcgaggaagccgatagcaaggcgtcgtctgccgggcatgatgatgcatctaccccaacaggggatacctctgctgggttgaaccaatcgcatgacgaaccaaaaacaagcaagccgattaatgtttctagcagcaactactggcgagatgtcagggcaaaccttgtgcgtcgggaacaggagctattagtggatccaagtactccatcagagtcgaaggcgtcctcaggagatccattacagctccctcaaaagtgggctcatgctattacgatgccagaggcaggatgcgttctggttgctaccgaagcgctagacgacgacagcatcttcgaaagaaccgtcatcttcctcctcaggctcggtacaaggggcacgttcgacggcccgttcggagtcatcatgaaccgtccgctctacacaaagatcaagcacgtgaacccgatgttccgagaccaggcgacgcccttcggcgactcccccctcttcttcggaggccccgtcgacatgagcatgttcctggtgaggaccgaggacagcgcgcgcctcaaggggttcgaggaggtggtgccaggcatctgctacggcttccggacggacctcgagaaggccgccgccctgatgaacagcggcgcgatcaggacccaggacctgaggttctacgtcggccacgccgcctgggaccacgagcagctgctgggcgagatccgggcggggtactgggccgtcgcgtcctgcagcacggagctgatcggcgatgccttgatgggcgacccttctcgcctctggaccgagatacagcagctgatgggaggataaagtgtagtactctctgagctcagccaggaacagaagcagggccggccgtaggtgtttgctcatttgagatgtaataatttgttatgggtaaggttgtggtcgagtctgtacataattggaatagggtgactcgcttgttagttgcccctagcctcgtgtagcaactgctgtgcgtcgaatgtactgaaacaggctctatataatgcctgcctgcctatgtatttcagcaattggcgaacgtgaagatggcgcttctgatgaaatcacatgtcggtcctgtttggcacagct

SEQ ID NO: 146717 - DNA, 777 bp, Zea Mays
aaaaaaaatcgaacacgatgcgtgacaaacttcattcattcacagtagagcaagcacctcgggccgcccgcaatagcatcgagcagaactccgggcagaagaacacaaatttactgaacagttatgatacatcacacagccatgatggccaccgtttagtgttttgaccgactagtaaataacagaaccaccaccatccatcaaattggatcaacattgtgcacagttctgtcagcaacaagtgcccaatagacatcacgattcacgaggtacagtagaagtcggcatggtataatctggaaccgactaaactcatactagccactcattgaagtttggtcatgtgctgtccccaatgatgtgatctttgataaacattatgactgaaatcagtattcttcagcagcactagctgcactcaaatccacactaagatccacagtctgcaatgagatcagagttaggatgcacatgttttgaggaactagatccattaaacattgaaataacaggaacaggagacttttttttgttagcaggtactagcaaacgtacccgcgctgcaatttgcaacggaacctaatacatattggaatcgcactccttgagtcatgaccatggctcatgagtccaggttacatatgatatgagatacagaaaggtgtgacccaacacatcttagaattgggctatgcatcgatcgtctctaggcacgagttctacatcgtaccagcaggaggtgcagaaactctacactgttttggtagtgagatggac

SEQ ID NO: 146718 - DNA, 544 bp, Zea Mays
ggaagcggaacaagggtgctttgggtcccccctcatattaacaactaccgaggcattttagcagcgagcaagaaacggaaatgccgatatgcatatctgaaaagcgatcacaatgcatcactgacaagaacgagcaggttgtagcaaacgtgagcacagttaaaagttaaccatccgatcaataatgcaaggaacaaaggaaccaccaccatcatcctaaacggtcttgtgtttaaacgccatgtaaatgctatagggtgatatgttctgtccgtttaattggctgcagctgcagcatagatctaaacctggcaagccaccaggcagggcctgtgttaacaccgttcttctttagagtatggtatctctaataggaaaatctctagtattcttcagctgcgctggcagcgctcaggtccacactgagatcaacggtctgcgacacagacatggagagatttaaagatgtgcgatccatctttgggtcagtaaacataaaatagtaatgtcatcacagtatcaataataaagagagatgtctagt

SEQ ID NO: 146719 - DNA, 2742 bp, Zea Mays
cacagcacagtgcgaaagccacacgaaagcgacgaccaagggagaatccgtcaattccccaatccccatcctctcaccggcgcaaacccacgggatccgtcgcgatcgcgacgcagcctccaattcgcgccgatgcctgcccccgcgccgtggcccgtgtcgcaggacgtcgcggcgctcgccgatcgcgccagcgccttctcccgtgccgtcgtcgggccccgcaacgacctgggtgctctcgcggcggcgctccttcggatccaacccgtagcccgcgagctcgagcgctggaggtggctcacgcccggcgaccctgaggtgcccgacctgcacgcctggctcttcgagctcagggacgcggtggccgacgccgagagcatcctagatgagctccaccgccggcgccagatcggccctccgctctcggcctgcgtatacgccacgttccgtggccccggacggaagctgaggcggctgacggagaggctcaaccgcgcccgcgacgattcggagcgtctgcgacctggcagcgctgcggccatctacggtgtgcggtcgccgaacagggtaaccggctccgttttcgcggagcggaaggtactcgggcgtggggaggagtgcaactccataatctccaggctcgtcgacgattgcgaggaaacatgccgtccggtatctccggttattgcagtggttggccatggaggcatcggcaaaaccacggtcgctcagtgcgtgtacaacgatgcgagggttgaagcgcggttcgatctgagagcctgggtctgcgtctgggacagatcagatgaggccgagctcaccagggagattttacagtccattggttgtgcagatgataaaccgtgtgatgacggtcttgccagtttagacagtttgcaggagaagtttgagaatctggttgcacgtaagaggttcctcctggtacttgacgatgtttggattgatgagggtaaaaccgagaaggagaataggagcatttggaacagagtgttggtgccacttagatctgccacaactgggagcaaggtcttgttgaccactcggatgaaactagtagctgaggttctgaatgcgggttatttggtttcgcttgatggattaagaagcagtgattgttggttgctgttgaaggaagttgctttgggtggagaaaccatggattttccacctgagttgcaagaggttgcaggaactcttgttgcaatggttaagggctcacctttagctgctaaagctattgggcaaatggcaaggagcaccaggagcacacggaaatggagaaccctggtgaacacagaaattagtaatgatatcattatctcttccatccaactcagttacaaacacttgccgggtcatctccagcgctgctttgcatactgcagcatatttccatcaacttggaggttcagtcgctctcagttggtcaatatgtggatagctctcggtttcattcaatcatcagcagaagggaaagggctggaagaattagggcaaaaatactttgatgatctcctatcacgatccttctttggtactgcaaataaagaccagcaaacatattacttccttgatgacctaatgcacattttggcacagcacttctctgctcatgattgtatgaaaatcaacgagggcatccctgttgtgattccaccaacagttcgtcatctgtctgtttcaaccgattatttaccacagctgaagagcaaatacaggttgggaaggctgcaaacattgttagtcctcagaagctcatcgttatcttcaggtcatttccctagaaaacttctggccaaatttaagaacttgcgggtcctggatctgagtggatctgatattgtagaattgccagaaagcattaatcagttggtacatcttcattacctagctatatgcagtataactaacaaacttcccaagactatatacatgcttaaacatcttgaggtgtgtgatatacctatattcttatttcatgatgatcatcctagaggtgttggtaaatctgttacagttaaacgtctcaaaacatgctgtggcaagcaggcaaggtcagttaagtccttgattgatgtgtaaggactgttataggaaaaggattaacctgcacggcttattagttaatcgatcaaccaatgtctgactttcagaatcaaactttacagtaatcccagcagcaggcatgaagtgcaatttttcttttcaattcgacaccttcaagctctagaatccatttctactcagcctgtttctgtgatttggtgtcagaataactccagtttggtggatcaagaatctggttgttcacatccatcaaaacttcaaactattttgtgttggtttgtttgatagtcccaggttggtactttgcaacctttcaagccctctttattgcaggactacttggctgttttgcctatccgcaacttatgtatagttattttatttttacttttattttttttatttccatttgtaaggtattccattttggttttcactgtcaactggtgcaaacaagactgttgcaacagggaaaaaatagactatgataccataactgaaaaacggtgttgagtgtgatcttgcaacatcctgtatgtagccaactgtcactcttacatgaatcttaataaggacatgcctagcgcagtggtaagaagtctttccacagagccaaaggtcctgaatttggcgtatactctgaaaaaaaaa

SEQ ID NO: 146720 - DNA, 1957 bp, Zea Mays
cctggagccgaagagtatcgagaaaattggaccagctatcaagattgtatcctttgacctcgaagggaagtcgaaatgcttgattggtcgaatttcgtcgcaggcccaaccgtctccgccttctcaaattgctgttcctattgtacatccatcatcacctcctcaaacttcacatgctgctcctcatccttttttctgacccaccgtctccgccacaagcatcaccattcagggctccaccaccttctcatccccatcctcttggtgacccactgtctacgccaccatcaagggatccaccttctccacatccatcaaaggatccacggccatcaaagaaatctaaacttcctataccaaaattggtgtccccgtatcagaaaaagaagagtaaagctagtactgctggcacagctcggtttttgaaagggattggacggagcctcacgtcacaaactgttgatttggccgagcatgaggagtctgcaaaaaaggctgaggcaatggccgcaaagataaagaagccaactaaggcagattacaaaaacgtgcctaaaaaatatgtgccgggcagacctctgctacctcttgagaaactaagaaaggtcccggctggtgttaaaaggttgcatgactggtacatgcgggcatcatcggttggcatcgacaccatcagtgtgcatataccagaccatgcttttattggttcggaccaaaaggccgttgttacattcgaggacatgtggttaatgatgaaccttcagagactcgacgtgcaacttgtaacgatgtttgcattaatgcaacatgatcagcaggagatcctttacggtaccaagcccaatgctagtgccagtaaaagggttgggtatctcaacccaatacttatatccgaggaaagccacacttttagaatcgggaaagacaacgatgaaatatggggaaagacggacgaagaagctcgatacgccacctacataggacatgcaatgcttcaatttcaagacagggaagccataatagccccgtacaactttaaggaccactggatatgcttcctcatttatcctaaggttggaaaggtgctggtgctcgactccttgaacttcgacccttcgacatatgcagaattcctcagcatcttagagctggcttatagattctataagatgagaggtggaaagtacgacctgtcgaaacaacgcgtgccactagacatccatcatcactggccggtaagtatgtgattttatgaatacatatcatacacaatgttgcaactaaataaccaatctcccgttatgtagtgccacaagcaaccataaggatcggtcctatgtggattctatgtgtgcgagttcatgagagtgaacggacgatacatcacgaaccctgacaaggtattattagtaatagtcaagtatgtatttatgtcattaaagatgcaaatgtgttattattgagtataaatagatgatgtttataaaattcctttacatcaatttcaacgaggaaacccggagaacttgaccgaagctgcattgtatggcatagtcgaggacctctgcatattcatattgaaagaggtcattcccgcagaaggaaaatatcacgatgcttccggaacattagctttgccagagtttagaatactaacagaaattagtagattatctcttagccgagatagttattagagcttaggtgaaaacttatgatgtatagaatgcatgaagcatatatggttgtaaacagaatactttgatgtatataaatgtatgatagaatttaatttcatgttgctttcaatatcaatatagatctctctctctctctctctatatatatatatatatatatatatatatatatatatatatatatgtttgtatgtgtaaataaatatatatataattcagtattgtttgaaattttgaaaaaaggcgggaaaacttcc

SEQ ID NO: 146721 - DNA, 159 bp, Zea Mays
taaggaaattacttaagaatactgccacacgtacaattatttacttagaattcaggaccttaatgttgaataacctagattgaaatcctcaccactaatttcctccttagctaatcaccatgtatataacacaatgtcgtgtgaagtgtgaacctggag

SEQ ID NO: 146722 - DNA, 822 bp, Zea Mays
atggccgtgctcgactccctcgaggcgctcaagcggcccgcgctcgcgctcctcctggccggtgtgctgctcgccgcggcatcggcgggcgggccgcacgcggcggcgctggccgcctcgggcgggcgcgtcggcgggtcggccttctcctcgcgctcctcctcgcctcgatcctacgggtacagcgcgccggctcccaggggcgggtacacggccgctcccttctactctccttcgcccttcgtatccgtcggcccagccctcggcatcggcttcgggggatcggggttcctcgtgaccctcatgggtttcgcggctttcctctacctggcctggacccggacgcgtcgacggcggacggtgccgccgcgaggcgccacggaggggaggccagcaatggcgcggcggtggggatgtcgatggggctcgaccggattggggaggcgacagagggtgaggccatgccggtggacgtgggcagggtgggcaaaggccggggaggaggacccggacgcgtcgacgacggacgacgccgatgcgaggtgcagcagcggggaggccggcaagggcgctgcagtggggatgtcggcggggctcctcggatcggggaggcgaccgtgggtgaggccacaccggtggacgcggccgagactggggtcgggcacagtccaacgaaatcaaaggcagagagggtacctcatcgggagggcaggtgggcgaggtgggagagagggtggttggaggcagagaggacgtcatcgggagggcaggagggcgaggtgggactgtgggagggaggctggtgggaagataagaatgtag

SEQ ID NO: 146723 - DNA, 197 bp, Zea Mays
tttgatttcatgggacttattttagaaacttgagctcaaaaactttgtcttatttggtctctgtatgatagaattatgtcattttataatctctgttcattcggtcagtcgttgtgaactcttttctaatcgctcacttcattggccgtgttgtgctaagacatattgcatggagtaaacaataacatcagttagcc

SEQ ID NO: 146724 - DNA, 2998 bp, Zea Mays
tttaccaaatagtaaatagttcagattatacgcaactaaacaataatcatgatggaaaaccaccctgtgactttgtgagtgagcatcatcaacctagcagcactgctcctcaacacagagagagagagaaggaaagagaccggaaagggcgccccccgacgcccgagtcgaccgcaacaagaatcagccacgccgcgtctcacccatctcccgtagcatttccgccatctcctgcgggttgagtacggccgagtcctgctgcccttcgctcgcttcttctggtaaattgcagtttgttaccgcaattgcagctgctagtggtggcgaggcatgggccatgggagaaagactagttgttgctggtgtttggtagtagtagccgcgtaggtctcgtgggtgtgcgcaccctgccttccccgtccctatccgcccgtctcatcgtcatccccttcctgtcttcaacttcaccttccctgtgtttcctccccgcttccttccgctctaggggtcagccaggcagtccagataagatttgctctggttaggctacctccgcgccgcgctggaactccctcccggtgaggttgttgaaaccgacaaggaacggggacgtggggcccgaggaaggtcacgctgctagtttttttccttcgcgatcgatcccttccgcctccggattcgccctgctcttgttcctccgctgttttctcgatcggttggctggtgactctgcccctgcccctgcccctgccccggccccgattcgggggaatctgattcgccgttgggcgggcgggagagattgggttcttggttctggtgccggtgcgcgcggcgtaatttggtagcagatagaagcaggaagggggagcatcggcccttggctgcgctgctgagaatcgcggtcgggggaggctgatcttggcgacggtggcccggcggggaccggtggcggccgcggcgatggccgacgggctggatcggtggcgcggcttcttccgtggcgccggcgctggcatctgcgacgtcatcgagaacgccatcctcgtggcggcggccgacgcgccgcgggacttcctgcaccgccgcgaccgcatcgctgagaggctcttcaccgcgctccgccgcgacgcggcgccgccgtccttcggcagcgccgcggcgtccaccaccccggccactcccgttgaggaggacaagggcagcgtgcgccgcgtcgccgagaaggagtgcaaggtcgacagcagcagcaacggtacccacggcggcggcggccatggccatggccacgccgatgaggacgatgattctgactctgacgacgagcgcctccgccgcgccgcagcgagcaactatggccacaactacgatgatgatgacgaagatggcgaccaacaggaggaagatgagcagcagcatgccgcggatgatactgaagaaggggaggaagaccacgacgctgaggagctcgaggcgctcaccaatgagatcgatgaggagtcacagatcgtcggcgaggtcctccgcatcaaggaactcctcctgcacaaggaagaccattcggatgccactttgttcgattcactgaggaggctgcagttgatgcaattgtccgtctctacgctaaaggctactgagattggaagagctgttaatcggctgcggaaacacaactcacgagagattcggcacctcgtgtgcactctcattgaaggttggaaagttttggttgatgaatgggtcagtaccacaaatgctgccctgacagagaactcccctggctcttcaaatccttctgttgtggatgaagaagaggaagggcttccatctccacctttggacgaaggggccttctttgccacccaaaccacttctattcaactctctgagttctttgacgaaatggatgaagatggaaatttgagacatagtaatgacccgagccttggaaacaagaggggtaacaatggtgggagacttgcaagccattcaacggttgcaaggcaagatccacctcgctcttatcctggagtcgtcgaaagagttcaacccaggaggctagaactggcaaggcaagagccaccaatgaggcaagcgaacccacaaaccctccaaagttcaagtttgcaagccaaacctcacggtgcgctcaacaagcagtctaataatccctcaagttatgaatctggaccggggagaccagtaaaggcagctcaacagagaccatttggtgacatgaaacctaaacaaactcgagagcatgttgctatcgagagaaagcctatggcaagccagacagataaatcaaggcccggcgctcgaccttcggcaggagccaagctagagttggcaaagccaaaggtttacgatgatggtctggataacaacaggaagctggaagcagcgaagcggaggctccaggagcggtaccaggaagcggagaatgcgaaaaggcaacgcacgattcaggtaatggagctgggtgacataccgaagcccaagaatcaaaacagacaaccggtggtgaagtccaggaatagccttaggaattgggcgaacgggcggcgctaactcctctgtgaccttttttttttttgtttacctcacctgatgaattgttgccatgcctggccttgtcggatcatgcgtttattatgctcaacgaggagcagatgaacaatcttttttttctttttgcacagaaccttcaatggagggttcttttgaagtggcaagagttgcacttgatgccatgagtggagacgagagtttagccatgtctggataatggacatgtagctggatttgtatcggctggttctttccttctttctttcttcttgttcttcttcttcaaaggaagctgctgtagataccagatagaataatcagcaatgtttggtacaggtacagccacctctttttctttttcttttctttttttttaccgtcagtcactttgatcgcggaaccattgacaaaaatgcaacaaactttg

SEQ ID NO: 146725 - DNA, 273 bp, Zea Mays
atgggaggaggggatccggacgcgcaggggctggagagcgagtcagaggaaaagctgcgcgtggctggggaagaatcatgggcgatctcgtcgcggtcggtcgagctggcagagggacgcgcaagggagttgggagggcgcgcaccatggggagcagcagcgggaattccggccaggcgcgagtggaggagagccatgggagggagtcggccgtgggagctgagcaagaagaaagcgcgcgtgagatatggctactggccgtcgagcggttga

SEQ ID NO: 146726 - DNA, 210 bp, Zea Mays
atgggaggaggggatccggacgcgcaggggctggagagcgagtcagaggaaaagctgcgcgtggctggggaagcatcatgggcgatctcgtcgcggtcggtcgagctggcagagggactgtcagcaccgacacccaagacaacgtgggagcaggaaacaaagcgggtggcgagccagaggaaggagctgctacacggacgccacgggtga

SEQ ID NO: 146727 - DNA, 1520 bp, Zea Mays
cagcccagccaaattacatgggaggagagagaaccggcaaattagctggcctagacacgccagccattcttcaaccgtcacgctcacctcgcgagggaaccggcgggcagcggctccacgagatctgcgacggcgcggctccatcgacgaccaggatggacaaccagttcaactccgaagagtggtcgctccctgtagcctcagccatgatggaacttgagaagtacaaccttactggtgcatttactagatcaatgcataacatgggtgtaccaattcagcctgtgaaccttgctattaatgcatcatctcgtcatcatcccactgaggacccagaggttcaagaagtctacaggagtcaagtctcaaacaacaagggaaagaagaaggttgcccaacgaggaaagtcattcaccaaggaggaagatagagcaatttgctcagcgtttttgcatgttagcacagatcctattgtaggaactaaccaatctgcatctgggtattatacaagaatgcatcgacacttcatggagaacattggagtgggtagtaataggactaaggtttccatagaaaatcggtggaccacaattcagaaggccgtcaataaattttgtggtttctttgctgcaattgaaagaagaaatgaaagcggcaagaatgagcaggacaggattaatgatgacattcggatgtatgagggaaccgagccatggcaattccatcactgttgggtgattcttcgaggagagccgaagtggcatgagaagatggcggagagtaacacgagtcaaaaagttaaccaaaagcattcccttaatgactctgaaatagaaataaattctatgcacaccaatagtgcaatccctgaacgacctgaaggaagggacaacgccaaaaagagatgtcgggtaatggctgatacctcgtcgtcaagtacagctgtggaaatgctacaaaaaatgcatgaaagaggagagaagaatgacgagaaggaagaccagttgaggcaagaaatgttccagatggaaagagagaggctcgagttgcaaaagctgaactgggagaagaaatgggcaataatggagtccaatgccaagttgcgacagaatgagtatgagttaaatcagtggaatgcagatcttttagtcatgtcacaggatcttgacaagttggctccaccattgcgtgcgatgtacgagcaaaaacaaatggagatcatgaagagaagaggcatcaacaccccttcagctagttaatcctaagctattatatgagggttgtacgagacttgtgtatgtgaatttgtttccagtgaagttgtttgattgttaagcttgtttgatcagatacacctattcgtgtctcatgtacccagagttaatttgttaagacttgtgtatgtgactgcttctgttgttcagtgaagttgtttgagtgttaaacttgtttgatcagatacacatattcatggctcatgtattagagttaatttgtctaagttacaatgtatttacaat

SEQ ID NO: 146728 - DNA, 1163 bp, Zea Mays
ccgccgccgctgccgccagcgcctcggtccatctcgtcggcgaaggaggagggcgcgatcatccccatccccatcccggcggcggcgctggccatgcggtggtggtgcatcccgggcggcgcgacgcggctcaggaagccgtggtcgaaaccgggcccggcggcggcggcgtagtgggcgagcgggcgcgcggccgggtggtggaagtggccgatctgcggcgctcggtggtggtggtgcgcggcgccggagcccatgggggagaagggcgggtaggtgtcggcggcgggcgcgcggtgggccggcgggaggaaggggacgggccccgtggcgaagaggtgctcggtggcggcgtcggtggcggagccggagccggaggagtggctgccccctcccccgccgccgccgagcccctgcatgcgcttgaggtagaggcggtacttctggaggtgggacgcgacgttctcgcgcgtgaggccgtcgacgctcatgagctgcattatggtcttgggcacggcgttcttgatgccgagctgcgccacggcgtccacgaagcgcttgtgcagctgcggcgtccacacgaggcgcgggcgcttgagcgtccgcgccggctcgtcgccgcccccgcccccgcccccgccgctggatcccgcggccgacgacgcgccgccgccgttgatgtcggggacggggcccgccccgccggcgccgtgcgtcgtgatgtcgaaggccacggcgagatcgggcgtgatgagcgtctgcgtgagcggcatcagctcgtccggccgcgggagctgctgctcctgctcctcgccgcgcgcgaaccagctgggctcctcctcctccctcatggccgcggcttcttcctctgctctctcctgacggacgggcagagcaattcttgcagctcactcgagcgagtcgacgccggcggcagcggcagccagcaggagcaacgagcaagcgaggaggggagtaggggttacttcgaggtggatctctcttcttctagctttcctgcccttctctctcctctcctttctctcccttgtctctcgcgtgtgtgtttagggaggaagggtgttttcgcctgttgctgctgctgctacagctgccgtgccatgatatcctcaagtcttctgttcctcatgctgctgctgctg

SEQ ID NO: 146729 - DNA, 1231 bp, Zea Mays
ccgccgccgctgccgccagcgcctcggtccatctcgtcggcgaaggaggagggcgcgatcatccccatccccatcccggcggcggcgctggccatgcggtggtggtgcatcccgggcggcgcgacgcggctcaggaagccgtggtcgaaaccgggcccggcggcggcggcgtagtgggcgagcgggcgcgcggccgggtggtggaagtggccgatctgcggcgctcggtggtggtggtgcgcggcgccggagcccatgggggagaagggcgggtaggtgtcggcggcgggcgcgcggtgggccggcgggaggaaggggacgggccccgtggcgaagaggtgctcggtggcggcgtcggtggcggagccggagccggaggagtggctgccccctcccccgccgccgccgagcccctgcatgcgcttgaggtagaggcggtacttctggaggtgggacgcgacgttctcgcgcgtgaggccgtcgacgctcatgagctgcattatggtcttgggcacggcgttcttgatgccgagctgcgccacggcgtccacgaagcgcttgtgcagctgcggcgtccacacgaggcgcgggcgcttgagcgtccgcgccggctcgtcgccgcccccgcccccgcccccgccgctggatcccgcggccgacgacgcgccgccgccgttgatgtcggggacggggcccgccccgccggcgccgtgcgtcgtgatgtcgaaggccacggcgagatcgggcgtgatgagcgtctgcgtgagcggcatcagctcgtccggccgcgggagctgctgctcctgctcctcgccgcgcgcgaaccagctgggctcctcctcctccctcatggccgcggcttcttcctctgctctctcctgacggacgggcagagcaattcttgcagctcactcgagcgagtcgacgccggcggcagcggcagccagcaggagcaacgagcaagcgaggaggggagtaggggttacttcgaggtggatctctcttcttctagctttcctgcccttctctctcctctcctttctctcccttgtctctcgcgtgtgtgtttagggaggaagggtgttttcgcctgttgctgctgctgctacagctgccgtgccatgatatcctcaagtcttctgttcctcatgctgctgctgctgatgataagcgagagaggagaatcttgggtgctgagctgacctgcttttatttttagtggcctgcccgc

SEQ ID NO: 146730 - DNA, 751 bp, Zea Mays
tcttctttaatcaacactgcgagagcctccctcctcgtttggttcggacttttgcttcggcgactttacgcggtaggccaccgtaaaccctagccccagaccacgggtcatagccaacgagatgcagatcttcgtcttgatgctgacggggaagaccatcacgctcgacgtcgagagcagcgacaccatcgataatgtcaaggccaagatccaggacaaggagggcatttcgcctgaccagcagaggctgatttttgctggcaaacaattggaggatgggaggacattagctgattacaacattcagaaggagtcaacactccctttggtcttgaggctcaagggtggaactatgatcaaggtgaagacactaactaggaaggaaatcgagattaacatcgagcccaatgacacaattgataggattaaggagcatgttgaggagagagaaggcatcccacctgttcagcagaggctcatttatgctgggaagcaacttgctgatgacaaaactgccaaggattacaacattgaaggtggttcagtgctccatcttgttcttgctctgaggggtggttgctagattaaaaagttcttgtactttctgcttatgctatctgttacatggagttgttttagaattgaagccttgtattgggtggttgattgtaccatgtgattagcacactactagagtcaggtgtcatctgtactgtttaagaaatgcttgaactagttcattcagttgtca

SEQ ID NO: 146731 - DNA, 100 bp, Zea Mays
ggaggattcaatcgatactgtcctgaaccagtatctagcaaccatctttagccatatatttcattcttcttggtccacgacatttcaaatcatttgaagt

SEQ ID NO: 146732 - DNA, 1694 bp, Zea Mays
acctcaggcgacaagagagcaagcaagcacactgctcctccctccccagccgcagcacagcagagcagagccgagtttgctgctgctgacctgacaccatcgtgtgcccctctctcggtccagaaggacgcgaaccgcgctcgtagagtgtggcagcaatggcggtcgtcgccggagacagcgagtcgctgatgcagcggtgcaagccgtacgtggcgatgatctcgctgcagttcgggtacgccggcatgaacgtcatcaccaaggtgtcgctcaaccacggcatgagccactacgtgctcgtcgtctaccgccacgccttcgccacgctctccatcgcgcccttcgcgctcgtgctcgagcgcaaggtccgccccaggatgacgctctgggccttcctccagatcttcgtcctcgcgctgctcgggccggtgatcgaccagaacttctactacgcggggctcaagttcacctcgccgaccttctcctgcgccatgagcaacatgctccccgccatgaccttcgtcctggccgtgctcttcaggatggagaaggtgaacctgaagaaggcgaggtgcgtggccaaggtggtaggaacgctcgtgacggtggccggcgccatgctcatgacgctctacaagggccgcgtcgtcgagttggtctggaccaagcacatacacctccacggcccgcacccggacgccgccgctgctgccgccgccgccgacaaggactggttcaccggctccattttcctcatcatcgctaccctcgcctgggcgtccctcttcatcctccaggccgccacgctgaagaggtacgacgcgccgctgtcgctgaccaccctcatctgcttcgtgggcaccctgcaggccatcgtcgtcaccttcgtcatggagcgcgagccctccgtgtggaggatcggcttcgacatgaacctcctagccgccgcctacgctggcatagtgacgtccagcattgcctactacgtgcaagggctggtgatccagagccggggccctgtcttcgcctccgccttcagccccctcatgatgatcatcgtcgccatcatgggctccttcatcctcgcagagaacatctacctcggcgggatcatcgggtccgtgctgattgtcgccggcctgtactcggtgctgtggggtaagcacaaagagaacgaggagaaggagggagaggcggccatggagatccccgtggcgatcaaggccgtcgacggcaatggcaggatcatggagatcgtggagctggacgaggtgcagctggagaaagcccaggccaacaccaacgccaacgccaacgcggccgtcgccgtcacggcggtccccgcggcggaggcccggatgcagggcaaggacgaccaggcttaagctacaggagatgcgccgatcgacgggtcgatcgcgcgcgtgcgtcatcttagccctcctgtgctgtgcttttgtgcgtcctcttctcccccggccggcccatgatagatgtgttgtagtgtggggcgacctgatgctttaagctagcgacgggcagtagtagtgctagctgtagtagtgaagtggtgccaagatggaagctgaggaggatgcaatataatgatgatggggagttttgtaacctctcctgctaagcagatgctgccagtacgcctgagataatcattattagtatcattttaatga

SEQ ID NO: 146733 - DNA, 721 bp, Zea Mays
ttagcacctcacctcactctagcctccagcctgcacctacaagggccccacaggcagcgcccctgcctggtagccagccacagtcggctaggcggtcaacgcccttgcccgccgcccatgccacacaccggcatccggccagccactgcttcactgtgctccagtagatggtgtgacgcccccatccctcgctctcgctcttcctggctctgatctgatccaccttctgcgttaggctcgattgcttaccggcaatggtgcagtccatcgtctccatcgacaagatttgtgccatgcttgagtgttatccttataccggtactccacatgaaggttcatggagcatgattaccacattggctagtggcacaacatgcctacgtatctaatatttaatgaagtggattcttgttaagcagaaattggttgtcctcaagaaaatgtagaatctcatgtacaaaaggtatcaacaagatgttaataaattgaacctcatattgagactgctaagatgaaatggatttctattaaggagaaattggttgtcctcaaggaaaatgcaggaccttacgtacaaattggttgtcttcaaaatgttggtcttgtagctgcaagcctgcaacaaagagaataaacaattgtggtgatgctacacatgtagaagtagcaatgttggtcttgtaactcccaagatttggttattgatgaatgatatctatga

SEQ ID NO: 146734 - DNA, 1115 bp, Zea Mays
ttagcacctcacctcactctagcctccagcctgcacctacaagggccccacaggcagcgcccctgcctggtagccagccacagtcggctaggcggtcaacgcccttgcccgccgcccatgccacacaccggcatccggccagccactgcttcactgtgctccagtagatggtgtgacgcccccatccctcgctctcgctcttcctggctctgatctgatccaccttctgcgttaggctcgattgcttaccggcaatggtgcagtccatcgtctccatcgacaagatttgtgccatgcttgaggtattaggccatacgagagggtatgttcgattatagttgttttaggttcatggagcatgattaccacattggctagtggcacaacatgcctacgtatctaatatttaatggtgcaattactatgctcgtgttctctcattgctatgtttgtcatcatctgtaggaggttgtcttaggtcactggaatcaacatgggaaacctgttgtgcagaatgttttgtagtatgtttttcataaggttcctcttcatactacatgcttttctttctgatttcaaaaatgcattacacaaataaaattaccatttatatgtctgtatctaatatttaaggcataagaaaaattagcataggcaaagaaatgggtcaaacctcatgttgagactactaagatggtaatacccatttgttcatgtagttcaatttattatgttttatcttgggcttatagttggctaacattattactttctatgattgaagaagtggattcttgttaagcagaaattggttgtcctcaagaaaatgtagaatctcatgtacaaaaggtatcaacaagatgttaataaattgaacctcatattgagactgctaagatgaaatggatttctattaaggagaaattggttgtcctcaaggaaaatgcaggaccttacgtacaaattggttgtcttcaaaatgttggtcttgtagctgcaagcctgcaacaaagagaataaacaattgtggtgatgctacacatgtagaagtagcaatgttggtcttgtaactcccaagatttggttattgatgaatgatatctatgataatatat

SEQ ID NO: 146735 - DNA, 2942 bp, Zea Mays
gctcaggtcatcccgttcctccgggacggctcatcatttctggacaggtacagctcctgcaggccagacatgtggccgagctccagtgggatgctcccggacaaccagttgctcgccaggctgagtctcctgagacccttgagcttgctcagcgacggagggatgcttccatggaaggaattgaaatccagatcaagaaactctaggctctagcaatgctccagctcttctggtagctgaccggagaatctgttcccggatagcgctagctgagcaaggttggtgaggatggagacgtcaggttggctagagtgtcggggatgaacccactcagcgcgttactgctcagatcaagctccagtagctgggtgaggtcgctgatggaggatgggattggcctcgtcaaccggttcccctgcaacgccaacttcgtgaggttcttcatgtccccaatccctgctgggatggtgccgttgaggaggttggattcgaggcccaacgttgtgagcccgatgaggtcgccgatggccggtggaatagacccggagatgcgggttttccctatgtccagtgcttgaatctccctcaggagttgggcaatggagcctggcaactggccaccgagcttgttgtcgtcaagggcgaggacctgtaggctgccgcagttggtaagatggtccaggaactcccagccttgctcgtcgctcgcgtcagctggttgcctgacatgtacagcgactgtgggcagagcatgccgatgactcactgctcctttgtatatttatgctattgttttcatccgacaccgtaaattgcagcctgcttaccaacttcagacgctctcgtcgccgatttgctgcattgcatccaagtgatagtgtcgtagtggtatgacagcctctttttaccttgtactacatttacatcctcttttttttactagcctggctcaagttatttcgttattgttacatgctactactgctcttgttcctgccttttgcgctggatgtcctctagctttggccacaccacaccacccttttatgttccgttggaggggtttggttttctatctgtacacaatcactgtaatgttttgtggagttttccaggatatattatgtgcaggtatccacagagtctcgaaactgaaatcgatcgtgcggtatatgttccacaatcccgacgacgtaaaatggttcaaggcaagtatttctgcgcgccattgacatatccaatttatccattttcgacgcaacgacaatgttatttttgcagcctattgagtggtggacaaaacatggtcgttgtggacgcataaaggagaccgttggtactcatggtgcgtcggttcaccaatcaaatgctttttgacagcttagatccagtttatcattatatatccctatttctggacctcttgctaatgttttctttccgccatgaaatgcttattcaacagcagcatgatgttgtgtgcatgagcttgtacaaacacgcgtacctgaaatggcctgaacagctctaccactgacgtttggctggatctgtaccagcaggctatccaaacaacgggaatgaaacagccgctagcgaggcatgtagcctatctaaatatttttaggattagaaaattgctttgtattggtccatcttatacttttctttaacattacaccctcattcttcttggtcttagacgactcttttcagtatcaattcaaaattcatgtttaactaggtgagtgcccgtgcgttgcaacggggacatataatattatagtgacttatatataaaatgtgtgtattatatgtctccgttgcaacgcacgggcactcacctagtttctattatcagctttccctctcaaagcccaatgcccaaacaacgtacagcctcgtggcagtagacacgaatatgagcgaccgacgactcaatggtgtggctgccccgacatatcacatcgctatcaagtgtgacgtgacaagacgtctaggccccaacgtttgtggatcgagtgcaagcggttgtcgagtgacttctttatttgtccagactggagcctgtcttgttcagtcaccgcacgcacgtccataacgaggtctgtgcctcgtcagtgccagcggagccctcgtaggccaacgcagcagcaggcacctcggcgccatggcccatgacaccgagcaaagggtccaaaaacgatattaagttgtcaaaaagtctaaacgtggtatttttcgaaaaaaagattaaaatataaaaaattcggtcgtcaatccaatgggtggtgatatcgtgctttttttcatcctagacaacaactggattggccagtcagccagtacacctaatgaattaaccacaatccaatatgattatctcaacatactttgattgctgcacacatatacatctatctattaacctagtgcagaagaacacagtagactatcctcttctatgtaaaattggccgtgcttagtgtgtgttttgtgtacttgtgacaaaccaaataaacccaactagtaaaatatggtgtttgtacaggtcttttatgcttgtagaaaaattgagcatatgacatgtttagtaaaaactgagcatgtggtgttttttagaaaaattgagcatattgcatctcaaatacttgccacaaaaacaacatgatgaaatgaaatagcttaggcatgtattcatgcacttattagtccaagatactcgcattatttctcaggggaggccaaacaagcaagataaaaagagagaagccaccatcaatccaaatgaatgttctaatatccagtgctagtgggcacgcacacatgacagtgacatggtagagaatgtacaattgaaaattaatagcgacatatgcatgtaaaataaaaataccagtgcacaacaagcataatgcataaccttattgcttctggcatca

SEQ ID NO: 146736 - DNA, 980 bp, Zea Mays
ctcccggacaaccagttgctcgccaggctgagtctcctgagacccttgagcttgctcagcgacggagggatgcttccatggaaggaattgaaatccagatcaagaaactctaggctctagcaatgctccagctcttctggtagctgaccggagaatctgttcccggatagcgctagctgagcaaggttggtgaggatggagacgtcaggttggctagagtgtcggggatgaacccactcagcgcgttactgctcagatcaagctccagtagctgggtgaggtcgctgatggaggatgggattggcctcgtcaaccggttcccctgcaacgccaacttcgtgaggttcttcatgtccccaatccctgctgggatggtgccgttgaggaggttggattcgaggcccaacgttgtgagcccgatgaggtcgccgatggccggtggaatagacccggagatgcgggttttccctatgtccagtgcttgaatctccctcaggagttgggcaatggagcctggcaactggccaccgagcttgttgtcgtcaagggcgaggacctgtaggctgccgcagttggtaagatggtccaggaactcccagccttgctcgtcgctcgcgtcagctggttgcctgacatgtacagcgactgtgggcagagcatgccgatgactcactgctcctttgtatatttatgctattgttttcatccgacaccgtaaattgcagcctgcttaccaacttcagacgctctcgtcgccgatttgctgcattgcatccaagtgatagtgtcgtagtggtatgacagcctctttttaccttgtactacatttacatcctcttttttttactagcctggctcaagttatttcgttattgttacatgctactactgctcttgttcctgccttttgcgctggatgtcctctagctttggccacaccacaccacccttttatgttccgttggaggggtttggttttc

SEQ ID NO: 146737 - DNA, 673 bp, Zea Mays
ggagtaccctatgcacatcctccaccgattccgattgtgattctcgatttagtgggattccaggcatcccacgagttacaatcataatgggtttactacttgataatagcatttttctatccgttaataaaaatatcatcgtacttgcttgtccatctttttcagctctgctcccaaccaaggatttcacaaatcaaagataaaggattctggaacaagtaaacacgattttcaaccgtctcaataatagaattagatctgaataaggaataaaagtcaatttgttcgagatgagataaagaaaagagtttagagacgactcaaaaaatttcgaaggtttttcttttgaagtttgtcaataaaaattagccaacttgagtcatgagtataaatgaaatttgttttttcttttctttaaggaaattaatgcaagtcataatcgaaaatctatctatttgcattatagacagattgcattatagacaaaaattcgaatcattttctcgagtcgtatgaggagaaaacctcctatacgtttctaggggggttgtttatctacatctatcccaataagctatctatcgaatcgttgcaattgatgtttgatctcgaagagaaggaagagatgtatatatatatatattcttgattaaattattgggtcccttgttct

SEQ ID NO: 146738 - DNA, 183 bp, Zea Mays
atggccgggatagggagaggtcaccgtgggaaagaagaggaagaggaggctcaccttggtgacgagaagacgatggcgcggacggtgagccgtccatggcgagcgcagcagagtgattcggttttgaagggtcgtgggaagatgggcgatggggaaccagagaaaatgggaggaagcagttaa

SEQ ID NO: 146739 - DNA, 2290 bp, Zea Mays
cgcccgaccgctgtctcgctcgcctcccgtctcgcttcgtctccattttctccccaccccaccacacccgcgtcaaccaaccaaaccctagaaggctctcgccctcgtccccaatccctcgccgccccgcgatccccgccgcccgcaggccaaaaccctacgcgtattgctcgacgccgggtatagacagtgtaatcactttgtcagaaatgccttctgcatccaagtccaaggcaaaagaaagatcagctgcaaaagttgcaaaagagcaacccaaggttgctgcaaagccaatgggaaatgctacacttgcaagttcttataacaacctgtctggaaagttccatgttctggaaccatcaagctctttgttgggtagccaaggcatcgataaattcaggaatacagatgaaatagatgagcattctcgcagctcccatggtacaggggatttcgattgtgcctccaacaatggtagctgttctggtgactcagaggatacaaaggaaaaatcaaccagcactgcgtcccgagtagactctgttcctggatgtgatattgataaacgtgagaagattagacagaaaaatgagaagaagcatcaaagacagaaggagaggcgtgcccaagagttacacgagcgttgtaagggatacattatgtccagaaagttggaagcacttgcgcagaagcttgttgcgatgggtttctcagcagatcaagcaacgatggctcttatacaaaatgagggttgcgttgaggagtctgttacctggctctgcaactttgatgccagtgaggaagctaaacaacaacttgtagctgatcaacagtctggagttaacttgaagattgatatagctgatgagctttcaaagattgtgagcttggaggcaaaatataagtgtacaaagcaagaagttgaaagggcagttgtttcctgtgaaggtgatctagaaagggccgaggaggccttgaagacacacaagcaagaatcaactgcaatcccaccaaagcctgaggggtctggctattcaagtggcttgcctaataagccgcaagttgtacttgcacagaaccctgcaaggcctcaaacaaatggattatcatcagtaggatctcatcagatgagaagagaggagaaggacataaactataagcttttgatgaatggtagtggtccaaaggaacctgcaattaaaggttttcagccactggcaacaccgattaagccagatttggtccgtcagcaatttgttcaacctgagaagagacgtctcaatcccaactcgaatccatcagttccttctgtggcatcgtctcctttgcctgttgcagtgccacaagtgaagccagacatgcggcatgtggcagggaccaatgaggtgaaaagtttgatgcccaatggaagcttgcgagagtctgtgattgtaatgcagcgtcctcaatctgcaggtaccaaacagagcctaccatccactagccatagtatgtttgtgtcagaaccatctgcaagggattggtacttaaatggcgtgtcaggtgtggatatgatgttgaatgggggcttaggtcatggactaaggaatatgagtttggacagtgctagttctgccaggtcgtttgggcatgcaaaccatcaacaaaatttggtttctaatcctatagagctggctgccaatggttggggtggcacctggagttctggaggtacatcatcttcccgttctgtggtgtcatcactcggggcatttagagggtggaatgcatccgagtcctctgcattgcctcattctgattggagaaccaacggggcagcaccttatgactacacctcagtagactggagcgtcgacacaacactattgaacccagcagcaaagagcgagctgctgtcggacacatggtcaaccatgttcatgggtggcagatcaacaaggacacctgggaacctcagtggtgcaggcatcgctgggttgtatgacagtaaccgtccaatggatcctgctccttcggctcgtccatatgagtggcctactttctgcaggggaggatcttcctagtttccccaaccctgtaggcaagaggccattgaataaaaaaagtaaaagctgtcatttgtttcttttcttgttttggtctcagttgcagttggttgaaaaagttttactttgtctatcgaaccgagcttgtgtacccttgactgttggccgagataagtcatctttctgtgaaatcgttgtgcatgaaaaatgaaggaagagaactgaatctatcttggctgaaatgc

SEQ ID NO: 146740 - DNA, 169 bp, Zea Mays
tcgtgatgactgatgggatcagtgtttgaaactaggtagcataaaatggcatgttcattcagattatatgatcctattatgaccctcaggggttctcggtacaatatgcataccagagtatatggtgtttgtaccgcaacttaaatatttgtctcacaattgaagtggt

SEQ ID NO: 146741 - DNA, 516 bp, Zea Mays
ggcacgccgatcccgatggacgctgaccacagccacggccagccgccgccgccgccgccgtcctcgacggaaatcctgatggccgcgctcctcaacgttccagccgtgcagctcccgggcctcgcgcgggcgctggccgccgacgcgcggcggctgcaatcccgcctcgcgttcctcctcctctccccgccgcacttcacgcgcgcgctcgcgcggctccgctcgatgcctctccccgccaaggccgcgctgctgggccgcgcgctcctccgctccctcctcctgctcctcccggtgctctgccccgacggcggcagcggcggcggcggctccacccaccaccaccacctcctcctgcagccgcccgaccacgacgctgcgctcatcgtcctcgccatgtgcgactcctactccccccgaggaagcggcaccttcccccggtcaactggggacacatagattttgtacagcgtgatggtatctgcactctcctactcatgcctcacgggattccct

SEQ ID NO: 146742 - DNA, 345 bp, Zea Mays
gatattagcgtcccacttgaatgagtctctgtcaactctgtttgtctcttggtttctccgttataatgcttatatgctcccaagtcagttcatgtcaaccagtaagtgttcaataacattttgtttcaattgtgcataccatttgatatgtttttggtcatctcagcacaaaattttagtttgttttggctatctgttttatgaagaattaaaccttggataattatgttacttcggtgtgattgggcagaatccactaacaacatatttgttcctgtcaaactgtgtatgaatgatttagtttacattagaagtgtcatccataatttctagatcaaagaaaat

SEQ ID NO: 146743 - DNA, 2248 bp, Zea Mays
aaagcggagagaggccaatgcgagggagtagctcgcggcggaccagagaccagagaccagagagcgagagcgagcaaagctcacaaggcgaagcggaattgattgcgaccaccaccaccacgtcttctccacctccgtccgatccgtcgtcaccaagccaccatcattggcgccaccgcgccgcccgcccgcgggagcccagctgcgcattcttaactgtttctctcttggcttctcggcgaagtgttgcggttgcgggggtactggagtgcggagagcagcgcggcggtacgtgtgcgttgctgcgctgtgcttccacagtgagctaggggagagcgagggaggaagcaccacccaccacaccacctccattaaaggcgctcacgcgccgcccctccgcctccacgagaaagcgaggcgggagcgagtgagcaggggcgtacgtccgtcgtcaaggccatctctctcctcctcacttcctcccctcacggggacagccacgtacaaaggcagctcgccaacgcccagcacctccctcgccgtgcgcctttaaagacagcgcgcgacaagcttaaagctgcagaggaggtgacacagaggccagagccgtcgcgcgcgcgcgaaaccgaaagcagagaggagcggcaatggcggtgaccgcgcggctcggcgcggtcgtggcgtgcgtcgtcttggcggccgtggcggtggcgccgcggccggcggcggggatcctcgacccggtggacttcctagcgctgcaggcggtgcggcggtccctggacgacatgcccggctcggcgttcttcgacgggtgggacttcacggccgacccgtgcgggttccccggcgtgttctgcgacggggaccgggtggcggggctcgcgctcggcgacccgcgggcggggtctccggggctgacggggaggctggacgcagcgctggggcggctgtccgcgctcaccgagctctcgctcgtgcccgggcgcgtcgagggggagctcccggcgtcgctcgcgtcgtgctcgaacctgcgcttcctggcggtcagcaagaacctcctctccggccagataccggacgggctcagcgcgctgtccaacctccggacgctggacgtgagcttcaaccagatctccggcgccatcccgccgtccgtcgccgcgctgccgtcgatcaccaacctcatcctctgccacaaccagctcaccggcggcgtcccgtcgttcccggactcgtccccgctgctccggctggacctcaagcacaatgcgctctccggcggcgtgcccgccctgccggccgggctgcagtacctgtcgctgtccgcgaacaagctcagcggcacggtggaccaggtgctgccccggctggcccggctgaacttcctggacctgagcgtgaaccagctggagggcccgatcccggcgtcggtgttcgcgctgccgctgtccgtgctgcagctgcagaggaacttcttcgcggggccggtgcagccgtcgggcgacgtgacgatcccagtggtggacctgagctacaaccggttctggggccagctgtcgccgctcctcgcgggcgtcgggcagctgtacctgaacaacaaccggttcagcggcgaggtccccgcgcggctggtgcaggagctggtgggctccggcggcctgcaggtgctgtacctgcagcacaacttcctgacgggcatcgagatatcgccgtcgtcgtcgctcccttccacggtgtcgctctgcctgatgtacaactgcatggtgccgccggtgtacgcgccgtgcccgatcaaggccaggtcgcagaacacgcggccggccgaccagtgcccggagtggaggggctgagacgccaatgccaaataccggatcaccgcagaagaacgacggatggagattgcgaaacggcggtctctgattctttgattgttttttgtccagttgttactagtgtttcttactattcttttccggtttggggaaggaggatagttacagacatgtaagtgccttgatagccgtgatttacaggtgtaagtttttttagttggtttatgtgcattgtgtgtatagcgagcagtactcccgtagcttctaccacatgctttcagatcagatgaatgaatggtgttaggttatcaaatcatgtcactgaacaaatctgctgttacccgcaccattccatccttatgggaggaatggtggctgcataacaaaatcagtcattctgaggtcatttatct

SEQ ID NO: 146744 - DNA, 531 bp, Zea Mays
atggggcagtttggggacacgacctacaccaaggtttttgttgggggactcgcgtgggaaacccagaaggagactatgaggaagtatttcgagcagtttggagagatcctggaggctgttgtcatcactgacaagaacactggcagatccaagggctacggatttgttaccttccgggactcggatgcggcaatgagagcttgcgttgatcctgcaccggtactctccatataccctagactacggttatccaacagacctcagtacacattttatggaggaggagctggcatggtgacaggaacaagtcccttttatccatatttccagtttgggcaatcaggaaacactactaccaactatacaagtggacaaggctacaacttgcaatacccacaaatgttccacttctcaactgtatcatctacagctgcagctgtgaacggctttgctcagcagtatggaggaccattgtcactagcagcaagtcctcaagcccaagcaggtcttctgacgagagtattgtgttag

SEQ ID NO: 146745 - DNA, 193 bp, Zea Mays
atttcccatttacaacttgtgttccatttcaaatttcaaacataaacatgtttccacttgatcatgccaaaatatgaagcatttgtttatttatcaatttatttgtattgtaagataatacttttgttccctctattcctattttcattctcttggttttcaaatctaaatttcaatttttgttataagtctc

SEQ ID NO: 146746 - DNA, 160 bp, Zea Mays
aggatttttaaagacatatgctgttggcaaagaaaatgctcctggaattatggttttgcaggagtggtggggaattgactatgagataaagaatcatgggatccacatttcccaacatggtgaaggatacagagcactcattccagagtataatcttgcc

SEQ ID NO: 146747 - DNA, 3057 bp, Zea Mays
cgccaggaccaattccattcgctccaccccgcgaccgcgagtccctcccttcctgcctccccccgcggaatcgtgagggttcccaaatcgccggagttgatcctgccgtgcgggcgcgcggtggttagggctagtctgtctccggaaatggacgcccccgattccggcggtggcggctcggcggatgccggcgagcctatctgggactggggcaatctcctcgacttcgtcgtccaggatgacgactccctcatcctcccctgggatgacgccgccggcatagcagcatccgaccccaccgaggccgccacggcactgctccccgcctcgcccccgcttccgcagtcggtggaggaggagccggagccggagccggaaccggggccagtgcttccgccgccccctcttcgggttcaggggatcgggcgccgcgtcaggaagcgggacccgcggctggtgtgcccgaactatctcgcggggatagtcccatgcgcgtgccccgaggtggacgagatggtcgccgctgccgaggtggaggacgtggcgacggagttccttgctggcgcgcggaagaagactaagactgctggtcgccgtggcaaagcggaagctgcaggtactgccggaggaactgtccgcgcggcggtggcggagatgaagtgccaagtgcctggctgtgaggcggacatacgggagctgaaagggtaccatcgccggcaccgtgtgtgtctgcgctgcgcgcacgctgctactgtcatgctcgatggtgtccagaagcgctactgccagcagtgcggcaagttccatgtattactagatttcgatgaagataaaaggagttgtagaagaaagttggagcgtcacaacaaaagaagacgaagaaaacctgattccaaaggaacattagataaagaaattgatgaaccattggatatgccagcagatgttagtggcagcgatgaacttagagaagagaacatggaaggcataaccagtgagattcttgagactgttcttagcaacaaggtgatggacagagaaacacctgtgggatctgaagatgtgcttagttcaccaacctgtacacaaccttgtttgcaaaatgaccaaagtaaaagtgtagttacctttgcagcttctgttgaagcctgcattggtgcaaagcaggaaagcataaaacttgccaattccccaatgcatgacaccaagagtgcatattcatcctcgtgtccaacagggcgcatctcattcaagttgtatgattggaatcctgcagaatttcctcgacgactacgacaccagatcttcgaatggttgggtagcatgcctgttgaattggagggctacattcgtccgggttgtattattttaactgtatttattgcaatgccacagcatatgtgggacaagttatcagatgatgcagcagatcttctcagaaacttggtaaattccccaaacagtcttttgttgggtaaaggggccttcttcattcatgtcaataacatgttatttcaagtactaaaagatgaaacaacattgatgagtaccagattagatatacaagctccaaggattgattatgttcatccaacatggtttgaagcagggaaacctgtcaatcttatcctttatggaagttctcttgaccaaccgaacttcaggtcacttctgtcttttggtggagactatttgaagcatgattgctaccgtttaccatctcatgatacctttgatggttttgagagtggtgattttattcctgattctcaacatgaaattttccgaattcacatcactcaatcaagaccagatatttatggacctgcatttgtggaagttgaaaacatgtttgggttatcaaattttgttcctatcctttttggaagcaaacagttgtgttctgaactagagaggatacatgatgctctttgtggttcttacagtgaaaataatgtacttggtgagttactcagtgcttcttctgatcctcatgagcaccggaaactttgtagttctgtgatgtctggattcctgatcgacattggatggcttatcagaaagcctactcctgacgaatttaaaagtgtgctgagttcaacaaatatacagagatggatatgcatgttgaagtttttgatacagaatgatttcatcaatgttctggagataatcgtgaagtcaatggacagcatcatgggttcagaggttctttcaaacttggaaagggggaggttggaagatcatgtaacagcatttcttggatatgtaagccatgctcggaatattgctgatcgtagagctaaccatgacgagaaaacacagattgaaacaagaggcattattgttacttctccaaatcagccaaacttaggcgcctcagtgccatttgctagtgaaaacactgactttggaggggataacaaattgaactcaactgatgaggaagaaattatgccacttgtgactagagatgtctcacaccggcactgctgccagcctgatacgactgttaggtggcttaagccctcactgattgttacttatcctggtggtgccacgagaatgcgacttgttacgactgtggcggttgcggctgttttgtgtttcacagcttgtcttgttcttttccatccgcatggggtaggggtgcttgcagctccagtgaagaggtacttgtcgagtgactccgcatcgtagttgatgttatagatcagatattctattttgccgtgccgctctgctctgtctgtatcatttgcgctttgttaaggcatagcttgtgtatctgatttttttgtaagggaaccaacacgcaggtgcttttcatctgtgcaaaactggcatcttttgtttttttcagactgtaagtataggcgccggaagctctgacctgctaatgtttgggcatgtaaacttctaatgtagtgcatcagttaatggaaaatagctgcattgctgcaaagggtggtgtgcgtctgaactgttggcatacaatacaattgtgctgttctcgctgctgcgggttttactggcatacgcatacgccgtggagaa

SEQ ID NO: 146748 - DNA, 1734 bp, Zea Mays
ttttcttttttcacttgtattttaacaacttatgattgcatcgtgacaaataccctgtgttgctaataatttgcacattttttacagttatcagatgatgcagcagatcttctcagaaacttggtaaattccccaaacagtcttttgttgggtaaaggggccttcttcattcatgtcaataacatgttatttcaagtactaaaagatgaaacaacattgatgagtaccagattagatatacaagctccaaggattgattatgttcatccaacatggtttgaagcagggaaacctgtcaatcttatcctttatggaagttctcttgaccaaccgaacttcaggtcacttctgtcttttggtggagactatttgaagcatgattgctaccgtttaccatctcatgatacctttgatggttttgagagtggtgattttattcctgattctcaacatgaaattttccgaattcacatcactcaatcaagaccagatatttatggacctgcatttgtggaagttgaaaacatgtttgggttatcaaattttgttcctatcctttttggaagcaaacagttgtgttctgaactagagaggatacatgatgctctttgtggttcttacagtgaaaataatgtacttggtgagttactcagtgcttcttctgatcctcatgagcaccggaaactttgtagttctgtgatgtctggattcctgatcgacattggatggcttatcagaaagcctactcctgacgaatttaaaagtgtgctgagttcaacaaatatacagagatggatatgcatgttgaagtttttgatacagaatgatttcatcaatgttctggagataatcgtgaagtcaatggacagcatcatgggttcagaggttctttcaaacttggaaagggggaggttggaagatcatgtaacagcatttcttggatatgtaagccatgctcggaatattgctgatcgtagagctaaccatgacgagaaaacacagattgaaacaagaggcattattgttacttctccaaatcagccaaacttaggcgcctcagtgccatttgctagtgaaaacactgactttggaggggataacaaattgaactcaactgatgaggaagaaattatgccacttgtgactagagatgtctcacaccggcactgctgccagcctgatacgactgttaggtggcttaagccctcactgattgttacttatcctggtggtgccacgagaatgcgacttgttacgactgtggcggttgcggctgttttgtgtttcacagcttgtcttgttcttttccatccgcatggggtaggggtgcttgcagctccagtgaagaggtacttgtcgagtgactccgcatcgtagttgatgttatagatcagatattctattttgccgtgccgctctgctctgtctgtatcatttgcgctttgttaaggcatagcttgtgtatctgatttttttgtaagggaaccaacacgcaggtgcttttcatctgtgcaaaactggcatcttttgtttttttcagactgtaagtataggcgccggaagctctgacctgctaatgtttgggcatgtaaacttctaatgtagtgcatcagttaatggaaaatagctgcattgctgcaaagggtggtgtgcgtctgaactgttggcatacaatacaattgtgctgttctcgctgctgcgggttttactggcatacgcatacgccgtggagaa

SEQ ID NO: 146749 - DNA, 2695 bp, Zea Mays
cacacgagagtgtcctccatggcgacggcggcgaggaaagggagcagcagcaggagtgccgcggcggcggccgcgactgtggccgtgttgttcctcacagtagtatcggccgccggcggtgctgcggctactccgcggcggctcctggtggacacggacatggacaccgacgacttgctcgggcttctctacctcctcaagcagaaccggtccgagatcgacgtcaaggccattaccatcagcgccaacgcgtggagcgacgccgggcacgccgtcaaccatctctacgacatgctctacatgatgggccgcgacgacatccccgtcggcgtgggcggcgacggcgggatatcctacgccggcgacgtgcaacgcgacgtcggtggctacctaccactgatcgaccagggcatgtcgacggacggcggctgccggtaccggcaggccatcccgctctcgggccggctggacgtcgacacgaactccggggtccggaagggcttcctcccgcggggctcccgggcgtaccggccgctccggcagcccacggcgcagcgggtgatggcggacgcgctgtccgccggcccgacctcggtgctcctcctgggcacgcacaccaacctcgcgctcctcctgatgtcgcgcccgcgcctgaggcggaacgtggagcgcgtctacgtctccggcggcgccgtgagggcggcgggcaacctgttcacggccgccgccgccaacccggtcgccgagttcaacgtcttcggcgaccccttcgccgcctacctggtgctccactccggcgtcccgatcactatgatccctctcgacgccaccaacaccatccccgtgacggaggcgttctactccgagttccagcggcgccagaggacgtacgaggcacagtactgtctcctgtcgctggacgggggcttctacttgtgggatcccttcgccgtcggggtggccatctccagcatgcgccatggcgatggcgaaaccagcaacgagtttgccgagcttgagtacatgaacgtcaccgtggtaacgtccaacaaaccttacggtgcgcgtgacgacggctctaacccctttttcgatggacgaactactcccaagtttgggctgcgagagggtggagttcacagcggccatgttgagaccgggataagagaccccttctgcctggtgcccggaagcaaccgaggcagatgccaagatgggtacactaaagaagtggccggtccagaagcagtgcaggttctaaatctcccccaaaacactggacgtttcaacataagcacacagtttccgtactatagagaggttctctacaagccggattccatcatgaacgtgacccgcaggggcgggaagccaaagccagtcgtttttgacatggacatgagccctggggacttcgtgtcgctcatatgcctcctgaaagaacccagacacgagatcgatctgaaggctgttttggtcaacgggaacggctgggctaacagcgctagcattgacatcgtgtacgacgtcctgcatatgatgggccgtgacgacatcccagtcggccttggcaatgccactgcgctgggcagcccgacgcttgggtgcaacaattcctacgcgatcccgcaagggagtggtgggtttgtagattcagacacgctgtatggactggctcggtcgttgccgaggagtcctcgaaggttcatctctgatgatctagaccatcccgagcgccggcacccgagcgctttcgatgtttggcggtcagttaggaagcagctcggtccaggccagaagatcacggctcttaccagcggacctctcaccaatctagccagcattatttcactgtctgacatggacgccggctctgtcatagagagagtttatgttgtcggtggagtggttagagatggaggtgatgacaggggaaacgtgttcaccgttccctccaacagatacgcggagttcaacatgttcctggatccgctggccgcaaagacggtgctagaatctggtctaaatatcacgctcattcctctcaacgtgcagcggaaggtttcttcatttgagggcgtcctcggagctctgaagcaacacacccagcatactcccgagtcaaagcttgtgcgccgtttgctgttgctgctccagcagctccagagggaacaacggaaattctatcaccacatggacatatttcttggagaagttcttggcgcagtttacatggtccaaggatctaacttggagccctctgtggaagtgaagtcaatatgcattgttgccaacacaaccgaaagcataaatgggcttattttggtcaagaagagcgcaaagccagtggatgtattgtatagtttgaatactggagcatattacgaccacctggcaaattctttggttaaccataagcaatctgctcctattggcagctttggagagcaaaaggcaatttggagcaggccacaaaaacatttagggacggacatagcaaaggatagaaaataagcaatctatttgtacaatattgctggaaaaggattagagattagattccaaaagaaaaacagtttacatcatacttcactatcttatagcgtagtacaaaattaaaggagatactcaacacagttacagttgtatgaaagggcttcagtaagcaataaaatttatcttgaatggatttcac

SEQ ID NO: 146750 - DNA, 2933 bp, Zea Mays
gtagctatatgatgtgatagtatcctatatagctttcgtgtctgacggaatggtctactagctccgatgaattccaaccccccatgcgcacgcgcctcaattgtttattgcgtcgccattgctggatcatcactagctagctagactagaggcgaagatgggggggagaaaaagtaacgtagatagactatggacagcgacggcgcatgttggcctccttgactatcttcttgcgcagtagtatgtagacatgcatgtttcaacgcctcgtggccgtcaattttgagagccatctttctttcagccaagaggtcgcggtagtagtgcgtcactattgccgtgaacaatgcaggccattaccatcagcgccaacgcgtggagcgacgccgggcacgccgtcaaccatctctacgacatgctctacatgatgggccgcgacgacatccccgtcggcgtgggcggcgacggcgggatatcctacgccggcgacgtgcaacgcgacgtcggtggctacctaccactgatcgaccagggcatgtcgacggacggcggctgccggtaccggcaggccatcccgctctcgggccggctggacgtcgacacgaactccggggtccggaagggcttcctcccgcggggctcccgggcgtaccggccgctccggcagcccacggcgcagcgggtgatggcggacgcgctgtccgccggcccgacctcggtgctcctcctgggcacgcacaccaacctcgcgctcctcctgatgtcgcgcccgcgcctgaggcggaacgtggagcgcgtctacgtctccggcggcgccgtgagggcggcgggcaacctgttcacggccgccgccgccaacccggtcgccgagttcaacgtcttcggcgaccccttcgccgcctacctggtgctccactccggcgtcccgatcactatgatccctctcgacgccaccaacaccatccccgtgacggaggcgttctactccgagttccagcggcgccagaggacgtacgaggcacagtactgtctcctgtcgctggacggggctctggcgcggcagaggaggcggtccgacagccatgacaacacgggcttctacttgtgggatcccttcgccgtcggggtggccatctccagcatgcgccatggcgatggcgaaaccagcaacgagtttgccgagcttgagtacatgaacgtcaccgtggtaacgtccaacaaaccttacggtgcgcgtgacgacggctctaacccctttttcgatggacgaactactcccaagtttgggctgcgagagggtggagttcacagcggccatgttgagaccgggataagagaccccttctgcctggtgcccggaagcaaccgaggcagatgccaagatgggtacactaaagaagtggccggtccagaagcagtgcagatgcttgtggcaacgagggcgaggccgaacaccaacaaaagtagcccactggacaagaaatttatggagaccttcctagaggttctaaatctcccccaaaacactggacgtttcaacataagcacacagtttccgtactatagagaggttctctacaagccggattccatcatgaacgtgacccgcaggggcgggaagccaaagccagtcgtttttgacatggacatgagccctggggacttcgtgtcgctcatatgcctcctgaaagaacccagacacgagatcgatctgaaggctgttttggtcaacgggaacggctgggctaacagcgctagcattgacatcgtgtacgacgtcctgcatatgatgggccgtgacgacatcccagtcggccttggcaatgccactgcgctgggcagcccgacgcttgggtgcaacaattcctacgcgatcccgcaagggagtggtgggtttgtagattcagacacgctgtatggactggctcggtcgttgccgaggagtcctcgaaggttcatctctgatgatctagaccatcccgagcgccggcacccgagcgctttcgatgtttggcggtcagttaggaagcagctcggtccaggccagaagatcacggctcttaccagcggacctctcaccaatctagccagcattatttcactgtctgacatggacgccggctctgtcatagagagagtttatgttgtcggtggagtggttagagatggaggtgatgacaggggaaacgtgttcaccgttccctccaacagatacgcggagttcaacatgttcctggatccgctggccgcaaagacggtgctagaatctggtctaaatatcacgctcattcctctcaacgtgcagcggaaggtttcttcatttgagggcgtcctcggagctctgaagcaacacacccagcatactcccgagtcaaagcttgtgcgccgtttgctgttgctgctccagcagctccagagggaacaacggaaattctatcaccacatggacatatttcttggagaagttcttggcgcagtttacatggtccaaggatctaacttggagccctctgtggaagtgaagtcaatatgcattgttgccaacacaaccgaaagcataaatgggcttattttggtcaagaagagcgcaaagccagtggatgtattgtatagtttgaatactggagcatattacgaccacctggcaaattctttggttaaccataagcaatctgctcctattggcagctttggagagcaaaaggcaatttggagcaggccacaaaaacatttagggacggacatagcaaaggatagaaaataagcaatctatttgtacaatattgctggaaaaggattagagattagattccaaaagaaaaacagtttacatcatacttcactatcttatagcgtagtacaaaattaaaggagatactcaacacagttacagttgtatgaaagggcttcagtaagcaataaaatttatcttg

SEQ ID NO: 146751 - DNA, 471 bp, Zea Mays
atgttgtgtcaacaagggaagagaatcgaggatctgtcgcggcacaaccggttctattatgttacaggaagtaattgttataccccatgggttgcactttccatctgcccttggcctggtgtgtgggaatatgtgagggtcaatgtcatcaagctcgctgttgaggagatgagggtccctgagtacctgcagttcaaggaacaacttatggaagaagggttgaggctgagagaacttaccatcagagagttcttgagatacttgaccaattggaagaagtattcacatgtacaacttttcttgtcatatgtatgccatggcgcttttgtaaatgttgcttcctttgaacaatttggtgtcaccttgatagagttgcttctcgcaatgggcttcacctacaaccaggtcatggaagcctacaacatattcgacgaggatgtggattgtcctgtgtgggctctcttcctttga

SEQ ID NO: 146752 - DNA, 3300 bp, Zea Mays
gcggggcccgaccgggataaggtgaggagccgctgcgatggcggcccgtgtgacccccgtcgcaacgcacggacgctacgcgcctggacagactcggcgcaggaggggatcgggaggatggcggcgtcggtttccacttccagggtcatctgcctccagaagccgggccccgaaggcagcagcaggggggccagggaagtggcccccttcacccgccagtcggtcgcggcgccgaggcgcccgcacggcgccaacgcgagcgtgatcatcggctccgactccggcgccggacggggccagcattcgccgccgctcagggccgtcgtcgatgccggcccggtacagacgacgaaaaagagggtgttccacttcggcaagggcaagagcgagggcaacaagaacatgaaggagctgctgggcggcaagggcgcgaacctggcggagatggcgagcatcgggctgtcggtgccgccggggttcacggtgtcgacggaggcgtgccagcagtaccaggaggccgggcgcgccctcccgccggggctctgggcggaggtcctcgacggcctgcggtgggtggaggagtacatgggcgccgccctcggcgacccgcggcgcccgctcctgctctccgtccgctccggcgccgcggtgtccatgcccgggatgatggacacggtgctcaacctggggctcaacgaccaagtggcagccgggctggcggccaagagcggggaccgcttcgcctacgactccttccgccgcttcctcgacatgttcggcaacgtcgtgatggacatcccccacgcgctgttcgaagagaagcttgaagccatgaagaaagccaaggggctgaagaacgacaccgacctcaccgccaccgacctcaaagagctggtgagccagtacaagaacgtctacgtggaggctaagggagagccattcccctcagaccccaagaggcagctggagttggcagtgctggccgtgttcgactcgtgggagagcccgagggcaaagaagtacaggagcatcaaccagatcaccggcctcagaggcaccgccgtgaacgtgcagtgcatggtgttcggcaacatggggaacacctctggcaccggcgtgctcttcactaggaaccccaacaccggagagaagaagctgtacggcgagttcctggtgaatgctcagggcgaggatgtggttgctggaatcagaaccccggaggatcttgatgccatgaaggacgttatgccacaggcctacaaagagctagtcgagaactgcaggatactggagagccactataaagaaatgcaggacatcgaatttactgttcaggagagcaggctgtggatgttgcagtgcaggacagggaaacgtacgggcaaaagcgccgtaaagatcgccgtggacatggttaacgagggccttgttgagcgccgtgcggcgatcaagatggtagagccaggccacctggaccagcttctccatcctcagtttgagaacccatcggcgtacaaggaccaagtcattgccacgggcctaccggcgtcacctggggccgctgtgggccaggttgtattcactgctgaggacgctgaaacatggcattcccaagggaaatcagttattctggtgagggcggagaccagccctgaggacgtcggcggcatgcacgcggctgcaggaatcctcacagaaagaggtggcatgacctcccatgccgccgtggtcgcacgcgggtggggaaaatgctgtgtctcgggatgctctgggattcgtgtaaatgacgcagagaaggttgtgaagattggaggcaatgtgctgcgcgaaggtgagtggctatcgctgaatggatcgaccggcgaagtgatcctcggaaagcagccgctctccccaccagccctcagtggcgatctgggaacattcatgtcctgggtggatgacgttagaaagctcaaggtcctggcaaacgcggatacccctgaggatgcattggctgcacggaacaacggggcagaaggaatcgggttatgccggacagagcacatgttcttcgcttcggatgagaggattaaggctgtgaggcagatgattatggctcccacagttgagctgaggcagcaggcgctggatcgccttctgccttaccagaggtctgacttcgaaggcattttccgtgctatggatggactttcagtgactattcgacttctggaccctcccctccacgagttccttccagaagggaacgtcgaggaaatcgtgcgtgaactgtgttctgagacgggagccaaccaggaggatgccctcgcacggatcgaaaagctttcggaagtaaacccgatgcttggcttccgtggctgcaggcttggtatatcgtaccctgagctaacagaaatgcaagcccgtgccatctttgaagctgctatagcgatgaccaaccagggcgttcaagtctttccagagataatggttcctcttgttggaacaccgcaggaattgggacatcaggtggcccttatccgtcaagtcgctaacaaagttttcaccagtatggggaaaactattgggtacaagatcggaacgatgattgagattcccagggcagctctagtggctgacgagatcgcggagcaggctgaattcttctcctttggaacgaacgacctcacgcagatgacctttggctacagcagggatgatgtggggaagttcatccccatttatctggctcagggcatcctccagcatgaccccttcgaggttctcgaccagagaggagtgggcgagctggttaagcttgctacagagaggggccgcaaagctaggcctaacttgaaggtgggcatttgtggagaacatggtggagagccttcatcggttgctttcttcgccaagactgggctggattacgtttcttgctcccctttcagggtcccgatcgctaggctagctgcagctcaggtgcttgtctgaggggctgcctcctcgttggcagcctgctgttggtgcatctggtgattaataatactactatgacagagccatatgctctgtgaagagtattagtagcagcgctcataaaagctacagttccatctattttctcagctatgtaaaacttccaaactgttcatgcttaaaactgagggttttcgtggtgtgagatgtgcatgtcgttgttgaggccattgctgcacattccacctattgaggccctcctcaaattaagcctcgaaaaagctgatatcttttcgtagaactctagactccggtgaatgcaactggctggtttgcttc

SEQ ID NO: 146753 - DNA, 3071 bp, Zea Mays
gccacagcgcccgttgttgtatcttgtcactgatcagtgttgtttgctttgctttgccgtgctaatggcgcccgctccatgtggccgttcgtcgcagagggtgttccacttcggcaagggcaagagcgagggcaacaagaacatgaaggagctgctgggcggcaagggcgcgaacctggcggagatggcgagcatcgggctgtcggtgccgccggggttcacggtgtcgacggaggcgtgccagcagtaccaggaggccgggcgcgccctcccgccggggctctgggcggaggtcctcgacggcctgcggtgggtggaggagtacatgggcgccgccctcggcgacccgcggcgcccgctcctgctctccgtccgctccggcgccgcggtgtccatgcccgggatgatggacacggtgctcaacctggggctcaacgaccaagtggcagccgggctggcggccaagagcggggaccgcttcgcctacgactccttccgccgcttcctcgacatgttcggcaacgtcgtgatggacatcccccacgcgctgttcgaagagaagcttgaagccatgaagaaagccaaggggctgaagaacgacaccgacctcaccgccaccgacctcaaagagctggtgagccagtacaagaacgtctacgtggaggctaagggagagccattcccctcagaccccaagaggcagctggagttggcagtgctggccgtgttcgactcgtgggagagcccgagggcaaagaagtacaggagcatcaaccagatcaccggcctcagaggcaccgccgtgaacgtgcagtgcatggtgttcggcaacatggggaacacctctggcaccggcgtgctcttcactaggaaccccaacaccggagagaagaagctgtacggcgagttcctggtgaatgctcagggcgaggatgtggttgctggaatcagaaccccggaggatcttgatgccatgaaggacgttatgccacaggcctacaaagagctagtcgagaactgcaggatactggagagccactataaagaaatgcaggacatcgaatttactgttcaggagagcaggctgtggatgttgcagtgcaggacagggaaacgtacgggcaaaagcgccgtaaagatcgccgtggacatggttaacgagggccttgttgagcgccgtgcggcgatcaagatggtagagccaggccacctggaccagcttctccatcctcagtttgagaacccatcggcgtacaaggaccaagtcattgccacgggcctaccggcgtcacctggggccgctgtgggccaggttgtattcactgctgaggacgctgaaacatggcattcccaagggaaatcagttattctggtgagggcggagaccagccctgaggacgtcggcggcatgcacgcggctgcaggaatcctcacagaaagaggtggcatgacctcccatgccgccgtggtcgcacgcgggtggggaaaatgctgtgtctcgggatgctctgggattcgtgtaaatgacgcagagaaggttgtgaagattggaggcaatgtgctgcgcgaaggtgagtggctatcgctgaatggatcgaccggcgaagtgatcctcggaaagcagccgctctccccaccagccctcagtggcgatctgggaacattcatgtcctgggtggatgacgttagaaagctcaaggtcctggcaaacgcggatacccctgaggatgcattggctgcacggaacaacggggcagaaggaatcgggttatgccggacagagcacatgttcttcgcttcggatgagaggattaaggctgtgaggcagatgattatggctcccacagttgagctgaggcagcaggcgctggatcgccttctgccttaccagaggtctgacttcgaaggcattttccgtgctatggatggactttcagtgactattcgacttctggaccctcccctccacgagttccttccagaagggaacgtcgaggaaatcgtgcgtgaactgtgttctgagacgggagccaaccaggaggatgccctcgcacggatcgaaaagctttcggaagtaaacccgatgcttggcttccgtggctgcaggcttggtatatcgtaccctgagctaacagaaatgcaagcccgtgccatctttgaagctgctatagcgatgaccaaccagggcgttcaagtctttccagagataatggttcctcttgttggaacaccgcaggaattgggacatcaggtggcccttatccgtcaagtcgctaacaaagttttcaccagtatggggaaaactattgggtacaagatcggaacgatgattgagattcccagggcagctctagtggctgacgagatcgcggagcaggctgaattcttctcctttggaacgaacgacctcacgcagatgacctttggctacagcagggatgatgtggggaagttcatccccatttatctggctcagggcatcctccagcatgaccccttcgaggttctcgaccagagaggagtgggcgagctggttaagcttgctacagagaggggccgcaaagctaggcctaacttgaaggtgggcatttgtggagaacatggtggagagccttcatcggttgctttcttcgccaagactgggctggattacgtttcttgctcccctttcagggtcccgatcgctaggctagctgcagctcaggtgcttgtctgaggggctgcctcctcgttggcagcctgctgttggtgcatctggtgattaataatactactatgacagagccatatgctctgtgaagagtattagtagcagcgctcataaaagctacagttccatctattttctcagctatgtaaaacttccaaactgttcatgcttaaaactgagggttttcgtggtgtgagatgtgcatgtcgttgttgaggccattgctgcacattccacctattgaggccctcctcaaattaagcctcgaaaaagctgatatcttttcgtagaactctagactccggtgaatgcaactggctggtttgcttccgaggcaattcgttttattcctgcaaaagaa

SEQ ID NO: 146754 - DNA, 1602 bp, Zea Mays
cttttgatttatttgttctgggcgagggaaatagtttcaagtttcttttcttttcttttcctcacctgtacttggggcagttcttcgcttcggatgagaggattaaggctgtgaggcagatgattatggctcccacagttgagctgaggcagcaggcgctggatcgccttctgccttaccagaggtctgacttcgaaggcattttccgtgctatggatggactttcagtgactattcgacttctggaccctcccctccacgagttccttccagaagggaacgtcgaggaaatcgtgcgtgaactgtgttctgagacgggagccaaccaggaggatgccctcgcacggatcgaaaagctttcggaagtaaacccgatgcttggcttccgtggctgcaggcttggtatatcgtaccctgagctaacagaaatgcaagcccgtgccatctttgaagctgctatagcgatgaccaaccagggcgttcaagtctttccagagataatggttcctcttgttggaacaccgcaggaattgggacatcaggtggcccttatccgtcaagtcgctaacaaagttttcaccagtatggggaaaactattgggtacaagatcggaacgatgattgagattcccagggcagctctagtggctgacgagatcgcggagcaggctgaattcttctcctttggaacgaacgacctcacgcagatgacctttggctacagcagggatgatgtggggaagttcatccccatttatctggctcagggcatcctccagcatgaccccttcgaggtaactgctgcagctcctctgtcaccctctctcatctgaggccatactcgcatctccatcatttacagatgtgagcatctcatgtcgtcttgggcattttgcatacccctgaggcttttggtgtccttgtgtgtgtgctctggtcaaaaaacttgtttaactcggcttttaaaaacgtccatgaactcatcaggttctcgaccagagaggagtgggcgagctggttaagcttgctacagagaggggccgcaaagctaggcctaacttgaaggttggtcttgggatctgtgggtatcgcttcgtttgcttagaaaccatggtttgattgtttttggtgttgtctgtcaacaggtgggcatttgtggagaacatggtggagagccttcatcggttgctttcttcgccaagactgggctggattacgtttcttgctcccctttcagggtcccgatcgctaggctagctgcagctcaggtgcttgtctgaggggctgcctcctcgttggcagcctgctgttggtgcatctggtgattaataatactactatgacagagccatatgctctgtgaagagtattagtagcagcgctcataaaagctacagttccatctattttctcagctatgtaaaacttccaaactgttcatgcttaaaactgagggttttcgtggtgtgagatgtgcatgtcgttgttgaggccattgctgcacattccacctattgaggccctcctcaaattaagcctcgaaaaagctgatatcttttcgtagaactctagactccggtgaatgcaactggctggtttgct

SEQ ID NO: 146755 - DNA, 1430 bp, Zea Mays
cccaagtttatccgggggttttctgcggcccatagaacaatccgagtcatggtaagaaattgggaatcaggcccattgtcgatctctagttgacgaccaggccctccgcagtcctcctctcacaaacagatacagcccgtccattccccaatccccgtgtcgcctgtgcccctctgccacctcgccgtcggcatgacaacagggtcgaccccgggttcggccccctctcagagaaaacgaaattctaccaaggattccgttgccctgtacgcggtgcaatgctataagtgctacaaatggagtacggttccaaaagaagaatttgagacgcttcgtgaaaacttcactaaggatccatggttctgcagcagacgaccagacagctcttgtgaagacgatgctgacattgagtacgacagcagccgcatttgggttttggacaagcccaacataccaaagcctccaccagagacggagaggctagtggttatgaggggcgactacagcaaaatggacacatattatgtcatgcccaatgggaagcgtgcaaggtgtgctggtgatgtggataagtttctggaggcaaatccggagtacaaagaccgcatatctgcttcggatttcagctttgcgccacccaaggttgttgaggagactgtttctcacaaccctgcctggcaagctgccaaggccaagaagcaggagaaggcagaggcacaaaagtgaatgatactcccaacggtgcttgtgttatgtttagatgatagtccgctcaagatcatgccccatcctatctagtgtgtacttgtctatctcgactgaagtcgatgtttaggtctttttagctgatttggctctgcatgcttcgttgcaacggagcccctgcgtgtcaattcctggggaataaatgagatgttgaataagtgctgtagagtgtagacctgcttttttataattaggcctcaagtcatgcttccttaatttctgcttcagttatccacttgcttggggctatcctatcctaaattgcttggggctagttgttattgtatccagtatggtgttctggttagctggtgtaacacccctgatgttcaaaccaaattagatcccaaaatcagaaaattagcaagattataataaaacttgacaccttttatgaaaacattttctttaaatggcaaccatcacgtttaaaatgtaaaacatattttgaaataaaataatagaaaattcaatatatacatatatatacatacgtacggatataaaaaataaaataaatatacaaataatagtatttttaaaaaaatttaaaacttcaataaaatatctattttttaaaataataataataaatttagttgctctttgctaaagtttagtctatgtcatatcaaatgtttaaatgataattatatatattaaat

SEQ ID NO: 146756 - DNA, 255 bp, Zea Mays
atgggtccaggaattgaggcgaacacagctccgaatttcccaggtgctctatggccttttagcacgcttggttggcatgatctttccaaggaggattataagcatttttatccttcaactgttctggagaaaggccatgatattttgttcttctggtttgcacaaatggtcatgatgggaattgagttcataggatcagtatcattttcttatgtctatcttcatggttttatctgggatgctgagggccaataa

SEQ ID NO: 146757 - DNA, 109 bp, Zea Mays
gcatgtttggtttgaggaatggagtgggccatcgtcttctcgctcaccttcttgtttggtctgtgggatattcactccttgagacaaaagataattaaaatctcaaaaa

SEQ ID NO: 146758 - DNA, 934 bp, Zea Mays
cagcgtctgctgaggctgaggatggcgtcccgctcgtgctcccgctgcgctgccttggcgccgcacgctgcgctcccgctctcctctctcctcgcaccctcgccctctgccgcgcgccctcgatccgcgcccctctcgtgcgcagctcggccgtgcaggggccacgcggcggcgtcagcgttgcacggcgcggcagggcggaggcccccgagcgtggcggcgatgtcgtcgtcgacgccgccgccgggatccgtgcagaagtcggaagaggagtgggaggccatcctcacgccggagcagttcaacatcctacgcctcaagggcaccgagtaccctggaacgggtgagtacgacaagttctttgaggagggcatttataaatgtgctggatgtggaactcccttatacaaatcatcgacaaagttcaactcagggtgtggctggccggcattctatgaaggacttcctggggccataaggcagacgccggaccctgatgggaggcggacagagatcacatgtactgcttgtggaggacacttggggcacatattcaaaggggaggggtttaagacgcctaccaacgagcgacactgtgttaacagcatctcgcttaagttcaatccgtcccccgaggaagcctgacggcagatgaactcccaatctgtaactcaacaacagaataaatttggactttgtttgttgctttcacattgtgtagagagctatgagatcgagtttgtcattcctcggatcatttcgaatatgatgtaaaaaatccaatcacaagtgctggtctttgttgataaatcaatgtacctcagttttagatgaataggccatgtatatgctcatgctcatacaacaaatcaactatcttcatgaagtcatcgtatccgcaggtacaggttatcaaacatgctaattttatggt

SEQ ID NO: 146759 - DNA, 1239 bp, Zea Mays
gccctactgacgttgcttcgcttcgcgactccgtgataagcgctcgcgccgcctctctggctctcttccgacgccctcaccgttgtcgttcccgtttggccgcacgcgtccgccacaccccagctcgcctccccggctcacgtctgcctctgtttgccgcccttcccgccgccgttcccatctggccgcacgcgccggccacaccccagctcgcctccccgcccccggctcactgcggctcccgtctgcttccgtctgcagtcctccccgccgcagttcccatctggctgcacgcgcctgccgcaccccggcccacctccccggctcgtgaacgcctccttccgccgccctcaaatccgcgtcgtctttggcgtgacaatcctgtggttcctccagttgaacggtgacgagtacagcggattttggccttccgattcgattaaaaattctgtcgtgcagttcctattaaggtccaacccatttgaaggcaattgaaaggccaaaacagattgattaaggtgccaccacctaacaaaaccaagcttgcaatggaatcctcctcaagcaatggtagcaatgtgccactgcctgcatctcaacaccctctacatgtgacagatgcagatgaggaggacaagagtgtaaagcagcttaacgagtgtgccacaatatatctatctctccaggactgcctcattgagtcaaaccgcaactggaaggtctgccaagcatacgtccaagcactgaaagcctgccaggctaaaagaaacaaaagtgatcaaacctaaagctttacatatgtgagtagctgatatcctaaaatggtcagcacggatgccagtttgcaggggacaggaagcaatgctccagatgttagttgcagatggagatgggctcttctcaaacagctcagaatctctgatgaccatgatgtttctttgttacgtttttctgcataagttcactgaacaacagtagaatttcaattctgtttctgtatttcccaatcccccaataagattaatggtttcagatttattaataggacaactgaacaagacattcttgcatacggttacaactgagttcgtgtgagatcgctttggattaaagccggttgtttgaactgctgcagttgcaatccatagagacaaaaacactgtagaaacagtagaaatcggtacagattaaagccaagcgaacaagctttatcataatgtcagtctcaattcgattttc

SEQ ID NO: 146760 - DNA, 635 bp, Zea Mays
aaaaaaatgggtgtattattgtcataaagttacaagtttttatggcatttgtacaggtccaacccatttgaaggcaattgaaaggccaaaacagattgattaaggtgccaccacctaacaaaaccaagcttgcaatggaatcctcctcaagcaatggtagcaatgtgccactgcctgcatctcaacaccctctacatgtgacagatgcagatgaggaggacaagagtgtaaagcagcttaacgagtgtgccacaatatatctatctctccaggactgcctcattgagtcaaaccgcaactggaaggtctgccaagcatacgtccaagcactgaaagcctgccaggctaaaagaaacaaaagtgatcaaacctaaagctttacatatgtgagtagctgatatcctaaaatggtcagcacggatgccagtttgcaggggacaggaagcaatgctccagatgttagttgcagatggagatgggctcttctcaaacagctcagaatctctgatgaccatgatgtttctttgttacgtttttctgcataagttcactgaacaacagtagaatttcaattctgtttctgtatttcccaatcccccaataagattaatggtttcagatttattaataggaca

SEQ ID NO: 146761 - DNA, 447 bp, Zea Mays
atgggcgaggtggagcaggtcgtcgtcctagatgtcgccgaggacatccggttgtcgcttgctcatggcgtcaggctggttgcttcctcaaagcgagcggtgcatcaactatttatctacgtcctggataatcgaattgctttgccgtggaagcaggagaagtgtaaaaagcactatttcctaacaatatgttatttcccagattactatgattcgttggcatgcccctcacttttaactttctttcaggctgcaattgagtacattcattctttatcaagggcacagcctgctcgttctctcaatggtgctggcctttgtcctgctagtagatcacttagcacccaggccaccactacgtcaagcacaccacagttgaaagcacaccccatgtcaagcagccaggccgccactatgttaagcaaaacagaagacgggaagaactga

SEQ ID NO: 146762 - DNA, 1702 bp, Zea Mays
catcgctgcggctttcatcctcgccaccggacctctgtcgctcacctgttgcccccaagtccaaatgatgaagtccctcctcttctccgcccaccccacgtcgctgctcctccccgctccccgccttcgcaggctcctccgcctccgcgccgcctcctctgcctccgcttccgcgccgccccgagccgaccgccgctcccccgggacgccttcgcgccgaccatcctcctccctctacgcgcgccccagcctcctcgacatggagcgggatcgcgccacccgccgcgccgatgtcgacgccttcctcacctccctcggcgtcgacccgggcgaactcgcgggcctcgagctcccagtcaccgtcgacgtcatgcgggagcgcgcggagtttttgggttccctcgggctcacccaggaggacctcgctgcctaccctctcgctctcggctgcagcgtgcgcaagaacatggtccccgtcctcgactacctcggcaagctaggcgtacgccgcgatgcgctcccggacctgctgagacggtacccgcaggtactacacgccagcgtcgtcgtcgaccttgcccccgtcgtcaagtacctccagggtatggacgtgaggcccactgacgtgccgcgcgtgctcgagcgctacccggagctcctcggattcaagctcgagggcaccatgagcacttccgtcgcctacctcgtcggcattggagtggggaggcgtcaggtaggcagcgtcatcacccgttttccagaggtgcttggcatgcgcgtggggaagataataaagcctttcgtcgaacaccttgagggcatcgggctgcagaggttagctattgcaagaataatagagaagaagccatatgtgcttggatttgggctacaggagaaggtgaagcctaacattgaggctcttgtggacattggagtgaggaaggaggccctagcatccattgtgatgcagtaccccgacgttcttggacttgaactgagggacaagcttgttgcacaacagagcttatttgagtcgagcatattggttagtcgtgaagattttgggagagtgctggagaggatgccgcaagccattagtcttggacgagctgcggttctgaagcatgttaatttcctcacagcttgtggatttatgctatctcaagtgagcaaaatggttgtggcatgcccccaactgcttgcactaaatatagatataatgaggatgaattttgaatacttcaagaatgagatggagagggatttggaggagctggttgagtttcctgcattcttcacatatggcatcgagtcgactgtgaggcctcggcatgagatggtgtcccggaagggcctcacatgctcccttgcatggcttcttaactgttctgatgccaaatttgatgagcgcatgaagtatgatacaattggggttgaggaaatggagcgtgaggattcttctgacatgaatgcatctgtggatgaggtagagagtgaggagtatgaagacagtgattatggtgactctgatgatgagtttgttcgataatttatttcactagtcattagatttttaactttggagtatgtgcttggtacgcgaaatgtcaaattatagcttaatgatgcatttctcatcttccttactgatgtatcccctcagttccaaattataagaggttttggcttttccagatatata

SEQ ID NO: 146763 - DNA, 1103 bp, Zea Mays
cggcaagctaggcgtacgccgcgatgcgctcccggacctgctgagacggtacccgcaggtactacacgccagcgtcgtcgtcgaccttgcccccgtcgtcaagtacctccagggtatggacgtgaggcccactgacgtgccgcgcgtgctcgagcgctacccggagctcctcggattcaagctcgagggcaccatgagcacttccgtcgcctacctcgtcggcattggagtggggaggcgtcagaagccatatgtgcttggatttgggctacaggagaaggtgaagcctaacattgaggctcttgtggacattggagtgaggaaggaggccctagcatccattgtgatgcagtaccccgacgttcttggacttgaactgagggacaagcttgttgcacaacagagcttatttgagtcgagcatattggttagtcgtgaagattttgggagagtgctggagaggatgccgcaagccattagtcttggacgagctgcggttctgaagcatgttaatttcctcacagcttgtggatttatgctatctcaagtgagcaaaatggttgtggcatgcccccaactgcttgcactaaatatagatataatgaggatgaattttgaatacttcaagaatgagatggagagggatttggaggagctggttgagtttcctgcattcttcacatatggcatcgagtcgactgtgaggcctcggcatgagatggtgtcccggaagggcctcacatgctcccttgcatggcttcttaactgttctgatgccaaatttgatgagcgcatgaagtatgatacaattggggttgaggaaatggagcgtgaggattcttctgacatgaatgcatctgtggatgaggtagagagtgaggagtatgaagacagtgattatggtgactctgatgatgagtttgttcgataatttatttcactagtcattagatttttaactttggagtatgtgcttggtacgcgaaatgtcaaattatagcttaatgatgcatttctcatcttccttactgatgtatcccctcagttccaaattataagaggttttggcttttccagatatatagtcttaatcatttaaatat

SEQ ID NO: 146764 - DNA, 715 bp, Zea Mays
cggcaagctaggcgtacgccgcgatgcgctcccggacctgctgagacggtacccgcaggtactacacgccagcgtcgtcgtcgaccttgcccccgtcgtcaagtacctccagggtatggacgtgaggcccactgacgtgccgcgcgtgctcgagcgctacccggagctcctcggattcaagctcgagggcaccatgagcacttccgtcgcctacctcgtcggcattggagtggggaggcgtcaggtaccctggaacgggaataaccgaacaaaaatgtgccggatgtggaactcccttatacaaatcatcgacaaagttcaactcaggtgtggctggccagcattctatgagggacttcctggggccataaaggcagacgccagacgaccctgatgggagccggacagagatcacatgtactgcccgtggaggacacttggggctcatattcaaaggggaggggtttaaaacgcctgccaacgagcgacactgtgttaatagcatttcgctcaagtttattccgtcccccaaggaagcctgactgcagatgagctctaatctggaactcaacaacagaataaatttggacttttgtttgttgcttccatgtgagagttatgagatgggatttgtcattcctctgaccattttgaatatgctgtaacaaattttcaatcgcaagtgctggtctttgttgataaaattattgtaccg

SEQ ID NO: 146765 - DNA, 1355 bp, Zea Mays
gctggccacaccggccacctgtatgttggcccgccgcgacccaaatctgtcatgtgccggcccgccgtgcccctctgttcgccgtcgaccggccggccactcgctatcactctacctcgctagaaagttccaaacgactacggcatcctctgactcccccgctctcggtccgcatttccattgtgctttctccgttgcatgcagcctcgcatctattctagcctccgccctcagctcaccaccacgacccgagggaaagggagaggggacgaatggcgagctctcagtgctgcgataacccgccagccctgaacccggcctgcgggaagggcaaggtcgtcgacagcttcggcgggctcaaggcctacgtcgccggccccgaggactccaaggccgccgtcgtcctcgttgccgacgtcttcggattcgaagcgccgattctgaggaacatagccgacaaagttgcttcgtcagggtactttgttgtggtaccagatttctttcatggggatccttatgtacctgagaatgctgagaagctcatacctgtgtggctgaagtcacatactccggaaaaagggtttgaagaggcaaaaccagttatcgcggctctaaaggagaagggagtgtctgccgttggagctgcagggtattgctggggtgcaaaggtcgttgtggagttggcaaaagcaaatgagctcctccaggctgctgtactattttttttttccaatataacaccagaggtcaaatgctcaatctctatacttggagctgagatggatgtgaggtccccaccagagttagtcaagcaattcgagcaagccctttctgtgaactcaggggttggtcacttcgtcaaggtcttccctggcgtggcgcatgggtggagcgtgagatacagcctcgatgatgcagctgccgtgaagagcgctgaggaagcctttgcggacatgctcgactggttcaacaagaacctaaaatgaactctgcagttgccatcatgccttgtaataataatgcgtattccattgtcctggaatcgggtctgctgtggtagggctgccattcagagttgaacaaatcatttagaaatcattatgttgctcggcaacagattaagaccctatattgtacaactcaacttcactagtaaggccccgtttcaatctcatgagctaaactttagcttcctgctaaactttagctatatgaattgaagtgctaaagtttagtttcaattatcaccattagctctcatgtttagattataaatggctaaaagtagctaaaaaatagctgctaaagtttatctcgcgacattggaacaaggcctaaatctttttttttagatt

SEQ ID NO: 146766 - DNA, 1635 bp, Zea Mays
atgtgccggcccgccgtgcccctctgttcgccgtcgaccggccggccactcgctatcactctacctcgctagaaagttccaaacgactacggcatcctctgactcccccgctctcggtccgcatttccattgtgctttctccgttgcatgcagcctcgcatctattctagcctccgccctcagctcaccaccacgacccgagggaaagggagaggggacgaatggcgagctctcagtgctgcgataacccgccagccctgaacccggcctgcgggaagggcaaggtcgtcgacagcttcggcgggctcaaggcctacgtcgccggccccgaggactccaaggccgccgtcgtcctcgttgccgacgtcttcggattcgaagcgccgattctgaggaacatagccgacaaagttgcttcgtcagggtactttgttgtggtaccagatttctttcatggggatccttatgtacctgagaatgctgagaagctcatacctgtgtggctgaagtcacatactccggaaaaagctctgtgctatagacccaaatgggtccgatccttccctggaccctgaccaagcgggagcacatgcacttggctgcccttttttttgttatatttcttctgagatcaaagttgggcatcttaatctgaaccatatgtgttgccataaaaaaactaaaaacaaataaaaacgcaaatgcttaatcttgtttgaactacatttaatccatctaggtgctaggaagtggcctagcgcctagcatcttttggacccttgattgtcacacgttgtttactttctttcgctgaacaaatttcatcaacagaaagaggtatttatttgctaggaaaaagggtttgaagaggcaaaaccagttatcgcggctctaaaggagaagggagtgtctgccgttggagctgcagggtattgctggggtgcaaaggtcgttgtggagttggcaaaagcaaatgagctcctccaggctgctgtactattttttttttccaatataacaccagaggtcaaatgctcaatctctatacttggagctgagatggatgtgaggtccccaccagagttagtcaagcaattcgagcaagccctttctgtgaactcaggggttggtcacttcgtcaaggtcttccctggcgtggcgcatgggtggagcgtgagatacagcctcgatgatgcagctgccgtgaagagcgctgaggaagcctttgcggacatgctcgactggttcaacaagaacctaaaatgaactctgcagttgccatcatgccttgtaataataatgcgtattccattgtcctggaatcgggtctgctgtggtagggctgccattcagagttgaacaaatcatttagaaatcattatgttgctcggcaacagattaagaccctatattgtacaactcaacttcactagtaaggccccgtttcaatctcatgagctaaactttagcttcctgctaaactttagctatatgaattgaagtgctaaagtttagtttcaattatcaccattagctctcatgtttagattataaatggctaaaagtagctaaaaaatagctgctaaagtttatctcgcgacattggaacaaggcctaaatctttttttttagatt

SEQ ID NO: 146767 - DNA, 1342 bp, Zea Mays
cttattttctcttaacccgttttcttgtaaaagcatggattgggttggaattgtgaccatggttctaacaacctcttgcaaatgcaggaaaaagctctgtgctatagacccaaatgggtccgatccttccctggaccctgaccaagcgggagcacatgcacttggctgcccttttttttgttatatttcttctgagatcaaagttgggcatcttaatctgaaccatatgtgttgccataaaaaaactaaaaacaaataaaaacgcaaatgcttaatcttgtttgaactacatttaatccatctaggtgctaggaagtggcctagcgcctagcatcttttggacccttgattgtcacacgttgtttactttctttcgctgaacaaatttcatcaacagaaagaggtatttatttgctaggaaaaagggtttgaagaggcaaaaccagttatcgcggctctaaaggagaagggagtgtctgccgttggagctgcagggtattgctggggtgcaaaggtcgttgtggagttggcaaaagcaaatgagctcctccaggctgctgtactattttttttttccaatataacaccagaggtcaaatgctcaatctctatacttggagctgagatggatgtgaggtccccaccagagttagtcaagcaattcgagcaagccctttctgtgaactcaggggttggtcacttcgtcaaggtcttccctggcgtggcgcatgggtggagcgtgagatacagcctcgatgatgcagctgccgtgaagagcgctgaggaagcctttgcggacatgctcgactggttcaacaagaacctaaaatgaactctgcagttgccatcatgccttgtaataataatgcgtattccattgtcctggaatcgggtctgctgtggtagggctgccattcagagttgaacaaatcatttagaaatcattatgttgctcggcaacagattaagaccctatattgtacaactcaacttcactagtaaggccccgtttcaatctcatgagctaaactttagcttcctgctaaactttagctatatgaattgaagtgctaaagtttagtttcaattatcaccattagctctcatgtttagattataaatggctaaaagtagctaaaaaatagctgctaaagtttatctcgcgacattggaacaaggcctaaatctttttttttagattctagctttatgagaatctttcttagtgaagctgagtcatttcatgtccccatttggcaaaataacatcacataatgaagcgaaagaattaaataactagaatgcccttcttttttctctctctctttttgtttacgtttac

SEQ ID NO: 146768 - DNA, 615 bp, Zea Mays
agtcggcgtcatgtgccggcccgccgtgcccctctgttcgccgtcgaccggccggccactcgctatcactctacctcgctagaaagttccaaacgactacggcatcctctgactcccccgctctcggtccgcatttccattgtgctttctccgttgcatgcagcctcgtctcttctcgcatctagcctccgccctcagctcaccaccacgacccgagggaaagggagaggggacgaatggcgagctctcagtgctgcgataacccgccagccctgatcccggcctgcgggaagggcaaggtcgtcgacagcttcggcgggctcaaggcctacgtcgccggccccgaggactccaaggccgccgtcgtcctcgttgccgacgtcttcggattcgaagcgccgattctgaggaacatagccgacaaagttgcttcgtcagggtactttgttgtggtaccagatttctttcatggggatccttatgtacctgagaatgctgagaagctcatacctgtgtggctgaagtcacatactccggaataaaaattaaggagataatgaataagttattaggctgttaaagaatgtttcaaagtcctgacagtcgatatccagg

SEQ ID NO: 146769 - DNA, 1458 bp, Zea Mays
atgagactctgaggctctgagctgagcgcgctccgtttcagtttcagagagcggttgctgtgcatgtgctggtgctgcgacttgactgttcgagcacagctgcgtctgcgtccccatggtgtagataggaggggaggaagcaggaagagggggaggcagcctgtgtgtgtgagagagaggcagaaagtagtgaggaaggaagcaggaagatggcttggaatgcccgcttcggcgatgacgaggaaggcagcggccttgagctcagcctgggccttccgggctacttctccgggtcgccagaccaagccgcaggtgccgccgcatccttcacgtgctctgcctgatcaggaacgagttccatggcatggtttgaaactttcaatgaaaacgatcgttgcgttctgtgttcgcctggcggtttcaggtttcgaggagaaagcgagccggggttctgctgctgctcctcctcctcctcctcccgctgctgctcgagcgaaaggaagcgacggcttcaaggcgaggccggcggcagctgctccggtcgtgggatggccgccggtgcgcgcgttccggcggaacctcgccacgtcgtcctccaagccgtcgagccacggaggcaaggagcccgccgcgagcgccgacggcggcaacaagggcctgttcgtcaaggtcaacatggacggcgtccccatcggccgtaagctcgacctggcggcgcacgccggctacgacacgctctccgccgccgttgacagcctcttccgcggcctcttcgctggtgcgtgcgcgcgcgcgcgcatcggcatcaccacaccacaccaccgtgcgagtgccatatgtatgaactgacgacgacggtcgacgtgcatctgcttgctgccagctcaagcggcggggccaggcggggagcagcaggctgtcgcgggtatcctgagcggcggcggcggcggcgagcacacgctggtgtacgaggacgacgagggcgaccagatgctggtcggggacgtgccgtggccgatgttcgtcgccaccgctaggcgtctgcgcgtgctgaagagctccgacctgagcccgtcgtcgctgagggcagcgagagccgcagctgagtgctgaacgcaccctggacctggagcctgaacgttttgcggcctctccggagggcccatccgtgtaaaatcgaagcagttttcgtcgattttgcttttagcaagggattatgtgtcctagtgatcaagtagggaagcaagaatctatctagaggtgatgaggggtgtcgtagaaccatgcaatcctagtgctagattttttttctgaaagtttaacaaggtttcttggcgctggataggacagcggatacgttatcgagctcgccacggcccatgggctactacatgttttgtgagttgtgtgacctggggcgacctagttcttttgtattattttttctggaaaaaattt

SEQ ID NO: 146770 - DNA, 1554 bp, Zea Mays
atgagactctgaggctctgagctgagcgcgctccgtttcagtttcagagagcggttgctgtgcatgtgctggtgctgcgacttgactgttcgagcacagctgcgtctgcgtccccatggtgtagataggaggggaggaagcaggaagagggggaggcagcctgtgtgtgtgagagagaggcagaaagtagtgaggaaggaagcaggaagatggcttggaatgcccgcttcggcgatgacgaggaaggcagcggccttgagctcagcctgggccttccgggctacttctccgggtcgccagaccaagccgcaggtttcgaggagaaagcgagccggggttctgctgctgctcctcctcctcctcctcccgctgctgctcgagcgaaaggaagcgacggcttcaaggcgaggccggcggcagctgctccggtcgtgggatggccgccggtgcgcgcgttccggcggaacctcgccacgtcgtcctccaagccgtcgagccacggaggcaaggagcccgccgcgagcgccgacggcggcaacaagggcctgttcgtcaaggtcaacatggacggcgtccccatcggccgtaagctcgacctggcggcgcacgccggctacgacacgctctccgccgccgttgacagcctcttccgcggcctcttcgctgctcaagcggcggggccaggcggggagcagcaggctgtcgcgggtatcctgagcggcggcggcggcggcgagcacacgctggtgtacgaggacgacgagggcgaccagatgctggtcggggacgtgccgtggccgatgttcgtcgccaccgctaggcgtctgcgcgtgctgaagagctccgacctgagcccgtcgtcgctgagggcagcgagagccgcagctgagtgctgaacgcaccctggacctggagcctgaacgttttgcggcctctccggagggcccatccgtgtaaaatcgaagcagttttcgtcgattttgcttttagcaagggattatgtgtcctagtgatcaagtagggaagcaagaatctatctagaggtgatgaggggtgtcgtagaaccatgcaatcctagtgctagattttttttctgaaagtttaacaaggtttcttggcgctggataggacagcggatacgttatcgagctcgccacggcccatgggctactacatgttttgtgagttgtgtgacctggggcgacctagttcttttgtattattttttctggaaaaaatttatagctagatttgattcccccccccccccccccccacacccaaatttgaggagtcaagatgaactagagaacagaagcaaaaaaaaaagaacgaagagtagggcggctaaggctaactgcaccggttcccgttatgccgcctcctccccctcaatctcgcggctacacgagcccccccacggctgcagcggcacctctacaaggcccccagccggcagaggtgaataagattccgccacagacagcatgaggacactgactcctctttctccgctcacgtgtacatcaatttttttaatagttgaaggaaaat

SEQ ID NO: 146771 - DNA, 1155 bp, Zea Mays
gttactgcaatacggagtacaatactgcatgttctgcctttggttgcctcctcctttcttcttctgaaacggaatccagatcaaaaaaaaaaaagacgcgcggggcggaaggattcctgctcctctgtttagttgatgagtagaagctactgttctaacggtgtctgaactacatgaatggatttcaaatcttcaggccggcggcagctgctccggtcgtgggatggccgccggtgcgcgcgttccggcggaacctcgccacgtcgtcctccaagccgtcgagccacggaggcaaggagcccgccgcgagcgccgacggcggcaacaagggcctgttcgtcaaggtcaacatggacggcgtccccatcggccgtaagctcgacctggcggcgcacgccggctacgacacgctctccgccgccgttgacagcctcttccgcggcctcttcgctggtgcgtgcgcgcgcgcgcgcatcggcatcaccacaccacaccaccgtgcgagtgccatatgtatgaactgacgacgacggtcgacgtgcatctgcttgctgccagctcaagcggcggggccaggcggggagcagcaggctgtcgcgggtatcctgagcggcggcggcggcggcgagcacacgctggtgtacgaggacgacgagggcgaccagatgctggtcggggacgtgccgtggccgatgttcgtcgccaccgctaggcgtctgcgcgtgctgaagagctccgacctgagcccgtcgtcgctgagggcagcgagagccgcagctgagtgctgaacgcaccctggacctggagcctgaacgttttgcggcctctccggagggcccatccgtgtaaaatcgaagcagttttcgtcgattttgcttttagcaagggattatgtgtcctagtgatcaagtagggaagcaagaatctatctagaggtgatgaggggtgtcgtagaaccatgcaatcctagtgctagattttttttctgaaagtttaacaaggtttcttggcgctggataggacagcggatacgttatcgagctcgccacggcccatgggctactacatgttttgtgagttgtgtgacctggggcgacctagttcttttgtattattttttctggaaaaaatttatagctagatttgattcccccc

SEQ ID NO: 146772 - DNA, 84 bp, Zea Mays
aaagccttcaatttatgaattcttgaactccatcccattattgcttcttatctttttgatccttaatccgaactcgtttcaatc

SEQ ID NO: 146773 - DNA, 1605 bp, Zea Mays
cctctaaccgtaaaccgctgtgtatcccgtcccgtcccgtctctcgctcggccagcaggccaccaactgccaggtccggcgatgggcaaggcggcgcgctggttccgcagcttcctgggcaagaaagagcagcggcccaccaaggaccagcggcggctgcagcagcaggacgaccaggctcctccgcttccgccgccaagcgccaagcgctggagcttcggtaggtcgtcgcgggactcggcggcggccgcggtcgtctcggccggcgcgggcaacgcggcgatcgcgcgcgccgccgaggccgcgtggctcaggtccgccgcgtgcgccgagacgcaccgggaccgggaccaggaccaggaccagagcaagcacgccatcgccgtggccgccgccaccgccgccgcggcggacgcggcggtggcggcggcgcaggcggcagtcgccgttgtgcgcctcaccagcaagggacgcgcgccgctcttcgccgtcgccgccgccgtcaggatccagacggcgttccgaggattcttggccaagaaggcgttgcgcgcgctcaaggcgctcgtgaagctgcaggcgctggtgcgcggctacctcgtgcgcaggcaggcggccgccacgctgcagagcatgcaggctctcgtccgcgcgcaggccaccgtgcgcgcgagacgagccggcgccgccgccctcccgcacctccaccacctgcccggccgcccgcgctactcgatgcaagagcggtgcgcggacgacgcgcggatcgagcacggggtggcggcgcacagcagccggcggctgtcggcgagcgtggagtcctcgtcgtacggctacgaccggagtcccaagatcgtggaggtggaccccggccgccccaagtcgcggtcgtcctcgcgccgctcgagcgccccgctgctcgacgccggcagctgctgcggcgaggagtggtgcgccagcgccaaccccgcgtcctcgccgctgccgtgctacctgtccgccgggccgccgacgcgcatcgccgtgccgacctcgcgccagttcccggactacgactggtgcgcgctggagaaggcccggccggccacggcgcagagcacgccgcggtgcctgctgcaggcgcacgcgccggccaccccgaccaagtccgtcgtcgcgggccactcgccgtcgcttaacgggtgcccgaactacatgtcgagcacgcaggcgtcggaggccaaggcgcggtctcagagcgcgccgaagcagcggcccgagctcgcctgctgctgcggcggagcgcgcaagcgggtgccgctcagcgaggtggttctcgtggattcctcccgcgccagcctgagcggcgtcgtgggcatgcagcgcgggtgcagcaccggggcgcaggaggcgttcagcttccggacggccgtcgttggtcgcatagaccgctcgttggaggttgccggcggcgagaacgaccggctggccttgttgcagaggaggtggtgactggcgaggaccgatcagcaagctccactggaaatgccaacaagacgacgagacctttggaagggtaattagcaataagaatgcgttttcatgtgttcttgcgagttctcgtct

SEQ ID NO: 146774 - DNA, 516 bp, Zea Mays
atgcgcacgctacccccacccacctcccattccgctgccaggatcatgcagctctgcgccgccacgcccaagcggacctcgtggcacatgcccacaccgtactggggcgctggtgccgccgcgttcccgcagacgcccgagcggagcccgaggttcacgggcgacgcccgactggggcactgcgttcatgatgtcgccgagcgctacggctgcgccgaggacgccggagaggtggcccgcgctgtccgcactctggagtacgcgcctgcgccgaggcgagagcaggcgaggtggggcggcgaatctgaggcagaagcgcctgcgctttatgaatccggagccgaatcgctccgtccagcttgcctcctcaccgttgcttttgcgctctgcttttcacttgccttgcgtggatctgctcaacgcgcgaaccaccgcctcgccgagaaggagatcgtcatcgtcctctcctctgcctccgtggtccccgtcgagagcagtgttgctgtcttcgactag

SEQ ID NO: 146775 - DNA, 745 bp, Zea Mays
gcatggaaacgacgcatactaggctatccacgtatgcagaattttgtctcccgcacgattgttcatccacggcttctatcgttcaactgctttccatctctagatgcttctacctggttcacgttcccttctccgctgcagtttggtgaacacacctctatcgccccgacctcgacgtgatccctctcgcttggatccggacggcgcggtccctccgccctcccatgcgcacggcgccgccgccgccgccgcagccgacatgacgctcgcctccctcgccctcggccggtccgcgcgctcctctcgcccgcgccagggtttctagctcgggggcctccagcagccgcccgcgccaccgctaccgccgcctgtccacggcggtgagggtggggcggcaggatttgttcgcagctacctaattgcggcctcgtcggcagctcttgggaagccatccgcgggcaagaccgtggattggagatatgtcctcgccagcccacatttctgacgcctcttctctgacgggtccaagaagaactacgagaactattaccccaagggtaagaaggaggtgcctaaaggagattgtacaaacaagtctgaatctaagcgtaagtttccttcgcgcttgacttgattgtgtagaggatgttagccatgttatggatgcaaatatcatagcttttttaggcgcccatagtaaatggaatcggtgcatatatttgagttgactaacaagttgccaact

SEQ ID NO: 146776 - DNA, 311 bp, Zea Mays
ccttggtgtatgctttttgcaaacgatgtagtactagttgatggaagtcgagcaggagtaaataggaaactagagttgtggcaggagactctagaacctaaagggcttagactcagtagaaataaaacagaatatatgagatgtgatttcagcactactatacatgaggaaggagatgttagttccgaaggtcaagtgacacatttagatatttaggatcaatgctacaaagagatagggatattgaagaagatgttagccatagaatcaaagcagggtagatgaagtggtgtcaagcatctgacgttcta

SEQ ID NO: 146777 - DNA, 432 bp, Zea Mays
atggatggagatgtccctgcgttctacaccgaggagatggatcgcgtgctcttccagcgaggagtccccattggggcgggcgtcaccaccgccgggcatggccggggcgctgcagctacgggccacgcagccgcccccgcggatccttgccgaggcatcgccaccactgggcttggtcgcggcgcctccgcagccgccccgcggatcctggccgaggcatcgccaccgtggagcttggtcgcggcacctccgcagccgaccccgcgtatcttggccgaggcatcgccgccgtggtgcttggtcatggcgcctctgcagtcgcccccgcgggtcctggccgaggcctcgccgccgcggggcttggtcgcggcgcctccgccacggggcacgcagccgctaccgtggggattgggcggggggcatccgccatag

SEQ ID NO: 146778 - DNA, 1440 bp, Zea Mays
gcgattctatggattggtcagtttctgagcatgttttcatagtttgtagcttatttgcagaacaagttcaaaagggtaatcgaccaaacactcatttgaatgtcgtgggttataccgaagtgtcttctaggttttttcagataactgggattgaattatctaagactcaactaaagaacaaatgggaaaaactaaaatgtgacttaaccgcatggagaaaactgatgaggaggcaaacaggcacgggttgggatcacttgagacagaccattgaaacggaccctgagtggtggaggaagatcaaggcggaaatcccagggtgtgcaaagtttaagaaaggccctctacagaacgaggcagatctttccaagatgttcgataagattacaaatgaagagaatgaccattggaatcctatgacagagaaccctatcataccagaaaatcatgagcctataattaatcttgaatctgattttgcagatgtggaatgtgagcttcccaatgagtttgcatcagcttctagtgatgtagttcaggaggtttctccatcggttggtaatggcaaaaaagacctcggtttgtcttaggaaaactagctaagaaaacaaaggttagcactgcggttgttatgcaagaacaagtgacaaggattgcaaattctgctgatgcacttgctgcaaagaaactaggagaggtcactatcaaacaagtaatggatttagttgtattctgtggggcaaggattggtagtaatgagcatttcattggtaccaagctatttatcaagaaggagcaaagggagatgttcatgaccctagatactgatgagagtaggtttctttggcttagtaggcactataatgagcagtacaatgcataaaaagcttgtttcggcaatctgttagacacttttatgtattagaataatcttttgtaatatactatactattcgagttatgtccagtttcagtttgctcacaaagtgttgtctgtatgggctctgcatttgctaaactgtaataaggtgatgtggccttatcttgatgaccctttacctcctcttgaagactgctaatatgtttttccatttgtttcatgtttgactgtgccagttccagcatcttatcaagttttgaagccctcttcgcctcctgtgcagcatgcaagcttctttcatccttcagctcttcaagtttacgaagcttatttgctgatgaatccaattcagcttcaatttcttgaatcctcttttttgaggtttcaagctcagaacccagctccttcagcgactctgttgcttcagccagctccttatctttcatagaaagagagctttgagcttcttgtagagaactgtagtgcatgctctgtttgttttctgcttctgtcaagtcctttactagtttacctttttcagattcaagctcctcaatacg

SEQ ID NO: 146779 - DNA, 906 bp, Zea Mays
agatgggttctctagatgttttgaatgctgaaataaaaatgtggaaacatcaaacatgaactatcggcgagcaggttgtcatatagggttgatatggcgtctgttattgtggaaagtagtgtttctgttagcatgcttccattaagtgtctgacatgccattttccttgcttgtctctgttcttttgctacattggcttaatgttattcgtgtgttttcttccatattttgttgcttgtggcattattcgttatttggttggttgaaaatatagagcatgcactcatcttatctaagtgatcggagtgatattgattggcttattagatggatattggcccagtttatctttcattttttctatagctgttagaaatttactttgctcatagttcatactataattaatatgagactcttgttttgtggtccaagtgttcagcgctcagggtgccttggaagtacgctagcttgttgtcatgaagaagtcattcaagttccttcccgggagttattagttcatatgtatatttctgtttatatcttatcttgtttatgtttagatttatatgagctagcaacttaatgcttgcaccagctgaagttggtgcataaggctgcaacaccatctagtggagggtgttctggacaaagaaagcttgtaccttaaaacaggaggatacaagaagttggagtggttgtctgaaggcttttgaactgcttgaagcattagtgtagctttggtgcttttgtgactgatcagctctggagcagctagagtgatatagttgtgggcttttgaacaatagttggagtgatatgaaacattagtgatctagttgtgaatgatattataattgtgatgcttttgtgaatatataattgtggtgattttgtgtttatgtg

SEQ ID NO: 146780 - DNA, 2073 bp, Zea Mays
accccaaccaatcccaagtctcatcacgaggacgaaagagagaagagaactcgtcgctctccctgtcaattcactcgccggacagtagcgccccctcctccgatcgattcggtcagtccgccgatcaaccgtcccgagcttgcttggatactgtgctgcgtgcgacagatggagaccgtcaccgtcgttgtcgcgccggctccggtggccgtcacccagcagccaccgcagcacaagctcgccgagttgaagccttcctccttcgccggcgtgccgaaatcgtcgccggcgaccaaggccaagccggccaagacgaagaagctcgccggcggctgtggcgggtacgtccttgaggacgtcccgcacctcaccgactacctccccgagctcaagagctacccgaatcccctacaagaccaccctgcctactctgtcgtcaagcagtacttcgtgaacccggacgacacggtggcgaagaagatcgtggtgcacaagagcggcgcgcgggggacgcacttccggcgcgccggcccgcggcagcgcgtgtacttccagccggacgaggtgacggcggcgatcgtcacctgcggcgggctgtgcccgggcctcaacaccgtcatccgcgagctcgtctgcggcctgcacgacatgtacggcgtggccaccgtctacggcatcgagggcgggtacaagggcttctacgcgcgcaacacggtggagctcacgccgcgctccgtcaacgacatccacaagcgcggcggcacggtgctgggcacctcccgcggcggccaggacacggccaagatcgtggacagcatccaggaccgcggggtcaaccaggtgtacatcatcggcggcgacggcacgcagaagggcgccgcgtccatccacgaggaggtgcagcggcgcggcctcaagtgcgccgtcgtcggcgtgcccaagaccatcgataacgacatcgccgtcatcgacaagtccttcggcttcgacaccgccgtggaggaggcgcagcgcgccatcaacgccgcgcacgtcgaggccgagagcgccgagaacggcgtcggggtcgtcaagctcatgggccggaacagcggcttcatcgccatgtacgccacgctcgccagccgcgacgtcgactgctgcctcatcccggagtcgcccttctacctcgacggcaggggcggcctcctcgagttcgtcgagaagcgcctccgcgacaacggccacatggtcatcgtcgtggccgagggcgccggccaggacctcatcgccaagagcatgaacttcgccgacacccacgacgcgtccggcaacaaggtgctccttgacgtcggcctctggctctcccacaagatcaaggagcatttcaagaagaagcccagcttccccatcaccctcaagtacatcgacccgacctacatgatccgcgccgtgccgtccaacgcctccgacaacgtctattgcacgctgctggcgcacagcgcactgcacggcgccatggccgggtacaccggattcaccgtcgcgccggtgaacggaaggcacgcctacatccccttctacaggatcaccgagaagcagaacaaggtggtgatcacggaccggatgtgggcacgggtgttgtgctccacgaaccagccgtgcttcctgacacaccaggacgtcgagggggcagggttggacgaggaggagccgcagatgccactcgtcgagggcgagaacgccttagtcaggaacccgtccatgtgcaacggcaatggccacctctgcagtggcgcggcctgaaaggcgcagggacagacagctcattcacgtgttacaaatgcggctgtgatgtaggttttctttttgttcattctttggttagtacgatggaataagtattggcgagaggagaattataattagccatgaagcacgcgatctggcccagcgttcacttggtacggaccaatctcggtcctgtggccatgccgtgcttagacaacatactctataaacaatataaatatatgtatatcatataattcataagtaaacaatagctctcttggctagatgattttactacta

SEQ ID NO: 146781 - DNA, 261 bp, Zea Mays
ggctctcttctgaagcagctagcaaacaagagtatcagtggtggtgtagctgttgttctagctgaaacgaacaagtaagagatggagatggacatagcaaagctagaagttggcttcatgggaacatctgtaatatgtaggagtgacgctcctctaattctagcagacttgaggaaggtttctgtttcgaaagcacgggccattattgtgttaacatctgataaaaatgcagaccaagttagtatttttgttctacacaca

SEQ ID NO: 146782 - DNA, 81 bp, Zea Mays
tgttttgcgaaatcctatgtttgtgttttgagaaatcctgtgttggttctcaaaatctgtaatttagtgatcagatgctgt

SEQ ID NO: 146783 - DNA, 102 bp, Zea Mays
ctgcgcgcgaaacggaagagggcagaacggcagactactattgcttacttaatagatagtagagatatgttgaattcttatacttaatatatgtaaactatt

SEQ ID NO: 146784 - DNA, 278 bp, Zea Mays
gatctaaaacatgtgcagcgcgtggaaagcaacaccacaggcagctacataatagtacatatcaaagtcagtcacaagttattgcaaataacatggaagacaatcccaaaagaaccttgacctacaatgcgctcagccatgtagctcactgtctgcaaatgcaaccaataaatacacattatcatacaaaaagaacctgacaaaattgatcagaactccacaatcttataagtttgcagactaaaaacatgatcaaatgcactaaaaatagcacatta

SEQ ID NO: 146785 - DNA, 1842 bp, Zea Mays
tcgagggagaagtgattggatccactgtactactacaattattgatttcttcctcaacttgcttgctaaggatgtcaacttactacacgggcggccgaaaccctagcgccgccgccccctccctccactccatcccacctcgccgtcaccagagggcgccgccggatgtccgcgcggccccaaggaaggtggcggcgaggcgatttttctctggtttggtcgcgtctgcccggatctagtcgggttccaggaggtggcagcggcgtgtgtggggcggcgacccttcgccggcgcggctcagcctcggcggcatcctggcggcagtgagcgcgacgttcgtatggcacatccgggcgttgcgggtcctggatgggtgttcgcgcagcaggggggcatgcggccggccgtgggtcgcaggcgcggagaaggtgctgtctggcgcccccagggcagggagcggcgccgcgcgtggaggtctggaatctagtgcgcgtggggttcgcggcctccgcgtgccagccttcggaggcgtcgacaggctggtcccgggcatgtgccggggtggtgttcggcgtggtgcgtcggtgggcctgcgcagtcgaccggattggcggtggcgggacctccactcgtctgcgtctacgatgaggtggtcggcgtcttgatctgcgttgggttggttggatctgcgggctgtctgcccggatctggggggctggtcgccttccgccgctcctccctgttgctggcttgggcgggtggccttgcggctgctgcggcggtgcctgcgcgctcgcgtggtcgtagctggtctgcggcgtcggcacccacgcgtgcggctggcgcgctgtggtggcggcgtggcttgcctgtacttgccttggtcggggcgttggccgtcgccggatctgcagctgtctgcggcgccttctgcaggggcggctagctccgtgcgttggggcgtgtggtgggagggcctctggcgaaagccatgcccgcttgcgggcggacagcggtgacgcccgcgggcgccacccctgccctattgagggtgctgtccttggacctctcaccacaatgcgggaaccctcgcctcggccttcttggggactttcgctggtgctcgtccgacgttggggctctgaaggttggggttgctgggttggtgggtcggcggacgacaggaggtcttcggaggaaactttgcttggttggtaccaggcgggcggcgacgacttttcgacttcgtttctccttcttgaaggcacagcccagaagacctctagtttgtgtgttcgtcggcgttgtggaggctctttgtcactccgcttggctcggtggtgtcggggccattgtcgctttaggcgtctgttttctcccggagttcggcgttgtggatctttgctcgtggcgaagaatcggagctgcctcgtgtggggtgtgcgaggcttggcaacgatggcgcgccgtgatcttattccttgcgtcggtgtctggatttaggcgtcgtcgagttgctttggcagtgtgcggctcgtcttggggagtcggagctgctcgtcccttgtgtttgagcttggcaacaatgactctagatgtgtttgtgtgtgtgaggctgctgttgtctaggtggtttgttagggccttcaccggtttttctaccgtgcgccctgtgtaggttttgggtccggttttccttaaaactggatcaattctattcttcttaattgagaggcagagctcctgccattatgttcaaaaaaataaggtgtagcttgcatagctagcaactctatgctaaattgagaaacttgcgagtcatatatttgcaacgaatcatac

SEQ ID NO: 146786 - DNA, 706 bp, Zea Mays
atgcgggtttcctcgtctcataacaaatcgccttcctgcgtgacgtgcggcatcctcgcgccatgccggcgtgcactcacgcggctgttccgcgtcccggcgccggctaacctctccatcagggccttccgcttccgtagcctccggaaggcagcgaccaggatgagcccgcgccgccgtcgccgccacaggacgttccggtcggtgcgcgctgtcttctggccgctcgtcccgatgtcgaccgcgccggcgacctctacagccgaaggcgaggccgcgcgtagagcagcaccggcacccgcaccgcaaacagtggtgcacgagactccggtcatcgcagtcgcaccggtgtcgtccacagagacgccagcgtacatgaaggtggtggcgcggctgcggtcggagaggatagctgctaggggaggcggagaggacgaagacaaagagaaggaggaggaggaggaggaggcgtgccggagcttcgagagctatctgatggagatgctggtggaggaggggaaagcgagggacctgaaggacgtcgaggagctcctgcaatgctgggagcggctcaggtcaccagtcttcatcgagctggtgtggtccttctatggcgagctctgcaatgacctgttccacgcaaggggttgacgaagttgacatcgaaggcggcggcggctatggctccgagtccatgtccactgct

SEQ ID NO: 146787 - DNA, 843 bp, Zea Mays
tatgtaacaacctcgagtcatgggccatatttgacaaatgcattctcttggtatgagtggccttaacctctgaaaaattgccatcttggagccttggaagatatatatcagaacagaaggattttgtaagcatttgaaactatagtacttgcttagtaatcacttctttaaagtaaaagtgtcattagattgagtagctccatgtgctatgcagacagatacatttatggctcagcagttcttatttcaaaggcaattgcagtggattcgtaaatatgcacaaaagctgggtatctacatcatgggtgacatgcctacatatgttggctaccatagtgcagatgtttgggcgaacaggaaattatttttgccgaacaagaatggtttcctcaattttgttagtggtgttccaccttatgcatttagtgaaatgggtcaactatggaacaatccgttgtacgactagaaatctatggaagcagatggcttttcatggtggataaagaggattaaatgtgaccttgacttatatgatgaatacgtattgatcatttcgggggtagctggttttttggtgggacttctctcttggacacactagagagttgtgtatctttgtataaggatcaatccatctcgaacaaacaatatggatgtagaaaattaaaagactttcatgattggtaacatcatcagctaagtaatctacaaaattttacatattttccactgaataatgttactgctacatcttttggaggtggttctgacaaccctcacttgccacacaaccatgaaacagatcaagttgtgtacactggaacatttgataacgatacagtt

SEQ ID NO: 146788 - DNA, 257 bp, Zea Mays
acccacacatacaatttgatctggttttcaaaagagtttgagttgtcgcacacatcaaaaactaccagcatcttcttcattggctacaaggttgagcagccattcgaggaagatggatatccttttttagcattgaattagttctacttcaagtagaagtgatcagaacttttttttgtttccttgacctcttgtttgccttcttccacaatggatcttgattctgaagatgaagacgaagagctgaatgttccatt

SEQ ID NO: 146789 - DNA, 1193 bp, Zea Mays
tgcgcacaccgggcgccccttccgcgtccgcccggccggcccgctctctatctccaccaccgggatcaaaccccatgcaccatccgtagttttattgagcataatcatacaaatcgcagtgcgacgacgcggccggccgctcccaaactttgagtagtgccgctctccgtcgtcctcttcgatctccatcatcgcgccacgtacgtacggtggtcacatccctgtcgaccgcgcgcgttgggagcgcatccggccgtgtgcattagccgcccatggacgacacggagagagaaaaggagaaggagaaggagaagcacgactgcgggacggacgtcgaggacgaagaagaggacgaggaaggcaacaagcgcgtcgtcgtgcttggcccccaggtccccctcaaggaacagctcgagctcgacaaggacgatgagagcctgaggaggtggaaggagcagctccttgggcaggtcgacaccgagcagctaggagaaactgcggagccagaggtcacggtgctggacctgacgatcctgtcgccgggcagaccggacctggtccttcccatcccgttccaggcggacgacaagggctatgcgtttgctctcaaggacggcagcccctacagcttccgcttctccttcgtcgtctccaacaacatcgtgtccggcctcaagtacaccaacactgtctggaagactggcgtcaaagtggagacccagaagatgatgctgggaacgttcagcccccagctagagccctatatctacgagggcgaagaagagacgacacctgctggcatttttgctagaggctcctattccgctaaactaaagtttgttgatgacgatggcaagtgcttcttggagatgagctactactttgagattaggaaggagtggccaggaggccaatgatgtggccggaccagcagggcagagctgactcgtcggagtacgctgttgttagagctcatagcaaaaagccaagcagaaaatatgtgctatcgcttcaagaatgtttcactactttcttcgtcattatcgattgtgttttgatttgtttcgagctgtcattaattgtatgttgtttgtcgcataaggctgtttattcgcatatataattcctgtatccagatattcagacatatttgtgtagttctattgttcaatttctcaacctgatacacatag

SEQ ID NO: 146790 - DNA, 2216 bp, Zea Mays
aaacccaaacaatctacgtttttcccatttcgtaaaacagagtatagtagtttacatatgcatacaagactacactactatactccgttgtattgtattctttgtacttcacattcactacatgtctacatgcagtagcactagtagccgagtacaggagagagtgtatgaagaggcgtgcgacggtgcgagacagatgggcaccggccgcgccgcgtgctagaaaaaaaaccctccaacgaatcaagaaatttgcattcctagctaagctaaaaaaacacctaggatccagtgtatacagcgtgtgtcgtgtgtgtgtgtgtgtgtgtgtgactgtgtgttatattgtgcatctgagtgcaaaggcgagcatgtacgctacggccgtatacgtacacgcgccgtacacgtaacgcaggctctacagacgcccgccgcagcgagattgggtggaccgaccgactccgcgtccccgacgctagcagaggagcgagtcgacgaacaggtcgtcccgcggctcgtccttggcggccgcgtagccgccgccgccgccgtacgatccgctgctcagcatctccagggtgtatggctgctgctgctgctgatgatgatagccgagctggccgccgccggtggccatcaaggccccggaacccgccgccgcagcagcagcagcagctcggctggcggcgccgcggcccacgggcacgtcgtggttgtgcttgccctcgtacgtggtgatcacggcgcgcttgtcgtgggacgcgcgctccacgtgcttccgcaccgggcaccccgccgtggtgcacttgtagtagctccgcgggttcgggttccccttcaccaccttctgcccgtacttgcgccaccggaacccgtcgtccaggatgtcgatgtcgctcatcgtctggaccaccagccggggctcgcggaccggcttgccgccgccgcctgcagagctgccctcgttctcgccgtcctcctgcttcctgatcaagcagacatatatacatgagttgcaggaacacgaggaaacagtagtaatacacgctcaacttgtgaaccgcgggtagcgaataatgaatctcgctcgctcgggagtcgggatcacgtacgtaccagcgcttggcgtcgggctcgtcgccgtcgctccgctgcgacccgttctctgcctcgtcgtcgccgaaggtgacagacgagttctcggcggtggcgccggagtgctccggtccagtacagccggccgccgctacggccgagaggctgctgttgccggcctgcagctcctccgccgcaccgccgccggatgagttgcggcgcgtggacagcggcttggggtggttgtgcgcgcccttgtacacgatctgcgtgatgcggccgtcggccagggccctctccaccttcttcttcatggagcagctgtggtacgtgcacttgtagtagctgcgcgggttctcgctccccttcacctgcttctgcccgtacttgcgccagttgtacccgtcctccagcttagtgttgccgttcccgccgccgctcgccctgttgctcgacgggacggcggctttttcgacttgctgctgctgctcctcctcgaaggaaggtaaggacgtcgtcgtcgtgtgcgcgcgcacggcgttggaggtagccgtgtggaaggagaagtcgtcgaagccgccggcggcagcccggctgtcgccgtcttgctgagactgagacgcgatcaggtcggcggccttcttccagtcgaacctctgcgccgggatggcgccggtggtgggagacgccaggatgttggaggacgagtggagcaggacgggcgagtcgagcagctcggcggggctgagccccggcgggatggcgaagtaggaggaaggcgacatgggcggcggcgagatgggcaggctgggaggctgcgccgacttgaacttgggcacgcccctggcgccgcggtggaacagccccctcggcgacgaccgctcctgatcggcgccggctcctagcatgtcccctgcgctggagagcagctcggtgaaggaggtgatgaagggcggcggcgtgaacgtgaaccccccgtgctccaagctccccgtggaggacgccatggcgagcgacgcagagcagggcagctgggtagagtgggggacgactggacgagacgagagggggagagaagagatggggtgcgtgacgtgaggaggagtcgaggagagggg

SEQ ID NO: 146791 - DNA, 193 bp, Zea Mays
tttgagtccgtgaaactgtatgccagtgttatctccccaactcttaaattgttcttgtcagcaggttgcataaaaggcccagaaaagcagcagttgacgagactggaactacaaaagcttgttgaatcccattggatgtatcttaaccgcaaacaaagtgacttaagactggatctgaaacactaaggataga

SEQ ID NO: 146792 - DNA, 1166 bp, Zea Mays
tgtgcgcagtacagtgacctcctaattcctattccttccaccctgctctcctcgtccactgtctcctctgctcgcccaccaaagcaagattcactcgcccggccggccgccatggccagatcagcgccggggctgccgccgcagcactatgccgccgcgggcgccggccgccgctcctcctcctcacccgcggcgtcttgcatcttggcggtcctcttcctcctcctagccgcctgcgtcgcggcggtgctgctgttcgtgttcttccgcccgcgcgcgccggccatcgccgtgacggccgtgcagctccccgctttcgccgtggccaacggcaccgtcgccttcaccttccagcagctggcttccgtgcgcaaccccaaccggtccccgctcacgcactacgacagctccctccacgtcgcctacgccggcggcgaggtcggctccatgtacatcccggcaggccagatcgacggcggccgcacgcagtacatggccaccagcttcaccgtccccgccttcgccgtctcggccacgggcgccgccgcgcagccgaccaccatctccgtcccggcgtccggcccgtccccgcacgtcactgcggctctagtgcagccgccggtgatggaggtggactcgctgctgcgggtcaagggcaaggtcaccgttctcaaggtgttaacccaccacgtcgaggcggccaaggtgtgccgcattggcgtctcgccggccgacggccgcgtgctcggcttccgatgctgaccgtcggccgagctcactaatgctggccctggcctccaccacccagccaagatctgacaatctcatcgctctgtcagcctggtcggtaggccctgctctccacatcaaattaaaactcttgatgaattcggttcaggcttcagttcagtcatccgttaaattgtaagataaggctgttctatttgtaaattagattagtctctacggttctcaagatttgttgtacttctttatgcttgtctgatttactagattttgcggctggcgtgttcttgttgtagattatcactggtatagatttcatagtcagagtccggaccaaacaaaggtttggttcttgagatggtggttcttgttccaatttcaatattgattgcttatgtcaaccaaacatagtggaaaat

SEQ ID NO: 146793 - DNA, 659 bp, Zea Mays
ctcactttcttactacacgcggtatacaccatctgagttgcgtggttgtgtaagggtactgcaccggctcttccgtttgggccctggaagcaatcttcctgcaattagagaaaaatacagtcagcataagtacaaatttgtagcaaagaagtactgcccacagtcaatccctactaagttcttccaggatctgacaagttagaagccaagattacttctagttactcaatgaaaccttcctgaggtacttagtgtgatactatgatattgatttgacagatagttttgaatgcaaggcatgcgcgcggccttgcgtttagcagataaacaggttcaagtaaactgtatgtcacttgtggcaatgttgtttcagtgttgtgctttgattgcttccagcatcgtcttatacgttgctgttgtggtcttctcacgctgtctagaacttttattgtatagttctggaccttgctcataacaagggtagatagtttggctaaagataaagtgtactcattctctcattgttatctacgtgttgcttctgtattctgaagattctgctctgaaacccagcaaatgtattatcaggcatcagaatagtagagtctgagtcaatttttgctattgggaataagtgggagggtaactttggaaagcaa

SEQ ID NO: 146794 - DNA, 1599 bp, Zea Mays
ggcatggacttcagccctcaaagaaagagcgccgaacgcaaccgcggcagcttcgaacacgatgacagtgatgatgacatcagagctgaatccaccgcctctaataagccatctgcgcattcgcacgacagcaccaaatccaagcccaagacgagccatggcggttcaacccgaagtagctccgaaccgacggcgggcaacaataatgctgacgccaccagcttggacagcggcggggcgaggaggagcaacagcatggagagcagcagcaccgcctcgggcaccacgccggccaacgtccggcggcacaccggcggcgacagccggtgggacgccatccagctggccaccacgtcccaggacgcgccgctgaacctggcccacttccggctgctcaagcgcctgggctacggcgacatcggcagcgtgtacctggcggagctccgcgcctcgcgggccttcttcgccatgaaggtgatggacaaggcgtccatcgtcagccggaacaaggtggcccgcgcgcagacggagcgcgagatcctcggcctcctcgaccaccccttcctccccacgctctacacgcacttcgagacggacaagttctactgcctcgtcatggagtactgcagcggcggcaacctccactcgctccgccagaagcagcccggcaagcacttctccgagcccgccgccaggttctacgtcgccgaggtgctgctggccatggagtacctgcacatgctggggatcgtgtacagggacctcaagccggagaacgtgctggtccgggaggacggccacatcatgctctcggacttcgacctgtcgctgcgctgctccgtgtgcccgacgctggtcaagtcgtcgtcgtcggtgcactccaccgggaccggcagaggggtggacgtcgcggacggcgacgtcatcaccgccaaccaggggtgcatccagccgtcgtcattcttcccgcgcatcctgccccggcgcacccggaagccgtccaagagcgatctggggctcagcggcccgatcgcggtggagttcaacgcggagccgacggacgtgcggtccatgtcgttcgtcggcacgcacgagtacctggcgccggagatcatccgcggcgagggccacggcagcgcggtggactggtggacgctgggcatcttcctctacgagctcctgcacggctccacgcccttcaagggcgccggcaaccgcgccacgctgtgcaacgtcatcgagcagccgctgcgcttcccctcgtccgacggcgcgcccggggccccggcggtcagctccgtcgccagggacctcatccgcggcctgctcgtcaaggacccacagaagaggatcgccttcaccaggggcgccacggagatcaagcagcacccgttcttcgagggtgtcaactgggcgctggtcaggagcatgaccccgccgttggtgccggaccccgtggacttcctgcagtacggagctgccaaggagaagaaggcctccgacagcagtacaacggcggccgtcgaggcggcgccggctggtcccgtcggaagccaaaactccggcgagtcttacacggatttcgagtatttctagcta

SEQ ID NO: 146795 - DNA, 831 bp, Zea Mays
atggcggagaacaccggcgcgcggggcgccaaggaggcagtggtgacgtccggcaagcgcgtcgccctcgggaacctcactaacgtcttccgcggcagctgggggtccggcgcggcgaattctgcgtccgatgcgaaattgagttctaccaaaccagatgatgttaagaaaggatcctatgcttgcctgcgcaatgtgaacacggaacggggttctagcagaaggctggcctctgaacagtttgatcaggcagtatcacttcttcagaagaacacatctcttccttctgtgccagacgttgtatcaacaggttgcagctcacccggcctgtctcaggattgctcggtctccatggaggatgctatgtcaacatgcaactcaacagaaagctctgatgttgagtacctcaataataatgacgacccctcaatgacatcttcttcgcattggtgggccagtgatagacctcatttctctgatagtatggatgttgcagaattcaactggaggaaacatagtcctaatcattacacctataaggatccacgactttctacaactcttgcctgtgaaatttacgagagcttgcgagaggctgagactaggaaaatgcctccaacaaactttttggaaaccactcagacagatatgagcaaaaccatgagggcaatattaatagactggcttgtagaagtcacagaagaatatcgtcttgttcctgaaaccttatacctcactgtcaattacattgaccgttatctttctgtcaaagagatcagtcggcacagactgcaattagttggtgttgcttgcttgcttatagctgcgtaa

SEQ ID NO: 146796 - DNA, 681 bp, Zea Mays
atggctcgccctggagccaggggaaaagccggaacagtcctctgccatgtcttcttccacctgcgacatggagagggagttagagaggctgagctctcacgccatggtggtctagcttggccagccctgacatcagcaacgacagggttgagcgtgccctctgctccaggtttgggaagcccgtcggcagacttcctcgtcaccttcgtgcaccgccactaccgagacgtcgtcgtcgccactaggggcttcctacacggcaacctagacttccgcatcaggcagtggcaactaatcgccctgggagactgccatggtctcaagtttcatgtcacgctttgtttagaaggcattcctcctcaagcctggaatgagtgcatcgccaagagggttgttgcccatgcctgtgttcttgactacgtcgaagaagggtgcctctccccagcaagcaagatgcccgctgtctctagcgtggactgggaatccatccgacatctccaagatcgtctggcaggctcaccatcatgggtaggggcgatgatcatccacaacaatgcgccgcctccaacgggtctatgcggtctcaccttcaagttgctgatctacattgacctggtggagggccagccggaccgcgatgggatgtctctacgtgtcgcttcgcctggcgccatgatgtag

SEQ ID NO: 146797 - DNA, 464 bp, Zea Mays
atggagctcgcccttgctcggcttctccagcgcgcctggccgccgcgtcgttcctgctcatcaacgccagcaagcttggtccctgcgccctcccatctccctcacgttctctgtccagctgccatgggtgcgctcgccccggcgctatccatcagcgccaccagccgtgcccttgtatcccgcatcctcgactcgtccacaacgctgccccaagccaggggccttgtcgagctccctcagctcgcccccgaccacagccgcacgccaacctcgcccttggtcatggagcagcaacaactatgaaacccccttcgtgtcgcgccctcgatgtgctcgatgaaataccgcagcgagctccacctcgatctatgccgacccgatcaccacttcgtcgaaccccggtgagaactcgttgtttttcttgtgtttattcctcgctagtacatgtactcggcgtagattaa

SEQ ID NO: 146798 - DNA, 1335 bp, Zea Mays
cctcacttccatccagacgtcatcattcctctcgagtagtcgatcggagtcaggagatgggcgcgtctggtggtgaaaagcttggtactcttgtgtgtgttcttgcacatgtatcgttattattggtgctcgtgctagcaccgtgtgtgtgcaaggcgactggtggtgactacggcggcctctccaacgaccactacaccgagtcctgcccggagctggagaccatcgtcaagaagtccctggcgccgatcttcgccgtggacatcacctcgccggccgccctcctccgcctgctcttccacgactgccaagtccacggatgtgacggctccatattgctcaactccgacgagcgccggcacataacctcggaactgggctcacgcaagaacctcgggatccggcacgtcggcaccgtcgggctcgtgaaggcggccgtggaagcggcctgccctggccgggtctcctgcgccgacatcgtcgtcctggcggcgagggaggccgtggcgcacaccggcggcccgcgcgtcgccagcgtgccccttggccggagggacgccacgaccaccagcacgcaggccgccgatgcgcagcttccgtcctgtttcctcgggattgacggcgcgctcgacatctttaccagccgcggcatgaccgtcgaggagacagtcgccattctagggagccacacgctggggggtggccattgcgtcaacatagacaccggtcgcgcgcgacgcgacaaggcatttgaggccctgctgcacctgcagtgcccaaagaccatgccgcctctgatcacagaggccgtcgtctttgtacccagcgacctgacgccgacatggttcgacacccactactaccggggcgccgccgcaggccgggggctcttcaacgtcgacgacgaggcctccacctacgcgcgcacggcggggtacgtgcggcggttcgctgaggacagggagggcttcttcggggtcttcgcctcggccttcgtcaagctctctgggtttggcgtgctcaccggtgagcagggtgagatcaggaagaaatgcgacgtcgttaactactgatctgctagcattattttggtggtatatcgaaagataatattgtgattgtgaatttgtgattctactgtcatggcatggattgaataataagttgaaataatattaatttaccttcacgaagtcccctgtaaattatgttacaataaaagagctccctgtaaaatgaattactctctccgtctataaataattgttgctattcatgtcgatcaattactactgcttttttacaatgcaatgtatataaatggtaagtacctat

SEQ ID NO: 146799 - DNA, 2023 bp, Zea Mays
cttctgttgctgggtgttgttgttgttgctgttcccttctccctctctctccctccccatctccctctccatctccatctctgtagctatagggaggagatgtattccgacttccgagccccccatctccaaggaaattgcgacgagcccatcgttccatatctccctttaagattgacctgagactgcttcgtccacaccacgagtgcaagagaggtgggagacagacacacagagagagagagagagagagagagactggcgaggaagagataacgaaccagcatttgctgcgtcaccagctctctacctagcaagctagctagcggccggtgcgcgcggcggcgatgaacagaggacaattccgggcctcgcctttgcagcagcaggtgatctggagcgccgataccgccacggccagcagcagcagcgtcgtcatgagcgccttcaacttcaattcgtgccatgaggatcaagaggccttctcccccaacaacctgccgtccttgtcttccccgtcgctgctcttctcccacgaccagcagcagtcgtttccgcacaccggtaccactaccacctctccgggccaccaacttcttgccaaccgcggcgcagcagcgggcggctgccttccaagtctgcacgacggcggccaggagaaccaccacatgccggagtcgtggagccagatgcttctagcggggctagtcggaggagatcaggagcgctgcaccgcagctctcctgtcaaagggcatggacgattggggggatcacgctgcgactgcaagcgcggcgtgcatggtgggtggcggcggtacgaagaaggatgagggctccgccgtgcctcaacaacctccgtatagcttctacgggagccacggccacctcgctgctggcggtgatgagcatgagatgccggcgccagccagcaaggctcagctcagccagatgctcctggcctcgtctcctcgctcgtgcgtcaccacgagcctcggcagcaacatgcttgacttctccaacagcgcgccgccgatggagctgaagcgccaccatcatcactctgataactcatccgagtgcaacagcactgcgactgctgcaggttcggccgtcaagaagcctagggttcaggcggcctcctcttcagcacaatctactctaaaggtgaggaaggagagactgggcgatagaataactgctcttcatcagatcgtttccccgtttggaaaggctctcagctacccctacatgggccacggcaatttgacctcctcctccactcaaaatgggccagctggatcagaaaggaaccctgcagggctgttcccagaataccccggccagttgctaaaccataatcataacactggagcacagcagcagcagcctgcagcagtccagcagccgcctgatgagaagcagggagtcgatgacgaggtgaaaagggacttgaggagccgggggctgtgcctcgtcccggtgtcctgcacgtcgcacttcggaggggacaacgccgctgactactgggccccggcggcgctcggcgggatgttccgctagatagagcatacagcgccgccgtgccattgaagcatggtggtctagacgtacgtacgtacgggctgggcgagcagctgtttggtgcgagtatatgtgttcatgacgcttgctgcaggtagagagatcatcgagctgtctaagaatcatcgcgagctagctagctagggtggtgcagctgggaaacatagcatcatgagcagtcattctggtaagggagaagcgagaacctgtaaggctgattgctcttgatgctatgcgagtagtatatgacctttcggggccgtaaagcttcgtcgtctgtatcttcagttggagggcttagcttctgcaggaagatctagctagatcttctctggtccttcgcgcagatttgttttgttgatcgtgtatatgtaattaaaatctagcaagttgtcagtgaacatctttactcatatatatagatcctgccatgctcgtac

SEQ ID NO: 146800 - DNA, 1870 bp, Zea Mays
gggagacagacacacagagagagagagagagagagagagactggcgaggaagagataacgaaccagcatttgctgcgtcaccagctctctacctagcaagctagctagcggccggtgcgcgcggcggcgatgaacagaggacaattccgggcctcgcctttgcagcagcaggtgatctggagcgccgataccgccacggccagcagcagcagcgtcgtcatgagcgccttcaacttcaattcgtgccatgaggatcaagaggccttctcccccaacaacctgccgtccttgtcttccccgtcgctgctcttctcccacgaccagcagcagtcgtttccgcacaccggtaccactaccacctctccgggccaccaacttcttgccaaccgcggcgcagcagcgggcggctgccttccaagtctgcacgacggcggccaggagaaccaccacatgccggagtcgtggagccagatgcttctagcggggctagtcggaggagatcaggagcgctgcaccgcagctctcctgtcaaagggcatggacgattggggggatcacgctgcgactgcaagcgcggcgtgcatggtgggtggcggcggtacgaagaaggatgagggctccgccgtgcctcaacaacctccgtatagcttctacgggagccacggccacctcgctgctggcggtgatgagcatgagatgccggcgccagccagcaaggctcagctcagccagatgctcctggcctcgtctcctcgctcgtgcgtcaccacgagcctcggcagcaacatgcttgacttctccaacagcgcgccgccgatggagctgaagcgccaccatcatcactctgataactcatccgagtgcaacagcactgcgactgctgcaggttcggccgtcaagaagcctagggttcaggcggcctcctcttcagcacaatctactctaaaggtgaggaaggagagactgggcgatagaataactgctcttcatcagatcgtttccccgtttggaaagactgacacggcgtctgtgctgcaagagaccattgggtatatcagattcctcctgggtcaaattgaggctctcagctacccctacatgggccacggcaatttgacctcctcctccactcaaaatgggccagctggatcagaaaggaaccctgcagggctgttcccagaataccccggccagttgctaaaccataatcataacactggagcacagcagcagcagcctgcagcagtccagcagccgcctgatgagaagcagggagtcgatgacgaggtgaaaagggacttgaggagccgggggctgtgcctcgtcccggtgtcctgcacgtcgcacttcggaggggacaacgccgctgactactgggccccggcggcgctcggcgggatgttccgctagatagagcatacagcgccgccgtgccattgaagcatggtggtctagacgtacgtacgtacgggctgggcgagcagctgtttggtgcgagtatatgtgttcatgacgcttgctgcaggtagagagatcatcgagctgtctaagaatcatcgcgagctagctagctagggtggtgcagctgggaaacatagcatcatgagcagtcattctggtaagggagaagcgagaacctgtaaggctgattgctcttgatgctatgcgagtagtatatgacctttcggggccgtaaagcttcgtcgtctgtatcttcagttggagggcttagcttctgcaggaagatctagctagatcttctctggtccttcgcgcagatttgttttgttgatcgtgtatatgtaattaaaatctagcaagttgtcagtgaacatctttactcatatatatagatcctgccatgctcgta

SEQ ID NO: 146801 - DNA, 1206 bp, Zea Mays
ctctctctctctctctctctctctctctctctctctgatccgtatttcatgaccagtgtgtggttttttcccctgtgtgacaggctctcagctacccctacatgggccacggcaatttgacctcctcctccactcaaaatgggccagctggatcagaaaggaaccctgcagggctgttcccagaataccccggccagttgctaaaccataatcataacactggagcacagcagcagcagcctgcagcagtccagcagccgcctgatgagaagcagggagtcgatgacgaggtgaaaagggacttgaggagccgggggctgtgcctcgtcccggtgtcctgcacgtcgcacttcggaggggacaacgccgctgactactgggccccggcggcgctcggcgggatgttccgctagatagagcatacagcgccgccgtgccattgaagcatggtggtctagacgtacgtacgtacgggctgggcgagcagctgtttggtgcgagtatatgtgttcatgacgcttgctgcaggtagagagatcatcgagctgtctaagaatcatcgcgagctagctagctagggtggtgcagctgggaaacatagcatcatgagcagtcattctggtaagggagaagcgagaacctgtaaggctgattgctcttgatgctatgcgagtagtatatgacctttcggggccgtaaagcttcgtcgtctgtatcttcagttggagggcttagcttctgcaggaagatctagctagatcttctctggtccttcgcgcagatttgttttgttgatcgtgtatatgtaattaaaatctagcaagttgtcagtgaacatctttactcatatatatagatcctgccatgctcgtacaagttggccgggacagggagatcgagctagtcccggcggggcgccgtcttcttcatttatgcgccgccgcgccgggtgtacttatctgggaaaatgaaaataatcctttgaaaaaatggtgttgccaaactagcctttatctgggttaaatcagcaattgatattgattgttgtattcctatgagctcgcggccgtacaaaacctacagctagctcacatatgtttttttttgaacgaacggcacgagattgtgcacgtttctattaataaagaagagagtgaagcagtgcccaagagacaccgcaggaagggtacatataggttacgtaat

SEQ ID NO: 146802 - DNA, 342 bp, Zea Mays
ccctcttctccttcatgtccggccgccggtctggccgaggaccctggtcgtggggtcgcgtcctcctccctcgtcgcggacctgccgtgtcctgggcgccattccagcactgccaggttccgcgccatcgtgcctctgggtcctcgccgcggttcaggccgtcgatgcctgttgccccgacgctccctcacgctcctttatcagcctcgcctagacctccgcctcctcgtcggactgcacacacgccgccgccatttcttgcagtttcgtcgcgccatcccctctgatttccttgttctcgtcggcttaaactccgttgacgtaccctgcaagcaggtttga

SEQ ID NO: 146803 - DNA, 1927 bp, Zea Mays
cttcctcccgttgattgattgaggggattgctactaggcgggcgctagcactgcgaagcatctcgcctcatcgtctcctccgtgctccacttgcccattcttacgcgctaagcaacaggccagccggccgtagctccaaagcgggagccggagccggagccggagccgggagctaaggggggccgtgatgtcgtcgtcgccgacggccgcgccggcgccgaccacgccatcggctccgccggccaacgcgacaaatccgccgcccgcgaccccgtccgcgccgccaccggcggcgcccacgcctcccacgcccaccccgcccacgccgtccccgccgtccccagccgcgccgccgccgtcacccccctccgtcccggcccccgcgccggcctccaccccggtgactccctctgcgccctcgccctcctccccttcctccccgggcacgcccgccaccccgtcgcctccatcggacaccccgtcgccgccatcgtccggtggagggggcaggtccccgccgtcgtctgggggtgggcgatccacgccgtcctcccactcgcctcccaagtcgcactcgccggggggcggtggcggcagctccgggccgtctacgtcgctcgtcgtgggcgtggccgtcggcggcctcgtgctgctgctgctcgccagcttcatctgcctctgctgcctccgcaagaagcgccgccgcgcgccgccgccgccgccgcctcagcactacggatacccgccgcccccgccgccgtacaaggaggatccatacggtggaacgtaccagagttggcagcaaaatgcgcctcctgctccaccccctgagcatgtggtcaagatgcacccttcgcctccgccagcatatgccaatcgtcctccacagccgccagtgccaccaccaccagcgatgctaaatagtagtggtggatctggttctaattactctggtggcgagatcctacctccaccatcccctggtgctgttcttggcttctcgaagagcacattcacctacgaagagctgttgagggctactgatggattctcggatgctaatctccttggacaaggtggttttggctatgttcacagaggattgctgcctaatggcaaagagattgctgtaaaacaattgaaactgggaagtggccagggagagcgtgagttccaggctgaggttgagattatcagccgagtacatcacaaacaccttgtgtctttggttggctattgcatttctggaggcaagaggctgcttgtctatgagtttgtccccaataacacattggaattccacttacatgcgaaaggtcgaccaacaatggagtggcctgctagattaaagatcagtttgggtgctgccaagggtttagcttatcttcatgaagactgccatccaaagatcatccatcgtgacataaaggcatctaacattcttcttgacttccaatttgaagctaaggttgctgattttggacttgcaaagttcactactgataacaacacccatgtttcgacaagagtaatgggcacctttgggtatttggcacctgagtatgcatcttctggcaagctaacagaaaaatccgatgtattttccttcggagtcatgcttcttgagcttattactgggcggcgaccagttgacacaacccaaacatatatggatgacagcttggttgactgggcaaggccattactgatgcgagcacttgaggatggtgaatatgattctttagtggatcctcggctgggaaaggacttcaatcctaatgagatggcaagaatgatagcctgtgcagctgcatgtgtacgccattctgcacgtcgtcggccacgtatgagtcaggtaatttatagacagcttttgcactgtcctagcgaacattcctaaactgcacttacgtcccttggcactatt

SEQ ID NO: 146804 - DNA, 2507 bp, Zea Mays
cttcctcccgttgattgattgaggggattgctactaggcgggcgctagcactgcgaagcatctcgcctcatcgtctcctccgtgctccacttgcccattcttacgcgctaagcaacaggccagccggccgtagctccaaagcgggagccggagccggagccggagccgggagctaaggggggccgtgatgtcgtcgtcgccgacggccgcgccggcgccgaccacgccatcggctccgccggccaacgcgacaaatccgccgcccgcgaccccgtccgcgccgccaccggcggcgcccacgcctcccacgcccaccccgcccacgccgtccccgccgtccccagccgcgccgccgccgtcacccccctccgtcccggcccccgcgccggcctccaccccggtgactccctctgcgccctcgccctcctccccttcctccccgggcacgcccgccaccccgtcgcctccatcggacaccccgtcgccgccatcgtccggtggagggggcaggtccccgccgtcgtctgggggtgggcgatccacgccgtcctcccactcgcctcccaagtcgcactcgccggggggcggtggcggcagctccgggccgtctacgtcgctcgtcgtgggcgtggccgtcggcggcctcgtgctgctgctgctcgccagcttcatctgcctctgctgcctccgcaagaagcgccgccgcgcgccgccgccgccgccgcctcagcactacggatacccgccgcccccgccgccgtacaaggaggatccatacggtggaacgtaccagagttggcagcaaaatgcgcctcctgctccaccccctgagcatgtggtcaagatgcacccttcgcctccgccagcatatgccaatcgtcctccacagccgccagtgccaccaccaccagcgatgctaaatagtagtggtggatctggttctaattactctggtggcgagatcctacctccaccatcccctggtgctgttcttggcttctcgaagagcacattcacctacgaagagctgttgagggctactgatggattctcggatgctaatctccttggacaaggtggttttggctatgttcacagaggattgctgcctaatggcaaagagattgctgtaaaacaattgaaactgggaagtggccagggagagcgtgagttccaggctgaggttgagattatcagccgagtacatcacaaacaccttgtgtctttggttggctattgcatttctggaggcaagaggctgcttgtctatgagtttgtccccaataacacattggaattccacttacatgcgaaaggtcgaccaacaatggagtggcctgctagattaaagatcagtttgggtgctgccaagggtttagcttatcttcatgaagactgccatccaaagatcatccatcgtgacataaaggcatctaacattcttcttgacttccaatttgaagctaaggttgctgattttggacttgcaaagttcactactgataacaacacccatgtttcgacaagagtaatgggcacctttgggtatttggcacctgagtatgcatcttctggcaagctaacagaaaaatccgatgtattttccttcggagtcatgcttcttgagcttattactgggcggcgaccagttgacacaacccaaacatatatggatgacagcttggttgactgggcaaggccattactgatgcgagcacttgaggatggtgaatatgattctttagtggatcctcggctgggaaaggacttcaatcctaatgagatggcaagaatgatagcctgtgcagctgcatgtgtacgccattctgcacgtcgtcggccacgtatgagtcaggtcgttcgggctttggagggcaatgtgtctttggaggaccttaatgaaggtgttcggcctggccatagccgcttctttgggtcatacagcagctccgattacgattctggccagtacaacgaggacatgaagaagttcaagaagatggcattcaacaacaactataccagcagccaatacagcgcgccaaccagtgaatatggacagataccgtctgcatcaagcagcgagggccaccagacgcaagagatggagtcgggtgcaatgaagaaaggtggctacagtggtggctacagctcaggatacagcggagcctcgtaagggaattccctctttttttttgtttttcttttgatgttttcattgctgcatttgtaaagtctggccgaattatatgaccaaagctgctgacttgcgcgtgatgtatctgagtttgaccgagtatagttctatgtagctgcaattgtttattctttcatgaaagttgttcttgaccaatgtttgctgtgcagttcgaagagagctaattgaatgttgatatactgtccatgggtcgcttgattcatctttcccctcgatgtgtcatctaaataaccttgctagtattttccggctacttcattacaatacatgtatcatgtatgctgtcacg

SEQ ID NO: 146805 - DNA, 1056 bp, Zea Mays
attatagacatgctgcatacctatttggctgaaattttaaccgtgtggatgccattacttaatactgatgcagttcagactagactgaaatatggtatttggcacctgagtatgcatcttctggcaagctaacagaaaaatccgatgtattttccttcggagtcatgcttcttgagcttattactgggcggcgaccagttgacacaacccaaacatatatggatgacagcttggttgactgggcaaggccattactgatgcgagcacttgaggatggtgaatatgattctttagtggatcctcggctgggaaaggacttcaatcctaatgagatggcaagaatgatagcctgtgcagctgcatgtgtacgccattctgcacgtcgtcggccacgtatgagtcaggtcgttcgggctttggagggcaatgtgtctttggaggaccttaatgaaggtgttcggcctggccatagccgcttctttgggtcatacagcagctccgattacgattctggccagtacaacgaggacatgaagaagttcaagaagatggcattcaacaacaactataccagcagccaatacagcgcgccaaccagtgaatatggacagataccgtctgcatcaagcagcgagggccaccagacgcaagagatggagtcgggtgcaatgaagaaaggtggctacagtggtggctacagctcaggatacagcggagcctcgtaagggaattccctctttttttttgtttttcttttgatgttttcattgctgcatttgtaaagtctggccgaattatatgaccaaagctgctgacttgcgcgtgatgtatctgagtttgaccgagtatagttctatgtagctgcaattgtttattctttcatgaaagttgttcttgaccaatgtttgctgtgcagttcgaagagagctaattgaatgttgatatactgtccatgggtcgcttgattcatctttcccctcgatgtgtcatctaaataaccttgctagtattttccggctacttcattacaatacatgtatcatgtatgctgtcacg

SEQ ID NO: 146806 - DNA, 950 bp, Zea Mays
aaacctttgggcacaatgttcatcatttatcatgcatatgctattttctcttgtattggtttagggtgtgatctccgtacatcgtgctccagccgcactcagatctagccttggccgggagacaccacgacagaggctggacgtgctcttcccgtcctcacgcccccacgccgctgcgcgctcttcccttcacctctcactacacgacggctgcggggcaggggtgaaagaggtgaggcttctccagcttctcgaggccggagaccgtttgctcaagggtgtcgttcttgacggcctcctccgacagcgtggacgcgtggttctcagccatggccttggtcgcggcaggaagcatagcctggtgaggtcccatttcatgtgcttgtcaataggtgtatattataattccggtaataatttaggtgccagagaagctcccagtgccccatgtgttggtagcatatcagcatgaaagatcctatgagccaagagctactagaggctgttgaacaagagaggaacatccgatctaatccttcacgtaatactgctgttttccaccatccaatgctgggtgattttgagatccctataggtgcagatgatgcagaacttgaagaacgcattattcagcacttggctgccacagctgtagtgcgtaggtcacaccgtcatcataatagaagagatgggcaccagagcagatcaggagcaagtagccacccacattttctggtgctctcagcagacgtgcacactatttcaggtcaagaagaggactatgaacaagcacctgctgtagcttctggccgccctttacgtacacttgttgaacaagaacacactcgagggttagcggatgcttccagtctcctgtgtgtaactactggacataaattgttctctatttttaggaaacgtgcaatacacaacaagaacagattcaaaca

SEQ ID NO: 146807 - DNA, 110 bp, Zea Mays
gtaagaaacgttgtaacttggggaatcttaaccaatgctcatacattctctcccttatccgctaggaggaatttactgcctgcacttccactcaaggggcaatgacacgc

SEQ ID NO: 146808 - DNA, 591 bp, Zea Mays
aattcaaatccaattcgagttcaagtttaaattcaaactttgtgaataacttgtcctcagtttgaaaggtataatttaataatataagtgtgagggaggtttattctgatttttattttattttatgtattatttttcttagttcttcccttctcttatttcaaaccctaattccaattcaaattaaatttcaacttgtggcaaatttattttcagattaatagtaaaatttggacatacttaaaagtgtgatgaatttataactttgttttgttttgtataatatttctttctttctttcctatttccaattcaaatcaaaccaagtttcaaattctagatttcaaattttatgcacaagttaaactttcacatgatgcaaaattactacatagtgttttcttcatttattttattatgattatttacctttaaaaagggtgaactataaagtttaatcacttatcaatggtactttgctcaaatttcttctaccaatcccaaattcagaatttgggtgttacaaatcctaccccccttaaaaataatctcgtccccgagattagtaagaggatgtagaagaaattgttt

SEQ ID NO: 146809 - DNA, 94 bp, Zea Mays
cggggggagggagatagtgagccggccggcgtcggtggatgccgaggggagctcgggaaccgccgacagaggccaaggttcggacgccgccggt

SEQ ID NO: 146810 - DNA, 621 bp, Zea Mays
ttggaatgccgggaccgtgaaacatgtgaatatgttgccataaaagttgttcgcagtatccgcaagtactgtgaggctgcaatgattgagatagatgtgctcaatcgccttgcagaaaatgaaaaatatagatctctatcattcgtattgtatccttccttgtattgcttcttttgttctgctacaaatatgatcaacatggcagggagaggtcttgaggtcaagcctggacccactgtcaattttatttcatgtaagactgatctaaacaatttctttgtggagtattttgtttccttgacctcatttttgcttcttgcctcttacataatggctcttgattctgaagatgaagagaacgagctaaacgttctagtaatcaaggaaaatggcaaaggtgaggtgaaggaggaccagagaagtgaagagaaggcagttgctgcagcttcaaaatcaagtcttgggcttgaaaaaaaagcaaggatgagtatgagtctgatgattctgatgagggagaaggtgaaactgaagaatgcgcagatgtggctgttcatggacgacagcatcaagaaacctgcaacatgcaaccagattttaagaaatctgccacctgcaacatga

SEQ ID NO: 146811 - DNA, 1104 bp, Zea Mays
acattcctttcgatgcgctatatataaataggccaccacgccattatcacacagctagcaaatgaaccagccacaataatcctgatcctcgatcttgcgtcgtcgtcgtcaaagagacgactcgatcatcatctcatctcagagcacgcaagcaacaatggttactagcatccgcgtcatagttggaatcataggatctgtagtctgtgtgctcctctacgcggttccagtgctgacgtttaagagagtggtgaaggaggccagcgttggggagttctcgtgcgtgccatacatcctcgcccttttcagcgccttcacctggggctggtacggcttccccatcgtcagtgacgggtgggagaacctgtcgctcttcggcacgtgcgccgtcggagtgctcttcgaagcttcgttcgtcgtcgtatacgtgtggtttgcgccaagagacaaaaagaaatctgtcgtcctaatggtgtctctggttgtggcaacgctctgcgtcatcgtatccttgtcaagcttcgtgttccacacgcaccatatgcgcaagcaatttgttggtagcattggtatagtcacctccatatccatgtacagcgctccgcttgtagccgtgaagcaagtcatcctgaccaagagcgtggagttcatgcctttctacctgtcgttgttctccttgctgaccagttttacatggatgctgtacggcatcctaggaagggatccctatcttacggcaccaaacggcgccgggtgtttaactggacttcttcagatcgctgtgtactgcatttacagcagatgcaatcgaccgccgaaagcagtcaatggtgcgacaactagccgtgaagatgcaaatgattgcaaggtttgacttggagagtcttaagaaactgcctctctccgacgacgctagatactacagtggcgctattaattcgcatgtgtgcagttattattatctaattgtagccttcgctagctgtgtctgttgtaagactagtttgttttacttggggcaaatcaatgggcatagcaccagcaaccagtaattaaccacattctgttctttcatacttaacggaaaggatgtttcattcgtga

SEQ ID NO: 146812 - DNA, 354 bp, Zea Mays
atgtcggccgccatcgccatcgagtgcgctggtgagcaccaccttctccctggcaccgacgtcgacgatgcgccggtcttgaggcccgacaggtgtgtccccaatctcgtgccaaccatagtgagtgcacatccactctatgacggcgttgcccttgattcaccatacacggccgtagacgatgatgtgtgtggcgcgtgcacactcgagcttgcgccacgcccgcaatgcagcaagaagcatcaggcgtgcacgccactagtagatggcgcccaagtgaagaaggtgcgcacgtggtgggatcgagttgggatggacgatggtgggccaacgtcgtgttcgctggtcgggtag

SEQ ID NO: 146813 - DNA, 1466 bp, Zea Mays
ttttttgtttggtttattcgcatacatcttcgtttttccttgttgctaggcagcttgtttcttctctcatatacagtattttcttttcagacatcgacgagtgtgctcatcctcatctctacccatgttatggggtttgcctaaataagatgggatctttcgattgccaatgcaaaaggggaacatatggtgatcccttcacaaaggggggctgcagttacctcacagtttgggaaatggggttagcaattggtggtggaacaggatttttgcttttggcacttggggcacccatcatatcacgtaaaatcaagctacataaggctaaaaggaaaaaagagagatttttcaaacaaaatcatggcctgctactacaacaattggtatcacaaaattcagacatcagtgaaaggatgatcattaccattggggagctagagaaggctacaaacaacttccatccgtctcatgaagtcggtggtggagggcatggtgttgtgtataaaggacttttagacctacaagttgttgccatcaagaaatcaaaaattatagtaaaaagagaaattgatgatttcataaatgaggttgcaattctttcacagatcaaccataggaatattgtcaaactccttggttgttgtcttgaggcagaagttccactattggtgtatgagtttatatcaaatggcactctttcgcaccatctccatgttgaaggaacaatttcactctcatgggatgaccgactaaggattgccctcgaaatttccaaagctttggcttatctacattcatcagctacaacaccaatacttcacagagacatcaagtcatctaatatacttcttgatgataatttaactgcaaaggtatcagactttggtgcttcaaagtacatcccaattgatcggactggagtgactactgatgtgcaaggaacctttggctacttagatccaatgtattattatacatcccgactaactgacaagagcgatgtttttagttttggtgttcttcttatagagttgcttaccagaaagaaaccatatgcctacagatccgatgatggtgatggtctcgtttcagaattttcatcattgctagatcaagggaccttggttgacattatagatcctcaaatcatggaggaggataaacaagtcgatgaagttgccaaactagcagcaaagtgtacaaaattgagtggagaagatcggccgacaatgagggaagttgagatggcacttcaaaacttaagagccacagagaagcatgctcataataatacaacatcaacgaataaatatgaaaaaggtaaaacctctcagtacatgccatttggggggctcgccatagaaacaagtagacaatatactatggaagaggaaatgttgttgtcagcaaggtatccacgatgagatcctcttgtggccagaagaataatgccgctttttgtaccc

SEQ ID NO: 146814 - DNA, 2023 bp, Zea Mays
gtcggagaccaacgccacgccgacatcgacagcactgatccgacaagtcgccgtttctgccctaagcacggacgctgttggtcacactcgcggagccccatccttccctcccggtctctccttgcgagctagtaccctacttgctgcacagtgccacaccgctcgcgctggagtatgggttcgagcccgatgtggtggtcaggaccaccaccgtcgccgtggagccgcggtttagggaaatggtgggcgctggtagggccattcgtggtgaaggccgtcgggttcctgctgctcgcgggcctcttgttccgggtgctctggtcctttccgtcctctccggcgccggcgttgcagatcacaaaaggaaaatgcagtcttttcaatggggaatggataccaaacccctctggtccagcctatacaaatgcaagctgtcgatttatcgacgatcaccagaactgcatgatgaatggtagacctgataaggaatatctacattggaagtggaaaccttatggatgtgatcttccaccatttgatgcagtaagatttctagattctgtgagaaacaaaggttggggactaattggtgactccatccttcgtaaccaagttcagtcattgctttgccttctgtctaaggtaaatgctaccgactttactttctcgttctcccgcgatgcactatacagtgtccctattctatatttgaatatgatgggatctttcacaaaactgtactgaaaatttcaccccttttcatccttccaaatcttcacttttaaataatatataggatgttttagtttgataacaagtgctttgatactagacattatgcaggtattcaaatgtaaaggtcctgttaccatactttttacaagaacagctgaaactcttgttcagtgttcattaaacttcatgtgtaccactgtcacatgcttccttctggttgctgccaaaactggaagtgtttgcttcctgctgttggcttttgctatttaatccgttttctttttttaaataatggtgggatggaaattccctgatgctctaaccttattatctcttccactgtcacatgcttgctgcttgtttaggctgaagaacctgttgaggtttaccatgataacgaattcaaaaacaggagatggcacttccaatcctacaacttcacagtgtccatcgtctgggctcctttcctcatcaaatctggtatttttgagaatgaggatggcgtgtctacctctgaaatacagctccaccttgatatactcgatgctaactggacaagtcagtatgagagctttgactatattattatttctggcggacaatggtttctgaggacagcggtctactgggagaacggtgcagtggttggtggtcataattctcagaacaagaacgtcgctgaacttggttttgagcacctgtatcagaaaactctacaaaacgttttcaacttcatcgtctcagcgaaacacaagccagtaattttcttcaggacctggtcacctgatcacttcgaggatggagagtggttcagcggtgggtcttgtcgcaggaaattgccctacaacaagggagagtacagagagggtaacatcgagcgtgtcatgagacagatcgagcttgagtccttcaacaaggctgtagccgcgcttaggggttcagcggacatggatagactgagactgatggatacctacagcctctcgtccttgagaccggacggccacgttgggccttacagaacaccctatccctttgcaaggggcagcagtaaatccacgcccgttcaaaatgattgcttgcactggtgtgtaccaggccccattgatgcatggaatgatcttgttatgaagatggccctggatccatgaaaaccttatggatttgtatggtgtgctcttatggagtaagtagcagctaagtgggcacaaaaaagtgtgtccgttttggtttagctgtaaaataggagtgctagcaaatagagaaacctcagggttggctttgttgc

SEQ ID NO: 146815 - DNA, 1641 bp, Zea Mays
gtcggagaccaacgccacgccgacatcgacagcactgatccgacaagtcgccgtttctgccctaagcacggacgctgttggtcacactcgcggagccccatccttccctcccggtctctccttgcgagctagtaccctacttgctgcacagtgccacaccgctcgcgctggagtatgggttcgagcccgatgtggtggtcaggaccaccaccgtcgccgtggagccgcggtttagggaaatggtgggcgctggtagggccattcgtggtgaaggccgtcgggttcctgctgctcgcgggcctcttgttccgggtgctctggtcctttccgtcctctccggcgccggcgttgcagatcacaaaaggaaaatgcagtcttttcaatggggaatggataccaaacccctctggtccagcctatacaaatgcaagctgtcgatttatcgacgatcaccagaactgcatgatgaatggtagacctgataaggaatatctacattggaagtggaaaccttatggatgtgatcttccaccatttgatgcagtaagatttctagattctgtgagaaacaaaggttggggactaattggtgactccatccttcgtaaccaagttcagtcattgctttgccttctgtctaaggctgaagaacctgttgaggtttaccatgataacgaattcaaaaacaggagatggcacttccaatcctacaacttcacagtgtccatcgtctgggctcctttcctcatcaaatctggtatttttgagaatgaggatggcgtgtctacctctgaaatacagctccaccttgatatactcgatgctaactggacaagtcagtatgagagctttgactatattattatttctggcggacaatggtttctgaggacagcggtctactgggagaacggtgcagtggttggtggtcataattctcagaacaagaacgtcgctgaacttggttttgagcacctgtatcagaaaactctacaaaacgttttcaacttcatcgtctcagcgaaacacaagccagtaattttcttcaggacctggtcacctgatcacttcgaggatggagagtggttcagcggtgggtcttgtcgcaggaaattgccctacaacaagggagagtacagagagggtaacatcgagcgtgtcatgagacagatcgagcttgagtccttcaacaaggctgtagccgcgcttaggggttcagcggacatggatagactgagactgatggatacctacagcctctcgtccttgagaccggacggccacgttgggccttacagaacaccctatccctttgcaaggggcagcagtaaatccacgcccgttcaaaatgattgcttgcactggtgtgtaccaggccccattgatgcatggaatgatcttgttatgaagatggccctggatccatgaaaaccttatggatttgtatggtgtgctcttatggagtaagtagcagctaagtgggcacaaaaaagtgtgtccgttttggtttagctgtaaaataggagtgctagcaaatagagaaacctcagggttggctttgttgcaaagatatgtgtatgttgttttaaagctttataagtttcaactgggcagatactgccagttgttcctggtttaaca

SEQ ID NO: 146816 - DNA, 76 bp, Zea Mays
actacgtttgtacttgtactccatgctctctctctctctctctctctctctctctctctctctctctctctctctc

SEQ ID NO: 146817 - DNA, 2349 bp, Zea Mays
tgttttgaacgatccacttactaaagacctaaaggtgatcgatccagctgcagtacacaagtagtcaagcccagctttgaacctctatccatgtcccctgtaccctccaaaaccaatttataaatacctctgctttgagctccctccaaaaccaaccagagaccccctgagcagtcactacggctcgcatcactcactcactggtgcactgccatggccatgaacgtgattgcactacttggcctcttggcacttgcatcagtggtgaggacggcttccggcgctggcgggcatgactacgcctcggcattgaagaagaccatcctctacttcgaggcgcagcggtccggcgtgctcccgcccaaccagaggatcacctggagagagaactccggcctcttcgatggaaaggccaacggagtggacctcgtcggagggtactacgacgcaggcgacaacgtgaagttcggcctgcccatggcgttcacggtgaccatgatgtcgtggggcatcctggagtacggcaggcagatggcggcggtcggcgagctgcgcaacgccatggacgccgtcaagtggggcaccgactacttcatcaaggcgcacccggagcccgaggtgctgtacggcgaggtgggcgacggcgacacggaccacggctgctggcagcggcccgaggacatgtccacgagccgccaggcgttccgcattgacccccagaaccccgggtccgaccttgccggagagaccgccgcggccatggccgccgcgtccctcgtgttccgcagcacgtatccgggctacgccaacctgctccttcagcatgccaaggagctgttccagttcgccgacaagtaccgcggcaagtacgacgccagcatcactgtcgctcgcaactactacggatccttcagtggatacggggacgagcttctgtgggcggcggcatggctgtacgaggcgacagaggaagggtgctacctcgagtacatggcccggaatggcgacgctctcggcggcacgggctggttcatcaaccagttcggctgggacgtcaagtaccccggcgtgcaggtcctggcagccaagttcctcctgcagggccgtgccggcgcgcacgccgcgacgctgcagcggtaccggcagaacgccgagttcttcgtgtgctcgtgcgtgggcaagggcgccgtgaacgtgccgcggaccccgggcggcatgatgtaccaccagcgctggaacaacctccagttcgtgaccagcgcctcgttcctgctgacggtgtacgcggactacgccacggcgctgcccggctccggcggcggcgccttgcggtgccccgcgggcgccgcgcggcctttcgagatcctcgccttcgtcaggtcccaggtgaactacatcctgggcgacaacccgcggggcaccagctacatggtcggctacggcgccagcttcccgcggcaggtgcaccaccgcggcgcctccatcgtgtcggtcaggacggacccgtccttcgtcagctgccaggaggggtactccgcctggtacccgcggcaggccggcaaccccaacgtcctggagggcgccatcgtcggcgggcccgacgagtacgacgacttcgccgacgagcggaacaactacgagcagacggaggccgccacctacaacagcgcgccgctgctcggcgtcctcgcccgcctcgccggcgcctgcggcaccgggctcgaggagtaccagctgcatccgccggaggaggccaccgcgaaccagacgtcgtcgtcgcggttgaggcagccgtcgtccccgatcgagatcgagcagaacgtgacgaggacgtgggcgatgcggcgcgcgacgtactaccgctactcggtgacgctgacaaacaggtcgaggaagaccgtccgggagctccacctcggcgtctcggagctccgtggccggctctggggcctcgacaaggcgcgctacgggtacgtcccgcccaagtggctaccggcgttgcgcgcaggtaagagcctcaggttcgtgtacgtccagcacgggacgccggccaacgtccgggtcatcggctacaagctactctgacgtcacgtcaccaagtgactgcggcagtgtgctgctactgctagtagcaagctagtttggtgagttcgtttagctttgctcgtcctcttcctcccaagaccaagagtatcaggtgtgtcctatttttgttaggccggcgaggggctttgacctttgagagatggagtaagtgttcgtcctctttgcccctgcgagttatccattgatacatttggaatgcgaaccaagagggggagtgaattctaatgtcaaccgactgtttct

SEQ ID NO: 146818 - DNA, 766 bp, Zea Mays
tgagttgctgacggtcgcttgacgagtttgcgattttggatcccatcccatcgtttcctcctcctccctctggcctccggtcacggctcgatctcccgttccaatcacgcccatggcagccgccgccttcggctccgccactggtggcgggtcgcggcttgtggaccgctgcatcgacgcggcagcgcgcggtcccgccactgtggaggcctggcgccggcagcgccgctccctggagcgcctcccggccccgctcgccgacgcgctcttacgccgcctagctgcgcgtcgccttctcttcccctccctcctcgagtaagcctgctgcaccgctttctaaactcgtcctcgtgctgcgaagtaaagatgctcgacgccccgatagggagctatggttttttttcctccattttttgcctcgccgcttccagtcccccatctctacccacgctccctccctctccgcgccgctcttccagccatggcgatcaccacagagtcgcggaagcggacaaggcttcccatgcgatcgagaagcggggggtacggtctgatttcgaggttgggaaattctttgtagtggccaattttagacatggttttctaggtagagaaaataatagtagtcagattgtggctttgaaagttcttttcaagggccagctcaaacaatctcaggtccaacatctgctcccaatgttcttcgcctgtatgtgtacttctataaccacaccggggtttacctaatcctggaatatgctgccaa

SEQ ID NO: 146819 - DNA, 1197 bp, Zea Mays
tgagttgctgacggtcgcttgacgagtttgcgattttggatcccatcccatcgtttcctcctcctccctctggcctccggtcacggctcgatctcccgttccaatcacgcccatggcagccgccgccttcggctccgccactggtggcgggtcgcggcttgtggaccgctgcatcgacgcggcagcgcgcggtcccgccactgtggaggcctggcgccggcagcgccgctccctggagcgcctcccggccccgctcgccgacgcgctcttacgccgcctagctgcgcgtcgccttctcttcccctccctcctcgaggtgtttggccggtcagtagaggaggttgatctgagtggatttctttctgtgaattccgagtggttggcataccttggctccttcaggtaccttagggttctgaagttggcggactgcaagaacatcaacaatgacgctgtctggtcgctctctggtggaattctcatgacagacaaaaccctacagtctttacaggtattgacaaaacttgagcatcttgatatatggggtagtgaaactacaaatgagggagcttctgctctgaaatcctttgcaaggctgctatccttgaatcttgcgttgacacgtgtcaaccatttatcaattcctccaaccacaagctatctaaatatgagcaactgcgaaattcattctatttgtgatgtggattctgaagttcctgttccactagaaaactttattgtctctgcagctacatttggcaatattgataaagtattttctagcatccaagcaagctcactgatacatttggacttgtctagctgcaagttaagcaacttgtctttcttggaaaagatgaagaatctagagcatctggaccttagctacaacataataactgatggtgcaattgaacatattgcgaagattggaacaaacttgcaatatttgagcctcaagaatactggaataacttcccaggcactatgtattctggcagggacagttccaaacctcacctcactgtctttagctaatacaaaaattgatgactctgctctagcatatattggcatgatacctttgctgagaacgatagatttaagccagacaagtatcaaaggttgtgctcttgcttactaaaattttttgtttccttgattacattaatttacttttggccacaaaaaaataaa

SEQ ID NO: 146820 - DNA, 2022 bp, Zea Mays
tgagttgctgacggtcgcttgacgagtttgcgattttggatcccatcccatcgtttcctcctcctccctctggcctccggtcacggctcgatctcccgttccaatcacgcccatggcagccgccgccttcggctccgccactggtggcgggtcgcggcttgtggaccgctgcatcgacgcggcagcgcgcggtcccgccactgtggaggcctggcgccggcagcgccgctccctggagcgcctcccggccccgctcgccgacgcgctcttacgccgcctagctgcgcgtcgccttctcttcccctccctcctcgaggtgtttggccggtcagtagaggaggttgatctgagtggatttctttctgtgaattccgagtggttggcataccttggctccttcaggtaccttagggttctgaagttggcggactgcaagaacatcaacaatgacgctgtctggtcgctctctggtggaattctcatgacagacaaaaccctacagtctttacaggtattgacaaaacttgagcatcttgatatatggggtagtgaaactacaaatgagggagcttctgctctgaaatcctttgcaaggctgctatccttgaatcttgcgttgacacgtgtcaaccatttatcaattcctccaaccacaagctatctaaatatgagcaactgcgaaattcattctatttgtgatgtggattctgaagttcctgttccactagaaaactttattgtctctgcagctacatttggcaatattgataaagtattttctagcatccaagcaagctcactgatacatttggacttgtctagctgcaagttaagcaacttgtctttcttggaaaagatgaagaatctagagcatctggaccttagctacaacataataactgatggtgcaattgaacatattgcgaagattggaacaaacttgcaatatttgagcctcaagaatactggaataacttcccaggcactatgtattctggcagggacagttccaaacctcacctcactgtctttagctaatacaaaaattgatgactctgctctagcatatattggcatgatacctttgctgagaacgatagatttaagccagacaagtatcaaaggttttattcacactgaagtaaattccgagaagttgttgtctatgtctgcatttgagcatctcaaatatctggaaagtctaaatctggaggatacaccgctatcagctgaagttatacctcccttggcatcctttgcaacactgaaatatttgtacctgaaaagtgatttcttgtctgatcctgccttgcacgcactctctgctgcctccaatttgatacaccttgggttccgcgggaatatattgtcaagctttgggcttttacagtttgtaccccctgtcacactctgtgtgttggatttaagcggctgttggatcttaacaggcgatgctatttcaacattccgtaagcgtcatcctacgattgaattgagacatgagctcctgcacgaagttgaggaaaattttgttggtggttcccaatttcgtaaacctagacgcagacgatctcctcatgtgaaagcagaagttggaaacagttttgctggctcaagtaggctacacgatatccgttttgtagatgaaaggataaaatacagcaaggaggaatttgtggagctgcaaggccttgctaaaccaaattcgttaatgcttggcgtgtggcttccaccagaactgcgaaggcccaaatgatagttttggatcttgattccttacgcatttactgccagcatatcataatcttccttgagttattcttgatatgacagacttttgagaattaagcatcaagcatgtcactcagttccaaattatagttcactttggttttgtcctaggtcaaacttttctagctttgacctatgcattcgaataaatgctataccaaaatgtatttcgtgaagaatctaaagaaactgatttgatgttctagatggtggtacactttcctttaaact

SEQ ID NO: 146821 - DNA, 2199 bp, Zea Mays
tgagttgctgacggtcgcttgacgagtttgcgattttggatcccatcccatcgtttcctcctcctccctctggcctccggtcacggctcgatctcccgttccaatcacgcccatggcagccgccgccttcggctccgccactggtggcgggtcgcggcttgtggaccgctgcatcgacgcggcagcgcgcggtcccgccactgtggaggcctggcgccggcagcgccgctccctggagcgcctcccggccccgctcgccgacgcgctcttacgccgcctagctgcgcgtcgccttctcttcccctccctcctcgaggtgtttggccggtcagtagaggaggttgatctgagtggatttctttctgtgaattccgagtggttggcataccttggctccttcaggtaccttagggttctgaagttggcggactgcaagaacatcaacaatgacgctgtctggtcgctctctggaatgaacacattaaaggagctggacttgtcaaggtgcaaaaagatttctgatgctggcatcaaacatatagtgaccattgaaagcttagagaagctacacttatctgagactgaattgactgacaatggagtgatgctcatttcttcactgacaaatctaagtttccttgatctaggtggaattctcatgacagacaaaaccctacagtctttacaggtattgacaaaacttgagcatcttgatatatggggtagtgaaactacaaatgagggagcttctgctctgaaatcctttgcaaggctgctatccttgaatcttgcgttgacacgtgtcaaccatttatcaattcctccaaccacaagctatctaaatatgagcaactgcgaaattcattctatttgtgatgtggattctgaagttcctgttccactagaaaactttattgtctctgcagctacatttggcaatattgataaagtattttctagcatccaagcaagctcactgatacatttggacttgtctagctgcaagttaagcaacttgtctttcttggaaaagatgaagaatctagagcatctggaccttagctacaacataataactgatggtgcaattgaacatattgcgaagattggaacaaacttgcaatatttgagcctcaagaatactggaataacttcccaggcactatgtattctggcagggacagttccaaacctcacctcactgtctttagctaatacaaaaattgatgactctgctctagcatatattggcatgatacctttgctgagaacgatagatttaagccagacaagtatcaaaggttttattcacactgaagtaaattccgagaagttgttgtctatgtctgcatttgagcatctcaaatatctggaaagtctaaatctggaggatacaccgctatcagctgaagttatacctcccttggcatcctttgcaacactgaaatatttgtacctgaaaagtgatttcttgtctgatcctgccttgcacgcactctctgctgcctccaatttgatacaccttgggttccgcgggaatatattgtcaagctttgggcttttacagtttgtaccccctgtcacactctgtgtgttggatttaagcggctgttggatcttaacaggcgatgctatttcaacattccgtaagcgtcatcctacgattgaattgagacatgagctcctgcacgaagttgaggaaaattttgttggtggttcccaatttcgtaaacctagacgcagacgatctcctcatgtgaaagcagaagttggaaacagttttgctggctcaagtaggctacacgatatccgttttgtagatgaaaggataaaatacagcaaggaggaatttgtggagctgcaaggccttgctaaaccaaattcgttaatgcttggcgtgtggcttccaccagaactgcgaaggcccaaatgatagttttggatcttgattccttacgcatttactgccagcatatcataatcttccttgagttattcttgatatgacagacttttgagaattaagcatcaagcatgtcactcagttccaaattatagttcactttggttttgtcctaggtcaaacttttctagctttgacctatgcattcgaataaatgctataccaaaatgtatttcgtgaagaatctaaagaaactgatttgatgttctagatggtggtacactttcctttaaact

SEQ ID NO: 146822 - DNA, 100 bp, Zea Mays
ggccacacatcactaaaacacagtttcagtcctctgaatttactgaatcagccaacactgcccccttgcacatttccttgtttagctgcatggatcaccc

SEQ ID NO: 146823 - DNA, 3350 bp, Zea Mays
ccgcggaccgcttctagttctgcatcggcggccttcgcttctcagccttttcctccccccatcccggagacttcttccctggttgctgcacagccttctttttttgcgaggtggagaggtttggggaggagaacacgaacgcatccaaagaccggagcggagcagggtaagggctctctcctgcaggctgcagccgtggaccgtggagggagaagatgcgcaaggggcagctcttgttgctgctgcttttgttcgctgccggatcaacaaccgcctccgccaagaccgacccgcaagatgaggctgctctcagatccttgatgaagagatggaaaaatgtgcctgctagctggggaaagtccagtccttgcgacatgccgtgggatggtattttgtgtgatgaaaatggaagggtcacatcactgaatctgtttgggatgggcatgggaggcactctgagtgatgatataggaagtctgactgagctaacgatcttagatctgtcctcaaacagagatcttggtgggccattgccagctgccattgggaagttgtttaagcttgaatctttagcattgattggttgcagtttcagtggtcctgttccgagcgaactaggaaacttgtcacaactcacattctttgctctgaactcaaacaaactaacgggtagcatcccgccctcattaggcaagctctccaatgtcacctggctggaccttgccgataaccagctgaccggacctctcccaacctccagagataatagaactggattggaccagcttcttaacgcacaacacttccattttaatcgaaacatgctggaaggttcaataccagactctctcttcagctccagcatgcacctcaaacatatcctttttgacctaaacagatttactggacagattccagcttctattggtgcaattccatcactcacagtacttcgtctaaataacaatggtttcatgggaccagttcctgctctcaacaacctgactaatctccaagttttaatgctttcaaataacaagctaagtggaccaattcctaatttgaccgggatgggctcgctagaaaatgtggatatcagtaataacagctttgatccttctaacgtcccaagctggttctcagatttaaagagcataatgacccttacaatgcagtcagttgggctttcggggcaactgccacagaagcttttcagttttcctcaactgcagcatctagtactaagtgataatgaactgaatggcacgcttgacatgggaaacaatatgagcaagcatcttgatcttgtcgatattcaaaacaacaaaatcacctcagttacagtgtacaacagcttcaaaaacctcaagcttgaaggaaacccactctgcaatgattctcttctgtcagacacaagtccatgcatgggcctgcaaactgaagccccacctcagccttatcaatttgatgttcaatgtgcatatccttttatagaaaccatcgtattcagagctccttcctttgccaacgtattcgagtaccttcccgagctacagaagaacctgtctaaacaattgaacagctgtaccccgaactggctaggcttggtaccttacttcgacgaagatgcatacctaaatgtgaatattaaggcatgcccagtaaagcagaaaaggttcaactactctcaagtgttaaactgcttcaacctgacccgtcagacttacaagccacccgagatgtatgggccttactatgtgaatgcacatccttacgcattccacgataaaacatctcgcgctgtgttgattggcattgtgactggatctgttctcctggtcgtggggctcactctggttgtattttacgctgtaaatcaaaagaaacgggctcagaggcttgtgtccatcaacaatccttttgcgtcttggggatcattgggagaagatattggtgcagcaccacaactgaagagtgctaaattcttctcattggaagaactcaagttatgcaccaatgatttccgagaaattaatgcgattggagctggaggctatggaacggtttaccgaggaaaacttccagatgggcagttagtggcaatcaagagatccaaggaagggtccatgcagggtggccttgagttcaagacagaaatagaactcctttccagggttcatcacaataacttggttggactggttggtttctgctttgagaagggcgaaaagatgttagtttacgagttcatacctaatggaacactaagcgaggctttatatggtatgaaaggaatacaattagactggagcaggaggctcaagatagctttggattcagctaaagggctagcatacctccatgaccatgccaatcctcctatcattcacagagatgtgaagtccactaacattctccttaatgagaagatgaccgcaaaggtttcagactttggcctgtcgttgctggtaacagacagtgaggaagggcaactatgcacaaacgtcaaggggacactgggctacctggacccagagtactacatgacccaacaactcacagcaaagagcgatgtctacagcttcggcgtagtgctcctagaactcatagtgggtaagccaccaatacacaacaacaagtacattgtccgtgaggtgaaaatggcactagacgaagacgatggcacgcactatgggctcaaggatgtgatggaccctgttcttcagaaaattgggggcctctttggcttcccacggtttctaaaactagcactgcaatgcgttgaagaggtggcaaccgcccggccctcgatgaacagcattgtgagggagattgaggcgatcatgctggacaatgggctcacaccgggctcaatgtctacgagctcttcattcagcattgaatcaagaacgatgaaggttggacctaagcacccatactccagttcatccatgtcaacctcgacgtttgatatggatagcagggcctttgagtacagtggggtgttcccttcttctcatggtagcttgaagccctgaagatcagaacttttggactccaacaatctgtacgagctgttatatatgtttcagtaggactgtacagaattgatgaactttgattcgttttgcctagagagacaaaagtatcttttggtttttttctttttaaagaagagatgtatataatattggccaaaacttttctccagtgatattgaagcttaggtgaggatgaaccaattataatgaactctcgagaacatgataagtactccctgtgtaattataatttgtttcttcttgtattagccatatatatatatatatatatatatatatatatagcac

SEQ ID NO: 146824 - DNA, 391 bp, Zea Mays
atggggccccgaggtggcggcactttcaaggccggcgagcaagcggcgcccctcaacgtgcgagtagtgacggcgacgcacgaggcgcgaggttcgagcggcgtcacggaaggcgcgaggtgcgatcagctacgatcgcgcatgacatcctccgatccggtgcagttcgggtggcccgagtgacggcctacatctgtgtttatgtcgtcgacgacatccttcggcgactaccttccccgattcatgttttcttttcgattattgtgttttatgcctaccacatgtattatttacgctaaaaactgtacgattttatgcttgaacacggagtttgtatatcagtttactgcatgcacattggagacaattccttgatttatgttgtttgtaa

SEQ ID NO: 146825 - DNA, 781 bp, Zea Mays
gcaaagagaaacggggaggcggacatccaaccggattggcgagaccgcaacggcgcaacgggcttctcccgttctccgtcggtcgcggtcttttcccgtccgccccgcctccagctcccgtctcccaccccaacccggatctcgcgcgcgacgccgcgcaggcgaaccccacctcctctcagaagcctctagaagttcctcaccccgctcccgcgcggatgagtggcagctcgggccccctcccctactcgatgcgcgatgtgggtgctggcggcgcctacaacaacgccaagttccgccaccggtctcgcctcaaggtgcggcgcctccccttccgacccaagcccccattgcttaccaaaaaggctgagttttcctaataaggctcaagttagctctactttggggtgtaacttatccccgtggagaactggagtttacggccgggactcgattcattgtggggagtgatttggtcgattgattggttaggctgtgtctggtttctgttggaatgagggatccctggcctcggatctgcgggtctagtcagttgaatttgctatggttaattgttctgtaccgctgctactctaggttgtttcgacctgcttgaggtcattcactagatcaaatggtcgctttgatctggagtagtgtatttcgtcaggggctagtttggtgtcatatgattgctgttgctctcgcatttgtatgaacttttgtacctcatccatttcttgagaagcttgagttatatatccgcaaatatttgagctta

SEQ ID NO: 146826 - DNA, 2411 bp, Zea Mays
ggggaggcggacatccaaccggattggcgagaccgcaacggcgcaacgggcttctcccgttctccgtcggtcgcggtcttttcccgtccgccccgcctccagctcccgtctcccaccccaacccggatctcgcgcgcgacgccgcgcaggcgaaccccacctcctctcagaagcctctagaagttcctcaccccgctcccgcgcggatgagtggcagctcgggccccctcccctactcgatgcgcgatgtgggtgctggcggcgcctacaacaacgccaagttccgccaccggtctcgcctcaagatggttctacagtccttggctactaacagaagcaaataccattgtggaaagttcactgttggtaaattcttgagcctgttgatggtttctggcttattgtacttatttatgcacaaaggctcagagggtattgtatccagtgagcttcatggcaaagaagtacagaataaaaatgttaggagatctcccagtatacgcacattctggagaaaaccaccaaggctgcccccacgcctccctccaaatgaaatctacaaaaataattctctgcttcagcagtctccatctgagtggacatcgaggcagaagaaagttaaagaagcatttgaacatgcatggtctggttatcaaaagtatgcaatgggttacgatgagcttatgcctctgagccacagaggcacagatgggttaggtggtctaggagctactattgtggattctttggatactgcgataataatgggtgctgatgatgttgtttctgaagcatcaaaatggattgaagacaacctaatgaaaagaattagtgagaaagggcaggttaacttatttgagactaccatccgtgtcttgggagggcttcttagtgcataccatttgagtggtggtgatcatccaggggcaggtgactccggagtacctgtaacatataaaaaggctaatccagagcgacttttggaagtttcaaaggatttagccgacaggttattattggcttttacatcaagcccaacagctatacctttaagtgatgttattcttcgtgaccatactgcacatgcagcgcctgatggcttaagcagcacttcagaggcttcaacgttgcaattagagttcagttacctcagtaaagtattaggggatcctaagtacgacagggcggcaatgaaggtgttagagcatatacatacactcccaaaggtggagggtctggtgcctatttacatcaacccctcctctggtcaatttagtggtgagaatattcgattaggatctcgaggggacagttattatgagtatctgctaaaagtgtgggttcagcaggaggaatatcgtgacagtagtttaaagtatctatttgaaatgtatactgaggcaatgagaggggtcaagcatcttcttgttcggaaaactgttccaaatgggttggtatttgttggggagcttccatttggacgaaatggcgggtttagtcctaaaatggatcacctggtgtgttttcttcctggtacccttgctcttggtgcaactaaaggtatcaccaagagaaaagctcttgagactaatttgttaactgatgaagatatagaaaatctgcagcttgctgaagatcttgccaaaacatgtgttgagatgtacttcgtgacctctaccggccttgctcctgaaatagcttatttccacattgagggtgatacagaaggggggcctgatggtgggaataaaagctccaaatatatcaatgatatcgtaataaaaccacttgaccgtcacaatcttctacgcccagagactgtggaatcactatttgttttgtatagaatcacagaggattccaagtatagggagtggggttggcagatctttcaggcttttgagaagtacacaaaagttgattctggtggttacacatcattggatgatgtcacaagcctacctccttccacgagagataaaatggaaactttctttcttggagaaacattgaagtatttgtatttactgtttgatgaaaacaatacccttcccctagataagtatgtgttcaatacagaggcccatcctcttccagttatgcggtctgcagaacaggcttcacattctgtgtagtttcccaagtttatagctgttgtaccatggtgagaagtacagatctgtgacaaatatacttgacaacatagttggaggaacgagaaattgagaatcccttgcatgactgttcttggaggcaagctcatggttctggaatctccatgcctgatttgaggatttgggggttttacttgtatttactggaaggccatacaacctttgtactctgtactgtctgtagtctgtaatacctaacttcaaattttgaaatcggctagcagttataccaagatt

SEQ ID NO: 146827 - DNA, 1269 bp, Zea Mays
ggggaggcggacatccaaccggattggcgagaccgcaacggcgcaacgggcttctcccgttctccgtcggtcgcggtcttttcccgtccgccccgcctccagctcccgtctcccaccccaacccggatctcgcgcgcgacgccgcgcaggcgaaccccacctcctctcagaagcctctagaagttcctcaccccgctcccgcgcggatgagtggcagctcgggccccctcccctactcgatgcgcgatgtgggtgctggcggcgcctacaacaacgccaagttccgccaccggtctcgcctcaagatggttctacagtccttggctactaacagaagcaaataccattgtggaaagttcactgttggtgtgttttcttcctggtacccttgctcttggtgcaactaaaggtatcaccaagagaaaagctcttgagactaatttgttaactgatgaagatatagaaaatctgcagcttgctgaagatcttgccaaaacatgtgttgagatgtacttcgtgacctctaccggccttgctcctgaaatagcttatttccacattgagggtgatacagaaggggggcctgatggtgggaataaaagctccaaatatatcaatgatatcgtaataaaaccacttgaccgtcacaatcttctacgcccagagactgtggaatcactatttgttttgtatagaatcacagaggattccaagtatagggagtggggttggcagatctttcaggcttttgagaagtacacaaaagttgattctggtggttacacatcattggatgatgtcacaagcctacctccttccacgagagataaaatggaaactttctttcttggagaaacattgaagtatttgtatttactgtttgatgaaaacaatacccttcccctagataagtatgtgttcaatacagaggcccatcctcttccagttatgcggtctgcagaacaggcttcacattctgtgtagtttcccaagtttatagctgttgtaccatggtgagaagtacagatctgtgacaaatatacttgacaacatagttggaggaacgagaaattgagaatcccttgcatgactgttcttggaggcaagctcatggttctggaatctccatgcctgatttgaggatttgggggttttacttgtatttactggaaggccatacaacctttgtactctgtactgtctgtagtctgtaatacctaacttcaaattttgaaatcggctagcagttataccaagatttttatcttc

SEQ ID NO: 146828 - DNA, 818 bp, Zea Mays
accgttcaatttcggtttctatcccaatgatagaggcgaaggtaaaggcatagagaccccaaacttaaatccaaaataaactacaggaagagaggaagggacgacaggagagtcattaagtaaatccacttgttgtctgattagggtaggaaatgatgtctgaaagtgacgagcacggctcgctcctagacaagatcaacgagaagatccacgagtacaagcactcatcgtcgtcttcctcgtcagactcagatgatgacaagaagtccaaaaagtctaagaagaagaagaagctctttgggaggaaacatccattgcatcacgttcttggaggaggcaaagccgccgatcttgtgctgtggaggaacaaacaggcatccgggagcatcttggcaggggtgactgtgatctggctgctgtttgagggcatcggctaccacctcctcaccttcctctgccacgcactgattgtgtttctcaccgtctggttcgtctggtctaatgttgcgtcctttgtcaacaggtctcctccaaagtttccagaggtgattctatctgaagcccaatgcctgaaggtagctcatattgcaaggaaagaaatcaacgaggctttctatacattgcgcaatgtcgcttctggaaaagatttgaaaacgtatctgatgtcaattgcagtgctttggttcatttcgataattggaagctgcttcagcttcttgactgtgtcttacactagtaaatttcttgtctacatcatgatacattaataccttcttaaaatctatactgcatggtactttatataaattactttgaat

SEQ ID NO: 146829 - DNA, 1240 bp, Zea Mays
accgttcaatttcggtttctatcccaatgatagaggcgaaggtaaaggcatagagaccccaaacttaaatccaaaataaactacaggaagagaggaagggacgacaggagagtcattaagtaaatccacttgttgtctgattagggtaggaaatgatgtctgaaagtgacgagcacggctcgctcctagacaagatcaacgagaagatccacgagtacaagcactcatcgtcgtcttcctcgtcagactcagatgatgacaagaagtccaaaaagtctaagaagaagaagaagctctttgggaggaaacatccattgcatcacgttcttggaggaggcaaagccgccgatcttgtgctgtggaggaacaaacaggcatccgggagcatcttggcaggggtgactgtgatctggctgctgtttgagggcatcggctaccacctcctcaccttcctctgccacgcactgattgtgtttctcaccgtctggttcgtctggtctaatgttgcgtcctttgtcaacaggtctcctccaaagtttccagaggtgattctatctgaagcccaatgcctgaaggtagctcatattgcaaggaaagaaatcaacgaggctttctatacattgcgcaatgtcgcttctggaaaagatttgaaaacgtatctgatgtcaattgcagtgctttggttcatttcgataattggaagctgcttcagcttcttgactgtgtcttacactattttcctgatggcatacactctgccaatgttatatgaaaaatacgaagatcaagttgatgttgtgggtgagaaggcccttattgagataaaaaagcagtacaaagtgattgatgcgaagcttatctctaagatcccaatgttgtctgagaagaaacaacattgaaactgcgctacagaggtctagttcagcacattaccaatatatggaaatagtttgattagctttgctatattaacacttcacattctttaagatgacaacatagatattgtatggattcttagtgttgactcttccgagtcctagaactgtgtcaaccatcatataaagtagttgcttcttcatgtcagatagtctatttgattttgtattgatgtggacatatatatgcttgacattgtgattatttgctattcctatatgttactgggtgcatttaatagtatttatacagttatgtttctatttgaatcaatttgaatatgtcatatgttaacattttt

SEQ ID NO: 146830 - DNA, 1644 bp, Zea Mays
gctatcgcagtcgcaggaggcttgcctggctggtcaacgtatgtacatatgttacgtactgcacgcgcgtgcagtaaacagctgcgagtcagccgatcctgatccctagccggaggtgggaggtcaccgtcaccgcgcctcgccgccggggcgtcacaatggcctaccgccggaagcctcagccccatccccagccccagcccacgccctcgttggagcaccactacccgtcgtccgtgggccccgcctcacccgactccctcgccgcgcaggccatgcgcgcctccgccgcacaccgcgatgcctcctccctcacctccgcctactccgcctcagcctcgctggcggcctctcgccggagccaccacgagccctccgtgtccacaccgtccctggatagttcaggctatgaatacacgtccatgaagaacctcaacgaggccaagtatggattctggggcacacttgcgcggaaggcaaagtcatttcttgacgaggactgctccccggagcagtacaaatcgccaagagatgatgtgcatgttggtgtccagcttccacattcaaaacaattgccaggagagacgtggaaacctgagacacctccatctcagaagagatctgagtctataacttcctcccttacctatattggaggcacaataaaaaatgcacttgaagaaggtcggaccattgtagagaataaaacggctgacattattcaggagacgcgtaaactgaacataagaagaaaaggagctggtctaaatacacaaggagaagctggccacaaaattgctcaaagacaccttcctcaaaatccacttgaccatgaaactcagttgaaggcatctcgcgacgttgcaaatgccatggctgcaaaagcaaagttgctattgcgggagctgaaaactgtgaaggcagatttagcttttgcaaaggaacgatgtgctcagcttgaagaagagaataaaatgttgcgtgagagttatgacaagggtgataatccagaagatgatgatctgatccgcctccagttggaaacactactagctgagaaagcacggcttgcgcatgagaactcagtatatgcacgagaaaacagattcctgcgggaaatagttgagtatcaccagctcactatgcaggatgtcatatatgtagacgaaggcatcgaagaggtcaccgaggtgtaccctacacaagtactacctcgcactgggtcgagcgtcagtcgtgcagccactgcagctacaccgaaatctgctccgacgtcaacataatcttgccctgtcgtacaagcttctacaaatacactttttcgcggtcatctctgagcaatagatcaaagcgcccacctccaaccttcacggaagagtaaggtggttgtttggttgtgacgggaccacatagtttatgctgctactgttcaatgtaaacaaggattcactgttgttatgcctgtttgttgtcgtgactgagctgtggcgaaatatgaatgaacagtagcttctgactttctatatatattgtctcttaaccgcatttatggtcagggactcatggttatattatatagtctcttaattgtctcttatacttggaaaaataatgtacatgctctaagaagtggtattggacgac

SEQ ID NO: 146831 - DNA, 865 bp, Zea Mays
gaaaacggccagaagcactggatgaactcgtgaagatttgtagaattcattacatatttcctccagaggacaattctgcagagatggaaatggtggctgctggactagaaaagaatttgcatgttgccgagagggttcaccttctatatctatacaggagcgtttgtactgctggtaacttaaaaacagctgcacaggctcttggtctgagtttgccaaatgagaatacagaaggatttgcaatgcccattcgtcaaccatagatgaaggctttgaagcccctgacgcagttttggtattcctactttcttaacatgcattatgcagtatgctaccaagacaagaatcaagcatactgcagattcccttctcaacagaatcttagggacagatctgcacgggccccccagacaaatgctgaatcaattgttccgttcatgtgcatttgatagaggggtgctctttaatatgtgcaatgtcatcaaaacctcgtatattcagatgatcgattctgctcaccaaacgcgcccaccgccatgcctaatatcgtggccgtattgggagtatcatggccgtattgggagttctcttctgcagctgtagttggttaggacatctacaacctgagtctttgaattgttattttaagagctacaaaaactgtgcgatgagaattggttttttaagagctaaaaaactgtatgatataatgagatgtcttcaatattaatcacataataaatatagttaatagacaatgtgtagtgtagagagactctttgcaaagagatctctcttatattttttatttaacccttatttctgaaaaggctgtattaaatgatattgtatatgtcattatttc

SEQ ID NO: 146832 - DNA, 1405 bp, Zea Mays
cttccctctcatcctctcgacctcgcttcctccctcccaccgtgccctgccttttcctcacgacctcgccgctgattgcggtcccccatggaaccgtcgtcctctcaatccgtccgccgctccatcgtcttcctgtatttgtgctgctgatatgtgtaacttgtgtttctccaggtgaaggcggccgagcacgcggccgagatggaggcgacggtggtcgtcgcggctgccgtggaggccgaggaggaggaggctgctgctgctgcggcttcgacgccgcagcggtctgggaggaaacggccccgcgcgattgggagtgggcggtaccgctcggtgtccaggtgtttctcccaatctcccctgctttcctcatcctgctgccgcttttgcttttaatcgctgtgacagcatagcacccgcctcgtctcgctgccggctgccgctggtgatcctgctccctgtggcattggccctagccagcaggcaggcagtcggccagggacggatggacggagacgacggatggaagccgcagccactagccagccacaccgcagaccgcgcacgcaagagaaagaagcggtgtttgcatggactgggattgccgacttgactgcggattgacggggacaggtgggagccagaaccgcccgaggaccctcttctcctcggccaagagacccacaccgcaactggaaccctcttctcctcatccgacgacagtggtggccactgctccggccaggcatagcataggcagcctggttacacaaaccaaaaaaggtatcccatacccacgctactgcctacacctacgaaacctgcttatcctgctgcaatttctgctaaattcgtggctaaattcaaagaatggtagtgtgaagtggaatcaaaatgggaactgggtgcagactgcctcaaaggatcagattattaaggtccgtggcttgtgctttttatttttctatcttcttcaaagaattttcggattacagtgtgcactctataaccagaattctatactatctatggagatggcctaatccatcctataaccaggatcgataagtttgttttttgatgccagtaaattattgattttggtccatttgctaattcattttgcaactgtatgacattagatccatgaaagagcagcaatccttctgaggggacgtcgctggttagatagttattacagtatcaagatttttatatgttcctttacatattttaaggttcacaaattgatactggttttatatgtagcagttcattgttcactgtaaccatacatgtaaaccataagcaaatgtgatgtaggagattgttatataaagagacttttgcagccactttgatgttttgttttatgcttctttttgtgaaaaattattatggtgct

SEQ ID NO: 146833 - DNA, 1025 bp, Zea Mays
ccgtgccctgccttttcctcacgacctcgccgctgattgcggtcccccatggaaccgtcgtcctctcaatccgtccgccgctccatcgtcttcctgtatttgtgctgctgatatgtgtaacttgtgtttctccaggtgaaggcggccgagcacgcggccgagatggaggcgacggtggtcgtcgcggctgccgtggaggccgaggaggaggaggctgctgctgctgcggcttcgacgccgcagcggtctgggaggaaacggccccgcgcgattgggagtgggcggtaccgctcggtgtccaggtgtttctcccaatctcccctgctttcctcatcctgctgccgcttttgcttttaatcgctgtgacagcatagcacccgcctcgtctcgctgccggctgccgctggtgatcctgctccctgtggcattggccctagccagcaggcaggcagtcggccagggacggatggacggagacgacggatggaagccgcagccactagccagccacaccgcagaccgcgcacgcaagagaaagaagcggtgtttgcatggactgggattgccgacttgactgcggattgacggggacaggtgggagccagaaccgcccgaggaccctcttctcctcggccaagagacccacaccgcaactggaaccctcttctcctcatccgacgacagtggtggccactgctccggccaggcatagcataggcagcctggttacacaaaccaaaaaagaatggtagtgtgaagtggaatcaaaatgggaactgggtgcagactgcctcaaaggatcagattattaagatccatgaaagagcagcaatccttctgaggggacgtcgctggttagatagttattacagtatcaagatttttatatgttcctttacatattttaaggttcacaaattgatactggttttatatgtagcagttcattgttcactgtaaccatacatgtaaaccataagcaaatgtgatgtaggagattgttatataaagagacttttgcagcc

SEQ ID NO: 146834 - DNA, 907 bp, Zea Mays
ccaaaggggtggtgctttgacgaaactgaaacaaatgagaatgaaaatgatgatgttgtggaagtaactgggtcatcatctagtggaggcaacaacactagaacaactgtcaaaagaaaggaattatcaagcaagccatcaaccattggggcaacaaaaaacccattacatctttgctccgatgtacacccaagaggttgtagcagaaaggtatgccaagggggcaactcagagaaccatcaatgctgcaatgaagcccaaagaagagaagttgtttgtatggagatagccaattttttttgtgagcgtggcatacccttcaatgatgccaactcaagacaattaaggtagctgtagaggccattacacattatggtatgaggttcaaacctgctactttccatgatctacgagaaccattgcttgcgaaggttgtcaaagagatagatggtgcgaagaaaaagaacgaggatgcatggagtcaatatggcttgttggtcacctgctctaattcctaaaagggaccaaaatagggcaaaacaattaatgacaaggggccttcattccttcaatctattcataagatagattaaaggaagaagattataagaatgatgagatcttcgaacaagatgaagacatctaggaaaaaggaaattactaccgcactccttttagtgtttcttcttcatcatgtacaattacaagtataccttttgtaggtagaagaagtgaagaaggtacaacttcataggtggaacaaaacagatcagagccaaaaaaggtgttccctatgcatgatactgtacacctatttataatggtggggtacaactttgtgaaaattacatttatgtcctcagtcctttacatgtgagctacaaaatcaatcgagggcattgtcgac

SEQ ID NO: 146835 - DNA, 363 bp, Zea Mays
atggccactaggttccaaaaaatgtgtgaagaagggaaggacttcgatactttggttcttgaagattttgattgggacaatgagtgggttgatccatttgctaattcgtctgttattggggataaccctcttttcacaagggagcatgtttatcatgccgagagctcatggtactcaaagtgccaattctttgaggatgatgaagacgggcttgatgtgggtgaagagaatgaagacgatgaaaattttgtgcttgatgactttgacatggatgatgaagaagcaacaaacaacaatggtggatgtggtgatgagcaagaaaaggatggtgttggtttagatgatttggatgatggctattga

SEQ ID NO: 146836 - DNA, 127 bp, Zea Mays
ttgtattttatgcctaccacatgcactatttatgctaaaaactatacaattttatacttgaacacggagttcgtataccagtttactgtatgcatattttttgcatgtatattggaaaggcaattcc

SEQ ID NO: 146837 - DNA, 794 bp, Zea Mays
gtcactaatcgacaagggcgtctcgaatggaaggagcccatccaacccaacgaagaagcaaaatccccaatctctgcgccgccgccgttctgtgtcgttcttcgcccgccgtcgttccgtgtcgttcttagcccgccgccgtttgtagtcgcggcttcatcgtcgcgtaccgatccccaccgcccccactgccaccagaggtgtcgacatgtctcagaacaacccctcccagcttctcccctcagagctgatcgaccggtgcatcgggtccaagatctgggtgatcatgaagggggacaaggagctcgttggcaccctctgcggctttgatgtctacgtcaatatggtgctggaggacgtcaccgagtatgaatacactgctgaagggcgccgtattacaaaacttgaccagatcctcctgaacggcaacaacatagccattttggttcctggtggttcaccacctgatgtgtaatgaacttttgcttcccagagtatcattcgtggtgaaggcagccccgtgaactttgcaccttatattttttaatcattggatgtttcctcatctcggatgtgtttctcctgttcatgattataccgaagtttattgttaactctgtcagcatggaatctctcctctgtattgaacttactgacctgaagtagtgtgcctgcatagctgtggttatatgattcgctttgctcatcatcattgtactgtaatgtgaattgcaggcaatggattatgaagaaacctgataaatggaagcgcatcggttgtatttggcgtttga

SEQ ID NO: 146838 - DNA, 716 bp, Zea Mays
tcgacaagggcgtctcgaatggaaggagcccatccaacccaacgaagaagcaaaatccccaatctctgcgccgccgccgttctgtgtcgttcttcgcccgccgtctcgcggcttcatcgtcgcgtaccgatccccaccgcccccactgccaccagaggtgtcgacatgtctcagaacaacccctcccagcttctcccctcagagctgatcgaccggtgcatcgggtccaagatctgggtgatcatgaagggggacaaggagctcgttggcaccctctgcggctttgatgtctacgtcaatatggtgctggaggacgtcaccgagtatgaatacactgctgaagggcgccgtattacaaaacttgaccagatcctcctgaacggcaacaacatagccattttggttcctggtggttcaccacctgatgtgtaatgaacttttgcttcccagagtatcattcgtggtgaaggcagccccgtgaactttgcaccttatattttttaatcattggatgtttcctcatctcggatgtgtttctcctgttcatgattataccgaagtttattgttaactctgtcagcatggaatctctcctctgtattgaacttactgacctgaagtagtgtgcctgcatagctgtggttatatgattcgctttgctcatcatcattgtactgtaatgtgaattgcaggcaatggattatgaagaaacctga

SEQ ID NO: 146839 - DNA, 2004 bp, Zea Mays
ggaaagacgaacgaagctacagctgccgaggtccccgttcccgcccaccgaggcgtcgcgcatgcggccacccgcacccaggcactggcccgggggagcgaggcgtggaggcggagcaatggcgggcggtctggaccgatccgtgcaactgtaggcgcggcgcggggggtgttggctggtgcgtgatgggatctgggagcagcaaggcaaccacctcctccacgtcgcccacggcggcggaggcgggcggcgagggtaagaggccaaatggtagcgagaaggcgaggagggggaggagcctgctgccgctgccgagttcctcctgcttccgtggctccacgacgccttgcgattgcgacgtttccgcagtggcggtggacgtcgagtgtaacaagggaggggagactgcaagcctaccttcactcactcacactacaaaatctgatgaagatgttcttgcaacgcctaagtctcatcccggtgaagagataacactaccttcatcagatagggaaagagatcaagatgatggcgtgctacagaatgctgctgccactaacactttaacagcagccagtcaattgacagatccttctgggaggtcaaggccacgttttggtgtcaactttgggttgagtagagctgtcagcttgggatcatcagtagcctgctctattctgtcatctggcctcccgacttctgctaacccaggtgaaggtcggggtgatgtggatgactcttctgatacagtcatctcccagcagggtagtgcaccaactgctgggattgattcgactctagacatgcttagagatagtgtcacggcacaagctagagcagctcgtcaggctagaagaaatctgcaagaatctgaagatgctatcttgaggaactcctacagaaggatgggatctcaggaaccttttgaaggcagtgttcggtttagccgaacattaagtgttgggcggcttcgggacagagtcctcaaacggcctccattctcagatgggttattcacccctgcccttctttacgatagggcggtatggttgtctggaaatgctagtgctaggcaagattcagcagtaatgcaaaggactaattcagacaggagttcagaatcgcgctctgatccttcaaccaatggtctgtacaacttgagctctgagaggcaggccagtaatagtgacctactggagcgtagatcagtttttcttgagaggaggcggaggatacggtctcaggtcagagctctgcaaaggttgggcagcaggtttgaaaatttatctggtcatgagaggtcctgcatactatctggtcagcatagaacaggaacttgcaactgcagaacaggtagtcgacaaggcaatcctgatgaagaaactagcacaagggctagcatatcaagaattgttatgttagcagaagcactatttgaggttctggatgaaattcaccaccaatctgctgcgttatcgtcatcaagaccagcgttttcttcaattggatctgttcctgctccaagggagattgttgagcgtcttcctgcaaaagtgtataggagaccattgaaataccacagtgaggaagctgcacaatgctatatttgccttgttgaatatgaagagggagattgtcttcgtatacttccatgccatcatgaatttcatctaacatgtgtagataaatggttaaaggagattcacagggtttgtccactttgtcgtggcgatgtctgcagatctgatgcactgattggaaaggtcagctgattctgtctcttgagaatgcagcttcctacagagaaaagtggagctctttccatggttctaattccgatacaacctacaaaactattgcacaggatgctcctgtattgtatggaaaattcgcattgaaactggtcacacgctattgtgaatttaagactcttgtatggtggggcgagtttgttgatattggattgttgccttccgtttccttataccgatgtgacgtttgatc

SEQ ID NO: 146840 - DNA, 1614 bp, Zea Mays
ctatactcctacgtgccgactcgagtccccgtccaggcgtctatggaaagtgatcagtcatcgctcacatgcgatcgcggccgtcagcgtcatggcccccgtccctgccggcctcaactcggcgcaggtgcgacccctcacagtcacataaagacgtcaggttccccacccccgaaaagtttttacctttcctcccgtctccgtctcctcgctggctcgctatgctggccgcctccaccgcgcctctccgtcactcccccaacgccatgagtctgtaacggcacacgtaccatgggcaggaccagaggcaacaggggcgtgggcggcgcgaagtcgttcccgtcgccggcgtcgtcctcggcctcgtcgtcggagttcgagttcacggtcacgctgtcgccggcgtccaagcagcggtcggcggagcagctgtgcccggccgacgagctcttctacaagggccagctcctgccgctgcagctatcgccgcgcatctccatggtgcgcacgctgctgctgtcctcggcgtccacgtcgtccgcctccgcgtccgactccaccaactcctcctcccgcgactccaacggcagcacgtcgtcgtccttctccgccgactgcggcgcgctcctgggcccggactcggcggcctcgtcgtctcgccccagctccgccaccgaggacgaccgccacctgcatccgccgtcggccgccgcggggctgctgccacccgccaagcgcaccgggaagcagtacctctcgtccttcgccacgcgcttctcctcggtcttccaccgcggcggcgccggcgctccggccgcgaagaagcagccgtccaagtcgctcgccaaggaggtgatcaagaagtacgctaagaaggtgaaaccgctctacgaaaggctctcccagatccccaacaagaaccagaacaacgtcgtcaacggcaacagccaaccgcagcagaggttcaagaagcccttcaccttctccatccgcaagaaaaagggcgacgccgtcgcggcagtggtggaggcggcagcagaggttggcggcaacaagtacgcgcactccagctccttctccggaaacctctggttcccgcgccagaagcgggccacggcgagctgcccgtcatcgatgcagtcgtcgcctagccactcgggtctgctcacctttggcggggctggcggcgtgggcttccccgacgtgccggccgttgccagcggcattggcgtcggtccggtgtcgttgtccacggcatcgtccatggaggagctccagagcgctatcgagggcgccattgcgcactgcaagaacacgatgggcggaaccgtgtcggtcaaggcggcggcggcggccgccgacgagatctgcacgttctgagcgcgaccacgctaggattccggggggagctaagtaaagcaggctgttttaatcggtagcagtacttatctgttattagcaaatttaatttcgtccgtctccttttttttttttgggtaagactctatggtcatggtcgtaaataggggtagttcggagggggttaagatgatagtcggagcctttttcgatctctccttatccttccttggtttggaaatttgcattagcgcc

SEQ ID NO: 146841 - DNA, 101 bp, Zea Mays
ttcaaccaaaatgcccatgttgactagcctgggcttcctctattattggaagcccagggctcttaatatgtatatatatatgctaggtgaatgcccgtgcg

SEQ ID NO: 146842 - DNA, 578 bp, Zea Mays
gcagcatgtccatgaacaacccgttcacgacgacggctgatccacggtggcagcgcggctgcagagcttcatgtcgcgggcagaggaggtcgcacctctatccatggcgtgcatgagcggcggacgtgaccttgccaataacaccgccggtgcagggcgcgacctcgaccccatgcttgcgacacgcaccatcagccacggtcgtgaactagagaacggcggcacgggctcgtcaactgtgtcatggggcgtcatcaactgtggcgcatggcgcgaactaccgaatgccggcatcgccacagtagtccacggcgtagatgctgcctaccatagttcgggtgtgctctagctgctcgataaaatgttcacaagaaacatacatgtgcatgcctctgttgtagcttctcgtggatgaataacattcatgatcaaattgccaatgcattatttgctagaataataccattttctttgtagcgtactttcttatagaacaataatatgtactcgtaggaatgataagcatggatcaaatcgaattaagataaggctttatttatatttatttttaaaataaa

SEQ ID NO: 146843 - DNA, 723 bp, Zea Mays
cgcaaaccaaaatcatttcatccccggaaccggacgccgaacggcagtgctgcaaaagtccggacaaagctcgcgccgcccaccgcacccgatccgcctcgcccaggcgtgctgccgtccgctcccttctcccgcgccgtcgcctccgcctacgcccgggccgacccgctggacccagcgtgcgccgctccactcggacgcgccgccgccctctcgggttgaggcggaggtgcttggggacccgcccccatggcgagcgccggcaacagcggcagcggggacgacgatgcaggagggaagctcctggcggatcgctaccagaagggcgaggtcctcggcgagggcacgtatggagtcgtcttcaaggccatcgacaccaaggtccccttaccacaccgatctcctaaagacctaaaccctcccttcctgatctgcgggcggccaccactcgagagttagagcttggctagtccgatcaatccagcttcgaccgtagacagatgcttgcggggtttagctttcggggttagagggttttgcacggcgtagctctgtgaattggggtcattgagtggttggagcttcgctctggattgactctgactgtggtagttctactgctatccgctctgatgagaataaatttggtgatttggtgttgctttgttcagctgcgcgttgattgaactgtcactgtagacactacaatgtgaatgttctgtt

SEQ ID NO: 146844 - DNA, 2034 bp, Zea Mays
cgcaaaccaaaatcatttcatccccggaaccggacgccgaacggcagtgctgcaaaagtccggacaaagctcgcgccgcccaccgcacccgatccgcctcgcccaggcgtgctgccgtccgctcccttctcccgcgccgtcgcctccgcctacgcccgggccgacccgctggacccagcgtgcgccgctccactcggacgcgccgccgccctctcgggttgaggcggaggtgcttggggacccgcccccatggcgagcgccggcaacagcggcagcggggacgacgatgcaggagggaagctcctggcggatcgctaccagaagggcgaggtcctcggcgagggcacgtatggagtcgtcttcaaggccatcgacaccaagactggaaatacagtcgcggtaaagcgaatccggataggaaaggacaagaaggaaggtgtcaacttcactgcgttgagggaaattaaactacttaaggagctgaaagatcctaatattatagagctgattgattgtttcccttacaaggaaaatttgcaccttgtgtttgagtttatggagaccgatctggaagctctcataaaagataagaacataatactctctccagctgacacaaaatcatatgtccagatgatgttaaaaggtctagcgttctgccataagaaatgggtgctacacagggatatgaaaccaaataatttactcattggtgccgatgggcagctcaagcttgctgacttcggtctggcccgtgtgttcgggagtccaggaaggaacttcactcaccaggtctttgcacgttggtaccgggcaccagaattattatttggctcgaagcagtacggatctggggtggatatttgggccgctggatgtatttttgctgaactgcttactcgcagagcctttctccagggttctagtgacattgatcaacttgggaagattttcgcagcacttgggaccccaaaatcttctcaatggcctgacatggtttatcttcctgattatgttgaataccaatatgttgctgcacctccactacgtacgttgtttccaatggccagcgatgatgctttggatcttctgtcaaaaatgcttacctatgatccaaaagcaagaatcagtgctcagcaggctctagaacacaggtacttttcatcgttacctgcaccaacaagaccatcgcagcttccaaggccacgtcggaaaggagatcaagggaataacaagattcctgatctcaacctgcaggatggccctatggtgctctccccgccaagaaagttacgtagggtgacagcgcatgaagggatggaaggtatgcacaggacagataaagtggacgaacatccttctgggatgaggcacaccgatgacatgcccagtcagagttctagaattccaatgtcagttgatgttggggctgtgtttggcacacgacctgcacctaggccaacattgaacagtgcggacaagtctcgtttaaaacggaaacttgatatggatccagagtttggatacgcggagtagaaggaacacatgtttacatgcaccattcttttcttattggggatgttgatttttaaaataagattctgacacaatcaactgagatgttaccgtcatcgcctcacgaagaggaaaactgaagagagattattctaatttatcccgagtcacatagggtattacagctaaccaattccgtaaggcaggctcttgaaaacagtagactcaatgggatattcatgagtggagagtgttatggggaattggaggatggaaaagcttgctccatgcgtgtttgtacgtgttttgccaagattgtgctgaagcatctgatctatctactgattctctattttccgtactgtcaattcccgttcttgtatggacagagctttgagcatgttttcagtcagacaccttaggcagtgattcttattgtacaacttatatcatctgacatttcttttgagatgattaaacaatgcatggcgaaaaaggggggaaaagtggtcttgattt

SEQ ID NO: 146845 - DNA, 1605 bp, Zea Mays
aaaccaaaatcatttcatccccggaaccggacgccgaacggcagtgctgcaaaagtccggacaaagctcgcgccgcccaccgcacccgatccgcctcgcccaggcgtgctgccgtccgctcccttctcccgcgccgtcgcctccgcctacgcccgggccgacccgctggacccagcgtgcgccgctccactcggacgcgccgccgccctctcgggttgaggcggaggtgcttggggacccgcccccatggcgagcgccggcaacagcggcagcggggacgacgatgcaggagggaagctcctggcggatcgctaccagaagggcgaggtcctcggcgagggcacgtatggagtcgtcttcaaggccatcgacaccaagactggaaatacagtcgcggtaaagcgaatccggataggaaaggacaagaaggaaggtgtcaacttcactgcgttgagggaaattaaactacttaaggagctgaaagatcctaatattatagagctgattgattgtttcccttacaaggaaaatttgcaccttgtgtttgagtttatggagaccgatctggaagctctcataaaagataagaacataatactctctccagctgacacaaaatcatatgtccagatgatgttaaaaggtctagcgttctgccataagaaatgggtgctacacagggatatgaaaccaaataatttactcattggtgccgatgggcagctcaagcttgctgacttcggtctggcccgtgtgttcgggagtccaggaaggaacttcactcaccaggtctttgcacgttggtaccgggcaccagaattattatttggctcgaagcagtacggatctggggtggatatttgggccgctggatgtatttttgctgaactgcttactcgcagagcctttctccagggttctagtgacattgatcaacttgggaagattttcgcagcacttgggaccccaaaatcttctcaatggcctgacatggtttatcttcctgattatgttgaataccaatatgttgctgcacctccactacgtacgttgtttccaatggccagcgatgatgctttggatcttctgtcaaaaatgcttacctatgatccaaaagcaagaatcagtgctcagcaggctctagaacacaggtacttttcatcgttacctgcaccaacaagaccatcgcagcttccaaggccacgtcggaaaggagatcaagggaataacaagattcctgatctcaacctgcaggatggccctatggtgctctccccgccaagaaagttacgtagggtgacagcgcatgaagggatggaaggtatgcacaggacagataaagtggacgaacatccttctgggatgaggcacaccgatgacatgcccagtcagagttctagaattccaatgtcagttgatgttggggctgtgtttggcacacgacctgcacctaggccaacattgaacaggtaaacagcactagccttgctgagtaaagcttgtactatttatatgaacagaacaggtaaaaaacatagtgccttgttggtgtacttagctctcctgttgtgggaaataattgaacatgtcaacctcctgttttgc

SEQ ID NO: 146846 - DNA, 108 bp, Zea Mays
taagctttccagaaagtacaagaatactaaattatgagtttgtatgtgagatttatgctaaaaacaaattaaacaaaaactaatctgataaggacgagatgatgagat

SEQ ID NO: 146847 - DNA, 1872 bp, Zea Mays
cccaaaaatctagccaaaaaagcccaaccaaaatgctgcctgcccgccccctcctcgtggccgccgccgtcttcctcctcctcctccccgttcacgtcgccatcgtcgccgcacaggggtttcgcggcttctcttacctcctaaactgtggcgcggcgtcccccaccaccgacagccgcggcctccgctgggatcccgatggcgactatgtctctgccggtacccccggcgtggtctcgctctcgggcctcatcaaccccacgcttgccacccttcgcaccttcccgctccgctacggggccaagttctgctacgagctccccgtggatcggaaccgccgctacctcatccgccccacattcttctacggcgcgctcttcgcctcctcctctgcaccgccgccgcccgtcttcgacctgatcgtggacggtaccttctggaccgccgtcaacaccaccgatgacgcgctggccggcgccgcgtcgtcctacgagggcgtgttccctgcgagtggcaggaacatgagcttctgtctcggggtgaacccggactataccgacgccaggccattcatttccgcgctgcaggtgatccagctcgacgattccgtgtacaacgcaactgatttcccgaccagcgcgatgggcctcattgctcgcaccaagtttggctccactggcggcatcgagaggtaccctaatgacagttttgatcgctattggcagccatttccagacgacaagcatgctgtcagtagcacccaaaatgttacatcagccgacttctggaatcttccccctcctgatgtgtttaacacagctttcatagcagaacaagatgcaccgcttgtgttacaatggcctccagtgcctctccaaaatgatagctattatgtcgccctctactttgctgatacattgcctgataattcaaggacctttgacgtgtatataaatgattacctctttttcaaagatctaaatgtcacatcagctggtctttctgtctttgcaacacaatggattctctcaggcttgaccacaattatattgaaatctgcttctccttctgctcttcctccacttattaatgctggcgaggtttttgggctttttcctgttggaagattgacatatgcacgggatgtacttgccctggagagtataaagaaaagccttcaaaatatacctgaagattggaatggagatccatgcatgccttcaggatattcttggaccggagttacatgtgatgaaggatcaaaaatacgtgtcatctcattgaacttttcaagtatgagtctctctggatttctttcaccagatattgccaaactgactgctttgactgatatatctttggcacacaacatgctcagtgggcctattccgaatcttagcaacctaagaaatctccaacgactgcacttgcaagaaaatcagctatctggatcggtacctgagacattgggtacaatcaatacattgcgtgaaatatttttacaatacaataatttaactggaacagttccggagaacttactgaacaatacaggattgacatacacatttctgccagggaatagcttctctccaaaaccaccgcattgagaaccaggcagtttgtacgacaaactactctgtgtaacatgattcagatttcagaggtagcaggaatgttgttgattcttctagggtagctgtacatttttttaaccattctgtgcataaaggggagatagcagtacagttattcaaaccaatcaaggaggttggcaacatggtggcaagatacatatattggttttggttagcaatgtttggttccagagactaaagttcagtcagttcaaatcgaatgtttgaatatcca

SEQ ID NO: 146848 - DNA, 2778 bp, Zea Mays
cccaaaaatctagccaaaaaagcccaaccaaaatgctgcctgcccgccccctcctcgtggccgccgccgtcttcctcctcctcctccccgttcacgtcgccatcgtcgccgcacaggggtttcgcggcttctcttacctcctaaactgtggcgcggcgtcccccaccaccgacagccgcggcctccgctgggatcccgatggcgactatgtctctgccggtacccccggcgtggtctcgctctcgggcctcatcaaccccacgcttgccacccttcgcaccttcccgctccgctacggggccaagttctgctacgagctccccgtggatcggaaccgccgctacctcatccgccccacattcttctacggcgcgctcttcgcctcctcctctgcaccgccgccgcccgtcttcgacctgatcgtggacggtaccttctggaccgccgtcaacaccaccgatgacgcgctggccggcgccgcgtcgtcctacgagggcgtgttccctgcgagtggcaggaacatgagcttctgtctcggggtgaacccggactataccgacgccaggccattcatttccgcgctgcaggtgatccagctcgacgattccgtgtacaacgcaactgatttcccgaccagcgcgatgggcctcattgctcgcaccaagtttggctccactggcggcatcgagaggtaccctaatgacagttttgatcgctattggcagccatttccagacgacaagcatgctgtcagtagcacccaaaatgttacatcagccgacttctggaatcttccccctcctgatgtgtttaacacagctttcatagcagaacaagatgcaccgcttgtgttacaatggcctccagtgcctctccaaaatgatagctattatgtcgccctctactttgctgatacattgcctgataattcaaggacctttgacgtgtatataaatgattacctctttttcaaagatctaaatgtcacatcagctggtctttctgtctttgcaacacaatggattctctcaggcttgaccacaattatattgaaatctgcttctccttctgctcttcctccacttattaatgctggcgaggtttttgggctttttcctgttggaagattgacatatgcacgggatgtacttgccctggagagtataaagaaaagccttcaaaatatacctgaagattggaatggagatccatgcatgccttcaggatattcttggaccggagttacatgtgatgaaggatcaaaaatacgtgtcatctcattgaacttttcaagtatgagtctctctggatttctttcaccagatattgccaaactgactgctttgactgatatatctttggcacacaacatgctcagtgggcctattccgaatcttagcaacctaagaaatctccaacgactgcacttgcaagaaaatcagctatctggatcggtacctgagacattgggtacaatcaatacattgcgtgaaatgtgagttaatttcatcactttgtgcttatagcttgttattctccttttcaatttgacatgatttttttcatgttgaaacaaattatcagaaccagcatagagtgttcatgatcttcaatttagtcgtgttttcatgctttgaattgctgcacatctattctgacaagtacatatgtcaatatgtgccgcatgcttgaagaacacaagaagttgacagtagatgtaaacttgtgacattagttaatgttatatgatgtattttggtccttactttgtatcagtatgcatttcaagtttattattatgcatatagcggaatgatataacatatctctgcaagtccaatagcatatatgatcttactaatgtgctccctaattcacaatatctgtccaatttattaggatttacttcttacagtatctctctgttgggagtatgccaatggtttgagcaagccattgaaaaggagactagcatgttataacattttttctgttagttacttcaattctcttatcaccactacaattttgaatgtgatctatgtgctagcattatagcacacaaaattcttggtgcagaccgaatgtctgtccagtacagctgcagaacatctgcaatgaaatacactatcctgttaaaagtgtaagacataaacttgtcggatactaccttaaccccgcttgaaagtagccaaatttgttcgtaactctatccatgagtaatgcaatatgagttcccaacacaaaaaatgaaagtgtcccaagtaccaagtcaatcatggagtttgtgaaaaaggctgcctggcccaggaagcgatctcaggcatccaaatttggttgccttcggtcagatcttgttgcctctcagggctgtaaagaaacaggattgctgccatgttcaatttttacaatacaataatttaactggaacagttccggagaacttactgaacaatacaggattgacatacacatttctgccagggaatagcttctctccaaaaccaccgcattgagaaccaggcagtttgtacgacaaactactctgtgtaacatgattcagatttcagaggtagcaggaatgttgttgattcttctagggtagctgtacatttttttaaccattctgtgcataaaggggagatagcagtacagttattcaaaccaatcaaggaggttggcaacatggtggcaagatacatatattggttttggttagcaatgtttggttccagagactaaagttcagtcagttcaaatcgaatgtttgaatatcca

SEQ ID NO: 146849 - DNA, 937 bp, Zea Mays
gcgattaaggaaataaggggggaaaaggaggaaggtccaagcggcggcagcagcaaaaacccgctccgaaaggcagaaaaccacaataaacaaggcacgcaacgaatccgatcccgatttaattcgcccaaatccgtcgattaatccccacgccggccgcgtcatgctccggccattcctctcccctcccctcaccgctctgccgccgccccctgcctccaccgcagcagccgcgggcgccgcggcgatgcgacccgcatcctcctcctcctcccgctcctcggccggcggaggcggggcccaccaccaccaacacaaccacggcggccacagcatctccgtctctccgccgacgtgcaggcacgccccatcgtcggccacgctcgatctcctcatcctgcttctcgtgctcttctcgcttgccttcctgctcgcctcctcgctctcgcacgtcgcgcgctcgctctccccgctgctcgccacgccgcccgccgccgcggcgctcgcctacgccaccgccgcactgccttacctggccgcggcggccgtgctcgtcgccaccgcgttcctctcctgtcgccggctcccgcggcgccggtgccgcaacccgcgctgccgcggcctgcgaaaggcgctggagttcgacgtccagctgcagaccgagggggcccttcgcgccggcgccggaagcaccgccggcggcgccgaagcatccatgtggcgcgagatcgaggcgctgccgtggaagggcggccagggcggaaacaacccagactacgagtgccttcgcgccgaactccgccggatggcgccgcctaacggccgagccgtgctgctcttccgcaaccggtgtggctgccctgttgctaaactcgaaggatggggcgcccccaagagcaaacggcgcaacaagaagtgagtgatggttgactatatt

SEQ ID NO: 146850 - DNA, 1035 bp, Zea Mays
atgtgtaaagtcagcaaggactttgtaattgatgcagcttttacagaacacgcttctcgcttttttaaccacagttgtcaacctaactgtcggctggagaaatggaatcagagggtctgctttgggccctcaatttgttgctaaaccacttgcacctgataaccctccactgaaggtaagatttattgacaacatcgatcctggtgggattgatcatcaaattgctcaactaggatctcaactggcaactagctactcttgtaattgtcatttctaagaacacttgagggagggggaactgctgaagcgtgtttcatcaagatccaagcagcacatgagctattgattcatgatgaaaggagaagggcatatgatagagaggatcatgtgaacccaatgaagattaccaccgtatcatgattcatcaactctaacatgcgtgagccaacactatgcttctccacttcaggacatggatatgactcttctatgtttaagccactacaacttggtgtatttatgccaaagattttttgagcactaacacaccaaaccagcgcctatgaagtgcttttgtatgatcaccttcttcttgcaccatccatggataatctacgtagctgcaaacagtcttagttacatattactgtactgaacatcctttcatagactacttgtacactgcctttttagaaccgttgtaaaacctcatgcgatacgtctgcgcctttgaaacagagatcaactgaacaacctgttcaatgtttccttctattgcatatgtattctgttgtcatactatgtccaacaatgcatttatattgctacaatatgtttatacttgatgcatgtgatacaaatccgttatttatacatacaaagacaagctcttctgacaccatagggcgccgcggagcgcaccccttttttctagtaagtttaacgttgcagttgctgaaggtgattgaatagaactcctgatttttttgtgttctatctaggaacttcagacatgatgtaaagatgaaccggagc

SEQ ID NO: 146851 - DNA, 852 bp, Zea Mays
atgtgtaaagtcagcaaggactttgtaattgatgcagcttttacagaacacgcttctcgcttttttaaccacagttgtcaacctaactgtcggctggagaaatggaatcagagggtctgctttgggccctcaatttgttgctaaaccacttgcacctgataaccctccactgaaggtaagatttattgacaacatcgatcctggtgggattgatcatcaaattgctcaactaggatctcaactggcaactagctactcttgtaattgtcatttctaagattttggaggcccaagtgagcaggccttcctgttatctagaacacaaaggccatttactccattgcagtggatggagttggagcaccaggctctcatgtacaatctcaatgcaatggccccgtttatgatggtaacagaacacttgagggagggggaactgctgaagcgtgtttcatcaagatccaagcagcacatgagctattgattcatgatgaaaggagaagggcatatgatagagaggatcatgtgaacccaatgaaggaacttcagacatgatgtaaagatgaaccggagcatcaagcagcagctgggtgcctcttcactgatagtagatctctaatatagtgatgtatgttctatactttgaggttagcttttcccctctggtcccctttgttggagaaactgttgtacttcagttaagagataagttttcagagtaatttctcctaatcagtttagtagaggtttcaggttcactaacctgagcagtgatcaggcttttagcttatttatttatgttgtgcaacgctggaatggtttcgaatgcaaaattgtcgctgctgttgccgc

SEQ ID NO: 146852 - DNA, 1937 bp, Zea Mays
gcagtataatacttaatctttatgtttttgatgcacctgctaagcgctaccagtaccaaaaaggggttacattaaaatgtgatgtatcatgtatatattgttgggtctgcatgttgtgatcttcaagggcacaacaacttagatgaacccaagtcgaatatgattatgtatcctcttttactgttctatattagattacttcacaattgttgaatgatatttcgatggtcatatttgaatgttgtttgttatggaagaaagatgatattttggcactatatggtaccaagtttttattatcttgcaaaaaaatatctaaatgttactgacagatttcccatcagtctgttttggatcacttttccctttctttgattgtgtgccaaaagaggtgccatctttcaccatgaggccttacattttctgatggtgacaaactgacaatccattccaagtctatatgctcatattatttttagtatctttgtattttacttccgaaggggcgtgtttatatgatagaaaaagtattacaacactaagtctttgccaccagagtttagcagcaaattattttttgccatcatacatgcttagattttggaggcccaagtgagcaggccttcctgttatctagaacacaaaggccatttactccattgcagtggatggagttggagcaccaggctctcatgtacaatctcaatgcaatggccccggtaccgtaccttccagcctgctcatttcaatcagcaagaacttcatatcatccaatagagatatgcatattctgaatcataaggctaaggttctctacttcaaaactactagcatttgcaataaaacaaaaatagaagataaaaatattatttgcacaaatgaatgcctttgtaatgttacatggtaaataataatgttggcagctttgtagtatcagaaactacatgagccatttgctcattgtattggatgtttctatatctggagttgtgctgttagagtattaaagttctacactttacgatgtaatagtttgtagattcctctattcatattttttgagtttaggtaattaactttatggatcatcttaagtcctcatggttggggagtatgtactaacaactaaagtcaagactaggcaaaatgaatcaaacaagtaaagcgtgtggctgcctgtagcttactgacaaataaaaacgaatcaagttggcaccatagtaacacaagagaagctgtcattctccttttattccatatgattatgtgttatttcacagtttatgatggtaacagaacacttgagggagggggaactgctgaagcgtgtttcatcaagatccaagcagcacatgagctattgattcatgatgaaaggagaagggcatatgatagagaggatcatgtgaacccaatgaaggtcttataattttcttagccactcaggttatcatttcattttgtgcaagatgcagttccactccagttttattcttatttgtagttaacttttgttggtttctaagtttaggatttaatccatgtggaataaacgaataaacatagctgcttggattgcttaggttattttgctacataattgctctgatagtgtccctctattgtgtttcagattaccaccgtatcatgattcatcaactctaacatgcgtgagccaacactatgcttctccacttcaggacatggatatgactcttctatgtttaagccactacaacttggtgtatttatgccaaagattttttgagcactaacacaccaaaccagcgcctatgaagtgcttttgtatgatcaccttcttcttgcaccatccatggataatctacgtagctgcaaacagtcttagttacatattactgtactgaacatcctttcatagactacttgtacactgcctttttagaaccgttgtaaaa

SEQ ID NO: 146853 - DNA, 3060 bp, Zea Mays
ccaccactgaccgaggtccaccaggcccatcccgcgccgcgtgacgcgacccacgcagtagctgacgcttcggacccgctgctggtggggtccaagtgtcagtgagtgcgaaagacagcgaaaaagggcagtgagggtgagggtgagggtgagaccgagcccctcgtcagtcgtcacgccgaccgagcgctggccgccaccactcctcgaggcgagcaccagcaggaggggcagggcaacgactcctggtagatccaccacccgcccgcttggtcgcccactccgcctgccttgctccgctccgctccgctttgcttctgctctctcggcttgcgggagtttgggccttggggggcgcaatgcggtgaggtggaggtagaggtgggtgaaaggaagcggagctgcggacaggagaggagaggagaggagaggagacgagatggggtgcgcgcagtcgcggatcgagaacgaggaggcggtggcgcgctgcaaggagcggcgccagctgatgaaggcggccgtcgcgtcgcggaacgccttcgcggccgcgcactcggcgtacgcctgctcgctcagggacaccggctccgcgctctcggagttcgcgcacggtgagggcttgcccccgccgccgccgccggaggcgtcggcggataaggcggcgcccgttgcggcgcagggagggatcggcgcagcagcgacgggtgcctcggcttcggggtccgacgcgataatgccgccgccgccaccgctcgactcgctgctaccgccgccgccgcctctgccggatttctcgccatcgccggcgaagatccaccgctccattagcatgccactgccgccgtcgtccggcaacagaaatcccgccatgctccgcagcgactccattagggaggaggacgaggacgaggcagagagggaggaggaagaggaggacgacggccatctcgacgaccgtcggcagcggttgcgccaccgcccgccactgcccccgcccttgtcgccgccgccgccggatacgccggtgactcctcagcctccgccgccgccgcctcccccgccctcgtcggagatgaaggcaggagttgccacgtgggactatttcttctccatggacgagggaatggcctccatcgcccctgatgacgaggagatcatggcggggccggaagagaagtacgtcccgcctttgccaccgcgcccgcctcattcccctccgctggcggccgtgccgctatctgaggagtttgaggaggagccgcggacgccggagatgcccattccgcctgcatctctgcccccgaagccgcccaagcgctcgtccaaaaagaaggggaaggagaagcttaaagcggcgcaccatcaacacacagagtcggcgccactggtcacgctggtcaccggtggtaaggcggggaagttagtcaccgccgagatgccgcgtgtggacctcctccgtgtgcttgcagaaatcgacgagaggttcttgaaggcgtcagagagcgccggtgaggtatctaaggcgctggaggccaacaggatgcattaccactccaatttcgccgacaaccgagggcatattgatcattctgcaagggtcatgaaaataattacatggaatagatcctttaaaggaatgcaaaatggcgatgatgggaaagatgacttcgaaaatgatgaattggagaccttggcaactgtagttgataaaatcttagcatgggagaaaaagctctatgatgaagtgaaggctggtgagattatgaagcttgagtatcagaggaaggttgctttgttaaatagacaaaagaaacacaatgctgccattgaggttcttgagaaaacgaaagctgcggtaacccacttacatactagatacatagttgatatgcaatcaatggattcaactgtgtcagaaattcagtatctccgtgataaccaactgtacccaagactattggatcttactgaccggatggcaaaaatgtgggaggacatgaagatacatcacgcaaatcagctgaaaattgtcctaaatctgaagtctgttgatattcctgattccaatattgaaacaagtgattatcaccacagccacacacggcagctgcgtgatattgtagataagtggatcacaaattttactgacttcatgaactgtcaaaaggaatacataaatgctctctatggctggttgaagttgaaccttatacccatagagagcagcctgaaggagaaagtagcatcgccacctaggatgcagcaacctcctatcaaagcctttctttatgcctggcatgagcacctagccaagctgcctgatgatcttgccaagacagccattgtcacttttcgagcagtcttggataccatattgggtgttcaagatgaggagttgaaacagaaggagatctgtgagcagactcgtagggaatacatacgtaaggcccgggcttttgaggattggtgccacaagcatccacagcccagagcgatcgacgtcgatccagatagcggtgaggggacaggacataaggatgtagtcaccgagaagagattcgcagtggagagcttgaagagcaagcttgacgatgaaattgaatcccataataagctatcaaagcaggtcagggagaagtccctctcgatcctgaaggcacatctcccagagctgttccgtgctctgaccgacttctccgacgcctccttcgaaatgtactcgaagctgaggctgatgtcgttgatgcaggatcagggaaacaactagatggacagtatgttcagaagttaggatcagtaatatccctcccccaagtgttgtaatgcatgtgttctacccctttctgtggtatgtgtaaaaggctagtagctcattggatgaggattcttgtttaatttattggcttgatgaaaccatcgggtactttgtagtgtggacatatgctggatagttagcatgtgatgaactgattacaatctgtgggggtaaaagccgtcgtctatgtaaatgataaattttgttgagatatccagccgtccagttttttgaggcactcgtga

SEQ ID NO: 146854 - DNA, 157 bp, Zea Mays
tctgtttgaatgcttcaaacttttgtggtggaacctttgtatgtttgaacctctgttgtggaagaactagtgtgctggaattgtgtatgacttgtgatgagaatgttgtgtatgatggcttttctgtgtattatgattctgtgagctatcatgagag

SEQ ID NO: 146855 - DNA, 618 bp, Zea Mays
aaatttacaggtgcaatttcagataaaatgaagggatcgaaggatggtgcatcaaaaggacacattagtggcaagaacaaaaacattaaggaggaaccttcgcttgatcatggattttctcgtaaaaacagatgtgattctgatgagtacaatggtaaacctcatgccagttcatgtcagttgcaaaacattcccaacaaaacttcgccactggagagggacaaagggaaagtattgcatatggaagatgaaccatctcagtacaaaagcaaggaaaatggagacctgtttagtgcagattccatggctgtcatggtaggaaatgttgatagaaattctttagggatgatgaaagggaagaagaaagtttcttctttgcaagccaccctgtctgggaagttcaagttcaaggcaaaaaaacaattgaatgacaacattgatagaaaaaaatatggtgaagacgagcattatgctttagaccatagaattggtttggataattcatatcaaatagataagagtgtgaggcttgagaaaaagaccatctcatctggggagattgataacaagtcagatgttggaaatgatggtggtgtcaatatctctgccatgtttgat

SEQ ID NO: 146856 - DNA, 3346 bp, Zea Mays
aaaaggaagctggtggaatcatcagataaaggagaaattgttggaaaagaccaatcacgtcgaatgagaagcagtgtaggggttgatcatgataacctgcgagcatcaaagaaaatgaagaaagaatccaatggccctgtgatgaagcatcaaccctctgagtttgaaataagcaaaagtagtcctgccagtgagactctgaaaaacattcagaagcgcagttgcatttctcctggcatgggaaagtatggtttatcttcatcaggtaaacattctcatggtgaggataaagatttctcagctgtggtcattaaaacatcagatacagagaactctggccctcgagactcatccattaagaagagaaaactgaaacaaaggcagtcaagccagcattttcgggatccacactgtagcaacaatgacacaaatggtattacaaaacaaaatattactgaaattaatgctgtgaagaaaaaatccaggtcagaattgaatttgttaaagacagataggatagctactgattctagaggcacagttggtggagttgatgataggatatctactgataaggagtgtttaagtgagcaacttcaagaaaatacccatttccagcatccgtcactcgtagaaggcaccacaaagagggaaatccgtcatgcacaaacacctatagctgcgacttcgagttcatccaagatgtctaactccaacaagtatatagctcattttcaggaaacgagggcctctcctgtagagtcagtttcttcctcacccttgagatcttctgataagaatcctttgggtcgacatagaagctcttcatggacaattacagaaaatgtgcattctcaagagtcagggaagataaattcttcatgctcgaacagaaactatgatcttgggtctgattgtgataaagctaaggctcgtatttctggttgctttaacggagatgtgagtcatcatgttcagaaggatagggactttctgaaagataaacaagatgtgatgaacgcatgtcttataaacaaaggttctggatttggtgctagaaatttccagctgagtcctgaacataaagtcaatccagatgtcctttcatcacatgacaacgatggtcacaagcaaccaacagttcgtcagaatgggaaaacacagccccatttcggttcaaaccaaggtgaccatgcaaatttgacttatgggcatattaagcctggtaaagggaatataccaaataaggaccagaaaacaaatccatctgcagtcaaagcaagcaagcagcagccatccttaaacaatgcatcaaatggtgatgcctcttacaaggcaaggcaaatagaaaaggctgttattgaaaatttggacacgaggaagcacatcactctcaatggtgatgcttcaaatctaacaagtgcatctgttctactgaaggaagctcgagatttgaagcacttgtctaaacgtcttaaggaaaaaggggatgactttgagagtacaagcatgtgctttgaggcgggtctgaaatttctccatgttgcttctctgtgggagaccccaaacattgatagctccaatcaaggggtttctatacaagctatgaaactgtattccgaaacaggaatcctctttggattctgcgctcacgaatttgagcgactcaagaaaatggcgaatgctgctctggcatataaatgtgtggaagtggcatatatgaaggctgctttctttagaagtcctggtgtaattaaagatagacatgcattgcatgcagcatctttgatggttgctccagctgagtctccatcatcttccgcttcagacatcgataatttaaataaccagagcacagttgctaaggctgtttctgcaagaggtgtatactctcctcagattgctagcaattccatatctcggaacaatcatcatttgatgggattgctttcttatgcagaggacacaaataattcatttgagggaaccagaaaatcacaaacttcattttcagcttatctttctggcattgggaagaatcaggtggatgaagttgctcttgtaaggaaagtacttgatttcagttttcataatgtcaagggattgctgcaactgattcgtcattcgttggagtctatcaaccatgaaagtggtaaatgatctaccaagtataggtatcttggaaaagagattaatgatgggaaggttgctttggcaactgtgctatacattggtacctcctccaatctggatgtagaagtaaacaagtttagagagtaatcagttgtgaatggaaagggttcacattgccttctcttggttgcatggaagtattatatgtgggtgatacaaatttcaccagcggcaaactgctaaaacgggtttctttaccaagtcatattgctacttttgttgcccggaatatttcttgtagatgatgactttgactagtgccgaactggcaaagggggttcttaccaagaattagcctgcaaatgttaattgctaagtccaacattcttggtttcagtgtctagtgaatgatcaaatccaagtcttcgagggcagagtctcagttttctttccagggcgccagtgtaagcttaggtcagcacttttgtcctaaagtctccccaccttctattggccttgcggagaaggttctgacaggcaagactccaccaattgcttcagtctaatattttacaaatttgcggaggttcagtgaggattgtctgactccaatgataggtgtgtatataggccaactttttagttaattcctgccctttttctcgatacatgtgtgtatattatacgagaaaaggaagaaaacaattttgtcataattttagctaatggttgtaattattgttcagatgttgcaaaattcattctttggtggcctggaaaaaactagtctagccctaaaacttcatcattgtttaggcaccttataactataaatattcttagcgtttgattcattttttccttttggggctgacctaacaacaaatgttagatgatgacactatctgctgcctatctgagtgttgtttgggttcctgactgagcattaccattgtaacgagaaagcgatgtaaaagcccttgctgctgtgctgacgaaagaggattcctttccaatgttacacgatgagtccggttgatttgtgtaacatgttctcgtctccgtccagactgaaaaggcagtggctcgttgagctgtacggcatgaagccttctttccgattttaatactagttctgggtgtactgctccaaagagtagcatctctttgcagtaaaaatggtttgttctgttcaagtatgtgagagaacaag

SEQ ID NO: 146857 - DNA, 3109 bp, Zea Mays
aaaaggaagctggtggaatcatcagataaaggagaaattgttggaaaagaccaatcacgtcgaatgagaagcagtgtaggggttgatcatgataacctgcgagcatcaaagaaaatgaagaaagaatccaatggccctgtgatgaagcatcaaccctctgagtttgaaataagcaaaagtagtcctgccagtgagactctgaaaaacattcagaagcgcagttgcatttctcctggcatgggaaagtatggtttatcttcatcaggtaaacattctcatggtgaggataaagatttctcagctgtggtcattaaaacatcagatacagagaactctggccctcgagactcatccattaagaagagaaaactgaaacaaaggcagtcaagccagcattttcgggatccacactgtagcaacaatgacacaaatggtattacaaaacaaaatattactgaaattaatgctgtgaagaaaaaatccaggtcagaattgaatttgttaaagacagataggatagctactgattctagaggcacagttggtggagttgatgataggatatctactgataaggagtgtttaagtgagcaacttcaagaaaatacccatttccagcatccgtcactcgtagaaggcaccacaaagagggaaatccgtcatgcacaaacacctatagctgcgacttcgagttcatccaagatgtctaactccaacaagtatatagctcattttcaggaaacgagggcctctcctgtagagtcagtttcttcctcacccttgagatcttctgataagaatcctttgggtcgacatagaagctcttcatggacaattacagaaaatgtgcattctcaagagtcagggaagataaattcttcatgctcgaacagaaactatgatcttgggtctgattgtgataaagctaaggctcgtatttctggttgctttaacggagatgtgagtcatcatgttcagaaggatagggactttctgaaagataaacaagatgtgatgaacgcatgtcttataaacaaaggttctggatttggtgctagaaatttccagctgagtcctgaacataaagtcaatccagatgtcctttcatcacatgacaacgatggtcacaagcaaccaacagttcgtcagaatgggaaaacacagccccatttcggttcaaaccaaggtgaccatgcaaatttgacttatgggcatattaagcctggtaaagggaatataccaaataaggaccagaaaacaaatccatctgcagtcaaagcaagcaagcagcagccatccttaaacaatgcatcaaatggtgatgcctcttacaaggcaaggcaaatagaaaaggctgttattgaaaatttggacacgaggaagcacatcactctcaatggtgatgcttcaaatctaacaagtgcatctgttctactgaaggaagctcgagatttgaagcacttgtctaaacgtcttaaggaaaaaggggatgactttgagagtacaagcatgtgctttgaggcgggtctgaaatttctccatgttgcttctctgtgggagaccccaaacattgatagctccaatcaaggggtttctatacaagctatgaaactgtattccgaaacaggaatcctctttggattctgcgctcacgaatttgagcgactcaagaaaatggcgaatgctgctctggcatataaatgtgtggaagtggcatatatgaaggctgctttctttagaagtcctggtgtaattaaagatagacatgcattgcatgcagcatctttgatggttgctccagctgagtctccatcatcttccgcttcagacatcgataatttaaataaccagagcacagttgctaaggctgtttctgcaagaggtgtatactctcctcagattgctagcaattccatatctcggaacaatcatcatttgatgggattgctttcttatgcagaggacacaaataattcatttgagggaaccagaaaatcacaaacttcattttcagcttatctttctggcattgggaagaatcaggtggatgaagttgctcttgtaaggaaagtacttgatttcagttttcataatgtcaagggattgctgcaactgattcgtcattcgttggagtctatcaaccatgaaagtggtaaatgatctaccaagtataggtatcttggaaaagagattaatgatgggaaggttgctttggcaactgtgctatacattggtacctcctccaatctggatgtagaagtaaacaagtttagagagtaatcagttgtgaatggaaagggttcacattgccttctcttggttgcatggaagtattatatgtgggtgatacaaatttcaccagcggcaaactgctaaaacgggtttctttaccaagtcatattgctacttttgttgcccggaatatttcttgtagatgatgactttgactagtgccgaactggcaaagggggttcttaccaagaattagcctgcaaatgttaattgctaagtccaacattcttggtttcagtgtctagtgaatgatcaaatccaagtcctcaatgggaatctaatatacatctaccatagtgttcgagggcagagtctcagttttctttccagggcgccagtgtaagcttaggtcagcacttttgtcctaaagtctccccaccttctattggccttgcggagaaggttctgacagttttggaggtgcttcaggatttagcagtctaatattttacaaatttgcggaggttcagtgaggattgtctgactccaatgatagatgatgacactatctgctgcctatctgagtgttgtttgggttcctgactgagcattaccattgtaacgagaaagcgatgtaaaagcccttgctgctgtgctgacgaaagaggattcctttccaatgttacacgatgagtccggttgatttgtgtaacatgttctcgtctccgtccagactgaaaaggcagtggctcgttgagctgtacggcatgaagccttctttccgattttaatactagttctgggtgtactgctccaaagagtagcatctctttgcagtaaaaatggtttgttctgttcaagtatgtgagagaacaag

SEQ ID NO: 146858 - DNA, 1108 bp, Zea Mays
cgagcatactagcgtgagtagttttcattttcacccctgcctctgtatccgagcatactagcggatcctggcccgatccctcttcccaccccacccacctccgcttctctccaagtgaggaaccccaagccctcgccatggcgtcgcggatcctggcccgatccaaggcccttcccctcgtcgccgccctcacccctgccgctgccaaagcagcaacgcctatcgccggagcccgcgcgctctcgtccctgccccgctacccgtctgccccgtcgccccatgggctcggcaaggttctgggatatgaaccaacatctcacctcagtggaccacaagttttacctcgttggttttcctctctagcatccaatggatctcaggtgcagaagtcacagatctctgagacatacaagtcaggtggtgaaatgaaacagtctgagacacggaaatcaagtgaggaagccacaccaaaagttgtggcgttcagtccgctagaagcagctatcgctaaacctagaagtagtcccctgacaagtgagagttctaaagtaaggcgatcagagatagcaacccaagtcaccttttacatgatcccagccctgcttcttgcctccaagaacagcataagtacctcccttctggtcggcgccgtgttccatcaagtatacatgttccacaaggagattcttctggactacgtgcaccatgatatcaccagaaagtgggctttgatttacttcaagctgcttttgctggtgatggcgaaggacaccatcatgtacttcaatctgttctaagctcaccttctcagtttctcaaatatccagcaatgcatccgtctctgcactcgtagaataatgatgatggatgaattatgcagccttcgttcttgtattctccctaatgagcttgcttttttccagctgccagtttcactcttattaagtatatcagtctggatgggattgatagtgaccagtcagatgatatccctgattctgcacctcattaataatatgattaatgtcaattgtgcaattaaggatgtgtttggtttgaggtaaaagtaggatgaggcggcgtgacactgtccgctcgattttttggg

SEQ ID NO: 146859 - DNA, 773 bp, Zea Mays
gtcctgcttgctctctctagagctgactttaggacattggaggctttgacgccttcggtgtccttgcgtccgcgtcgtgtccgcgcgcctgctgcccgccaacccgcctctcccaaatcccatccaaattcctccgcgtctttcgaagatcatattttgggaggggcaccgcccccagatcggggaggaatccccattccgtctggtgggtcggtctcccctgtccgtttttggctcttttcccctctcacaagggcggctcttggatgggctgcctgccgtgcttcgggtcggctggtgagggggcggccaaggagggcggtgcgcgcaaggacggtctggaccttggtattacagaagcttggacttgtggcactagcacctgattctgatgtaacaagtttccccagctggtggtgtggtgctatcaagaagatacctaaggacgtgaggaaatgatttaacacttaaattatcctggtagcttggaaaatatggaagcatcgaaatgcatgtgttagctcaaacgtgcaaatggttttacaggcggtgggtactgagagaatcctttggtgctctccaggagcttctgctctttaggagctgctcccccccccccccttcagattaggtttgagttttcctggttgtggttatttgtattttttttaggtgtgggtgtgtgagtctcaaggttttcctgggagaaggttccatgccctctccccctggtgttctttcttccatcttaatgaaatgacatgcagctcttc

SEQ ID NO: 146860 - DNA, 829 bp, Zea Mays
gtcctgcttgctctctctagagctgactttaggacattggaggctttgacgccttcggtgtccttgcgtccgcgtcgtgtccgcgcgcctgctgcccgccaacccgcctctcccaaatcccatccaaattcctccgcgtctttcgaagatcatattttgggaggggcaccgcccccagatcggggaggaatccccattccgtctggtgggtcggtctcccctgtccgtttttggctcttttcccctctcacaagggcggctcttggatgggctgcctgccgtgcttcgggtcggctggtgagggggcggccaaggagggcggtgcgcgcaaggacggtacgtcggatcttcgcgtcacccgggtcgaatcaggtctggaccttggtattacagaagcttggacttgtggcactagcacctgattctgatgtaacaagtttccccagctggtggtgtggtgctatcaagaagatacctaaggacgtgaggaaatgatttaacacttaaattatcctggtagcttggaaaatatggaagcatcgaaatgcatgtgttagctcaaacgtgcaaatggttttacaggcggtgggtactgagagaatcctttggtgctctccaggagcttctgctctttaggagctgctcccccccccccccttcagattaggtttgagttttcctggttgtggttatttgtattttttttaggtgtgggtgtgtgagtctcaaggttttcctgggagaaggttccatgccctctccccctggtgttctttcttccatcttaatgaaatgacatgcagctcttctgcatggttcgagaaaaaaa

SEQ ID NO: 146861 - DNA, 2306 bp, Zea Mays
gtcctgcttgctctctctagagctgactttaggacattggaggctttgacgccttcggtgtccttgcgtccgcgtcgtgtccgcgcgcctgctgcccgccaacccgcctctcccaaatcccatccaaattcctccgcgtctttcgaagatcatattttgggaggggcaccgcccccagatcggggaggaatccccattccgtctggtgggtcggtctcccctgtccgtttttggctcttttcccctctcacaagggcggctcttggatgggctgcctgccgtgcttcgggtcggctggtgagggggcggccaaggagggcggtgcgcgcaaggacggtacgtcggatcttcgcgtcacccgggtcgaatcagataaatcaaaaccacagggtggactagactctaagaaggatgcagtcattttgagggaggggaataatcaacatattgcagcacacactttcacttttcgtgaacttgcagctgccactaagaacttcagacaagattgcttattgggtgagggaggttttggtcgtgtttataaaggacgtttggagaatggacaggttgttgcagtgaagcaacttgatcgcaatggccttcaaggaaacagggagtttctggttgaggttctaatgcttagtctgttgcaccatgacaatctagtaaacttaattggatactgcgctgatggagaccaacgtcttcttgtatacgagtttatgccattgggatcacttgaggatcatttgcatgatattccacctgataaggaacctctggactggaatacacgtatgaagattgctgctggtgccgccaagggcttagagtacttgcatgataaggcaagtcctcctgttatttacagggatttcaagtcctcaaacattctactcggtgaagggtttcatccgaagctatcagacttcggccttgccaaacttggccctgttggtgacaagactcacgtttcaacacgtgtcatgggaacttatggctactgtgctccagagtatgcaatgacagggcagcttacagctaaatctgatgtatatagttttggtgttgtgttccttgaactgattactggccgcaaagcaattgacaacacaaaaccccatggagagcaaaacctagttgcatgggctcgtcctctattcaaggaccgcagaaaattccctaaaatggctgatccgtcacttcagggctgtttccccatgaggggactgtatcaagctctagctgttgctgcaatgtgtttgcaagagcaggctgctacccgcccctttataggtgacgtggtcactgctctttcatacctagcttctcacacatatgatccaaatgcgcctgctcaacataatcggagtaattcatctactccgagggttagccgaggtggtgggagcaatgaccaacgccgtctccgctcatcaaaccaccactctccagatttgagaagggaagtcaccacagcatcaagatacgacgatgaggttagcagggcaaactctggtactggttctggtcgccggtctggcttggatgatgcggatatgtcaggctcacaattgggtagccctgctcacactggaaggaagaggggatctcctaggacttctgaaagccagcatgctatagcagaggccaaaacatatggggaaaattcaagaggcagaaagtgaccaaactctcagagcagcattgaccgtatgagcagaatgctgaaccagatggttcatccattcatcattcatagaaaaaaaaaatgataagttccttgctagcgccagacaggaacattgcatcagtccatctaggtcccttggtctttgtgaatagagctttcctcttttccctttacgggctattgccactgcttcttaacttctccatacaaatatcattgccaccacaaccaccatcagaactcccattcctgtcatctattcctcatgaatgcgatcatcatgcttacgagccttcgtcgtcacggtgtataacaacattcggttcacaatgtggaggtaaggcaaacatctgctctggggagcacaggatctcatccagttgggcatcttctgttgctgttgcatgctgggtgtcagcagtcacaccattgtcgaggggtgtgatgttctttttcttgaatggtttgtacctggggttacagcagttcacctgtgtttgatacatctgccttgtgacatttttgtgttgagttgtcggaacacatctattatcatctctaccataaaattgttgtggcccttgcatcttatcctatgcatgctgttttg

SEQ ID NO: 146862 - DNA, 2270 bp, Zea Mays
gtcctgcttgctctctctagagctgactttaggacattggaggctttgacgccttcggtgtccttgcgtccgcgtcgtgtccgcgcgcctgctgcccgccaacccgcctctcccaaatcccatccaaattcctccgcgtctttcgaagatcatattttgggaggggcaccgcccccagatcggggaggaatccccattccgtctggtgggtcggtctcccctgtccgtttttggctcttttcccctctcacaagggcggctcttggatgggctgcctgccgtgcttcgggtcggctggtgagggggcggccaaggagggcggtgcgcgcaaggacgataaatcaaaaccacagggtggactagactctaagaaggatgcagtcattttgagggaggggaataatcaacatattgcagcacacactttcacttttcgtgaacttgcagctgccactaagaacttcagacaagattgcttattgggtgagggaggttttggtcgtgtttataaaggacgtttggagaatggacaggttgttgcagtgaagcaacttgatcgcaatggccttcaaggaaacagggagtttctggttgaggttctaatgcttagtctgttgcaccatgacaatctagtaaacttaattggatactgcgctgatggagaccaacgtcttcttgtatacgagtttatgccattgggatcacttgaggatcatttgcatgatattccacctgataaggaacctctggactggaatacacgtatgaagattgctgctggtgccgccaagggcttagagtacttgcatgataaggcaagtcctcctgttatttacagggatttcaagtcctcaaacattctactcggtgaagggtttcatccgaagctatcagacttcggccttgccaaacttggccctgttggtgacaagactcacgtttcaacacgtgtcatgggaacttatggctactgtgctccagagtatgcaatgacagggcagcttacagctaaatctgatgtatatagttttggtgttgtgttccttgaactgattactggccgcaaagcaattgacaacacaaaaccccatggagagcaaaacctagttgcatgggctcgtcctctattcaaggaccgcagaaaattccctaaaatggctgatccgtcacttcagggctgtttccccatgaggggactgtatcaagctctagctgttgctgcaatgtgtttgcaagagcaggctgctacccgcccctttataggtgacgtggtcactgctctttcatacctagcttctcacacatatgatccaaatgcgcctgctcaacataatcggagtaattcatctactccgagggttagccgaggtggtgggagcaatgaccaacgccgtctccgctcatcaaaccaccactctccagatttgagaagggaagtcaccacagcatcaagatacgacgatgaggttagcagggcaaactctggtactggttctggtcgccggtctggcttggatgatgcggatatgtcaggctcacaattgggtagccctgctcacactggaaggaagaggggatctcctaggacttctgaaagccagcatgctatagcagaggccaaaacatatggggaaaattcaagaggcagaaagtgaccaaactctcagagcagcattgaccgtatgagcagaatgctgaaccagatggttcatccattcatcattcatagaaaaaaaaaatgataagttccttgctagcgccagacaggaacattgcatcagtccatctaggtcccttggtctttgtgaatagagctttcctcttttccctttacgggctattgccactgcttcttaacttctccatacaaatatcattgccaccacaaccaccatcagaactcccattcctgtcatctattcctcatgaatgcgatcatcatgcttacgagccttcgtcgtcacggtgtataacaacattcggttcacaatgtggaggtaaggcaaacatctgctctggggagcacaggatctcatccagttgggcatcttctgttgctgttgcatgctgggtgtcagcagtcacaccattgtcgaggggtgtgatgttctttttcttgaatggtttgtacctggggttacagcagttcacctgtgtttgatacatctgccttgtgacatttttgtgttgagttgtcggaacacatctattatcatctctaccataaaattgttgtggcccttgcatcttatcctatgcatgctgttttg

SEQ ID NO: 146863 - DNA, 2509 bp, Zea Mays
gtcctgcttgctctctctagagctgactttaggacattggaggctttgacgccttcggtgtccttgcgtccgcgtcgtgtccgcgcgcctgctgcccgccaacccgcctctcccaaatcccatccaaattcctccgcgtctttcgaagatcatattttgggaggggcaccgcccccagatcggggaggaatccccattccgtctggtgggtcggtctcccctgtccgtttttggctcttttcccctctcacaagggcggctcttggatgggctgcctgccgtgcttcgggtcggctggtgagggggcggccaaggagggcggtgcgcgcaaggacggtacgtcggatcttcgcgtcacccgggtcgaatcaggagaactgcgcgataatatattaaagaagaggggcagatacaagaacaaactgggggcccctacggcggccaataacaggcatacagaaacccatccatgactaaaaaactaacaagaactaccacaatgctagctaactagcagggaggcccagaatgggggcggtgagcaaagacaactttgcacaagccatcttccaaagataaatcaaaaccacagggtggactagactctaagaaggatgcagtcattttgagggaggggaataatcaacatattgcagcacacactttcacttttcgtgaacttgcagctgccactaagaacttcagacaagattgcttattgggtgagggaggttttggtcgtgtttataaaggacgtttggagaatggacaggttgttgcagtgaagcaacttgatcgcaatggccttcaaggaaacagggagtttctggttgaggttctaatgcttagtctgttgcaccatgacaatctagtaaacttaattggatactgcgctgatggagaccaacgtcttcttgtatacgagtttatgccattgggatcacttgaggatcatttgcatgatattccacctgataaggaacctctggactggaatacacgtatgaagattgctgctggtgccgccaagggcttagagtacttgcatgataaggcaagtcctcctgttatttacagggatttcaagtcctcaaacattctactcggtgaagggtttcatccgaagctatcagacttcggccttgccaaacttggccctgttggtgacaagactcacgtttcaacacgtgtcatgggaacttatggctactgtgctccagagtatgcaatgacagggcagcttacagctaaatctgatgtatatagttttggtgttgtgttccttgaactgattactggccgcaaagcaattgacaacacaaaaccccatggagagcaaaacctagttgcatgggctcgtcctctattcaaggaccgcagaaaattccctaaaatggctgatccgtcacttcagggctgtttccccatgaggggactgtatcaagctctagctgttgctgcaatgtgtttgcaagagcaggctgctacccgcccctttataggtgacgtggtcactgctctttcatacctagcttctcacacatatgatccaaatgcgcctgctcaacataatcggagtaattcatctactccgagggttagccgaggtggtgggagcaatgaccaacgccgtctccgctcatcaaaccaccactctccagatttgagaagggaagtcaccacagcatcaagatacgacgatgaggttagcagggcaaactctggtactggttctggtcgccggtctggcttggatgatgcggatatgtcaggctcacaattgggtagccctgctcacactggaaggaagaggggatctcctaggacttctgaaagccagcatgctatagcagaggccaaaacatatggggaaaattcaagaggcagaaagtgaccaaactctcagagcagcattgaccgtatgagcagaatgctgaaccagatggttcatccattcatcattcatagaaaaaaaaaatgataagttccttgctagcgccagacaggaacattgcatcagtccatctaggtcccttggtctttgtgaatagagctttcctcttttccctttacgggctattgccactgcttcttaacttctccatacaaatatcattgccaccacaaccaccatcagaactcccattcctgtcatctattcctcatgaatgcgatcatcatgcttacgagccttcgtcgtcacggtgtataacaacattcggttcacaatgtggaggtaaggcaaacatctgctctggggagcacaggatctcatccagttgggcatcttctgttgctgttgcatgctgggtgtcagcagtcacaccattgtcgaggggtgtgatgttctttttcttgaatggtttgtacctggggttacagcagttcacctgtgtttgatacatctgccttgtgacatttttgtgttgagttgtcggaacacatctattatcatctctaccataaaattgttgtggcccttgcatcttatcctatgcatgctgttttg

SEQ ID NO: 146864 - DNA, 2381 bp, Zea Mays
gtcctgcttgctctctctagagctgactttaggacattggaggctttgacgccttcggtgtccttgcgtccgcgtcgtgtccgcgcgcctgctgcccgccaacccgcctctcccaaatcccatccaaattcctccgcgtctttcgaagatcatattttgggaggggcaccgcccccagatcggggaggaatccccattccgtctggtgggtcggtctcccctgtccgtttttggctcttttcccctctcacaagggcggctcttggatgggctgcctgccgtgcttcgggtcggctggtgagggggcggccaaggagggcggtgcgcgcaaggacggtctggaccttggtattacagaagcttggacttgtggcactagcacctgattctgatgtaacaagtttccccagctggtggtgtggtgctatcaagaagatacctaaggacataaatcaaaaccacagggtggactagactctaagaaggatgcagtcattttgagggaggggaataatcaacatattgcagcacacactttcacttttcgtgaacttgcagctgccactaagaacttcagacaagattgcttattgggtgagggaggttttggtcgtgtttataaaggacgtttggagaatggacaggttgttgcagtgaagcaacttgatcgcaatggccttcaaggaaacagggagtttctggttgaggttctaatgcttagtctgttgcaccatgacaatctagtaaacttaattggatactgcgctgatggagaccaacgtcttcttgtatacgagtttatgccattgggatcacttgaggatcatttgcatgatattccacctgataaggaacctctggactggaatacacgtatgaagattgctgctggtgccgccaagggcttagagtacttgcatgataaggcaagtcctcctgttatttacagggatttcaagtcctcaaacattctactcggtgaagggtttcatccgaagctatcagacttcggccttgccaaacttggccctgttggtgacaagactcacgtttcaacacgtgtcatgggaacttatggctactgtgctccagagtatgcaatgacagggcagcttacagctaaatctgatgtatatagttttggtgttgtgttccttgaactgattactggccgcaaagcaattgacaacacaaaaccccatggagagcaaaacctagttgcatgggctcgtcctctattcaaggaccgcagaaaattccctaaaatggctgatccgtcacttcagggctgtttccccatgaggggactgtatcaagctctagctgttgctgcaatgtgtttgcaagagcaggctgctacccgcccctttataggtgacgtggtcactgctctttcatacctagcttctcacacatatgatccaaatgcgcctgctcaacataatcggagtaattcatctactccgagggttagccgaggtggtgggagcaatgaccaacgccgtctccgctcatcaaaccaccactctccagatttgagaagggaagtcaccacagcatcaagatacgacgatgaggttagcagggcaaactctggtactggttctggtcgccggtctggcttggatgatgcggatatgtcaggctcacaattgggtagccctgctcacactggaaggaagaggggatctcctaggacttctgaaagccagcatgctatagcagaggccaaaacatatggggaaaattcaagaggcagaaagtgaccaaactctcagagcagcattgaccgtatgagcagaatgctgaaccagatggttcatccattcatcattcatagaaaaaaaaaatgataagttccttgctagcgccagacaggaacattgcatcagtccatctaggtcccttggtctttgtgaatagagctttcctcttttccctttacgggctattgccactgcttcttaacttctccatacaaatatcattgccaccacaaccaccatcagaactcccattcctgtcatctattcctcatgaatgcgatcatcatgcttacgagccttcgtcgtcacggtgtataacaacattcggttcacaatgtggaggtaaggcaaacatctgctctggggagcacaggatctcatccagttgggcatcttctgttgctgttgcatgctgggtgtcagcagtcacaccattgtcgaggggtgtgatgttctttttcttgaatggtttgtacctggggttacagcagttcacctgtgtttgatacatctgccttgtgacatttttgtgttgagttgtcggaacacatctattatcatctctaccataaaattgttgtggcccttgcatcttatcctatgcatgctgttttg

SEQ ID NO: 146865 - DNA, 2253 bp, Zea Mays
gtcctgcttgctctctctagagctgactttaggacattggaggctttgacgccttcggtgtccttgcgtccgcgtcgtgtccgcgcgcctgctgcccgccaacccgcctctcccaaatcccatccaaattcctccgcgtctttcgaagatcatattttgggaggggcaccgcccccagatcggggaggaatccccattccgtctggtgggtcggtctcccctgtccgtttttggctcttttcccctctcacaagggcggctcttggatgggctgcctgccgtgcttcgggtcggctggtgagggggcggccaaggagggcggtgcgcgcaaggacgggtggactagactctaagaaggatgcagtcattttgagggaggggaataatcaacatattgcagcacacactttcacttttcgtgaacttgcagctgccactaagaacttcagacaagattgcttattgggtgagggaggttttggtcgtgtttataaaggacgtttggagaatggacaggttgttgcagtgaagcaacttgatcgcaatggccttcaaggaaacagggagtttctggttgaggttctaatgcttagtctgttgcaccatgacaatctagtaaacttaattggatactgcgctgatggagaccaacgtcttcttgtatacgagtttatgccattgggatcacttgaggatcatttgcatgatattccacctgataaggaacctctggactggaatacacgtatgaagattgctgctggtgccgccaagggcttagagtacttgcatgataaggcaagtcctcctgttatttacagggatttcaagtcctcaaacattctactcggtgaagggtttcatccgaagctatcagacttcggccttgccaaacttggccctgttggtgacaagactcacgtttcaacacgtgtcatgggaacttatggctactgtgctccagagtatgcaatgacagggcagcttacagctaaatctgatgtatatagttttggtgttgtgttccttgaactgattactggccgcaaagcaattgacaacacaaaaccccatggagagcaaaacctagttgcatgggctcgtcctctattcaaggaccgcagaaaattccctaaaatggctgatccgtcacttcagggctgtttccccatgaggggactgtatcaagctctagctgttgctgcaatgtgtttgcaagagcaggctgctacccgcccctttataggtgacgtggtcactgctctttcatacctagcttctcacacatatgatccaaatgcgcctgctcaacataatcggagtaattcatctactccgagggttagccgaggtggtgggagcaatgaccaacgccgtctccgctcatcaaaccaccactctccagatttgagaagggaagtcaccacagcatcaagatacgacgatgaggttagcagggcaaactctggtactggttctggtcgccggtctggcttggatgatgcggatatgtcaggctcacaattgggtagccctgctcacactggaaggaagaggggatctcctaggacttctgaaagccagcatgctatagcagaggccaaaacatatggggaaaattcaagaggcagaaagtgaccaaactctcagagcagcattgaccgtatgagcagaatgctgaaccagatggttcatccattcatcattcatagaaaaaaaaaatgataagttccttgctagcgccagacaggaacattgcatcagtccatctaggtcccttggtctttgtgaatagagctttcctcttttccctttacgggctattgccactgcttcttaacttctccatacaaatatcattgccaccacaaccaccatcagaactcccattcctgtcatctattcctcatgaatgcgatcatcatgcttacgagccttcgtcgtcacggtgtataacaacattcggttcacaatgtggaggtaaggcaaacatctgctctggggagcacaggatctcatccagttgggcatcttctgttgctgttgcatgctgggtgtcagcagtcacaccattgtcgaggggtgtgatgttctttttcttgaatggtttgtacctggggttacagcagttcacctgtgtttgatacatctgccttgtgacatttttgtgttgagttgtcggaacacatctattatcatctctaccataaaattgttgtggcccttgcatcttatcctatgcatgctgttttg

SEQ ID NO: 146866 - DNA, 2468 bp, Zea Mays
gatctgtgaggggaaaggataagctgtgctgtgtgcttgagcacatgagtctcatacgttattaggctgggagtgggagcgctggttgaggttaaagtgtgctggaccaggaagtggtggcccaagttgacctttattcattttattgtattacttttattgttctctttaaaacatgtaatttatgtatagcccaataaagatgtgcatcaaccagttgcttggaccctgggtcatcggcctcataaacttgggttgggtttgcataccaagtcctaaattgtcattaaatgatatattctattttctaaatgttgacagtaagatcgttactcttagcaacacatgggtatgtttgctagtaaagataggtgctaagtgctctagatcaacttattccgaaatacttgatgcaccgaatttcttttagttttcatttactgctttaacttcgcattttcggttgtagttcatcttgattatgttgaaccctttaacccggatgtgacctaactctagactaacttctgctttagataaatcaaaaccacagggtggactagactctaagaaggatgcagtcattttgagggaggggaataatcaacatattgcagcacacactttcacttttcgtgaacttgcagctgccactaagaacttcagacaagattgcttattgggtgagggaggttttggtcgtgtttataaaggacgtttggagaatggacaggttgttgcagtgaagcaacttgatcgcaatggccttcaaggaaacagggagtttctggttgaggttctaatgcttagtctgttgcaccatgacaatctagtaaacttaattggatactgcgctgatggagaccaacgtcttcttgtatacgagtttatgccattgggatcacttgaggatcatttgcatgatattccacctgataaggaacctctggactggaatacacgtatgaagattgctgctggtgccgccaagggcttagagtacttgcatgataaggcaagtcctcctgttatttacagggatttcaagtcctcaaacattctactcggtgaagggtttcatccgaagctatcagacttcggccttgccaaacttggccctgttggtgacaagactcacgtttcaacacgtgtcatgggaacttatggctactgtgctccagagtatgcaatgacagggcagcttacagctaaatctgatgtatatagttttggtgttgtgttccttgaactgattactggccgcaaagcaattgacaacacaaaaccccatggagagcaaaacctagttgcatgggctcgtcctctattcaaggaccgcagaaaattccctaaaatggctgatccgtcacttcagggctgtttccccatgaggggactgtatcaagctctagctgttgctgcaatgtgtttgcaagagcaggctgctacccgcccctttataggtgacgtggtcactgctctttcatacctagcttctcacacatatgatccaaatgcgcctgctcaacataatcggagtaattcatctactccgagggttagccgaggtggtgggagcaatgaccaacgccgtctccgctcatcaaaccaccactctccagatttgagaagggaagtcaccacagcatcaagatacgacgatgaggttagcagggcaaactctggtactggttctggtcgccggtctggcttggatgatgcggatatgtcaggctcacaattgggtagccctgctcacactggaaggaagaggggatctcctaggacttctgaaagccagcatgctatagcagaggccaaaacatatggggaaaattcaagaggcagaaagtgaccaaactctcagagcagcattgaccgtatgagcagaatgctgaaccagatggttcatccattcatcattcatagaaaaaaaaaatgataagttccttgctagcgccagacaggaacattgcatcagtccatctaggtcccttggtctttgtgaatagagctttcctcttttccctttacgggctattgccactgcttcttaacttctccatacaaatatcattgccaccacaaccaccatcagaactcccattcctgtcatctattcctcatgaatgcgatcatcatgcttacgagccttcgtcgtcacggtgtataacaacattcggttcacaatgtggaggtaaggcaaacatctgctctggggagcacaggatctcatccagttgggcatcttctgttgctgttgcatgctgggtgtcagcagtcacaccattgtcgaggggtgtgatgttctttttcttgaatggtttgtacctggggttacagcagttcacctgtgtttgatacatctgccttgtgacatttttgtgttgagttgtcggaacacatctattatcatctctaccataaaattgttgtggcccttgcatcttatcctatgcatgctgttt

SEQ ID NO: 146867 - DNA, 798 bp, Zea Mays
ggaccaaggagtcgcgctggtagtctggtacagacgtacagtacagtcgctgcagcgaaagggggatcgcgcgaggcgagatggagctctcgccggtggggaggtgggccgacctccccgaggacatcgccgtagccgtcgcctcctgcctccaggaggccgacgtctgcgcgctcggcggctgctcgcgctcctggcgcagagcctgcgacgctgactgcatctgggagcgcctcttccgctgccgctggccatctgccgtggcgtcggcgtcccctgtgcagggatggaaagctctctacatcagccagcacagaagaatggctgttgcaatatctaatgtggttgaatttgtgggcagcagcttaaataatgagtcacttgaatccgaatactatctgaaagctattgctgatttggccttgatacctgatataggattcctcgatgtccagtttttcttgttctcaaggaatcatagtgcgataatcaaccttattggactgcactactcgatcgcatctttgcatgtgctggtgagttatgtactgctgatgattctattatggcggaacaggctttgtgtcgaaagaactcaacactgcttcgtttctaaattgctaaaacaactgtttctaatgctttactggaaacttcatcaacaataacgaagccttttttacttgtaactccataccttgttaaagcagctatgtaatgtcaatgttagaaaactgtttggctcctaactgattttctatttccttcgagaagctgtggtccttgcattcaaggctt

SEQ ID NO: 146868 - DNA, 881 bp, Zea Mays
ggaccaaggagtcgcgctggtagtctggtacagacgtacagtacagtcgctgcagcgaaagggggatcgcgcgaggcgagatggagctctcgccggtggggaggtgggccgacctccccgaggacatcgccgtagccgtcgcctcctgcctccaggaggccgacgtctgcgcgctcggcggctgctcgcgctcctggcgcagagcctgcgacgctgactgcatctgggagcgcctcttccgctgccgctggccatctgccgtggcgtcggcgtcccctgtgcagggatggaaagctctctacatcagccagcacagaagaatggctgttgcaatatctaatgtggttgaatttgtgggcagcagcttaaataatgagtcacttgaatccgaatactatctgaaagctattgctgatttggccttgatacctgatataggattcctcgatgtccagtttttcttgttctcaaggaatcatagtgcgataatcaaccttattggactgcactactcgatcgcatctttgcatgtgctgccaactgaagtcagtaaagcactccaagctcaccgagtagcagaaagggtagtttgtgtgaacctggtcattaggtggttctatggtttccggttgcccgacgaatacgagtgccaccgaatctctctaggtgagctcaccgtggctgagggagcagagtttttcgccatccttaaccgtggagctgttcacacggtattccttctccggatcagtctggtgaacgtagacaagtgaccctaaagtacaaaaaggtacacacggccacacgccataattagctgcctggcttgttttgcgccctttgtaaatatgtgtaagcttttgttccctcgcccccccccc

SEQ ID NO: 146869 - DNA, 896 bp, Zea Mays
ggaccaaggagtcgcgctggtagtctggtacagacgtacagtacagtcgctgcagcgaaagggggatcgcgcgaggcgagatggagctctcgccggtggggaggtgggccgacctccccgaggacatcgccgtagccgtcgcctcctgcctccaggaggccgacgtctgcgcgctcggcggctgctcgcgctcctggcgcagagcctgcgacgctgactgcatctgggagcgcctcttccgctgccgctggccatctgccgtggcgtcggcgtcccctgtgcaggtaccgcaaagaaggggatggaaagctctctacatcagccagcacagaagaatggctgttgcaatatctaatgtggttgaatttgtgggcagcagcttaaataatgagtcacttgaatccgaatactatctgaaagctattgctgatttggccttgatacctgatataggattcctcgatgtccagtttttcttgttctcaaggaatcatagtgcgataatcaaccttattggactgcactactcgatcgcatctttgcatgtgctgccaactgaagtcagtaaagcactccaagctcaccgagtagcagaaagggtagtttgtgtgaacctggtcattaggtggttctatggtttccggttgcccgacgaatacgagtgccaccgaatctctctaggtgagctcaccgtggctgagggagcagagtttttcgccatccttaaccgtggagctgttcacacggtattccttctccggatcagtctggtgaacgtagacaagtgaccctaaagtacaaaaaggtacacacggccacacgccataattagctgcctggcttgttttgcgccctttgtaaatatgtgtaagcttttgttccctcgcccccccccc

SEQ ID NO: 146870 - DNA, 902 bp, Zea Mays
ggaccaaggagtcgcgctggtagtctggtacagacgtacagtacagtcgctgcagcgaaagggggatcgcgcgaggcgagatggagctctcgccggtggggaggtgggccgacctccccgaggacatcgccgtagccgtcgcctcctgcctccaggaggccgacgtctgcgcgctcggcggctgctcgcgctcctggcgcagagcctgcgacgctgactgcatctgggagcgcctcttccgctgccgctggccatctgccgtggcgtcggcgtcccctgtgcaggtaccgcaaagaagggtaaagggatggaaagctctctacatcagccagcacagaagaatggctgttgcaatatctaatgtggttgaatttgtgggcagcagcttaaataatgagtcacttgaatccgaatactatctgaaagctattgctgatttggccttgatacctgatataggattcctcgatgtccagtttttcttgttctcaaggaatcatagtgcgataatcaaccttattggactgcactactcgatcgcatctttgcatgtgctgccaactgaagtcagtaaagcactccaagctcaccgagtagcagaaagggtagtttgtgtgaacctggtcattaggtggttctatggtttccggttgcccgacgaatacgagtgccaccgaatctctctaggtgagctcaccgtggctgagggagcagagtttttcgccatccttaaccgtggagctgttcacacggtattccttctccggatcagtctggtgaacgtagacaagtgaccctaaagtacaaaaaggtacacacggccacacgccataattagctgcctggcttgttttgcgccctttgtaaatatgtgtaagcttttgttccctcgcccccccccc

SEQ ID NO: 146871 - DNA, 431 bp, Zea Mays
cgtctgaagcatgcatcatgcacatcaattatatatggactacgtacgcagatgataaatgaggtgcgggaactcctgcggccggcggagatgccgggcttcttgacggactccaccgtccgccgcttcctccacgctaggagctggagcgcagcgcaagccaccaaggctgtcaaggaaaccgtcaagtggaggcgccagtacaggccggacgaaatccgttgggatgacattcctggaagggagcatgaggtgaagagagcgtacatagctgactacctcgacaaggatggccggactgtggtggtaacagtgccggcgataaagagccaaatttcagcgaaggagcaggtgaaactactagtttacaccttggagagctgtaccgcgggctcagaaaacgggcaagaaagtgtgttggacctcgatga

SEQ ID NO: 146872 - DNA, 306 bp, Zea Mays
caaatgatgtagactgaaaacgcggatccaaactacaaatagcttacagatcaaaattgccatgttctttttacaaaatttcagcttggccctaccactgctctttttaaggctgaaatgccctggttagcccaaagagaaaatctctcggagaaacaaagagttaagagtcttcaaaacggtgaaaggtgtactgaacaaacttacacaagagaaattactggtagagattttagaccttatgcctattatggatactgcatgtctctaacatcagtatttttggtgggggcaatcctgttttga

SEQ ID NO: 146873 - DNA, 1205 bp, Zea Mays
tggggccccactctctgaaagtgacctatcctcgctggctatacgtctcccctccgcgcacaaaaaccctagcacgcaggcgcagccaggcctgcacccaaagcttccggagaattcctcccttgccccgccgtcgcatcctcttcgaagttcgaatcgaatcgcgccgcgatcacccacctcatggcggacaaggagcctgtcgtggagcggccagaggcgggtgaggaggaggaggacgcctcagccgccgccgccgcgggggaggaggaggacacgggcgcccaggtggctcccatcgtgcggcttgaggaggtagccgtcaccaccggcgaggaggacgaggacgtcctgctcgacatgaaggcgaagctgtaccgattcgacaaagacggtaaccaatggaaggaacggggcacgggcgctgtcaagcttctcaagcacaagcagaccggcaaggtccgcctagtcatgcgccaggctaaaacgcttaagatctgcgcgaaccacctcgtggcctccaccacgaagatgcaggagcatgcgggcagcgacaagtcgtgtgtttggcacgctgctgactttgccgatggcgaacttaaggaggagatgtttgccatcaggtttggttcggtagaaaactgcaagaagttcaaggagttggttgaggagatagctgagtcgcttacaaagaacgagggcaaggaaggtgaagatggtggttccacggctggattgctggcgaagctcactgtgagcgagggcaaatctgagggaagtggcaagtctgagtccactgattctggcaaagtgactgaaaccaaagccgacacagccccagctgagtagttggtgtggttgcacttgcacgcagattcgcctggtgctgaactagtttgtctgtccgcgtccagtggaagtttggtgccctttagccatggaatacgattgctatcatttgggcccgggccgagttggaggagtctcaggtgttcggtctggtttggtccgggcttgattttgctaaaaacttgggagtccatgggggttgggaacgtttgatatgtgagtcgctagtatttaactgcatggatcgttgtggattgcggtaaattcataaagtggaccctatatattttttatttcgttcaatacacattcatatcatcaatgatttataatggcagtgcctgtggggagacttg

SEQ ID NO: 146874 - DNA, 1259 bp, Zea Mays
atcctcgctggctatacgtctcccctccgcgcacaaaaaccctagcacgcaggcgcagccaggcctgcacccaaagcttccggagaattcctcccttgccccgccgtcgcatcctcttcgaagttcgaatcgaatcgcgccgcgatcacccacctcatggcggacaaggagcctgtcgtggagcggccagaggcgggtgaggaggaggaggacgcctcagccgccgccgccgcgggggaggaggaggacacgggcgcccaggtggctcccatcgtgcggcttgaggaggtagccgtcaccaccggcgaggaggacgaggacgtcctgctcgacatgaaggcgaagctgtaccgattcgacaaagacggtaaccaatggaaggaacggggcacgggcgctgtcaagcttctcaagcacaagcagaccggcaaggtccgcctagtcatgcgccaggctaaaacgcttaagatctgcgcgaaccacctcgtggcctccaccacgaagatgcaggagcatgcgggcagcgacaagtcgtgtgtttggcacgctgctgactttgccgatggcgaacttaaggaggagatgtttgccatcaggtttggttcggtagaaaggccttttttgtttgagcccaggcatccaattttggtggcctggggttgacattgctgcctgggaagcttccaaccaaatccaaaaactgcaagaagttcaaggagttggttgaggagatagctgagtcgcttacaaagaacgagggcaaggaaggtgaagatggtggttccacggctggattgctggcgaagctcactgtgagcgagggcaaatctgagggaagtggcaagtctgagtccactgattctggcaaagtgactgaaaccaaagccgacacagccccagctgagtagttggtgtggttgcacttgcacgcagattcgcctggtgctgaactagtttgtctgtccgcgtccagtggaagtttggtgccctttagccatggaatacgattgctatcatttgggcccgggccgagttggaggagtctcaggtgttcggtctggtttggtccgggcttgattttgctaaaaacttgggagtccatgggggttgggaacgtttgatatgtgagtcgctagtatttaactgcatggatcgttgtggattgcggtaaattcataaagtggaccctatatattttttatttcgttcaatacacattcatatcatcaatgatttataatggcagtgcctgtggggag

SEQ ID NO: 146875 - DNA, 1009 bp, Zea Mays
atggagcctggtcccgacgggcctgctggtggccaaggaaccagtgcgccagcggaggccgggccgtctccgtcgtcgtcatcggccgccgcagccgcctcgtcgtcgagtcggaagcaggcagagcagcaagcgccgccgcagcaacaagcaggagcacagcagaggcaacagcaggcagcaagggcccagcatcaggaagctccagcgccgcaggcggcccaggcccaaccgcagccactggcgcagcagcctccgccgcctcctcctccagcggggctgagccggtacgagtcgcagaagcgccgcgactggaacacgttcctgcagtacctgcggaaccacaagccgccactgacgctggcccgctgcagcggcgcgcacgtcatcgagttcctccgctacctggaccagttcggcaagaccaaggtgcacaccgagggctgcgcccacttcggccagcccaacccgccggcgccctgcgcgtgcccgctgcgccaggcgtggggcagcctcgacgcgctcatcggccgcctccgcgccgcgtacgaggagtccggcggccgccccgagtccaacccgttcgcggccaaggccgtgcgcatctacctccgcgacgtgcgggaggcgcaggccaaggcgcgcggcatcccctacgagaagaggaagcgcaagcgcggaagcgcggccgcggcgcctccagttgcgccgcctcctgttgtaactgcagagaccgcagggaccacgtcagggaccgtctgtgacgaggaggaggaaccatcgccgtctgcaggtgatgaaccacagaagcagaccaccacgccgacgtccgcctcggctcctcctacaagtacttccagcgctagtgcaagtagtagcagtgccgccgcggccaccacgtcgacgacgacgacaaggaaggaggaagaaggatccgcgccaagctcgtgataagtgcagatcatctacatatcatcacctcccaattctaatcccacctccatcttaa

SEQ ID NO: 146876 - DNA, 194 bp, Zea Mays
tatttggagtttctattgtacccgacggtgcattgtttatgctcgcgtgtacttcactcgttcctgaaatacagtgctttgtgactttttcaatttttttagtgaaatatactagtgtcaataatgcctagatttgataaagtttgttaaaaaagaaatcaaaatttaaagagaaacaccataattaggttaat

SEQ ID NO: 146877 - DNA, 426 bp, Zea Mays
atggatggtaaggtaacaatgcttggactggtacccagcatcgttcgtacttggaagaatacggactatacagctggactagactggtcctccatccgctcctctggggaggcatccagtgtggatgattatttatggctgatgggaagagctggttacaagccagtaatcgagtactgtggaggtacagagattggtggtggatttgttactggatcgatgctacaacctcaagcgttgtctgcattcagcacacctgccatgggttgtaacctgttcattcttgatagcagtgggaatcctttggagcctgacattatgtcctactgcgttcatgtactgcttgcaaattctaacacttcatatctggattccatggatatcgtcaagacctttttgatctcttttgactgcatgaccacataa

SEQ ID NO: 146878 - DNA, 744 bp, Zea Mays
atgtggtcgtcgtgggtccgccggagcaagacctccttgcgactcacttcgtcgccgtccttctcatcgcccacggtttcgtcgccgtccttctcatcgcccacggtttcgtcgcccaccggcaaggaccatcctggcatcggcgctgtcctcgatgacgaggcgctcgacgatgatagcccctgcgccggcagcaagagcgtccttcaccgtacgcggtcggcgacaaggctgcggacgtgcaagtcgttcgcggcggccgcggaggccgcggcggcttccgtggcgggggagcgccgcgtggtgctctacttcaccaccctccgcgccgtgcgcgccacgttcgaggactgcctcgccgtgcgcacaatcctgcgggggctccgcgtctccgtagacgagcgggacgtgtccatggacgccgcctacctcgccgaggtccgcgcgctgatgcggcgagaccgcccatccctgccgcagctcttcgtgggtggcaggctcctcggggacgccgatgtggtgcgcctcctgcacgagagcggggagctgcggcgcgtcctggccggcgcggcgcaggcggagcccacgccgtgcgcgtggtgcggaggctcgcggtttgtcccgtgcggcacttgttgcggcagccaccgccggttcagcgagaagaccggcggtttccgcgtctgcgcgtcctgcaacgagaatgggcttgtccgctgtgccgcctgctcctcctgcagctaa

SEQ ID NO: 146879 - DNA, 129 bp, Zea Mays
gatcctattgtgttccttgaaaatgaacttctgtatgaaatatctttctgtgctcaactatattctctatgttcatgtgtcttgtcatccttcacctaacccaatccattctacaatgcctaaacacgc

SEQ ID NO: 146880 - DNA, 1341 bp, Zea Mays
caactcgtctctctctgtctcttgtagccgccagccgcccccgccgctcactccatgccacggccgcccctgtcgcgcccggccacccccggccccggtcgcccttgccgcggacgcccctgtgtgagccgccggcgcgcgctcgccgctccgcccctacgcgcagtcgccacgggagctcatatcgctcgatttcctctccggtggcagcaccctccacccctcatcaacccaacccgcaagaaaaacccgcagcagagaagaggagtcgtcgtgaccgagagctccagagcatgcccccgccacagcctctgacgatggatccaaagatgacagaggtgacccagatgttcgcccgcttcaagacggcctacgcctgcaacgacctcaacacctgtgtcaccctcctctcgcagctcaaggtccatctcacccaattccccagccatccggccttgtttcagcagacaccgaacattgtggaggagctcaaacttgcaagggacatttatgagcatgctgttgttttgagtatgaaatttgaggaccaagatgcgtttgaacgcaatttctgccagctgaagccttattacgtggatacatgatctggtaaaaaaggcaagctaatggaagaaaagccaatagaatattagagatcacattatagaaagataggatgatgaaacaaataacatatgttgataacttgtacattgatagattaaagattaaaagtattgtgcataatagggatgacgcggatatttttttataatcatcaaaggatggcattgacagtttgcatgaaagggtagcaagttagtagggcatttagtggggaagatgtggacaccttgcatgaagagagagatatagaacatctagtggggattagctttatagagtatatagataaattcataagcttccactattgctcgacgtcccggtgccccccccccacctctgttcattatccttggtcttcacctccacctgtacctacatctccatctaccgaacatcagacccctccaactaccttaccgacgcatgaacaagatggcgagttagacttagtagaaaccctcttcactagtggaggtatcgaccatcactcttcactgtaacccgatggtgatcagcgaccgtgagcttccatgttattgcgttatgatacttgagacttttattatgactatgtatgagatattgtctcttattagtactggatgatgagatgtgtcttattatgactatggatgagacttttgtgatgtaattgatgagactatggatgagacttttgtgatgtaattgatgagactatggatttaaata

SEQ ID NO: 146881 - DNA, 1353 bp, Zea Mays
gagtgaacacgtcacccttggtattcttccagcttccaggctctacgccgcttctagcgccccgatacgcggcgccggcgcaggcgtgcagccatggcgatgagctggatccgatcggttgttaggagggccctcatcgctccgaagccgcggggctcccgccagtttactgtcaccgccgccggcggcggcgcgacgcagaccgaaagggtggcggcggagatggtccgctacgccctcggcggcgccgtgcaccggagctcgccagaggaggcgatgcggatactggagcaaggcgcctcgaacctgcagggaggaggcgagggcagtgccgaagctgttgggttgctcatgctcgctatgtccacgctgctttaccggagtggaagacgtcaagacgcagtggaaaagctcaaagcaacccaacaagttgccccttctgcagtttttagagttgcagcgtgggaagcactaatgggattacacatggaggcagggcagttgatctgtcaatcaaatatgatagcaaatggtctgatcaggaccatcttaaatttcgggttaatgctgtcagaggacttgttacacttctgaatggagaaacagaatcagctgcccagctgttcgatggttggtgcagagacttttctagaggcgaaaaccaaacagaaaatgctgccgtttcatacggtgaatatttgcattgtgttggggattttcaaatggcagcacaagtgtatgagaaaattctcgaggcattttgcatggatgatatgtctggaaaccttttagcagctggaaacatggttcccgaggaggcttctcttggggccacttgctcatatggccagcttttatctcactctgggaagtttgctgaggcagaggattatctcacaagagctctacagaaggctgaagaacaatttggtgcaaaccacccaaaggtcggcattatattgacctgtgtagctagaatgtacaaactaaaggcaaaatctgaaggttctacttcaattatggtccaggaggggctgtacaggaaggccctagaagtattgaaagcccctgctattaattctgagggtaccagcaaacaggttgactggagagatatcatctccctcgctagaggtgagtacgcggagctgttattaattcagtctaataggaaggcggaaggtgaacggatgaagcagtgggcagaagatgcttggaggaaccgtaggctaacgctagcacaagctctagagttttcagaaccttcaaagccgactgtcgttgttgacacccgaatcggcagggtcgtgtagcttcagtcaacaatctcgtgagatgcacaaatgaagcaat

SEQ ID NO: 146882 - DNA, 1727 bp, Zea Mays
gagtgaacacgtcacccttggtattcttccagcttccaggctctacgccgcttctagcgccccgatacgcggcgccggcgcaggcgtgcagccatggcgatgagctggatccgatcggttgttaggagggccctcatcgctccgaagccgcggggctcccgccagtttactgtcaccgccgccggcggcggcgcgacgcagaccgaaagggtggcggcggagatggtccgctacgccctcggcggcgccgtgcaccggagctcgccaggttcccccttcgccccctctatttgcgctagtgtgcattagggttttgaggactcgctcatgtgccctggaccgctgtcgctggtgtgccagaggaggcgatgcggatactggagcaaggcgcctcgaacctgcagggaggaggcgagggcagtgccgaagctgttgggttgctcatgctcgctatgtccacgctgctttaccggagtggaagacgtcaagacgcagtggaaaagctcaaagcaacccaacaagttgccccttctgcagtttttagagttgcagcgtgggaagcactaatgggattacacatggaggcagggcaggagatgtcatacttgatttccccaaatgattcagttgatctgtcaatcaaatatgatagcaaatggtctgatcaggaccatcttaaatttcgggttaatgctgtcagaggacttgttacacttctgaatggagaaacagaatcagctgcccagctgttcgatggttggtgcagagacttttctagaggcgaaaaccaaacagaaaatgctgccgtttcatacggtgaatatttgcattgtgttggggattttcaaatggcagcacaagtgtatgagaaaattctcgaggcattttgcatggatgatatgtctggaaaccttttagcagctggaaacatggttcccgaggaggcttctcttggggccacttgctcatatggccagcttttatctcactctgggaagtttgctgaggcagaggattatctcacaagagctctacagaaggctgaagaacaatttggtgcaaaccacccaaaggtcggcattatattgacctgtgtagctagaatgtacaaactaaaggcaaaatctgaaggttctacttcaattatggtccaggaggggctgtacaggaaggccctagaagtattgaaagcccctgctattaattctgagggtaccagcaaacaggttgactggagagatatcatctccctcgctagaggtgagtacgcggagctgttattaattcagtctaataggaaggcggaaggtgaacggatgaagcagtgggcagaagatgcttggaggaaccgtaggctaacgctagcacaagctctagagttttcagaaccttcaaagccgactgtcgttgttgacacccgaatcggcagggtcgtgtagcttcagtcaacaatctcgtgagatgcacaaatgaagcaatccgtggatgcacctcgtgtcgtgtatattttcgaaagtgttgctccttgcgggctgcatccggtttgatccgttcaagtcccagcacactcgcctgcttgtttttcatatcacctttttgaatagggggacattcgaggatcacaaagcttgtgcatgtgatcactttaaacatttaatagcatatgtatatgttattgtacacagaataacaccacttaaagcatctttacattttgattgctatat

SEQ ID NO: 146883 - DNA, 1594 bp, Zea Mays
gagtgaacacgtcacccttggtattcttccagcttccaggctctacgccgcttctagcgccccgatacgcggcgccggcgcaggcgtgcagccatggcgatgagctggatccgatcggttgttaggagggccctcatcgctccgaagccgcggggctcccgccagtttactgtcaccgccgccggcggcggcgcgacgcagaccgaaagggtggcggcggagatggtccgctacgccctcggcggcgccgtgcaccggagctcgccagaggaggcgatgcggatactggagcaaggcgcctcgaacctgcagggaggaggcgagggcagtgccgaagctgttgggttgctcatgctcgctatgtccacgctgctttaccggagtggaagacgtcaagacgcagtggaaaagctcaaagcaacccaacaagttgccccttctgcagtttttagagttgcagcgtgggaagcactaatgggattacacatggaggcagggcaggagatgtcatacttgatttccccaaatgattcagttgatctgtcaatcaaatatgatagcaaatggtctgatcaggaccatcttaaatttcgggttaatgctgtcagaggacttgttacacttctgaatggagaaacagaatcagctgcccagctgttcgatggttggtgcagagacttttctagaggcgaaaaccaaacagaaaatgctgccgtttcatacggtgaatatttgcattgtgttggggattttcaaatggcagcacaagtgtatgagaaaattctcgaggcattttgcatggatgatatgtctggaaaccttttagcagctggaaacatggttcccgaggaggcttctcttggggccacttgctcatatggccagcttttatctcactctgggaagtttgctgaggcagaggattatctcacaagagctctacagaaggctgaagaacaatttggtgcaaaccacccaaaggtcggcattatattgacctgtgtagctagaatgtacaaactaaaggcaaaatctgaaggttctacttcaattatggtccaggaggggctgtacaggaaggccctagaagtattgaaagcccctgctattaattctgagggtgagtacgcggagctgttattaattcagtctaataggaaggcggaaggtgaacggatgaagcagtgggcagaagatgcttggaggaaccgtaggctaacgctagcacaagctctagagttttcagaaccttcaaagccgactgtcgttgttgacacccgaatcggcagggtcgtgtagcttcagtcaacaatctcgtgagatgcacaaatgaagcaatccgtggatgcacctcgtgtcgtgtatattttcgaaagtgttgctccttgcgggctgcatccggtttgatccgttcaagtcccagcacactcgcctgcttgtttttcatatcacctttttgaatagggggacattcgaggatcacaaagcttgtgcatgtgatcactttaaacatttaatagcatatgtatatgttattgtacacagaataacaccacttaaagcatctttacattttgattgctatatacatgaa

SEQ ID NO: 146884 - DNA, 1655 bp, Zea Mays
gagtgaacacgtcacccttggtattcttccagcttccaggctctacgccgcttctagcgccccgatacgcggcgccggcgcaggcgtgcagccatggcgatgagctggatccgatcggttgttaggagggccctcatcgctccgaagccgcggggctcccgccagtttactgtcaccgccgccggcggcggcgcgacgcagaccgaaagggtggcggcggagatggtccgctacgccctcggcggcgccgtgcaccggagctcgccagaggaggcgatgcggatactggagcaaggcgcctcgaacctgcagggaggaggcgagggcagtgccgaagctgttgggttgctcatgctcgctatgtccacgctgctttaccggagtggaagacgtcaagacgcagtggaaaagctcaaagcaacccaacaagttgccccttctgcagtttttagagttgcagcgtgggaagcactaatgggattacacatggaggcagggcaggagatgtcatacttgatttccccaaatgattcagttgatctgtcaatcaaatatgatagcaaatggtctgatcaggaccatcttaaatttcgggttaatgctgtcagaggacttgttacacttctgaatggagaaacagaatcagctgcccagctgttcgatggttggtgcagagacttttctagaggcgaaaaccaaacagaaaatgctgccgtttcatacggtgaatatttgcattgtgttggggattttcaaatggcagcacaagtgtatgagaaaattctcgaggcattttgcatggatgatatgtctggaaaccttttagcagctggaaacatggttcccgaggaggcttctcttggggccacttgctcatatggccagcttttatctcactctgggaagtttgctgaggcagaggattatctcacaagagctctacagaaggctgaagaacaatttggtgcaaaccacccaaaggtcggcattatattgacctgtgtagctagaatgtacaaactaaaggcaaaatctgaaggttctacttcaattatggtccaggaggggctgtacaggaaggccctagaagtattgaaagcccctgctattaattctgagggtaccagcaaacaggttgactggagagatatcatctccctcgctagaggtgagtacgcggagctgttattaattcagtctaataggaaggcggaaggtgaacggatgaagcagtgggcagaagatgcttggaggaaccgtaggctaacgctagcacaagctctagagttttcagaaccttcaaagccgactgtcgttgttgacacccgaatcggcagggtcgtgtagcttcagtcaacaatctcgtgagatgcacaaatgaagcaatccgtggatgcacctcgtgtcgtgtatattttcgaaagtgttgctccttgcgggctgcatccggtttgatccgttcaagtcccagcacactcgcctgcttgtttttcatatcacctttttgaatagggggacattcgaggatcacaaagcttgtgcatgtgatcactttaaacatttaatagcatatgtatatgttattgtacacagaataacaccacttaaagcatctttacattttgattgctatatacatgaagctcttatatttt

SEQ ID NO: 146885 - DNA, 2231 bp, Zea Mays
aggtgatcacctcgatctcccgcgcttattttccccgccaccctgctctgctctgcaagcctccctgctaaataatcctaccgctccgcagccgcaggtgcgtgcgtggtggttgacggccgcttacccgcaccggcgccatgcgcgcgcgcggctaggtggtcgaggtcaagccaaacgctgcccaccgcctctgcctcgcatatatcctcgcgcacgttctttgctcgtctcgcactcgcttccttcgacggactcatcgccgatcacaccaggctagctagcccacccacagtcgtagggccaggaccgataggaggagctcggtttttccgaccaggaccgccgccgccacacccgaagaagccgacgatgcagacgacgacgacgacgtcctcggtggtggccgagctggagggcgcgctgctccggagcgcggacacgttcccgtacttcatgctcgtggcgttcgaggcgtccgggctgccgcgcttcgcgctgctgctggcgctgtggccgctgctgcggctgctggagctggcgggccggcgcggcctggcgctgcgcgccgccgcgttcgtggccaccgcgggcgtgccgcgcgccgaggtggaggcagtgtcgcgcgccgtgctgcccaagttcatggccgacgacgtcgaccccgccgcgtgggcggccttcgggagctgcgaggggacgcgcgtcgtcgtcacgcggatgccccgcgtcatggtcgaccgcttcgccagggagcacctaggcgcgcacgcggtcgtcggctgcgacctcgagtacagccggctcaggcggtccacgggtctgctaagaggcgcgagctatgaggacgtcgccacccgtgtgcgcgcgttgttcgccggcgacggctgccggccggcactcgggatcggcgggtcaaagatggcgcgctcattcttgacattctgcgaggagcagctcaggcagccattcccagcgcccaacgagacgaacgccccgccgttccggccggtcatcttccacgacgggcgcctcgtgtgccggcccacgccattcatgtccctcgtcatccttctctggctgccgctcggcgtgctggtcgccttcgtccggatcgccgtcgggctcatggtccccatctggaccgtcccctacatcgcgccggtcttcggcggcgccgtgatcacccacggccgcgcgcctccccccgccaagctcggcggcggctcgccctcgggggtcctcttcgtctgcacgcaccgcacgctcatggaccccgtggtgctggccgccgtgctcggccggcgcgtggcggccgtgacgtactccatctcccgcctctcggaggtcctctccccgatcccgacggtgcgtctgacgcgcgaccgggacgcggacgcggcgcgcatgcgcgcggagctggcccgcggcggcgacgtggcggtgtgccccgagggcaccacgtgccgggagcccttcctgctccgcttctccaagctcttcgcggagctcagcgacagcatcgtgcccgtggcgatgaactaccgcgtggggctgttccacccgacgacggcgcgcgggtggaaggccatggaccccatcttcttcttcatgaacccgcggcccgtgtacgaggtgacgttcctgaaccagctccccgcggagtcgacgtgcgcggcggggaagagccccgtggacgtggccaactacgtgcagcggatactcgccgccacgctcgggttcgagtgcaccaccctcaccaggaaggacaagtacacggtgctcgcgggaaacgacggcgtcgtcaacgccaagccggcctgctggcagagccgcgtgaaggatgtcctcggcttcctgctccactaaccacattacttgcacggctctggactctgcgctcaaatacttcgctcaccgatttgattgagtttatactttacatttatttatacatgtaagtaagaataaccacacgcaaaagcatgtagtagtaacatacagtagtgtgattattagcctttatttcttcacataataagtactgtatattgtattgttctttgttttacaagtgttttggtgaatttttactgggtgtaatcaaatatattttgtagccatgactaagaaatcttggctgaagagcttgttgccgagtgatggctacaggtagatcaggtttggtaggactttcaaccctgtttttgtttatagcaaagtcgaaagct

SEQ ID NO: 146886 - DNA, 3100 bp, Zea Mays
gccgccgcggcgatccctctcctccacttcctcatcacaacattcaagaacagaccggggccttgcgcaaaagaacaaaaaaaatctcagaacacacacacacacctctatcgccccgacctcgacgcgacccctctcgcttggatccggacggcccggtccctccgccctcccatgcgcacggcgccgccgccgccgccgcagccgacatgacgctcgcctccctcgcccgcgccctcggccggtccgcgcgctcctcccgcccgcgccagggtttccagctcgggggcctccggcagccgcccgcgccaccgctaccgccgcccgtccacggcggtgagggtggggcggcaggatttgttcgcagctacctgactgcggcctcgtcggcagctcttgggaagccatccgcgggcaagaccgtggattggagatatgtcctcgccagcccacatttccgacgcctcttctcggacgggtccaagaagaactacgagaactattaccccaagggtaagaaggaggtgcctaaaggagatggtacaaacaagtctgaatctaagcaggaatccaatacagatgaaggatggaattttcaggataatgctatgaaacacatgcagaatttccttgcgcctttattgattcttggcctgatgctatcatccatgtcatctagctctgcagaccagaaggagataagcttccaagagttcaagaacaagttactagaacctggtttagttgatcgcattgttgtttcaaataaatcagtagcgaaggtctacatcaggagttcacctcatccaaagagccaaggccaagatagtgatatccatattactaccactgatgctccaggcaagcctgctcccagcagatgcaagtattacttcaatattggtagtgttgatttgtttgaagagaagttagaggaagcccaggaagctttgggaatagatccacatgattttgtcccagtaacttatgttgctgaagtaaattggttccaagaagttatgaggtttgccccaacagcattgattgttggtctattatatttcacgggaaaaaggatgcagagtggtttcaatattggaggtggtgctggcaaaggaagaggaggtattttcaacattggaaaagctacagtgatgaagatggacaagaactccaaaaataaggtgttttttaaggatgtagccggttgtgacgaagcaaaacaagaaataatggagtttgtgcatttccttaaaaaccctaagaagtatgaagatttgggagctaaaatacccaaaggtgctctacttgtaggccctcctgggacagggaagactttgctcgccaaagctacagcaggagagtctggtgtgccatttttgtctatttctggttcagatttcatggaaatgtttgttggtgttggaccgtccagggtacggaacttgttccaagaagctaggcagtgtgctcctagtattgtattcattgacgaaatcgatgctattggtcgtgcaagaggacgtggaggtttttcaggttcaaatgatgaacgtgagagtactttgaaccagctgcttgtagagatggatggatttggaacaacttctggtgttgttgttcttgctgggacaaatagacctgacatcctggataaggcattattaaggccaggaagatttgatcgccagatagcaattgacaaaccagatataaagggccgtgatcaaatattccgcatatatcttaaaaagcttaagttggacaacaaaccatcattttattctcaaaggctagctgccttgacacctgggttcgcaggagctgacattgccaatgtttgtaatgaagctgctttaattgctgcgagaagtgaggaaactcagattaccatgcagcattttgagtccgcaattgataggattatcggtggtttggagaagaaaaatagggtcattagcaaactggagcgccgtactgttgcttaccatgaatctggacatgcagttgctggatggttcttggaacatgctgagcctcttctaaaagttacaattgttcctcgtggaacagctgctttaggctttgcacaatacgtcccaaatgaaaatcttttgatgacaaaagagcagctttttgatatgacatgcatgacattaggtggccgtgctgcagaggaggttttgattggcaaaatctcaactggtgctcagaatgacctggagaaagttaccaaaatgacatatgcacaggtcgccgtgtatggttttagtgaaaaggttgggcttctgtccttcccccagaaagatggtggtttcgaaatgagcaagccttacagtaatcagacagcatccatcatcgacgatgaggtccgggaatgggttggcaaggcctacaagaaaacagttgaattgataacagagcacaaggagcaagttgcacagatcgcagaattgctgctcgagaaggaagtcctacaccaggacgatctaaccagggtactaggagaacgtccattcaaggcactggagccaaccaactacgacctctttaagaaaggtttcgaggatggtggtgacaacagccaagcaccagcagagaacgccgagctgcctgatgattcatctcccccagttggtgacgttgtacccacgtagtgtttctctcctcaacgtcagagctgtacattgagcgctcattctcgatagattcttgtttgttggttgcatcataaaaaagatctgtataaattcgcgcccaagctgattatgccactgtggaaatgcatttggatttccgtagtgtcagtccggtcgatagggtgccttgggttcttcatggcacgagcaaatgttctgattcttgtattcgaatgttttgaaatattctgtctgacgggactgcggagttggcgcgagaagtgtgcttgttcagttctatctgaaggcttagctgtctgtagctgtagctggtaacaacagtggctaaaatggtacctctgaaatctttgtgacagtaacaagccattttcctttgaatttttatcaggtagtcggcgcgattactttgtttgacaagcacaaactaaatgtcttggttt

SEQ ID NO: 146887 - DNA, 225 bp, Zea Mays
ctattgttgcagagcctagaatacattcaaatgtgtcatcttgactggtattgtaaatttcgtcatatattcactgaagagtggcttcgacttcctaaattctttgctttattatttttccctacctcctccctaaattctttgttttattattttttccctagctcctcccttgtagtcttttaattttctaagttttcgttgttattgaagttgttttcattt

SEQ ID NO: 146888 - DNA, 870 bp, Zea Mays
atgggggaggaagagcaaacagggcagaaacgacggctcaatgagcagaaagcggttgaggggtcgcgaatcaagaaggggcggagtcgtggatggaggccgccctacaaccgggttccagatgctccgccgccttgttctctttccctccctcttctcattccctcccaccctcaaatggcgtggattccagatggggcgccacctcgcagagatacggaccgcatatttcacgcgctcgccgtgctctacaacatcgtctcgaccgtcgcgctggtccaattaatcagaatcgagtgcagggtgccagagtatggatggacaacgcagaaggtgttccattttctaaacttccttgtgaacggcgtgcggtctgtcgtgtttgtgctggggcaaaatgtgcaacttgtagagcctaaggtctttagtaatggtttgaagcaatgtggtacctcagataatacaacatgtgcttctggatatgcccgggcttttgcattcttcacgacatatgcacttttagtgctcttctgggctgagatttattatcaagcacgtgccatgtcgactgatgtgcttagaccaactttctattggatcaacggtgtggtttatgcaattcagatgatattcaaaaatagtgctcacgaggaagagctaacttcccaagtgaaagggtggatacgctcatgggacaacgaaacaattaatgttttagatgtcatttccaacttccctgacatatcaatggaattggttgaaggtctaagaaaatggttcttgtcattgtgcatgatgattacatccttgagaagggaagactacatgaagaagaagcatggtattctttcagcaggtggtttctattga

SEQ ID NO: 146889 - DNA, 124 bp, Zea Mays
caacttttatatttggcccaagccatgatcataaggttttcatgaccttttggtcatacttacatctagggttcccattgtccaaaggggtttgcttaagggttttgggcaattctcccttttt

SEQ ID NO: 146890 - DNA, 2215 bp, Zea Mays
aaaattcgaacgtcctccgccgccccaacgataccatcttccccagttccccacgccggcacacccaagctcggccactcgtcttgttgcgaccaaacccaaaatccgaacaccctctcgttccccatccccggcgtccggcgctgaccgcgtgatcctcgccccgatggcggccgcctccacacccgcccgttcttccgcgcacctttcgcagccggtgcgcgtcgtgctgcgtgtgcgcccgttcctgtcgtcggaggccgcctcagcgacagcgccttgcgtctccctcctcggctgccaccccggcggtggggtcaccgtccagctcaaggaccagcacacaagtcggagtgaacagtacaaactggatgcgttcttccgtcaagaggacagcgtcagccagatatttgaccaggaggttcgtgcagtgatcccaagcatcttcgaggggatcaacgcgacggtctttgcctatggggcaaccggcagcggcaagacctacacaatgcagggcacagaggattttccagggctaatccccttggcagcttcgaccatcctagcactctgcactggcacatggtgctctgttgagatctcgtactatgaggtgtacatggagcggtgctatgacctgctggagcctaaagcgaaggagatcatggccttggatgacaaagatggtaacatgcagctgaaaggcttaagctgggtccctgtgcgatccatggaggaattccaggagctctattccataggcgtgcagaggagaaaagttgcccacactggactgaacgatgtttctagtcggagccacgctgtgctctcactcagggtcagcagcactgatgtggtgaaagggaagcttaatctcattgatttagctggtagcgaggacaacaaaaggactttgaatgagggcatacgccttcaagaaagctccaagatcaaccagtcattgtttgcgttgtccaatgtcatttcagctctaaataagaatgagcatcggataccatatagacagagtaaactgactcggttacttagagattctctaggaggcggttgccgcactgtgatgatagcttgcctgaatcctgcagaataccaggagtcggccaacacagtaagtctggcggctcgttcatgccatattgagaatttcaccagttcaagcaaacaagaaactcccaaacttaagatcgacatggaagccaaattacgagcatggttggaatcaaaggggaaaacaaagagcatccaaagaatggatggtcttttctccccaattgccagcaagactccattgtctgtgagccatatgaagcaaccaacatcttcaagaattccttgtagagttaaggcaatggatcaggatggtggtaaaatcaagaagatactttttgatccagtagtccatgttcccactgaaaatataccacgagagcacaggcagacagaagtaaatacaccaaagaaagtggtgcttccttcagttactccatgcaatgaaaaacatgaagcttctctcaggaaagctctttctccaatttcttcaaacatggtgcctgtagagcagcaaatacctgataatggcaattgccccgttttattggagccccaaactccaatagaaaaacgtaatatagtcgaggagactcctggtgcaacaccactagagagatttaatgcactagggtctaacctaaaggtttgtatggttccccttctcattctatagacaagatgtttgctactttaagatttatcaattgacattatgaactttttaggaagctctagttcagcagtaccttgaccttttaaatgttgcaaacaagtaagtgcgaattctacaaacttttttgttggcaccccagtgttccagatttttattgaacttggctttatttgattgatgcgtaaaatggatgatgctgtacgtattgctgaaaactgactaaaatagcacaagggaagcaaaaatgcagtggatctaaattgtaaaaaagaccccctgatctaaaaaggcatgttcatcactctaacttttaggctaatctttcttctctagcatcttgtatgcttgtggtgtagcttcaaccgtgacaaaaaaacatggacatatcagttatggtttgtgaacatcacaaattaactaaggatcaattgcaaacatgacctgacattttgggaggtgggtgtgggggtg

SEQ ID NO: 146891 - DNA, 2343 bp, Zea Mays
aaaattcgaacgtcctccgccgccccaacgataccatcttccccagttccccacgccggcacacccaagctcggccactcgtcttgttgcgaccaaacccaaaatccgaacaccctctcgttccccatccccggcgtccggcgctgaccgcgtgatcctcgccccgatggcggccgcctccacacccgcccgttcttccgcgcacctttcgcagccggtgcgcgtcgtgctgcgtgtgcgcccgttcctgtcgtcggaggccgcctcagcgacagcgccttgcgtctccctcctcggctgccaccccggcggtggggtcaccgtccagctcaaggaccagcacacaagtcggagtgaacagtacaaactggatgcgttcttccgtcaagaggacagcgtcagccagatatttgaccaggaggttcgtgcagtgatcccaagcatcttcgaggggatcaacgcgacggtctttgcctatggggcaaccggcagcggcaagacctacacaatgcagggcacagaggattttccagggctaatccccttggcagcttcgaccatcctagcactctgcactggcacatggtgctctgttgagatctcgtactatgaggtgtacatggagcggtgctatgacctgctggagcctaaagcgaaggagatcatggccttggatgacaaagatggtaacatgcagctgaaaggcttaagctgggtccctgtgcgatccatggaggaattccaggagctctattccataggcgtgcagaggagaaaagttgcccacactggactgaacgatgtttctagtcggagccacgctgtgctctcactcagggtcagcagcactgatgtggtgaaagggaagcttaatctcattgatttagctggtagcgaggacaacaaaaggactttgaatgagggcatacgccttcaagaaagctccaagatcaaccagtcattgtttgcgttgtccaatgtcatttcagctctaaataagaatgagcatcggataccatatagacagagtaaactgactcggttacttagagattctctaggaggcggttgccgcactgtgatgatagcttgcctgaatcctgcagaataccaggagtcggccaacacagtaagtctggcggctcgttcatgccatattgagaatttcaccagttcaagcaaacaagaaactcccaaacttaagatcgacatggaagccaaattacgagcatggttggaatcaaaggggaaaacaaagagcatccaaagaatggatggtcttttctccccaattgccagcaagactccattgtctgtgagccatatgaagcaaccaacatcttcaagaattccttgtagagttaaggcaatggatcaggatggtggtaaaatcaagaagatactttttgatccagtagtccatgttcccactgaaaatataccacgagagcacaggcagacagaagtaaatacaccaaagaaagtggtgcttccttcagttactccatgcaatgaaaaacatgaagcttctctcaggaaagctctttctccaatttcttcaaacatggtgcctgtagagcagcaaatacctgataatggcaattgccccgttttattggagccccaaactccaatagaaaaacgtaatatagtcgaggagactcctggtgcaacaccactagagagatttaatgcactagggtctaacctaaaggaagctctagttcagcagtaccttgaccttttaaatgttgcaaacaaggaagagctacagcagctgaaagtacgatccttttcatcttaatagcatttcgatcactattgttccagccttttttctgagtaacttcccctcttgtttgttagggaattggcgcgaggagagcagaatatattctggaattacgggaggactcaccaaaaccattcaaaactcttgaagatttgggaaacatcggcctctcgtcaaagcagatccgagacatccttaagaagacggccactgggatcttcaaatgatgacctcaatggatgatgatgtattggcgctagacattcataggtgtaacagctaaatgactggcttgtgttgctgacggagaagttagttcaatgtttgtgttggtgacttcaggcagtgccctgctgctactttcaactagattcccttgattgtgtgtagaattgcagttgaagtgttgaacaagtaaactatcggagttgtgatgctacttttacgtccaggggagtttttatggaacgagctattcgaacattttatatgatgaagtggagcatcagttttgctcatttgaataatgataacaagcagagtttttatca

SEQ ID NO: 146892 - DNA, 2260 bp, Zea Mays
aaaattcgaacgtcctccgccgccccaacgataccatcttccccagttccccacgccggcacacccaagctcggccactcgtcttgttgcgaccaaacccaaaatccgaacaccctctcgttccccatccccggcgtccggcgctgaccgcgtgatcctcgccccgatggcggccgcctccacacccgcccgttcttccgcgcacctttcgcagccggtgcgcgtcgtgctgcgtgtgcgcccgttcctgtcgtcggaggccgcctcagcgacagcgccttgcgtctccctcctcggctgccaccccggcggtggggtcaccgtccagctcaaggaccagcacacaagtcggagtgaacagtacaaactggatgcgttcttccgtcaagaggacagcgtcagccagatatttgaccaggaggttcgtgcagtgatcccaagcatcttcgaggggatcaacgcgacggtctttgcctatggggcaaccggcagcggcaagacctacacaatgcagggcacagaggattttccagggctaatccccttggcagcttcgaccatcctagcactctgcactggcacatggtgctctgttgagatctcgtactatgaggtgtacatggagcggtgctatgacctgctggagcctaaagcgaaggagatcatggccttggatgacaaagatggtaacatgcagctgaaaggcttaagctgggtccctgtgcgatccatggaggaattccaggagctctattccataggcgtgcagaggagaaaagttgcccacactggactgaacgatgtttctagtcggagccacgctgtgctctcactcagggtcagcagcactgatgtggtgaaagggaagcttaatctcattgatttagctggtagcgaggacaacaaaaggactttgaatgagggcatacgccttcaagaaagctccaagatcaaccagtcattgtttgcgttgtccaatgtcatttcagctctaaataagaatgagcatcggataccatatagacagagtaaactgactcggttacttagagattctctaggaggcggttgccgcactgtgatgatagcttgcctgaatcctgcagaataccaggagtcggccaacacagtaagtctggcggctcgttcatgccatattgagaatttcaccagttcaagcaaacaagaaactcccaaacttaagatcgacatggaagccaaattacgagcatggttggaatcaaaggggaaaacaaagagcatccaaagaatggatggtcttttctccccaattgccagcaagactccattgtctgtgagccatatgaagcaaccaacatcttcaagaattccttgtagagttaaggcaatggatcaggatggtggtaaaatcaagaagatactttttgatccagtagtccatgttcccactgaaaatataccacgagagcacaggcagacagaagtaaatacaccaaagaaagtggtgcttccttcagttactccatgcaatgaaaaacatgaagcttctctcaggaaagctctttctccaatttcttcaaacatggtgcctgtagagcagcaaatacctgataatggcaattgccccgttttattggagccccaaactccaatagaaaaacgtaatatagtcgaggagactcctggtgcaacaccactagagagatttaatgcactagggtctaacctaaaggaagctctagttcagcagtaccttgaccttttaaatgttgcaaacaaggaagagctacagcagctgaaaggaattggcgcgaggagagcagaatatattctggaattacgggaggactcaccaaaaccattcaaaactcttgaagatttgggaaacatcggcctctcgtcaaagcagatccgagacatccttaagaagacggccactgggatcttcaaatgatgacctcaatggatgatgatgtattggcgctagacattcataggtgtaacagctaaatgactggcttgtgttgctgacggagaagttagttcaatgtttgtgttggtgacttcaggcagtgccctgctgctactttcaactagattcccttgattgtgtgtagaattgcagttgaagtgttgaacaagtaaactatcggagttgtgatgctacttttacgtccaggggagtttttatggaacgagctattcgaacattttatatgatgaagtggagcatcagttttgctcatttgaataatgataacaagcagagtttttatca

SEQ ID NO: 146893 - DNA, 2351 bp, Zea Mays
aaaattcgaacgtcctccgccgccccaacgataccatcttccccagttccccacgccggcacacccaagctcggccactcgtcttgttgcgaccaaacccaaaatccgaacaccctctcgttccccatccccggcgtccggcgctgaccgcgtgatcctcgccccgatggcggccgcctccacacccgcccgttcttccgcgcacctttcgcagccggtgcgcgtcgtgctgcgtgtgcgcccgttcctgtcgtcggaggccgcctcagcgacagcgccttgcgtctccctcctcggctgccaccccggcggtggggtcaccgtccagctcaaggaccagcacacaagtcggagtgaacagtacaaactggatgcgttcttccgtcaagaggacagcgtcagccagatatttgaccaggaggttcgtgcagtgatcccaagcatcttcgaggggatcaacgcgacggtctttgcctatggggcaaccggcagcggcaagacctacacaatgcagggcacagaggattttccagggctaatccccttggcagcttcgaccatcctagcactctgcactggcacatggtgctctgttgagatctcgtactatgaggtgtacatggagcggtgctatgacctgctggagcctaaagcgaaggagatcatggccttggatgacaaagatggtaacatgcagctgaaaggcttaagctgggtccctgtgcgatccatggaggaattccaggagctctattccataggcgtgcagaggagaaaagttgcccacactggactgaacgatgtttctagtcggagccacgctgtgctctcactcagggtcagcagcactgatgtggtgaaagggaagcttaatctcattgatttagctggtagcgaggacaacaaaaggactttgaatgagggcatacgccttcaagaaagctccaagatcaaccagtcattgtttgcgttgtccaatgtcatttcagctctaaataagaatgagcatcggataccatatagacagagtaaactgactcggttacttagagattctctaggaggcggttgccgcactgtgatgatagcttgcctgaatcctgcagaataccaggagtcggccaacacagtaagtctggcggctcgttcatgccatattgagaatttcaccagttcaagcaaacaagaaactcccaaacttaagatcgacatggaagccaaattacgagcatggttggaatcaaaggggaaaacaaagagcatccaaagaatggatggtcttttctccccaattgccagcaagactccattgtctgtgagccatatgaagcaaccaacatcttcaagaattccttgtagagttaaggcaatggatcaggatggtggtaaaatcaagaagatactttttgatccagtagtccatgttcccactgaaaatataccacgagagcacaggcagacagaagtaaatacaccaaagaaagtggtgcttccttcagttactccatgcaatgaaaaacatgaagcttctctcaggaaagctctttctccaatttcttcaaacatggtgcctgtagagcagcaaatacctgataatggcaattgccccgttttattggagccccaaactccaatagaaaaacgtaatatagtcgaggagactcctggtgcaacaccactagagagatttaatgcactagggtctaacctaaaggaagctctagttcagcagtaccttgaccttttaaatgttgcaaacaagttgaccttatgtcacaaaaaatatccagttttttccagtctttatttctaatgtttatctccctttacctatgagcagggaagagctacagcagctgaaaggaattggcgcgaggagagcagaatatattctggaattacgggaggactcaccaaaaccattcaaaactcttgaagatttgggaaacatcggcctctcgtcaaagcagatccgagacatccttaagaagacggccactgggatcttcaaatgatgacctcaatggatgatgatgtattggcgctagacattcataggtgtaacagctaaatgactggcttgtgttgctgacggagaagttagttcaatgtttgtgttggtgacttcaggcagtgccctgctgctactttcaactagattcccttgattgtgtgtagaattgcagttgaagtgttgaacaagtaaactatcggagttgtgatgctacttttacgtccaggggagtttttatggaacgagctattcgaacattttatatgatgaagtggagcatcagttttgctcatttgaataatgataacaagcagagtttttatcatttgataatgtc

SEQ ID NO: 146894 - DNA, 499 bp, Zea Mays
tctgtgtgaaatagtggttcaaaatatgaaaagttggttgaaatttactcagaacagcctctgaaattttttcaccagtgtgttcacgtgtgcatctgatgtctaaaggtctcgagattttttacctgtgttttcacatgtgaatctgatgtctaaagtcttatgcagtggtgcttccttcagttactccatgcaatgaaaaacatgaagcttctctcaggaaagctctttctccaatttcttcaaacatggtgcctgtagagcagcaaatacctgataatggcaattgccccgttttattggagccccaaactccaatagaaaaacgtaatatagtcgaggagactcctggtgcaacaccactagagagatttaatgcactagggtctaacctaaaggtttgtatggttccccttctcattctatagacaagatgtttgctactttaagatttatcaattgacattatgaactttttaggaagctctagttcagcagt

SEQ ID NO: 146895 - DNA, 1887 bp, Zea Mays
cccgctcgttcgcctgcacacgcgccaccccgtcctcctcaccccgcctccctctctcgtctcgcccccattgcgcggcgcgggcggcagcgatcgcgcgcgggggaggcctagacctagttccggaggggcaccgacccaatgcaggggcaggcgtacagccgcctaggcagcttcggcgccgcggcgagcgcgccgccgccgccttcggctccggtgcggcctggggccggcgctggcggggccagccggacgcccgcgaaggctggtccagcgagggccatcccggggaccgcggcctcggcgacggcggcggcgcgggcgggggttgcccaccgtggtggcggcggcgcggcgcggagggtggccagggcggtgctcgcgacactgctgcggaggcaggcggtgttcctcttcgcgccgctcctgtacgtcgcagcgatgctgctgtacatgggctcgctcccgctcgacgccgtgccgcggattatcgcgcgccagccgcccgggtccgtgtaccgcagcccgcagctgtacgcgcggctccgcgccgacatggacgccgacaactctaccggcgcgctagcaactgtatggaggcacacttacaaaggtggcacatggtggccctgcataaacaacatgacaaatggtttacctgaatcaaatggctacatatacgttgaggcaaatggtggtttaaatcaacaaaggacatcaatatgcaatgcagtcgccattgctggttttctgaatgctactcttatcatcccaaatttccatttccatagcatttggagggatcctagcaaattcagtgatatctatgataaagatcactttgtacaacgtctacaaaatgatgttcgagtagttgacgaaattccggatttcatgatggagcgatttggtcataatctcagcaatgtgttcaatttcaagataaaggcttgggcacgcattcaatattacaaagatgttgttcttccaaaattagttgaagaaagagtcatcaggatttctccttttgccaaccgactctcatttgatgcaccttctgctgttcaacggttgagatgcttggcaaactttgaagccttaaaattctctaaaccaattgtatctttgtctgaaaccttagtttctcgaatgagagagagaagtgctgaaagcgatggaaaatatatctcagtgcatcttcggtttgaggaggatatgattgccttctcatgttgtgtttatgacggtggtgatgaggagaagaaagaaatggatgcagccagagaaataggttggagagggaaatttactaagagaggacgggtaataaggccaggagttatcagaatgaatggaaaatgtcctcttacacctttggaggttgggttaatgcttcgtggaatgggtttcagcaataagactgcaatttttttggcgtctggaaagatttacagagcagagaaaaacatggcttctcttcttgaaatgtttcctctcctacagacaaaagagacactggcatccgaagaggaacttgctccattcaagaatttctcctcaaggatggctgctgttgactatagtgtttgtgcccaaagtgaagtttttgtgaccacacaaggtggaaatttcccacatttccttatgggtcacaggagatacttgtatggtgggcattcaaaaacaatcaaaccagacaaaagaaggcttgtcgtactctttgataatccacgtatagggtggaaggcattgaagcggcacttgcttaatatgagagcacacagtgatgccaaggggattgaaatgaaaagaccaagcgaatccatatatacatttccatgtcctgactgcatgtgccgcttgaacagaacagaacactctaaatcc

SEQ ID NO: 146896 - DNA, 1423 bp, Zea Mays
atgtccagccccaaccctccaccttctccccaccacccgcagccgccaccatctccggggctgtcccagccgccgggtgcccagctacaggcaccggcatcccaggggacgaccgcccccatgctcggcgatcacacggcggccgcactggtgcccactgcgccgccagccgacgtcctggcaggctcttcccgcctccaggcattcacgcctcatgagatgacggcggccatcttggagctgggccaggcggtggccgggatccgcgccttcctggcaggaccctatacgccgccaccgcagctacctccgccgcagcaaccgcccgcgtcggcgccctcgtaccaatacgggatgccgccggactgggcaggttctgcttcatcttcttcaccacaggcgtcccagggcctccccatccatatggttcgatttccgccctcgccctcaccactgccggcgtgggcgaccgtgacatcggcgcccgtcttcggatcggccgccatacaaccacacacatttcattttggatacagcaaattcagtgatatctatgataaagatcactttgtacaacgtctacaaaatgatgttcgagtagttgacgaaattccggatttcatgatggagcgatttggtcataatctcagcaatgtgttcaatttcaagataaaggcttgggcacgcattcaatattacaaagatgttgttcttccaaaattagttgaagaaagagtcatcaggatttctccttttgccaaccgactctcatttgatgcaccttctgctgttcaacggttgagatgcttggcaaactttgaagccttaaaattctctaaaccaattgtatctttgtctgaaaccttagtttctcgaatgagagagagaagtgctgaaagcgatggaaaatatatctcagtgcatcttcggtttgaggaggatatgattgccttctcatgttgtgtttatgacggtggtgatgaggagaagaaagaaatggatgcagccagagaaataggttggagagggaaatttactaagagaggacgggtaataaggccaggagttatcagaatgaatggaaaatgtcctcttacacctttggaggttgggttaatgcttcgtggaatgggtttcagcaataagactgcaatttttttggcgtctggaaagatttacagagcagagaaaaacatggcttctcttcttgaaatgtttcctctcctacagacaaaagagacactggcatccgaagaggaacttgctccattcaaggtggaaggcattgaagcggcacttgcttaatatgagagcacacagtgatgccaaggggattgaaatgaaaagaccaagcgaatccatatatacatttccatgtcctgactgcatgtgccgcttgaacagaacagaacactctaaatcc

SEQ ID NO: 146897 - DNA, 1737 bp, Zea Mays
cgcatctggagcttcaccacctcactcgctctcgctcccaccctcgagttctcgctcgctcgagctgtggcggcgagatgcggaaacagatccctcccgtctcctgcctcgtactcctcgcggcggctttcgcgctgctcgccaaggcgtctgcagcgtcaccggcgcaggccgccgtcgcggtcaacgtcacgggcgtcctctcggcgttcccggacctcagcgacttcacgcggctgctggcgtccagccccgtgctggcggagctcgcagggcggtcatcgctgacgctgctggccgtgccaaacggcaacctcccgcagtcgccgtcggcgttcgcggccgcgtcgggcgccgacctcgccgacgtcctccgctaccacgtcctcctcgagtacctctcccacgccgacctacgccgtctgcccgcctccgggaagctggtgaccacgctgttccagacgaccggccgcgccaccgcggacctaggcgccgtcaacgtcaccacagcgggcgcctcccgcctcaccgtcatccggtcgccggcaccgttcccgggctcgaacgccaccgtcctcggcgccatcaccgcggtgccgtacaacctgagcgtgctggcggtgagcggcctcatcgcgccctccgggttcgacctcgcggcgtccgagtcccagccgcccgcggccgtgaacatcacccgcgtcctcgccgacgcgcgcgccttcaacgtggcggcgtccatgctggaggcgtcgggcgtggcggccgagttcgaggacgacgagcgcggggccgggatcacggtgttcgcgccgaccgacgacgccttcgcgggcctcccggcgggggaccggctccagtcgctccccgccgaccgcaaggccgtggtgctccgcttccacgtgctccactcctactacccgctggggtcgctggagtcgatcgtgaaccccgtccagcccacgctggccaccgagttcagcaacgccggccgcttcaccctcaacatcacccgcgccaacggctccgtggccatcgacaccggcgtcgtgcaggccaccatcacgcggaccgtgttcgaccagaaccctgtcgccgtcttcgccgtatccaaggttctcctccccaaggagatgttcacccgcacagccgccgcctccatcgtggccaccaccgcctccgcgtcctcccccccaccagccgcgacagccccggaggcctccgagagcgcgcggacgccgccgacaaagctgtcctccccacccgcgctccgcggcggcgggcaggactacgccacggcgccggcgccggcgcgagggatcgagtggtggtgtatagcattggtgtatctactcccacatctggtatgagatccgggactccgtcagtccaccgctgttctcaatttttgccttctgttttctcttctctcttctttttcttatgtgggttttgcaagaatctgtacaatgttgactctgtgaggtgaggtgaggcctgagggaggtgaagaaggagaagaagaagattcagctgcgaaaacaaagaaaatgcagcgaccttttaagcaagaagaaacagaattggttattgttggccatcatcaaaggggaaataacagtaccgccctgtaaaaatccaatcaaatccattgcatccgacaattgctttaccatactcgtgtctcgtgtgtgctacattgcagttgcttcagccagctccatttttgccctgtcg

SEQ ID NO: 146898 - DNA, 682 bp, Zea Mays
cattccgctagggtttctcctcggtagcagctggctcacttctccaggaaagtgttcgtcctcatggcgccgccgcagccgaagtcgggcctcttcgtgggcatcaacaagggccatgtcgtcaccaagcgcgagctgcctctgcgcccgtcccaccgcaaggggaaagcaacgaagagggtgtccatggtcaggggcctgatcagagaggttgctggctttgctccttatgagaagcgtatcaccgagcttctgaaggttggcaaggacaagcgcgctctgaagcttgccaagagaaagcttggaactcacaagagggcaaagaagaagagagaggagatgatgggcgtcctcaggaagatgagatcggctggtacgcacactgacaagaagaaataaagcatttcaagttcatgaatgtggcagccagagattatcaactgtgttttttccctacctctagaaactagacatggcaaagtatttttgaccgaaacattgtttgttagtaatgtattgaaccacctcgtggtattttgccccaacttccaatgcatcaatggtttgttaatcttttgctatgctatttcattaccgtgaattttatgttccattagatatcataggttgacctgttggttgtacaattactttaaaaactatagtcataaaagacttagtg

SEQ ID NO: 146899 - DNA, 958 bp, Zea Mays
cattccgctagggtttctcctcggtagcagctggctcacttctccaggtaaggcaagtccccattcccgcgccgccgccgtcgccgtcgctgatctgaaacccagcgtatctcctgcttatcctcggttgtttgtccccgcgcacaggaaagtgttcgtcctcatggcgccgccgcagccgaagtcgggcctcttcgtgggcatcaacaagggccatgtcgtcaccaagcgcgagctgcctctgcgcccgtcccaccgcaaggggaaagcaacgaagagggtgtccatggtcaggggcctgatcagagaggttgctggctttgctccttatgagaagcgtatcaccgagcttctgaaggttggcaaggacaagcgcgctctgaagcttgccaagagaaagcttggaactcacaagagggcaaagaagaagagagaggagatgatgggcgtcctcaggaagatgagatcggctggtacgcacactgacaagaagaaataaagcatttcaagttcatgaatgtggcagccagagattatcaactgtgttttttccctacctctagaaactagacatggcaaagtatttttgaccgaaacattgtttgttagtaatgtattgaaccacctcgtggtattttgccccaacttccaatgcatcaatggtttgttaatcttttgctatgctatttcattaccgtgaattttatgttccattagatatcataggttgacctgttggttgtacaattactttaaaaactatagtcataaaagacttagtgagtgcatctaaggaactcttcatacaatccaatagacgctggtcgtttatatgggttgtataggtggaatgttatattgttggatctagagaatttccttaatcaagactagtcagttgctcgtgcgttgcgacgactcacaacaatacacacgtaaactatccaccaaaaaagat

SEQ ID NO: 146900 - DNA, 1048 bp, Zea Mays
cattccgctagggtttctcctcggtagcagctggctcacttctccaggtaaggaaagtgttcgtcctcatggcgccgccgcagccgaagtcgggcctcttcgtgggcatcaacaagggccatgtcgtcaccaagcgcgagctgcctctgcgcccgtcccaccgcaaggggaaagcaacgaagagggtgtccatggtcaggggcctgatcagagaggttgctggctttgctccttatgagaagcgtatcaccgagcttctgaaggttggcaaggacaagcgcgctctgaagcttgccaagagaaagcttggaactcacaagagggcaaagaagaagagagaggagatgatgggcgtcctcaggaagatgagatcggctggtacgcacactgacaagaagaaataaagcatttcaagttcatgaatgtggcagccagagattatcaactgtgttttttccctacctctagaaactagacatggcaaagtatttttgaccgaaacattgtttgttagtaatgtattgaaccacctcgtggtattttgccccaacttccaatgcatcaatggtttgttaatcttttgctatgctatttcattaccgtgaattttatgttccattagatatcataggttgacctgttggttgtacaattactttaaaaactatagtcataaaagacttagtgagtgcatctaaggaactcttcatacaatccaatagacgctggtcgtttatatgggttgtataggtggaatgttatattgttggatctagagaatttccttaatcaagactagtcagttgctcgtgcgttgcgacgactcacaacaatacacacgtaaactatccaccaaaaaagatctcaatattttttattgattgtctctgctctccgcataattttttttttgatttgactaagtgagtcgacatcgtgataaaggaaaggccatgtagacagtcaatattgagccatcgaatgggtaccatagacagcaaatcagggatcccatccctcaccttccccacttccaaggtttcgtaga

SEQ ID NO: 146901 - DNA, 224 bp, Zea Mays
acccaccaaggcgacacaacaacaccaccaactctgtagcatatgccgactgctgtcgcgctacaggctttggttgtccaatatctcagatctagactcgtcatccccaagataacctacgtgttaggcaccatcgtgtcctcctcggcgacacgcacgaagaaaagccaggagcaagatcgacttgcccgtacccacatcgacgagcatcggtcggctcgcgg

SEQ ID NO: 146902 - DNA, 2113 bp, Zea Mays
ggaaaccgtgtttcgacgggccgcagtgggcagtggcttggcccatcgaacccacttgccactcacttccacctgaactttgccctgccttctctcgacgactcccctgtccccgccgccgccgccgccgcaaatccccttccgcgtctgtctggcctctggggcttctaggttagcgcgtgcgaccaccatggccgaggaggtccaggctccactttccgccaccatggcgaaggaggcccagtcgccgccgtccgcaaccatagcggaggcgacggcgccgccgcagctcttattatttaactcctttacgaagagggaggagccattccagccccgggtagaggggaaggtagggatgtacgtctgtggcgtcactccctacgactttagccacatcggccacgcgcgtgcctacgtcgccttcgacgtcctctacaggtaccttaaattcttggggtatgaagttgaatatgtccgtaatttcacggatattgatgacaagattattaagcgtgccaatgaacgcggtgaaacagtaacaagcttgagtagccagtttatcaatgaatttcttcttgacatgactgagctccagtgcttgcctcctacctgcgagccacgggtaacagaacacattgagcatattataaagttgataacacagataatggagaatggcaaagcctatgctattgaaggagatgtttacttttcagttgaaagttttcctgaatatctcagtttatctggaagaaaatttgatcaaaatcaggcaggtgcacgggttgcttttgatacaagaaagcgtaatcctgcagacttcgcactctggaaagctgcaaaggagggtgaacctttttgggatagcccttggggccgtggaagaccaggttggcatattgaatgcagcgcaatgagtgctcactatttaggacatgtattcgatattcatggtggggggaaagatttgatttttcctcatcatgagaatgagcttgcacaaagccgcgcagcttatcctgatagcgaggtcaaatgctggatgcacaatggctttgttaacaaggatgataaaaaaatggcaaaatcagataataactttttcacgattagagatatcattgctctttaccatccaatggctttaagatttttcttgatgcgcacacattatagatcagatgttaaccattctgatcaagcgcttgagattgcatctgatcgtgtctactacatttatcagactctatatgactgtgaggaagtgttagctacatatcgtgaagagggtacctctctcccagtgccgtctgaggagcaaaatctgattggtaagcaccattcagaattcttgaaacatatgtcgaatgatcttaaaaccacagatgttctggaccgttgcttcatggagctgctgaaggccataaacagcagtctgaatgatttgaagaaactgcagcaaaaaatagaacagcaaaagaagaaacagcaacagcagaagaagcagcaacagcagaagcagcagcaacagaagcaacagcaattgcaaaaacagccagaagattatattcaagctctgattgcactggaaacagaacttaaaaacaaattgtctatacttggtctgatgccatcttcatctttggcagaggtactgaagcaattgaaggacaaatcattaaagcgagcagggctgactgaagaacaattgcaagagcagattgagcagagaaatgtcgcaaggaagaataagcagtttgagatatctgatggaatcaggaaaaaccttgctaccaaaggcatcgccctgatggacgaaccttctggtacagtatggagaccatgcgaaccagagcggtctgaagagtcatgattagctcactgactcaacaagtgatggcggtgtaaaatgagatttttgcctgagggcagttatcgcattttgaagactaacaaaaatcgccatctctggatgtggtattctacagggtaggggttccaggttgactcaccagttaaaacatgcatttctggttgtataacaagcaatgaaccccatatatatacttgacagttgactcctttggaggtttggtttttagttttggat

SEQ ID NO: 146903 - DNA, 1406 bp, Zea Mays
ataggatttttagcagctgcgtgatatttcttctatgttcttatctcttctctcttctcagcctcatccgtcgccagatttttcttacgagcgctcgactttctctccctgagctccccagccgcgctcggatttatctgctgccgtttcttcatgtctgcagctggaatttttaccatcgttatcctctcagttcttcttctcccttatctctcccggtcggccaagcgcttgtgggatttttctcgctgcccagcttgctccagctcggtgccaagccgccggaaaaatcctgccgcccagccgccgttcggtggtatttattccccagcccgtcgtgttcttcgctgtccccatgccgcaactccaccgtggggctgctcctgccgcgcccttgttccagctcctatggtggcgctcgatctccagtcgtgccgtgatttcttgctcagactgcgcccagctctgcccagcgccgcggttgccgagctcgccctgggtcgcgcccccttccccctgttgcagctcgcgccctgctcttctactcgtttcttctcgcgtggagctccctctgctcagtcctgacctctgctcgcgtccagccatggcgcgctggctccctgccgcgcccagctctagcactcggtgcccctcccatggtgtcctagccgaactcgcccagccgaagccgcccagctggtttcctgcgcgcggtactctctccggcgtccagttttctccgcgccgaagctccctccgcgcgctgcccagcaccagttcctctgtggccgcgcgcacaaatccctgctcgccggcgtgctctggattcagccatggagcatcccctgcgtccctctctattcgctgaccgagctccatctccttgctgaccatggcgccctgctctgctcgctaatggagttagacccgtgtcatcatcattcttaccatgggtgtcgacatcaatcgtctcgacaaccaccacatccacgactccaccgttccaataattttgccgcatcgccttttaaatccgagtccccgtccgtaggatcgtcgttgacctcacaacttcagctcgagttaattatggacgataaataatcgtgtgatgcggaagacgacccaagtcgactccaagcgtgggctaatccgcaggatgaagctgatggaccaacctgaagatggttaaatcaagcaagtgctcagtcgagtgatactcgtcaagtgaacatcgcctaacaaacactaacctagtgttatccagaatgtgcattaggtttataggagttgcttggaaaccctttgatgcattgccttccttgatatccatacctttatagatactcttggtgaagtatcaaaaatatgatttacaaaaatgcttagccctgcttaaatcttgt

SEQ ID NO: 146904 - DNA, 904 bp, Zea Mays
agtccggaactctctcccaagcttcttataaatgctccaacctgttgccatctactgtcttcctcccgattccaagctgctctcgtccctagaaataaagcagctcctccgcggggcggcgaactactacccatcgccaaaaccctagccccgatccggtcgaggagcactacttcttggcatggcgggcacccctagccaggcaagcctcctgctccagaagcagctcaaggtgatggaggctacttcaatgcaataatgaccttcccccagaactatcccaacagcccgccatcagtaagatttacttctgggatgtggcatccgaatgtttatccggatgggcgtgtttgcatttctattcttcatccacctggtgaagatcccagtggttatgagcttgcaagcgaacggtggacaccagtgcacacggttgaaagtatagttctgagcatcatttcaatgctctctagtccgaatgacgagtctccagcaaatattgaagctgccaaggattggagagagaagcgggatgagttcaagaagaaggttaggcaatgtgtccgcaggtctcaggaaatgctgtgaaggaggaacatgggggagttgaatgagtctgcaatcggtgtgctgcaattcacaaccaattatctcatgtcagcattcttttgctttcccctgtatattttttcaaccgatgtcactcgtatagtggtgttgggtctctttagacaaactcgggacggttgcttatcctaaaaattcgattgtactgcgtggcatgaaatgatcgattcgaagaatattttgaacatgctgccacctaatcaaaaaatttcatgtttaacatcataaggaataactgttgcttattctaatgattcgattgcattgcgtgattcta

SEQ ID NO: 146905 - DNA, 915 bp, Zea Mays
agtccggaactctctcccaagcttcttataaatgctccaacctgttgccatctactgtcttcctcccgattccaagctgctctcgtccctagaaataaagcagctcctccgcggggcggcgaactactacccatcgccaaaaccctagccccgatccggtcgaggagcactacttcttggcatggcgggcacccctagccagtgatggaggctacttcaatgcaataatgaccttcccccagaactatcccaacagcccgccatcagtaagatttacttctgggatgtggcatccgaatgtttatccggatgggcgtgtttgcatttctattcttcatccacctggtgaagatcccagtggttatgagcttgcaagcgaacggtggacaccagtgcacacggttgaaagtatagttctgagcatcatttcaatgctctctagtccgaatgacgagtctccagcaaatattgaagctgccatgcctttggtttctgaagttatacacgactttgccttgcagaaggattggagagagaagcgggatgagttcaagaagaaggttaggcaatgtgtccgcaggtctcaggaaatgctgtgaaggaggaacatgggggagttgaatgagtctgcaatcggtgtgctgcaattcacaaccaattatctcatgtcagcattcttttgctttcccctgtatattttttcaaccgatgtcactcgtatagtggtgttgggtctctttagacaaactcgggacggttgcttatcctaaaaattcgattgtactgcgtggcatgaaatgatcgattcgaagaatattttgaacatgctgccacctaatcaaaaaatttcatgtttaacatcataaggaataactgttgcttattctaatgattcgattgcattgcgtgattcta

SEQ ID NO: 146906 - DNA, 1079 bp, Zea Mays
agtccggaactctctcccaagcttcttataaatgctccaacctgttgccatctactgtcttcctcccgattccaagctgctctcgtccctagaaataaagcagctcctccgcggggcggcgaactactacccatcgccaaaaccctagccccgatccggtcgaggagcactacttcttggcatggcgggcacccctagccaggcaagcctcctgctccagaagcagctcaaggatcttgcgaagaaccccgtggatgggttctccgcagggcttgtagacgatagcaacgtcttcgagtggcaggtcaccatcatcggcccgcccgacaccctatatgatggaggctacttcaatgcaataatgaccttcccccagaactatcccaacagcccgccatcagtaagatttacttctgggatgtggcatccgaatgtttatccggatgggcgtgtttgcatttctattcttcatccacctggtgaagatcccagtggttatgagcttgcaagcgaacggtggacaccagtgcacacggtggggcttcttgttcagggcacataaatgtttgcttgctcttttcctatgtgggggtggtagtctgttggggttgaaagtatagttctgagcatcatttcaatgctctctagtccgaatgacgagtctccagcaaatattgaagctgccaaggattggagagagaagcgggatgagttcaagaagaaggttaggcaatgtgtccgcaggtctcaggaaatgctgtgaaggaggaacatgggggagttgaatgagtctgcaatcggtgtgctgcaattcacaaccaattatctcatgtcagcattcttttgctttcccctgtatattttttcaaccgatgtcactcgtatagtggtgttgggtctctttagacaaactcgggacggttgcttatcctaaaaattcgattgtactgcgtggcatgaaatgatcgattcgaagaatattttgaacatgctgccacctaatcaaaaaatttcatgtttaacatcataaggaataactgttgcttattctaatgattcgattgcattgcgtgattcta

SEQ ID NO: 146907 - DNA, 1007 bp, Zea Mays
agtccggaactctctcccaagcttcttataaatgctccaacctgttgccatctactgtcttcctcccgattccaagctgctctcgtccctagaaataaagcagctcctccgcggggcggcgaactactacccatcgccaaaaccctagccccgatccggtcgaggagcactacttcttggcatggcgggcacccctagccaggcaagcctcctgctccagaagcagctcaaggatcttgcgaagaaccccgtggatgggttctccgcagggcttgtagacgatagcaacgtcttcgagtggcaggtcaccatcatcggcccgcccgacaccctatatgatggaggctacttcaatgcaataatgaccttcccccagaactatcccaacagcccgccatcagtaagatttacttctgggatgtggcatccgaatgtttatccggatgggcgtgtttgcatttctattcttcatccacctggtgaagatcccagtggttatgagcttgcaagcgaacggtggacaccagtgcacacggttgaaagtatagttctgagcatcatttcaatgctctctagtccgaatgacgagtctccagcaaatattgaagctgccaaggattggagagagaagcgggatgagttcaagaagaaggttaggcaatgtgtccgcaggtctcaggaaatgctgtgaaggaggaacatgggggagttgaatgagtctgcaatcggtgtgctgcaattcacaaccaattatctcatgtcagcattcttttgctttcccctgtatattttttcaaccgatgtcactcgtatagtggtgttgggtctctttagacaaactcgggacggttgcttatcctaaaaattcgattgtactgcgtggcatgaaatgatcgattcgaagaatattttgaacatgctgccacctaatcaaaaaatttcatgtttaacatcataaggaataactgttgcttattctaatgattcgattgcattgcgtgattcta

SEQ ID NO: 146908 - DNA, 356 bp, Zea Mays
cgcaggcagcagtcaagcggccaacctctgcttcacaccgtacctacctgcgagccacgcccacgccgcagcccccgatgtcgtcgcagcgcccgggccgccaccagcgccgcgcgtcgcagagcgtgttcgtgctcccagagaacctggcctccctcgacgtcgacgcggcggccgacgcgggcgccaaggccggcgggccagaaggcgccggcgccggcgccgagcagcaggcgaggccacccgcggggcgtcaccaccgccgcgccatgtccgtggccgcggccgtggcctccagggagcttgagctgatcaaggaggacctcggcagctacaactacaaggtcggcgcctga

SEQ ID NO: 146909 - DNA, 103 bp, Zea Mays
tttttttgttcatttctattcttttatgcatttccttcccatacacatgccaattttctcacaatatcttaagagtgctctgcaccaactgccgaaacaaaaa

SEQ ID NO: 146910 - DNA, 1823 bp, Zea Mays
acacccaccagcagactggcgccaatctcacacttcactcccaccgatttgatttctccctcatcctccgcccgcctcgccgcggccaccgcttcctccatgtccgcgcccgtgggccggcttctactgctggtctccgctgtcgcggtaggcctggcgctccccgtggcggccgagatcaagaaggagtccttcagggaggacccgcgctcgtccatcatgttcgagaaattcggcttctccaggtccggcgaggtccggatcatcatctcgggcgcctccgtctcctcccccgtcgcgcgggccgacctcaagcagctcgggttcttcctcgtctccgacgagtccctcctcgacgccatcgacgaggcgcgggaggaggggccgacgccggagaagctcgtcgcggcgagcgacgacgaccccgacgacggtgccgctgccgggtgcgtgctcgacagccccagcccctacgtgaggaagctcttcaccttcaagaacatgaagggcgggcactacaacaggtccttcccggtgacccgccccgacgagtacgcgctcttcttcgccaactgcgccccggggtcgctcgtctccatgaccgtccgcaccgagatgtacaacgtcggcgccgacggctccaaggactacctccccgtcgggcaggcgccgctgcccgccatccacggcgtcttcgcgctctgctacgccgcgttcctggccgcctgggggtacctgaccctctcatccgtctccgcgcagcagatccaccacctcatgtccggcctcctcgccgcgcgcctgctctactgcgtctcggccgccgaggaccagcaccacgtccgcgccacggggacgccgcacggctgggaccacgtggccttgtacctgttccagctcgtgaagggcgtggtcctcttcgcgctggtcggcacgggctggtgcttcctgaagccggtcctgcaggggcgggagaagaaggtgctcgtggccgtgatcccgctccaggtggccgcgaacgtcgccgccgcggtggtcggggaggccgggccctccctgctgctgcaggggtgggcgacgtggtggaaccggaccctgctcctcgtggacgtcgcgtgctgctgcgcggtgctcttcccggtcgtgtggtcgcactcgcaccgggagacgtcgtccaagaccgacggcaaggcggcgcgcaacctctccaggctcaccctgttccagcggttctacgccgcggtgatcgggtacctgtacttcactagggtcgtcgtgtacgcgctcaggacggctgccagctacaggtaccggtgggcgagcgtcttggcggaggagacggccgccctggcgttctacctgttcatgttccacacgttcaggccggccgagaagagccactacttctgtctccatgacgacgacgacgacgacgagatggtgctccgagaagaggaactcgagctatgaacagatagatgcagcaatcagcagcagccccatgtctcgtttgaaccatgctgtatattctgcgtgtggtaatccgtcctcgtcatttcgttcggcacattttgactttgttgtgccaggaatcaacgtgacgctctgcggttttctacgtactgacgaccagcatgtgtagaaagaaagtggcacgcgccgttccttttccctgccccaccttgtcctatgtgtcttctgaaattccctgcgacgctttgctgcgtctgcgttattattgtctcacggtacgttgtggtcacacacacatgtacacacgctcgcgtgattaaagaaggcacaaagcatcgctagatttattt

SEQ ID NO: 146911 - DNA, 2562 bp, Zea Mays
gcaccgatgagctcgggggccatcggggcctcggatcctgggggtggcgagacgaagccggtggcgggcggtgacgtcacgacgtcggaagctgcgggcgaggtgcctgctttcgccgccgatgtgaaagtggaggggaaagctacgttggcgacggatgtggatcgtgaagggggagatacggcggtgagcgacccgctctacgcgaacgagtcagctggtatggttggtgccgaaggccacggagatgagcccgcggagggcctggaggcggtgaatggtgaggaggagatgctagaagcaggagctcgtgatctgctcactgagacggagaagaatccggttcttgtggtacatgtgcctgctgctgctgctggtggtggttctgccattcctgaacatgctgaagccgaatctaacaaagttgaagatcatgtaaacgtggagcctgggacaaagaataatgaaagtgataatggcatagctcattttgataaggaaatacagaacaatgtgcctgatgacatagaggaaagctccaaggaacatgaaggtgatggagcacctgtagttgaccagacaaataatgcatctgaaatgctcccacaaaccggagagcagtttcctgatgttgaaaatagcacggacagcaacctagaggctgctagtctgggtagtgtggatcagggtgctagatactgcctgcctcctcatgataaaggcgggtttcaagttgctgatcttgtctggggtaaagtgaaaagtcatccttggtggcctggtgaaatttttgatccatcagatgcatctgaattggctctgaaacatcagaaaaagggcagccacttggtagcttattttggtgacaacacttttgcgtggtgcgatgaatcccagttgaagccttttgtgacaaattattcacaaatggagaaacagagcagttcagatgcctttgttgggtcagttaataatgcacttgaagaactgtcaaggcggatactgtcaggtatgagctgctcttgtttgccagaagagcttgctgataatggcatgtcctatacagttgataatgctgggctcaaggatggagttacttgctctgcagttaatcggcctgaaatcttaaactgtttcagtccagaaaaccttcttcattatattaaggagttagctctatttcctggccaaggaggtgatctgttggagttagttatagcatgttctcaacttacttctttctatcgatctaagggatgtcctgaacttgcatcatttcaaactggcgatgcgtgggttgaggatggtctggattgtacagacactttgtccacccagaatgtaatggttgaggaacctgtgattaatgaagtgcatcctactcaagataagcccaaaaggggcagggggagacctcggaaacaaaaacctggtggtgaccaggtggtgatggagaaaaggagcatatctaatcaggtcaatgatactagctacaatgagaaacaagtgggtatggactttgataactatggcaacctacagaacaagaacaaaagaaactttgaatcatttgaagattcagagaagtcatcagctccaactggtggtagttctttcaagattggtgagtgtattcggcgagctgcaagccagctgacaggatctccgtccattatgaaggctcagaatgctgctgaaggagagaatggggaatttgatatctttagtgatgatgctggtgatgaacttactgtagagaaacgagcaaaaaggagaagtctgcacaggaatcacactgcagatcccaaggaattactatcacagctatgcttggttgcaacagagccaatgaatggatataatttctcagtaatgataatcagttacttcagtgattacagaaactatattgtttctactactactgaagcaaacatcgttgataaaggtacatctaggagagggaggaagagaaaagaagttttaccttctcctgatgtagagacaacagatcatatgcaggactcgtattggtccggattgagcttgcataatcacccaatccatgacctcagaaaagagagtcccactacaaggccaagacgtaggcggagatcctcaagtcatgcatatgtacctttgtcagaacttggggagccagtacctaaaaaacagatacaagtgatggaaagatctatcatccatgttgacgagaagatgattgatgagttgaagcccactgcacttgttttgagctttgccaggtcagcttctattccttcagaattggatcttgttaagatgttcagtcgctttggtccactgaaagaaagggaggcagaagtacacagggaaacaaatactgttaaagttgtcttcaagaaacgtgccgatgctgaaagggcttttagcgctgctggcaagtatggcacttttggaccttcgcttcgaagttaccgtcttgtcagtatgccattttctctagagacacagtcagcaaacaatcctgtgaaacatcctgaaaatcatggcatggagattccaggtaaacattcttacaat

SEQ ID NO: 146912 - DNA, 3253 bp, Zea Mays
acatttgtcagtcaagacaggtttgatgaagctggaaatattgacgctgagctaattgaccatgttaatcaaattgggaaagctgcacaagctgcatctgtatctgaagagtcacgagatgttgagcaagtttacactcaaaaggaagtgtcagccaatgatctacccacagagacagaaatcttaaattctgatgctataacaaaagagttgcctcagaatgctccagataatgtggaaactgatatagtcgaagatccaaaacagagtcacaattcaagagataatgccgtatttgaagcagtcattgaagcaccgagtactgcacaagatcatacagaggaggatactgggaatgcagttccagaagagcccatggtatctcctgagttacaaagtcaaacccctggtgatctacccacagagacagaaaccttacattctgatgctatattaaaaaagttgcctcagaatgctccagataatatgcaaactgatatagccgaggatccaaaacagagtcacaattcaggagataatgccgtatttgaagcagtcactgaagcaccgagtactgcacaagatcatactgaggatgatactgggaatgaagttccagaagagcacatggtatctcttgagttacaaagtcaaacccctggtgatctacccacagagacagaaaccttacattctgatgctatagtaaaagagttgcctcataatgctccagataatatgcaaactgatatagccgaagatccaaaacagagtcacaatccaggaggtaatgccgtatttgatgcagtcactgaagcaagaagtactacacaagatcatactgaggatgatactgggaatgaagttccagaagaggacatggtatctcttgagttacaaagtcaaacccctggtgatctacccacagagacagaaaccttatattctgatgctatagtaaaagagttgcctcataatgctccagataatctgcaaactgatatagccagagatccaaaacagagtcacaatctaggagataatgctgtatttgaagcagtcactgaagcaccaagtactgcacaagatcatactgaggatgatactgggaatgaagttccagaagagcacatggtatctcctgagttacaaagtcaaacccctggtgatctacccacagagacagaaaccttacattctgatgctatgataaaagagttgcctcagaatgctccaaatagtatgcaaactgacatagctgaagatccaaaacagagtcacaatccaggagataatgccgtatttgaagcagtcactgaagcaccaagtactgcacaagatcatactgaggatgatactggtaataaagttccagaagagcacatggtatctcttgagttacaaagtcaaacccctggtgatccacccacagagacagaaaccttacattctgatgctatagtaaaagagttgcctcataatgctccagataatatgcaaactgatatagcggaagatccaaaacagagtcacaatccaggagatgctgtatttgaagcagtcactgaagcaccaagtactgcacaagatcatactgaggatgatactgggaatgaagttccagaagagcacatggtatctcctgagttacaaagtcaaacccctggtgatctacccacagagacagaaaccttacattctgatgctataatgaaagagttgcctcagattgctccagataatatgcaagttgatatagctgaacatccaaatcagagtcacaattcaggagataatgccgtatttgaagcagtcgctgaagcaccaagtactgcacacgatcatactgaggatgatactgggaatgaagttccagaagaggacatggtatcttctgagttacaaggtcaaacccctggtgagaaactagtggggcaatctgcaactgaacagatggtgggatctgaagatccaaagccgcaagccgaaaattttgttgctgaacctgttgtgctgggtgcagtcgggcaagtagaaattgaactggaatccaaaactactgttgaagtgtcaggcgaacaaggctatagtattgagcagactgttcaagtggaagctctaattgaagcgtcaggtggacaacttgaggtgggaaggcaaattccagaagatgaatctattgcttgtgcaactactgagcactctatggttgtcgatgaaactgtggaggcaaaagtggtactactcgatgagagtatagagaataatgctgctgtcataggagtagtcgaggagactgctgaaggtgaaactaaggaggaagcatcagacgagaagggaaaaatagaaaataatgaagatgctgacaaattagcaccagccgggaaggggaaaatagaaaataatgaaattataattgacgcaccagatgagaaaacagaaaataaagcagatgctgacacaccagctggggagaccaaagaaggtgaaattacagtagaggaaacagatgagaaaatagaatctaaagttactgctgaacctgtaatcggggagacaactgaaggtcaaactgcagctggagaaccagttgaagaagctagaacagctgaggacatggtagaagatgttaaggtgctagatgataaatctacagcagctgagaaacctgtagagaatgccacagttgtggcacatgagaattcgactacagttgagaatactctgaaggatgcgattgtcgcgccaccagatgcaaataccaccaacgccgaaaaaactgctattggtgccacaattgaaacacaaaatgaggacgctccagcggagaggactatagaggatacctcggttgaggcaccagatgtacaagcaggtgcaagtgagtaaaccagcttagcgatcctttgcattcctgtcagtttctgttgatatcgacgtagtttgctcaactgattctcttgtctagatgatgtgttctgtatagaaaacctggaaccactttagcatcataaggctgttaggttttaaataacttgggcatctatattttgccccttatttttcctatataaacttcatctagttgtattcgatgcgcacgtgtgagtttgtcataaacacaattttctcctatatgtcagttcagtgctcaggcgatcagtgactgagtggaagtctttgggctatctacttggatcaaatgattctggtaccatttgtcgtctgtaaccaactgtgttctcgaatcctt

SEQ ID NO: 146913 - DNA, 2797 bp, Zea Mays
atgctgcagcgtgcggctagcaacgcctactcctggtggtgggcatcacacatccgcaccacccagtccaagtggcttgaaataactgtcgttgagatggaggacagagtaaaggccatgctcaacctcattggggccgatggcgattcgttcagcaagaaggcagagctctatttcaaaagccggccagagctcatcaatcacgtggaggagatgttcagatcctatcaggcccttgccgacagatatgaccggatatccagtgagctgcacaaggccaaccacaccattgccaccgtgtttccggatcaggtgcagttctcaatggaagagggggatagtgaggggttttctaaggcaataggtgggattgatctcagcaacttcaagttccctgcactggaaggcttgtccgtgggctcaggctcacagagcgcaaacaggggcaccagtccggtccccaagaggggggcccaggcacaccggaaggtcacccccaacatgaccaaggagaaggcacaggaggagatagacaagctgcagaaacagatcctggcattacagactgagaaagagttcttgaagacctcttacgacagcgcactaggaaagtatctagacattgagaaacaggtggcccaattgcaggatgaggtctgcaatttgcaggatgctttcagcaccggtgtagccattgaagacaatgaagctcgggcattgatggctgcacaagccattatgtcatgtgaggatacgttggtgaatttacaggaccagaaaaacaaattgactgaagaggcggaggtggagctccgacgagccaatgaggcaattgaaaagctgaaaaccttcaagaacgaatgtggactgcctcatgtgcaaatggatgggcatgatcaccatgaaatagaactggtccatgcactgcccttcgaggattctgatgattctgcgctgaatggaagcaggcttgacctccaggaaatatgtcaaagagtcaaagaaataattgaatcttaccctgagctatcagttgcggaattagcagataaagttgaccgacttgtggaaaaggtgatcagccttgaacttgccactacttcacagaatgctcagatcgatagaatgaagactgagatagatggccttcacgagcgcctgcatgctttggagcaagacaaggtggctttggttgttgattctagtaacttggctgacgggttgaggaaagttgaagaaatgctgcaagaagtacaacaaatttggaagtccgtacaaaatggtttcgagaacatttgtaaacaaatgactgaagccgcccatgaactaactgaattcgtcgaaacattacatgctcctgagcaagaaagcagtgacttcgtggattcatcgcgagactccaaacacgatacttctctggaagattactcgggactaacaagtctgtctgtgcaaaacgagccatccaaatctttacatgacactacaaatgaaactgataaacatgaagaaaccttagaagatcaagcccaaaaagagctagttccaaaagaatctgaagttgagggtaagattctattagaagactatgcatctgtacttcagagctacaaagatacagagcagaagctttcagaaattgagaagataaataaagattaccatcttgaggcaatgtcagaactgaaggaacttaagagtgccaatgcaacaaaagatgaggagatccactcgcttaggcgcatgctacgttctttgcggaaaaagatgagtgcttctattattgagagtatagagaaggcagaagaaacatccaagataagcagcagtcctactacagaagacatagagattgccaagtcagaagaaacatccaagataagcgccactccaagtacagaagacaaagagattgctgagatagaggaatacattaagcaatggcaaattaatgactcactggcttcttcggttgcagaggagaaatttagagcagaaattgatagggtattaggggagaacttggacttctggttgagatttagcacatcatatcatcaaatacggaatttccaaatatgctttgacatgttgaaaactgagatgtacagattgactgatgaacaggaagacgggggaaattacggctttgctggtagttatcaggtagcaaagctggaatcagcagtactagaaaagaaattcagggatctaaatacagatcttcaagtttggattgaaaagaacgtgctattgaaaggagaggtagaaaacagattttcgtcactatgctgcatacaagaagatatatcaaagatcacaactctggataaatgtgatgaaattcacttcaacccttttcaagctgcaaaattccaaggagaggtgcttaatatgaaacaagagaacaacaaagttgctaaggagctagaagctgggctggatcatgtaagaggtctccaagtggaggttggaagggtgctcttgaagctcagagagaatctcgaggtatctctagaaagaagccatcgagcccaacaaaacttccggaacctgtcaacaaaagctggaattccccttagaacttttctgtttggctcaaagacaaggaaatcatcattcttttcgtgcatgagtcctggggtgcataagtaacacagtggttcaaaggttgggcgtagatgattactgacaaattgttttttgacatttaatcataaagagatctcagtgtacatgacaattcatatgtgataattgcctttaggccttaaatgtaaaagatcctcatctccta

SEQ ID NO: 146914 - DNA, 3003 bp, Zea Mays
acaacgcagatacggacactctcctactccgccctccccctgcgccccgcgcagcgcacgcccagcccagtccagccggaggagaccagatcaaagcgccaccgccacgccgtactctagctaatcccgccgccgcgccggggtcgcgaggaggaggatgaagcccaagagcctcccgttcatcgccttcgagcacaagcgggatgcatacggctttgctgtgcggccgcaacacctgcaacgttacaaggagtacgctggcatctacaaggaagaagaggaggagagatctgacaggtggaagaattttctggagaggcagcctgaatcatccggacaagatgctggtggtaatgctaaggatgatggttccgaatcactgcatgagaagacggtagttggaccacgaaagattgaaatatggacgccaattagaccgtccctgagcaacatcgagcagatgatgagcttgcgcatcgagaagaagcaatcctctgctagcaagcagcaagcaaaggatgtaatccatcctgtgaaagttgaggagggcaagttgtcagaggattcagacgacgagttctatgatgtagataaggttgatccgagccaagaagtgcagccgagcgatactgggaatgctgatgttggaagcaggagtcaagaagaaaattacatttcaaaggaagagttggagtgtctagtccatggtggactaccgatggctttgaggggagagctatggcaagcttttgttggtactggagctcgtagggtagaagggtattatgataatctggcagcagagggtgaattagataacaaacgttcagattctcgaacctcggaaggtgttcacgagaagtggattggacaaatagagaaggatttgcccagaacttttcctggtcatcctgctttagatgaggatggaagaaatgctttgagacgcttgcttatagcttatgcgaaacacaacccatcagttggttactgccaggcaatgaacttttttgctggtctcttgcttctattgatgccggaggagaatgcgttttggacattggttgggattatggatgactattttgatggctacttttctgaagaaatgattgagtcacaggtggaccagcttgttttagaggagttagttcgagagaagttccctaaattagcaaatcacctggattaccttggacttcaagttgcatgggttactgggccatggttcttatccatcttcacgaatgtgcttccttgggaaagtgttctccgtgtatgggatgtgcttttgtttgatggaaacagagtaatgctgttccggacagctcttgcgctactggagttctatggccctgctcttgtgactacaaaagatgctggtgatgcagttacccttttgcagtctttagctggttccacttttgacagcagccagcttgtcttgacagctcgcatgggataccaatccgtaaatgaaacaatattgcaagaactgagtaataaacaccgcccacctgttatatctgcaatggaagaaagagcaaagggtctaggtgtttggacggataccaatggtcttgcatcaaaactgtataacttcaaacgtgaccctgaaccgctggtttctttaagtgattcaacagaccagttgagtgatgtgggagatggggataccaatcaagaaagtgatctgggaaacatggatgacgagtatggtggtgtaatagtgaattctgagattgattctttgcctgatccaaaggaccaggttgcctggctgaagttggagctgtgccgactcatagaggagagaagatcagctgttctcagagctgatgaactagaaacagcacttatggaaatggttaagcaagataacaggcgccaattaagtgcaaaggttgagcagtttgaacaagaaatatctgaactaagacaggccctgtcagacaagcaggagcaggagcaagcaatgtttcaggtcctgatgcgtgttgaacaagaactaaaaattgcagaggaagctcgcatctcagctgagcaggatgctgctgctcagagatacgcagcaaatgttctacaggaaaagtacgaggaagctatggcttcacttgcccaaatggagaacagagctgtaatggcagaaacaatgttggaggctacactgcagtaccaatctagccagcagaaagcaatgtccccttgcccttctccaagaccatcgatgctcgacgcatcccctagtcagtcaagccagaattcatcgcaggagttccagccaagaaggaaaaacttgcttggcccattttccctgagttggcgtgataagaacaaggaaaaaccgaacaacgctgatgactccaccaacacaaagtctacaaataatgatgaaatggtagaaacctccaacacaaatgatgagaagcatagagaaacactagatctaaatagtgagcagagagcagaatcacccaaagcagatgtcaagatgagagcagagacacctgagaaagacaacgacctgccaggggtccaactagtcactgacgatttgaatgggcaccacgaacagatgcaagaaataaaattggattgataagcattaagcacaatgctcccagcccaaatatcttcgccaccacgtaagtaatatcagagtatttatgatctgatcacacggtgccagttggtgacagcactgagggtggctaagttttgaaatgatactggtccccccctcctctcccctttccctttgtggttccccgaattctttttgccaccacatctaggttacatgtcatttctctccattttttataattttgaggagaaaatgagcaagttatatatggttgcccatccgttgctgcctcccaatgtaaatgcattggaagaactgtgagaaaaaagatgagaattgtgggcaattatgacacccttattcttgtaaattatcatatcatttagagtttatgcgtgctttcaattgaagaaatc

SEQ ID NO: 146915 - DNA, 195 bp, Zea Mays
atgttttgtttagccatattttacacaaattgcttgggattcatgtgtaccaaaacttcatggttgtcagttttaaataccagtggtccaaaaatagcacacacacacatcattcattgcaaattcgagcatcatattagtaagtgttgcctctacataaaagtaagaagttcatttcttcggcagcaacattag

SEQ ID NO: 146916 - DNA, 783 bp, Zea Mays
agccgcagcactcatcgtgacgcagatcaagcaaaccctaactgccaacgctactataaaatgtttttctcgcctctcctcgctcccgtagccgccgccggcctccaactctaaccccgttgcttccggctcccgcagcgtcgccgaccttcacagccggttccttcctccgccaccatggggaagacacgtggtatgggagctgggcgcaagctcaagacccaccgcaggaaccagaggtgggctgacaaagcatacaagaagagccacttgggcaatgagtggaaaaaaccttttgctggatcatctcacgccaagggcatcgttctggagaagattggtattgaggccaagcagccaaattcggccatccgtaagtgtgcccgtgttcagctggtgaagaatggaaagaagattgctgcctttgtgccgaatgatggttgcctaaactacatcgaggagaatgtatgatgaggtgttgattgctggatttggtcgtaagggtcatgctgtgggagacattcctggtgtcaggttcaaggttgttaaggtgtctggtgtgtcgctgcttgcactcttcaaggagaagaaggagaagccaaggtcttagatcactttcggtagtcaagaatggtgtaaactgcccaaggctctattgtcaaagttaaagttctgctagcaactcagctgttaaatctgagctgtacctttttgttaacattgttacagtattacagagttctgtttccattttgaagatattaatattgcatcggcatgtgc

SEQ ID NO: 146917 - DNA, 788 bp, Zea Mays
agccgcagcactcatcgtgacgcagatcaagcaaaccctaactgccaacgctactataaaatgtttttctcgcctctcctcgctcccgtagccgccgccggcctccaactctaaccccgttgcttccggctcccgcagcgtcgccgaccttcacagccggttccttcctccgccaccatggggaagacacgtggtatgggagctgggcgcaagctcaagacccaccgcaggaaccagaggtgggctgacaaagcatacaagaagagccacttgggcaatgagtggaaaaaaccttttgctggatcatctcacgccaagggcatcgttctggagaagattggtattgaggccaagcagccaaattcggccatccgtaagtgtgcccgtgttcagctggtgaagaatggaaagaagattgctgcctttgtgccgaatgatggttgcctaaactacatcgaggagaatgatgaggtgttgattgctggatttggtcgtaagggtcatgctgtgggagacattcctggtgtcaggttcaaggttgttaaggtgtctggtgtgtcgctgcttgcactcttcaaggagaagaaggagaagccaaggtcttagatcactttcggtagtcaagaatggtgtaaactgcccaaggctctattgtcaaagttaaagttctgctagcaactcagctgttaaatctgagctgtacctttttgttaacattgttacagtattacagagttctgtttccattttgaagatattaatattgcatcggcatgtgcactgttgct

SEQ ID NO: 146918 - DNA, 114 bp, Zea Mays
cctataatctcttatctactctctattaccataatagaagagtttatgtaaaaaataaggtgaaattatgtaaagtgagtgttttaatcttggttgttggctccatattcaaat

SEQ ID NO: 146919 - DNA, 1132 bp, Zea Mays
cagccccgcatcgcaccctccctggccgccttctcttctccagcgtccgatctctcccactcgccttcctcaccgcagctctcccggctcggtcgcttcgccacctccgtcctccccccgcgctcggtcgctcgccacctgctctcccctccctccacgttgctcgcgcccgcgcttatataagtgcaggaggagctcatggcggacgctccggcgagccctgggggcggaggcgggagccacgagagcgggagccccaggggcggcggaggtggaggcggtggcagcgtcagggagcaggacaggttcctgcccatcgccaacatcagtcgcatcatgaagaaggccatcccggctaacgggaagatcgccaaggacgctaaggagaccgtgcaggagtgcgtctcggagttcatctccttcatcactagcgaggcgagtgacaagtgccagagggagaagcggaagaccatcaatggcgacgacctgctgtgggccatggccacgctggggtttgaggactatattgaacccctcaaggtgtacctgcagaagtacagagagggtgatagtaagttaacttcaaaatccagcgatggctccattaaaaaggatgcccttggtcatgtgggagcaagtagctcagctgtacaagggatgggtcagcaaggaacatacaaccaaggaatgggttatatgcaacctcagtaccataacggagatatctcgaactaatgaagacatggaccttttctgcaacagctgctcttccccgaggcgggtttttggtcgcagttatttactaagtaagacaccttgcggtgaccattaaagagtaaccaatcaccctgggtaggtcaatttttatctgcaagaactgatgaggccgcttggtaggagtaaatcgcttttcctgggaacgattgttggttagcgccgctactgtatgtatattgagataccttaacgattggtcttttggctgccatttggttacatgtatttgtatttggaggcataagtatcgtgtaatttgtgttatgactagtgtattgactattgaattatgagaagagctgctttagttgtaagatcacatgacacatccaagaattcccaaaaaaatgttcgt

SEQ ID NO: 146920 - DNA, 1115 bp, Zea Mays
ggccgccttctcttctccagcgtccgatctctcccactcgccttcctcaccgcagctctcccggctcggtcgcttcgccacctccgtcctccccccgcgctcggtcgctcgccacctgctctcccctccctccacgttgctcgcgcccgcgcttatataagtgcaggaggagctcatggcggacgctccggcgagccctgggggcggaggcgggagccacgagagcgggagccccaggggcggcggaggtggaggcggtggcagcgtcagggagcaggacaggttcctgcccatcgccaacatcagtcgcatcatgaagaaggccatcccggctaacgggaagatcgccaaggacgctaaggagaccgtgcaggagtgcgtctcggagttcatctccttcatcactagcgaggcgagtgacaagtgccagagggagaagcggaagaccatcaatggcgacgacctgctgtgggccatggccacgctggggtttgaggactatattgaacccctcaaggtgtacctgcagaagtacagagaggtgcagggtgatagtaagttaacttcaaaatccagcgatggctccattaaaaaggatgcccttggtcatgtgggagcaagtagctcagctgtacaagggatgggtcagcaaggaacatacaaccaaggaatgggttatatgcaacctcagtaccataacggagatatctcgaactaatgaagacatggaccttttctgcaacagctgctcttccccgaggcgggtttttggtcgcagttatttactaagtaagacaccttgcggtgaccattaaagagtaaccaatcaccctgggtaggtcaatttttatctgcaagaactgatgaggccgcttggtaggagtaaatcgcttttcctgggaacgattgttggttagcgccgctactgtatgtatattgagataccttaacgattggtcttttggctgccatttggttacatgtatttgtatttggaggcataagtatcgtgtaatttgtgttatgactagtgtattgactattgaattatgagaagagctgctttagttgtaagatcacatgacacatccaagaattcccaaaaaaatgttcgt

SEQ ID NO: 146921 - DNA, 769 bp, Zea Mays
actgtatgtttgcctaatggacttgacctccacctgattctgatacatatatttatttggtttcactgactgtttagcaagttctaattcctgtaaaatggttcgtacagggttctgataatttctttctttgtagttagtatgggagtagctcttctcattctccatgctttagctaccaatcttgtagattctgagatataatgaacattgttcttgtttctttgattaacaacagggtgatagtaagttaacttcaaaatccagcgatggctccattaaaaaggatgcccttggtcatgtgggagcaagtagctcagctgtacaagggatgggtcagcaaggaacatacaaccaaggaatgggttatatgcaacctcagtaccataacggagatatctcgaactaatgaagacatggaccttttctgcaacagctgctcttccccgaggcgggtttttggtcgcagttatttactaagtaagacaccttgcggtgaccattaaagagtaaccaatcaccctgggtaggtcaatttttatctgcaagaactgatgaggccgcttggtaggagtaaatcgcttttcctgggaacgattgttggttagcgccgctactgtatgtatattgagataccttaacgattggtcttttggctgccatttggttacatgtatttgtatttggaggcataagtatcgtgtaatttgtgttatgactagtgtattgactattgaattatgagaagagctgctttagttgtaagatc

SEQ ID NO: 146922 - DNA, 539 bp, Zea Mays
gcaaccatctcgcatgccggaggacgggcttccagcaccgcgtcgccgacggcgtcagggtcaggccaccacccgcatctagtggggtcggccagaacctggctgcagcagcgatgccggagccatcaaccaccgaggggcggcgaatccaaggggagctcaagaatctcctggaaggcgccgcggtccgacgggccgagagctctgcctcctgaaggcaggggtacccctcggaacctcatgtcgcgacttcccgattcatgcgggaagcctcggtctacaccgggcgcacgcgcaacacagcgcctgcggccccgggtcgcctcggcaacgagcaccatcaccgcgaccgtcgggcccacctcgacgagagggtgcgccgaggctaccaccccaggcgtgggggacgctacgacagcggggaggatcggagtccctcgcccgaaccacccggtccgcaggccttcagccgggccatacgacgggcgtcgttcccgacccggttccgacccccgactactatcacaaagtactcgggg

SEQ ID NO: 146923 - DNA, 895 bp, Zea Mays
cagactcgccaagtcagtgatccgcgcctcactccacgtcagcgatccgcagcatcctccccgtccattccctccgtatcggacggcagccaccggcatcctcccagcttcgcttccttttaaacccctctccctcccccaatcaacactccaagcgccactaatctcgccttccgaggaaactcaccagcccaccacagacccgagcggaagaagccatgtccgggcgcggtaagggtggcaaggggctcggcaagggcggcgcgaagcgtcaccggaaggtgctgcgcgacaacatccagggcatcaccaagccggcgatccggcggctggcgaggaggggcggcgtcaagcgcatctcggggctcatctacgaggagacccgcggcgtgctcaagatcttcctcgagaacgtcatccgcgacgccgtcacctacactgagcacgcccgccgcaagaccgtcaccgccatggacgtcgtctacgcgctcaagcgccagggccgcaccctctacggcttcggcggctaggctgatgggctcctcgcgatgttctccccttctgcagatgcgacgttttctggccgtgcccacaagtcttgcggtcaagaaagtttcaggaactcttgttagttcatctctggctgtggtaggtttatctgaatcgtgagactagtaggtttatctgaatcgcgaggctagcaggtttacctgaatcatgaagcagtgatgaaattatgtgtgcatcggatgttggaaatcgagcttgtaatgcaatttgttactcttgatgcaaatgaatggtctggtcgttacttctgtagttacgattttaaactggtgattgttgcgtttctcatgcaactgaatcgtgtcagcaaaagttgctttgcatt

SEQ ID NO: 146924 - DNA, 267 bp, Zea Mays
atgtccgggcgcggtaagggtggcaaggggctcggcaagggcggcgcgaagcgtcaccggaaggtgctgcgcgacaacatccagggcatcaccaagccggcgatccggcggctggcgaggaggggcggcgtcaagcgcatctcggggctcatctacgaggagacccgcggcgtgctcaagatcttcctcgagaacaccgtcaccgccatggacgtcgtctacgcgctcaagcgccagggccgcaccctctacggcttcggcggctag

SEQ ID NO: 146925 - DNA, 261 bp, Zea Mays
atgtccgggcgcggtaagggtggcaaggggctcggcaagggcggcccggcgatccggcggctggcgaggaggggcggcgtcaagcgcatctcggggctcatctacgaggagacccgcggcgtgctcaagatcttcctcgagaacgtcatccgcgacgccgtcacctacactgagcacgcccgccgcaagaccgtcaccgccatggacgtcgtctacgcgctcaagcgccagggccgcaccctctacggcttcggcggctag

SEQ ID NO: 146926 - DNA, 557 bp, Zea Mays
gttggtgcaccacttgctaagggaagtgcagggagacgaaggaaactaagattaaaaggatgtttggaaggtggccaaaggaagaaaaatgttgaagctgctaatggaggtgaaaatggtgctgctccaatcaatgcaaagggaaaaaaatgataagaggaccaatgacttgcattagatgtggggaaaaaggtcacatgcaagctagttccaagtgtccactcaatgggaccgcaaaaaagaggcaagtataaattttcttcatctaaaatataaaacaatatattattatataatttatttattttccttgtagaaagcggaatcagcctagaatgaatgttacaaaagctaagacaggagaacttaatacaccacagagaccaactagtgaagaaatattacgagatagtccaggaaggatcactagaagccgacttgcgttcttgttaggagagggcagctcttcccaggcaagtaccacaagtcctgtgaggattccagctacgtcaggtccaaaaaagatgacttcacagaggaggctatacagtggatga

SEQ ID NO: 146927 - DNA, 1919 bp, Zea Mays
gttctcccaatcgcggctaagtctccgcctccagagacagatgtcggcggcgacggaggttgcgccagttcagcaaccgagccatccggcggcggcggggtggctcggcctcggtctgctcttccagatcctgctccggatcatccgctcctcctgggcgcagcttctctccttcgtgcgcctgcgccaccggctcctcccagttaccgcgtcgcctgagctggccttcgtgcagctcccacccgaggcgcctgctgacgcgtcgcctccgccgcttcggcggctcatggtcgtgcttgacttggatgagactttagtttgcgcgtacgagtcatcgagccttccttctactatgcgcacacatgctgttgaggcaggattgcatcgctttgacatggagtgcgtattgtctgaaaaggatactgagggaaggcagaggataaatcgtgtaactgtctttgagcgtcctggcttacatgagtttttgcagcgaactagcgaatttgctgaccttgttctctttacagctggtttggaaggtttgatctcctgtattttttttttctgttttgtgacaacaaaagccaggttgatctcagctcacgcccactgatctgtcctcttatccaggctatgcaaaacctctagttgacaggatagatgctcacaacagattcactcaccgtctctatcggccatcaactgttaatacataagtcgccgttggcatttccataagttattagtgacgggatgttaaattcatgaggtttcctgctcgtaaaaaatcagctactttcagttggaggctaagtctcgagtataaattttccatgtccctagtgattcatcaacagcatattagcatcaaagcactctcaatgcaggccgattggacagattcagttcatccttttttgtttgttgctgatttcgctatcttatgtagttattttcttgttcatgaccagtttatgtgaaccacaaatctggctttactgatgcttccgtgaaccctcatatattatgctggttggaccaaattgttattcagcgagaaagggagtcctttgttgcattagctgagctggttcgatcagtctttgatactgtgtgtttataatttcagggaatacagagagcatgtaaaagacctttcttgtttgtccaaagatttccagagaattgtccttgttgacaacaacccatacagtttcttactgcaaccattgaatggaataccatgcgttacgttttcggctggacaacctgttgacgaccagcttatgggaacgatgtttccgcttctcaagcatctcgctctccaaaaagatgtgaggcctgcattgtatgaagcatttcacatgccagagtggttccaaagacaaggaatcccacaaattgaacaggcagtctaggaattgcagctaccacattggacaattgaaagtctcaaaaacctgctactgtacagtagaactcttttagctctcccctaccagcgttattaattcccttgacggagtctcagcagcacaaccaccgtggcatcctgctcgtagccgccaggcgtggcgggagggcgaggttggagtctgcgtgctgcatcaatccaagcagtcgacgcagactggttcgcagcacggcgcaacccattcatggcacgtcacttccctaggagctggaccacttcatcttcatccgtgcatggcctttcatcaatggcaacaacttctattagaggccgagtgaagcacttccagagccgaaccaaacggataacgtttttagttcctctgtagtagtaacagttagcactgttagtagctagttgcattaccattcccgcactccctcttgaaacaaacagcaccatggttgtagtgctcccaaccattatttaggtcaagaaccagaaa

SEQ ID NO: 146928 - DNA, 252 bp, Zea Mays
atgacgaaccaaccccactgtcagagcattgccctccttggattggatcttccatgttctgacgccactgtcttttccctttgctccgactccgatcgccccttcttcaaattccaaaccagctccaacgagaccatgtcagctcaatcgacgtatatacttgggacttgttcgtttgtgtcggattgcacccggaatcgttccacctatacttcgttgaatgggaataccggtgccatgaacaaatgctga

SEQ ID NO: 146929 - DNA, 1318 bp, Zea Mays
cctgccatcactaccctgcaccagatcggtacagggcacccaagatgcccgacgaccggcggttggtactcccactgatgaatgggactcacataccctgattcggtccaccttgcagtgtacacacagttacacagaggaggtttcctccctgcgaatctgcgatactgactctgccttcttcgttccagcgccgaaagagagggagagccaagccgcctcccgccgcgacgcacgatggatcgcgcgcagttgctcctcgtcggactcccggccttgctcttcttctccgacctcactcacatcttcgcgccgccgcctccccacctccgccacccccatcaccaccctcctcaccaccaacatccgcatccgccgcatcatccccactcgcctcatccccatccgcacccgccgcatcatccccacccgcacccgccgcaccaccaccagcaccccgacccctccacggcaatcatacaggagccacgtgtggatgaggctggattcggcagcacagtggagctgcaattctgtgcctcctgctcgtacaagggaactgcagtgaccatgaagcgcatgctggaaacctcatttcctggcattcatgttatcttgcataattatcctcctccattccccaagcgtgtactcagcaaagttatcccaattgttcaagttggagccgttgcaacaataatggctggtgaccagattttccccagaattggaatggttgctcctccatggtactactcgcttcgtgccaatagattcggaaccatggcaacaatctggctatttggcaactttgctcagtcctttctacaaagctctggtgcctttgaagtttactgcaatggagatttggtattctcaaaacttgctgagcagaggttccctagcgagttcgagttgcgggaccttgttggcagcagattgcctgggtctccatttgggaggaatccggggaaaaccctgacttgatgatgaccccggaaatcagagctcagaatgccacaatttattatgttgcttttaaggtattagtagatagtaactatttggtattgatctatcgaggctgcagcttgtctgtaaacacaactttccagcttgtataatggatcaacggatcacctgacatgtgacggtggccgaagtactacgaactctaatgacattggaacggtaaagatattgtgatggcctgttagtttatgggaggtgtactgtttggcattgatctcgatgtaaacaaacaatgttagcattgtcccatggggaagattaagcgagcaggatgttaaagatacaa

SEQ ID NO: 146930 - DNA, 522 bp, Zea Mays
atggcagcgcaggagagcgccgcagggaacccgcaggtggtggtgacgcggtggcggtacggggacgtgggcgacagcaacttcgcggtgcgcggccgcgcggcgccgctgctggcggggctgctgtgcgccgtcgtcgtcttcgccgcgctctgcctgtacctctgctggaggtgccagcgccagcgccaccgctacgacccggaggcggacgcctcgtcgtcgtcgtcgccgtcgccagccggcgcggcggcgctgcccggcctcgacgccgacgccatccgcggcctgcccgtgacgctgcaccggccgtccgcgtcgccgcggcttcccggcggggacgacgaggcgctgtgctccatctgcatcagcgcgctggtggccggggagaaggtgaaggtgctcccgccctgcggccactgcttccacccggactgcgtcgacgcatggctccggtcccaccccagctgcccgctctgccgccgccgcctcctcctcgccgacgccgacgccaaagtgtga

SEQ ID NO: 146931 - DNA, 1830 bp, Zea Mays
atggagaccctcctggctggcaaccccgccaacggcgtggcgaagccgacgtgcaatggcgtcggcgccctgcccgtggccaactcccacgccatcatcgccacgccgccggctgcggcgacgctggccccggctggcgccacgctcggccggcacctggcgcgccgcctcgtgcagatcggcgcctccgacgtcttcgccgtcccgggggacttcaacctcaccctgctcgactacctcatcgccgagccgggcctgaccctcgtcggctgctgcaacgagctcaacgccgggtacgccgccgacgggtacgcgcggtcgcggggcgtcggcgcctgcgccgtcacgttcaccgtcggtgggctcagcgtgctcaacgccatcgccggcgcgtacagcgagaacctccccgtcgtctgcatcgtgggcgggcccaactccaacgactacggcaccaaccgcatcctgcaccacaccatcggcctccctgacttctcccaggagctccgctgcttccagacgatcacctgctaccaggccatcatcaacaacctggacgacgcgcatgagcagatcgacacggccatcgcgacggcgctgagggagagcaagcccgtgtacatcagcgtcagctgcaacctggccggcctctcccacccgaccttcagccgggatccggtgcccatgttcatctcgccgaggctgagcaacaaggccaacctggagtacgccgtggaggcggcggccgacttcctcaacaaggcggtgaagccggtgatggtgggcgggcccaagatccgggtggccaaggccagggaggcgttcgccgccgtcgcggacgccagcgggtaccctttcgccgtcatgccggccgccaagggcctggtgccggagcaccacccgcgcttcatcggcacctactggggcgccgtcagcaccaccttctgcgccgagatcgtggagtccgccgacgcctacctcttcgccgggcccatcttcaacgactacagctccgtcggctactccctcctgctcaagcgggagaaggccgtcatcgtgcagcccgaccgcatggtggtcggcgacggcccggcgttcggctgcatcctcatgcccgagttcctccgcgcgctcgccaagcgcctcaggcgcaacaccacggcgtacgacaactaccgccgcatcttcgtccccgaccgcgagccgcccaacggcaagcccaacgagccgcttagggtcaacgtcctcttcaagcacatcaagggcatgctgtccggcgactccgcggtcgtcgccgagaccggcgactcgtggttcaactgccagaagctcaggctccccgagggctgcggctacgagttccagatgcagtacggctccatcgggtggtcggtcggcgccacgctcgggtacgcccaggcggccaaggacaagcgtgtcatcgcgtgcatcggcgacggaagcttccaggtgacggcgcaggacgtgtccacgatgctccggtgcgggcagaagagcatcatcttcctcatcaacaacggcggctacaccatcgaggtggagatccacgacggcccgtacaacgtgatcaagaactgggactacacgggcctggtcaacgccatccataactccgagggcaactgctggaccatgaaggttcggacggaggagcagctcaaggaggcgatcgccacggcgacgggcgccaagaaagactgcctctgcttcatcgaggtaatcgtgcacaaggacgacacgagcaaggagctcctcgagtgggggtccagggtctccgccgccaacagcaggccgcccaatccccagtga

SEQ ID NO: 146932 - DNA, 1653 bp, Zea Mays
atggccgccgatgacgcggcgcggagcagcagacggatggatctgaacctctacctcggtctcccccgggccccgcgcgccccacgccccgatctcggctccgacctcgcgctgggcactccgatgctgtcttcgtcgtctccctcgtcctcggccgcctccgcggacgcgccgccgctggagacggatccactccacccgccctactcgccgtcccgcgccgaactggtgcgcccgccgaccccggtgcacgagccctacagcccgttcgcgcccgaggcgcatcccccctatgtgcctccgccaccactgccggttccaggggctttacctgtgctcgctgatgagcttgagtttggtttttccgacgcgcaactcggtctggtcgagcgtttagaccggccttcgtcgtcgaccgcatcttcttcattccgcccggatcgtgccgagcgctaccgccgcttgatgtccttgggcggatctaggtacttccggccaagacggttccgctccgaccttccacctctaagctcagaggcccctagtctggagaatgatgctgcagtgcaaccacctgaacccgaagaacctgtccatgatactgtggaggagaacaaggtggctgctgagggtgcagttgtgggtgtctcagaggacgatggaacagagcatggtaagagtaccgcaatgttcgagtgtaatatctgttttgaaatggctgatgaaccagtggttacctcctgtggccacctcttctgctggccttgtttatatcagtggttgcatgtccactccagccataaggaatgccctgtctgcaaaggagaggttactgaagggaacattactcctatctatgggagagggaattcaggttcggctatggagaaggtcgcagaggatggtaacgcatctggccccaagattccaccaaggccacatgggaatcggctagagagcttccggcagcagttccaccatttgcgacccatatctagacggcttggtgaggcacatggttttttgtctacgtggaggcgcatttttgatcagcacttagcgaatagcatgagtagatttgaagggactcctgaactatctgtttcggaaactgctcagcatgcaagccgtcttggccgaatgactactaggttgagagcgaggaggttgcaaagggaagcggaaaaccctacacccattgtttcatctgcaccagatagtgggcagcctagaaacaatacacccgatctgccaaggcgctcttcaagcccatttccctcagaagggatggatttgttgcgacagattgccttcgctggtcttgaagactcagagaggtttgcgactgctgtcagtgaacttaggcgaatcgctaggccaagccactacggggcatcaacttcatcaaacccaccaaatcctgagcctattgatggaactcatattgccatggcactggctgcagatcaagcttctaattcgagcaccatggctgtcattcaggaagatgcagcttttgctgaaagtgctggagaacctagtaatgccgggtcttcaagatccctgagaagaagaagaggaagtggtgccttaggttctttggatgtggatggtggggacctacatcagaataagagaaggcgtctgaactaa

SEQ ID NO: 146933 - DNA, 637 bp, Zea Mays
tagtggaacagagccgagaaagcattgcgggtttgttgcagcagcatccatcgcgtgcgtacattaatctaagcgatcttcatccagccttctgctctgctccctcgaaatggaggcgacgagcaaggcgatggcttcaggcctcctcgttctgctgcttctcatcaacacaggctttgtcctgcccgtccattccgaggactgctgggccgacacccgcgtcatctgcaccaagacgcacaactgccgggacgacacttgcgcggggcgcggcatgccggacggccgctgccactgggagttccccaacctggtgcccttctgccagtgcctgcgccccaactgccactagtccgggcgcctcggattggctcacttcgccggcgatgatggatggtgcccaactgcgactgcccagtctgctccattcgttgttgtttaaggcataatatataaactgccaaattcacatgtattttgggatatttgttatcatactatgaaatgactgtgaatcgttgttctgatttgtctttcaccacatgttttccttgcatgaagtaatatacgatatttatgtatttcttgttttcgagaataatagtcaaagtatcttgtgatttgaacggttagctcc

SEQ ID NO: 146934 - DNA, 170 bp, Zea Mays
gatctgctcgccactggtgtcctgacactctctagctacttcgactcccctacgtcctccaaggtacgcacgtatgtacgtctgattttctggctcactgactccacgggtgttgggggacttcttctccaccgaaggtcctcaagacgaagatgttatctaagggcgtt

SEQ ID NO: 146935 - DNA, 914 bp, Zea Mays
acttttctgtcctgctcctagcgacagggcctgtctgttctccttccgccgcgccacaaaacctccatggatgagccgtctcccctagagttggccgacggagatgcagtcctatggctcccagagccggccgccgtagatctagctccgcagctcccagatgaggtggatgtggaaccagacggagtggatccggcatccccgctgctcgtcgtcagccccagcctcgtcgtggatccttccccaccactccctctcgattgcaaggtggatcgacacagagatgacccctttcagcccgccgtggagacgatgcttgccttccagtctgacacggagaggatcctgctactgcgttctctgtccatccccaggacacaagatgatgaatcagccttagcggttttggaaccatcacgaatcgattgggatgcaattgaaatcgaacctagatgggatgaggaaggaacagagggagttgctagtgaacatgggttgtatgttaaactaggactgcaaaaggaggatgaaaaggggaaaaaggttagagaatctagagctaaaaagagaggtgtcagcacctttgaaaatgaatatattgacgatcatgaagggatggcttatcttgagcatataccagaagacagggctatcgtgtatgactggacgaatccagtgatgaaagttggtgccttgtatccaaatatgtcagtgtttcgacttgctgtgcgacactatgcaattatgaaagagtttgagctaggcatcgagactacttctacctctcgatatagagggttatgtatgggtgatgattgtccctggagacttcatgcagtgttggaagtgccaggatcagcaactatcatttacgttgagctatttgatttacttgatttggttattctttccag

SEQ ID NO: 146936 - DNA, 654 bp, Zea Mays
atggcctccgcaccgacgccgccgcccctcctcccggtgaccaaccctgcgtccggatcgtccccggccgccgccggaggctccgatgcgccgatcgctacgccggctttccggctcttcctgagccggatctccgactcggcgcggcgctcgctgtcggatcgccggccgtggggagagctcctcgaccgttcggcgttctcgaagccagactctctctccgacgccacctcccgcctgcgtcgcaacctcgcttacttccgcgtcaactacgccgccgtggtcgccttcgcgctgggggcctcgctcctggcgcaccccttctcgctcctcatcctcctgggcctcctcgccgcctggtgcttcctctacctcttccgcccctccgaccagcctgttgtcctcttcggccgaaccttttccgaccgcgagacgctgctggggctcgtcggcgcgtccttcatcctgcttttcttcacctccgtcgcgtcgctcatcatctccgggctgctcgtcggcggggccctcgtcgcggcgcacggcgcgttccgggtgccggaggacctcttcctcgacgagcccaacgcgccccccggcagcagcgcggcccaagggctgctgtcattccttggcggacccggatctggggtttga

SEQ ID NO: 146937 - DNA, 2490 bp, Zea Mays
aatggccgcacgatctgctgggcaggggtgccgtttccggaggcggtggagtcctgtgcggccgcgacatcggcgcctttgctcgatgagctccttgtcggtttcggggatgtcttcagggagccgcaaggactgccacccacgcgcaactgtgaccatgccatcaccctcaagcccgatgcacagccggtggcggttcgcccctatcgctatccggctgcacacaaggacgagatggagcggcaatgcgccgcaatgatcacacagggcattgtccggcgtagcgtctcggcattctcatcgccggtactcctcgtcaagaaggcggacggcgcatggcgtttttgcgtcgactaccgggccctgaacgcgctcaccatcaaggacgcgttcccgattcccgtcgtcgatgagctgctcgacgaacttcacggtgcccgtttcttcaccaaactcgacctacggtcgggatatcaccaagttcgcatgcggcctgatgacatccacaagacggcgtttcgaactcacggcggcctctacgaatttttggtgatgccattcggattgtgcaacgccccggcaacatttcaggcactcatgaacgacgtcttacggccatttctgtggcgcttcgtacttgtctttttcgatgacattcttatctacagccagacatgggcggagcacctgcgccatcttcgcgtcgtgctcactgagctccggagacaccaactcttcgtcaagcacagcaagtgcgcgttcggcgagcagtcggtctcctacctgggccacaacatctcggcatccggcgtcgccatggacccggccaaggtgcaggccatccacgactggcctgtacctcggtccgctcgggctgtgcgcggcttcctcggcttggcgggctactaccgcaaatttgtccacaactacggcacggtcgccgctccgctgaccgctctcctaaaaaaggaggggttctcctggaacgacgctgcggccgcggcttttgaagacctcaagtctgcagtcacttcagcgcccgtcctcgccatgccagatttcgccaagtccttcaccgttgagtgcgacgcttcctcttttggttttggcgcggtcctcatccagggaggccacccgatcgccttcttcagcaggccgatcgctcctcgacatcgcgcactcgctgcctacgagcgtgagctcatcggccttgttcacgccgtgcggcactggaggccgtacttgtggggacgccgttttttggtgaagacagatcactacagcctcaaatacttgctggaccagaggctctcgacgacgcaccagcaccgttgggtggggaagctcctcggcttcgatttcgccgtcgagtacaaatccggagcaacgaacgtggtcgccgacgcgctctcacgccgcgacacggaggacggcgaggaaggagccacgctagcgctctcggctccacgcttcgacttcatcactcggctccgacagcaccaaggctcggacccggcactcgtagcgttgcgccaggagatcaccagcggcgcacggggcgcgccctggtccctggttgacggcatgatccaatacaaggaccggctctacataccgcctgccgccactctgatccaggaaatagtctaggcggtgcacgaggacaaccacgagggcgttcagaggacgctgcaccgactccgccgagatttccatttccctaacatgaaacaattggtgcaggatttcgttcgggagtgcagcgtttgccagcgttacaagtcggaacacatgaatccggcgggacttctcatacctctgcctgtgccgaacagtgtctggaccgacatagcgctggatttcatcgaggcgctgcccaaagtgcgcggcaagtccgtcattttgacagtggtggaccgtttcagcaagtactgtcactttataccactggcgcacccgtactcggcagagtctgtcgcagaagctttcttcatcaacattgttcgtctgcatggcgtaccacagtcgatggtgtcggatcgcgatccggtcttcacatcaatattctggcgcgagctcatgcgcctgacggggaccaagctccacatgactacagcatttcaccctcagtcgaaaggacaatccgaggcggctaaccgggtcatcattatgtatctccgctgccttacaggggacaggccgcgacaatggctgcgttggcttccgtgggcggagttcatcttcaatacggcgtaccaaacatccctgcacgacacgccattccgtgtcgtctacggtcgcgatccaccgtcactccgatcgtatgagccaggcgacacgagggtcgctgccgtcgcccggagcatagcagagcgcgacgagttcctcgccgacattcgctcgcggctagagcaggcgcagcaggttcagaagcgctactacgacgccggacatcgccaggtggtctaccaagtaggcgactgggtcctc

SEQ ID NO: 146938 - DNA, 781 bp, Zea Mays
aagaatgtcagattatccactgcggcctcttcctcctcttcctccgcccctcccaccatgattgccacccatctctccccagccctcaagcagtaccgcttctcgtccccgctccactccacctctcacaaccaccaccttctcgtgcacctcccgctcccccgccaccaccgcaacttcgctaagcccgccgcggccgcgccaggcctcctcgccagcgtcgagtccgtggcctccgcggcctccgtcctggccgctatcgtgctcgtccacgagtccgggtacttcctagccgcggcgtcccggggcatccacgtctcccagttctccatctgcttcggcccgccgctcgctcgcttccacctcggccccgtgaagtacgcgctccacgccatctgttagcagcccctaggaaggggatcgagagaactggaagaagagctcgtagattgagatttcggaagaggaaagtgatcggctgggatagagacttggagaagaagagagatagagacaaaggagcacgaaggcttctcgatagagttctgatatttcttctttgataccttttacagatgtctgagcatgtatttataactccttaataccacataacctatagcccatctagtatacatgaccatagcccatagtatacctaacattccccactccttgaaatgtggcttgcccccaagtcgctgatggtgtaggatcagcttcttctgctgcatcattgttgaatgcataacgtttcctctgcagccctccatctgaaatt

SEQ ID NO: 146939 - DNA, 3426 bp, Zea Mays
atggcgaggtccagcgatggcggaggggatcagtgggaaccgacggtggttgcaggtgggaagacgccgctccaccctacggggctcggcatcggcgtggaggtgggccgtggtgcctctcgcgctgcttgctcctgccacgacaaacaatggagagagagggccgcccgccgccatggcatgggggccgtcgccgacgccgacggtctggacagcgaccttgctggtggtcgtccctcccggcagcagcttccccctattggcgaccccacagatcccatggctcgttgtccgagagtggacatcgccttccatggctcgttgttacagtacaatgtctccaagagttcccctgcacccattgttgaggacaatccatttgctctagctataatcgaaccatctcaaattgttcggagtagcattcagattgaaagtagatgggacgagaaaggacaaactggagtacctaaagaatatcttttgtatattcaactaggattgcagcgtgaggatgacattgaaaatagggaaagtgaagttgcgactagtggtagtagaggccctttaccttttccagagctccagaggatgttttcccaagcccagaaggccacgaaaacggcagaggaggtgaagacggatgtggaagccaagatgcgagagctttcgcaagctcgtgatgacgtcgttgctgcgacaacccaggcaatggctatgctctcggaacggagcgccgagcttcagaatttttgtctatttatcaattgtagtgcagaccgccatggaagacacggcctgacgagaaagggcgcagggcattgtcgtcggcgccggcagggacacgcagggaagatggacgacggcatcgactgctacgtggtcccgcagatcacgggcgccgggcggaacatcttccagggaggcaacccactgcaggagtcgctgccgctgctcggcttgcagctcgtcctcatcgtcgccatcacccgcgtcctctacttccttctcaagccattcaagcagccccgcgtcggcggcatcatactcggcccgtccatgctgtcacgcagcccggcgttcaaggagacggtgttcccggcgaggggcgacccggtgctgcacaccatcgcgacgttcgggctcatgtacgtcatcttcctcatcggcgtgcggatggacccgatgctcgtcgtccgctccggcaagaagggcgtgatcatcgccctctccggcttcatcctcccgctggtcatgaccaccgcgggcttatccggcgccgccatggtcgaggaacccgacgtaacgaggcgttccacgttcctgttcgcgctggccacgtcgctctcggtcacgtccttcgcggtgctgtcgccgatcctgtcagagctcaacctcctcaactccgacctgggccgcaccgccatgtcggcctcgatgaccaccgacggcatcgcgtggctcatcatggtggggtacatcctcgccgaggcgttcctcgtttcggccgtgacgtcgctctgggcgttcctctcggtggccgcgctcggcgcggtcatactgttcgcggtgcgcccggtcgcgctcaaggtgatcgagcgcacgccgccgggcaagcccgtggacgagagctacgtcttcttcttcctcctcgtcgtgcttcttgtcggattctacagcgacgttatcgggaccaactcgttccacggcgcgctgatgctggggctggcgatccccgacggaccgccgctcggcaccgcgctgggggagaaaattgacgccatggtgtccggcctgattctgcctctgtactacgccatgaccggcctcagcaccgatgtgtggtccctgcattggggcaggctgcagctagtcgtgctcctcggatggtttggcaagatgatcggcgtcatggtgccgtcgctgtaccttgagatccccctccgggacgccgtgtccctcagcttgttcatgagctccaagggcatcgtcgaggtcatcaccttcaccttcttcctcacaaacaagatggaagaatcaaatgcaacaaccaccaaccaattttgcatttttgttcacattctttgcgtcggccttgaaacatttgatcggttctgttcgcagttgatcggcaagaacacctacagcgtcctcatgtgctcgtcggtggcgatcacagcggtgtcagtgccagtggcgggatgtatgtacgatccggcgcggcgctacgccgtgtacaagcggcgcaccttgcagcacctcaagccggacgccgacctgcgcatattggcgtgcatccacgacgagtcccacgtatcggggacgctcgcgttgctcgaagcgtcgcacgccacgccccagacgcccatcggactctacctcctgcagctcgtcgagatcgcgggccgctccgcgccggtgttcatcccgcataacccccgccggaacgcgtctcggatcgctgcacccaacgcgccgtccaccgacgtcgaccgcatcatcaacgtcttcttccggcacgagctccggcacccggagggcgcggtgtcggtgcacccgttcaccaccatctccccgtactcctccatgcacgacgaggtgtgccgcctcgccgtcgagaagcgcacgtcgctgatcctcctccactaccacaagcaccacttgctcgccggcggcgtgcacgcgtcagttgggctgcgcgtcgtgaaccgcaaggtgctggaggtcgcgccgtgctcggtcgcggtgttcgtcgaccgcaacgccgggaatgtggggctgtgcaatttcattcccgggccgctgcaagactgctcgggctcctccacggctagcagtggcctctcgtcgagcgggccccagttccgcgccgccgtggcggcgctcttcttcggcggcggcgacgaccgcgaggccatgtcctacgtggcgcgcatggcgcgccatccgggcgtgacagttgcagtagtgcggttcctaccagcccgaggcatcaaggacgacccggcggatcggcgggtggacaaccgcgccatcgaggaggtgaaggcgctcgcggcgaggagcaggaacatgcaagtccgggaggagctcgttggcgacatggagaggatcgtcgaggtgctgaggggtcttgacaaggccggctatgacctggtcatcgttggcatgaggcacaggtggtacccggtgatgccggcgaacgggctatcggactggagcgagtgccccgagcttggcgtcatcggcgacctcctggcgtcctccgacttcgacacgccctactcggtgctcatcatgaagcaacaggaccaggctggcctgaacgccgctgtgccgggagcccaggaccaatggcacggtgcactgccgccgccaccgtcgcgaaccatttcgctggctcaatctagcatgtccaagcgttag

SEQ ID NO: 146940 - DNA, 1613 bp, Zea Mays
actgccccatggcccattgcttacgcataactgcggcggggacacgcgacgctaccgacttcgccgccgcctccttccttccgcccgtcgagtcgaccgaccgattgttcgcgggtcgcggcctccctcctagtcagatccactcaatcccaagaggccaagtccaaaccctacccaccacccttctcaaccagcgatgatggcagcggagccctcgccgtcggttccctccaccgccgctgacgccctggaaaccctcgccctcgactcatcctcgtcgtccgccgccgctaccgcctccacttccaccgaccccctcctccggccacctacctccccgaccgccgccgcgagcgacgacccattcgtcatcgacgacttcgacgaggacgacttctccaccgccccggcgcccaacgtcgcccgccagccgcgcgctgcgcgtggtgatgcggcgtccccagtgttcgccaaaatcaccgtatcggatcccaagaagcacgcggagcccagcggcgggggtgccgccggtgtgatcccggggtccggtagctacttctcttacctcatcaccacccgtcttgcgggcggcggcggggaggtccgcgtgcggcggcgcttccgcgacgtggtgaccctcgcggaccgccttgccgcagcccaccgtggcctcttcgtcccggcccgacccgacaagagcgtcctcgaggggcaggtcatgcagcgccacgacttcgtgagccagcggtgcgctgcgctccagcgctacctccgccgccttgccgtgcaccccatcgtcggccacagccctgacctccgcacgttcctcacggagcctggtgccgtccctgcctttcagggtgagcccccgcggtactggactaccacgctgaatgctgctgctccgctggtgccaacgaaagctaggagggacttgtttgggatgtttaagggtctcaagcagacggtggtgaatggactggttgcaacaaagcctccacctgtggagcaggagacagacacagagttcctggcgcacaaggccaggtttgatgacttacagcagcagcttaccataacatcacagcaggcggaagcgcttgttaaagcccaagatgatcttagagaaactacaggtcacttgggaatgacattgattaagctggcaaaatttgaaagagagcaggcaacatgtaattccctaagaagacgtgctggtgaaatccataattttgcaaattctgttttaaagatgagcaggtcacagataaaattaaactctgaaatggtgaaacacctgggcagtatccatgaatacttggagatgatgatatcagttcatcatgcattcacagatcgctctaatgctttatattacgtgcaaagtctgtcagcagatttgttttccttgcacaccagggcagggggacttgaatcttcatcagcaagagatatggggcatgagtggtcaacatatcagaaggtagaggggttgaaagaagcaataagatctgcggaagcagccaaaagtgatgccgttagagaatatgaaagcattaaggtaagttgcctgaaaaaaatgtaaataataacattctatttgaaaaacttag

SEQ ID NO: 146941 - DNA, 2001 bp, Zea Mays
actgccccatggcccattgcttacgcataactgcggcggggacacgcgacgctaccgacttcgccgccgcctccttccttccgcccgtcgagtcgaccgaccgattgttcgcgggtcgcggcctccctcctagtcagatccactcaatcccaagaggccaagtccaaaccctacccaccacccttctcaaccagcgatgatggcagcggagccctcgccgtcggttccctccaccgccgctgacgccctggaaaccctcgccctcgactcatcctcgtcgtccgccgccgctaccgcctccacttccaccgaccccctcctccggccacctacctccccgaccgccgccgcgagcgacgacccattcgtcatcgacgacttcgacgaggacgacttctccaccgccccggcgcccaacgtcgcccgccagccgcgcgctgcgcgtggtgatgcggcgtccccagtgttcgccaaaatcaccgtatcggatcccaagaagcacgcggagcccagcggcgggggtgccgccggtgtgatcccggggtccggtagctacttctcttacctcatcaccacccgtcttgcgggcggcggcggggaggtccgcgtgcggcggcgcttccgcgacgtggtgaccctcgcggaccgccttgccgcagcccaccgtggcctcttcgtcccggcccgacccgacaagagcgtcctcgaggggcaggtcatgcagcgccacgacttcgtgagccagcggtgcgctgcgctccagcgctacctccgccgccttgccgtgcaccccatcgtcggccacagccctgacctccgcacgttcctcacggagcctggtgccgtccctgcctttcagggtgagcccccgcggtactggactaccacgctgaatgctgctgctccgctggtgccaacgaaagctaggagggacttgtttgggatgtttaagggtctcaagcagacggtggtgaatggactggttgcaacaaagcctccacctgtggagcaggagacagacacagagttcctggcgcacaaggccaggtttgatgacttacagcagcagcttaccataacatcacagcaggcggaagcgcttgttaaagcccaagatgatcttagagaaactacaggtcacttgggaatgacattgattaagctggcaaaatttgaaagagagcaggcaacatgtaattccctaagaagacgtgctggtgaaatccataattttgcaaattctgttttaaagatgagcaggtcacagataaaattaaactctgaaatggtgaaacacctgggcagtatccatgaatacttggagatgatgatatcagttcatcatgcattcacagatcgctctaatgctttatattacgtgcaaagtctgtcagcagatttgttttccttgcacaccagggcagggggacttgaatcttcatcagcaagagatatggggcatgagtggtcaacatatcagaaggtagaggggttgaaagaagcaataagatctgcggaagcagccaaaagtgatgccgttagagaatatgaaagcattaaggaaaacaacatgattgaaataaaaagatttgacaaggaaagacgtcatgatttcattgagatgctgaaaggttttgtggtaactcaggtgtcttattcagaccattttgctaatatgtggacaaaggtaacagaggaaacagaagtatatgccaacaggagcaactgatgtacgtatagagagtgtagagttgttggttttgatctatttaaattgctgcaacatcgagcgacaacacccattcttattcttctccagttttttcacttttgggttggttgtaatgcatgagttatgtgcagttgtgaaattgggtcccggcagatgagcaaattggctccacgagaactggcatatgtgagaaccatacgcaagatttttctcggtgataactactactaacaactgtctctgttccaattacaaatcttaagaaatta

SEQ ID NO: 146942 - DNA, 1887 bp, Zea Mays
actgccccatggcccattgcttacgcataactgcggcggggacacgcgacgctaccgacttcgccgccgcctccttccttccgcccgtcgagtcgaccgaccgattgttcgcgggtcgcggcctccctcctagtcagatccactcaatcccaagaggccaagtccaaaccctacccaccacccttctcaaccagcgatgatggcagcggagccctcgccgtcggttccctccaccgccgctgacgccctggaaaccctcgccctcgactcatcctcgtcgtccgccgccgctaccgcctccacttccaccgaccccctcctccggccacctacctccccgaccgccgccgcgagcgacgacccattcgtcatcgacgacttcgacgaggacgacttctccaccgccccggcgcccaacgtcgcccgccagccgcgcgctgcgcgtggtgatgcggcgtccccagtgttcgccaaaatcaccgtatcggatcccaagaagcacgcggagcccagcggcgggggtgccgccggtgtgatcccggggtccggtagctacttctcttacctcatcaccacccgtcttgcgggcggcggcggggaggtccgcgtgcggcggcgcttccgcgacgtggtgaccctcgcggaccgccttgccgcagcccaccgtggcctcttcgtcccggcccgacccgacaagagcgtcctcgaggggcaggtcatgcagcgccacgacttcgtgagccagcggtgcgctgcgctccagcgctacctccgccgccttgccgtgcaccccatcgtcggccacagccctgacctccgcacgttcctcacggagcctggtgccgtccctgcctttcagggtgagcccccgcggtactggactaccacgctgaatgctgctgctccgctggtgccaacgaaagctaggagggacttgtttgggatgtttaagggtctcaagcagacggtggtgaatggactggttgcaacaaagcctccacctgtggagcaggagacagacacagagttcctggcgcacaaggccaggtttgatgacttacagcagcagcttaccataacatcacagcaggcggaagcgcttgttaaagcccaagatgatcttagagaaactacaggtcacttgggaatgacattgattaagctggcaaaatttgaaagagagcaggcaacatgtaattccctaagaagacgtgctggtgaaatccataattttgcaaattctgttttaaagatgagcaggtcacagataaaattaaactctgaaatggtgaaacacctgggcagtatccatgaatacttggagatgatgatatcagttcatcatgcattcacagatcgctctaatgctttatattacgtgcaaagtctgtcagcagatttgttttccttgcacaccagggcagggggacttgaatcttcatcagcaagagatatggggcatgagtggtcaacatatcagaaggtagaggggttgaaagaagcaataagatctgcggaagcagccaaaagtgatgccgttagagaatatgaaagcattaaggaaaacaacatgattgaaataaaaagatttgacaaggaaagacgtcatgatttcattgagatgctgaaaggttttgtggtaactcaggtgtcttattcagaccattttgctaatatgtggacaaaggtaacagaggaaacagaagtatatgccaacaggagcaactgatttgtgaaattgggtcccggcagatgagcaaattggctccacgagaactggcatatgtgagaaccatacgcaagatttttctcggtgataactactactaacaactgtctctgttccaattacaaatcttaagaaattaaaagatgttttggtttttc

SEQ ID NO: 146943 - DNA, 2194 bp, Zea Mays
cccatggcccattgcttacgcataactgcggcggggacacgcgacgctaccgacttcgccgccgcctccttccttccgcccgtcgagtcgaccgaccgattgttcgcgggtcgcggcctccctcctagtcagatccactcaatcccaagaggccaagtccaaaccctacccaccacccttctcaaccagcgatgatggcagcggagccctcgccgtcggttccctccaccgccgctgacgccctggaaaccctcgccctcgactcatcctcgtcgtccgccgccgctaccgcctccacttccaccgaccccctcctccggccacctacctccccgaccgccgccgcgagcgacgacccattcgtcatcgacgacttcgacgaggacgacttctccaccgccccggcgcccaacgtcgcccgccagccgcgcgctgcgcgtggtgatgcggcgtccccagtgttcgccaaaatcaccgtatcggatcccaagaagcacgcggagcccagcggcgggggtgccgccggtgtgatcccggggtccggtagctacttctcttacctcatcaccacccgtcttgcgggcggcggcggggaggtccgcgtgcggcggcgcttccgcgacgtggtgaccctcgcggaccgccttgccgcagcccaccgtggcctcttcgtcccggcccgacccgacaagagcgtcctcgaggggcaggtcatgcagcgccacgacttcgtgagccagcggtgcgctgcgctccagcgctacctccgccgccttgccgtgcaccccatcgtcggccacagccctgacctccgcacgttcctcacggagcctggtgccgtccctgcctttcagggtgagcccccgcggtactggactaccacgctgaatgctgctgctccgctggtgccaacgaaagctaggagggacttgtttgggatgtttaagggtctcaagcagacggtggtgaatggactggttgcaacaaagcctccacctgtggagcaggagacagacacagagttcctggcgcacaaggccaggtttgatgacttacagcagcagcttaccataacatcacagcaggtattgatctactcacggatcttgtgaaatagctcagttgcatagcatcacaacaggtattgatctactcacagatcttgtgaaatggtggcatttatctacttacagatcttgtgaaatggctcagttgcatgtgttggcccatgcttcctcttttacatacatattattatgcgaagaatacaaaattgctctggccaatcctttaaactttgtattttatatatatgcaggcggaagcgcttgttaaagcccaagatgatcttagagaaactacaggtcacttgggaatgacattgattaagctggcaaaatttgaaagagagcaggcaacatgtaattccctaagaagacgtgctggtgaaatccataattttgcaaattctgttttaaagatgagcaggtcacagataaaattaaactctgaaatggtgaaacacctgggcagtatccatgaatacttggagatgatgatatcagttcatcatgcattcacagatcgctctaatgctttatattacgtgcaaagtctgtcagcagatttgttttccttgcacaccagggcagggggacttgaatcttcatcagcaagagatatggggcatgagtggtcaacatatcagaaggtagaggggttgaaagaagcaataagatctgcggaagcagccaaaagtgatgccgttagagaatatgaaagcattaaggaaaacaacatgattgaaataaaaagatttgacaaggaaagacgtcatgatttcattgagatgctgaaaggttttgtggtaactcaggtgtcttattcagaccattttgctaatatgtggacaaaggtaacagaggaaacagaagtatatgccaacaggagcaactgatgtacgtatagagagtgtagagttgttggttttgatctatttaaattgctgcaacatcgagcgacaacacccattcttattcttctccagttttttcacttttgggttggttgtaatgcatgagttatgtgcagttgtgaaattgggtcccggcagatgagcaaattggctccacgagaactggcatatgtgagaaccatacgcaagatttttctcggtgataactactactaacaa

SEQ ID NO: 146944 - DNA, 276 bp, Zea Mays
gcgccgaagatggagaccgagcagggcgctcgcggcaggactggagccgagcgcgcgcacatgagaaatggagcagggagggcgcggccatgggcatcggcaccaggaaaacttagtgcgtgagccaaggaagaagcaggatcacgcagcggacttcgaacggcttggggttgaagtacacatcgatctcgctcgtgtcctccggtggcggcgcggggttggcatcgggctccggcttgaaggagaccagagagagaagcaagaagggagcgctgc

SEQ ID NO: 146945 - DNA, 1033 bp, Zea Mays
cttctttctctagtgccgctgcctgtgaatcgattcacagtttatccacgagaccacgacatccccagactcccagcatcggctctcgcgatcagcaagcacagctccaagcaggctgccagcaatgctgtcccacgcgccgtctcaaatccccgccgcctccaaaccgcgcctctcctctcgcaggcgcagctcccgcctaggcgccaaacacctcacggccaccgccgctgcggcctcaacactccgcagcgtatccgcctcccgccgcggcttcgtcctcttcgttccctcgctcgccgccgcatccgccgtcctccgcccgctcccgtccgccgccaccgaggccgatgacaccgaaagcccggctccacatccaccgcccaccgaagaatccctctccccgcagcccgccgcggatgcggcggagacgaagcctgaggccagcgagtcggccatgtcgagggtgtacgacgcgacggtcctcggggagccagaggcgttggcaggggacgcgcgggggcgggtgtgggagaagctggcggctgcgagggtggtgtacctcggcgaggccgagctcgaacccgaccccgacgaccgtgtggtcgagctcgagatcgtcaggggcctcgcgggccgctgcgctgacgctggaaggggcctggcgctcgcgctggaggcgttcccctgcgacctacagcagcagctcgaccagttcatggacggcaggtgcggtgctgctctccgtctgcggttgtaatttatcacttctcctatatgttctaattttaaggcaacgttgttgcgatggaaaaaattgctatgatttgtgagcccaatatgataaattggcgaccacttggagggcttctttgttctttgcacatgtttaacttgtatatgagccccattgggcctggaatacactttgttccgccacttcctaacaattgtaacaagcataaattgtatgctgcctcattaatagtgtggtattttatcatgaaaaagatgtagtattctttgcacctca

SEQ ID NO: 146946 - DNA, 2696 bp, Zea Mays
cgacatccccagactcccagcatcggctctcgcgatcagcaagcacagctccaagcaggctgccagcaatgctgtcccacgcgccgtctcaaatccccgccgcctccaaaccgcgcctctcctctcgcaggcgcagctcccgcctaggcgccaaacacctcacggccaccgccgctgcggcctcaacactccgcagcgtatccgcctcccgccgcggcttcgtcctcttcgttccctcgctcgccgccgcatccgccgtcctccgcccgctcccgtccgccgccaccgaggccgatgacaccgaaagcccggctccacatccaccgcccaccgaagaatccctctccccgcagcccgccgcggatgcggcggagacgaagcctgaggccagcgagtcggccatgtcgagggtgtacgacgcgacggtcctcggggagccagaggcgttggcaggggacgcgcgggggcgggtgtgggagaagctggcggctgcgagggtggtgtacctcggcgaggccgagctcgaacccgaccccgacgaccgtgtggtcgagctcgagatcgtcaggggcctcgcgggccgctgcgctgacgctggaaggggcctggcgctcgcgctggaggcgttcccctgcgacctacagcagcagctcgaccagttcatggacggcaggattgatggtggaatcttaaagttatacacatcgcactggtcgcaggagctatggcaggagtatgaacctcttctgtgttactgccgtgatactggaattaagcttattgcttgtggaacaccactggaggtgaaaagaactgtccaagcagatgggattagagctctcaaaaaagcagaaagagaagcatatgcccctccagcaggctcaggattcatctctagtttcatgtttggctcaggaaggtcattgatagacaagatctcatcgattgacgactctatgtttggctctacctcgtatctatcagaacaggcaagagtagttgatgattataccatttcccaggttattacgagagaacttagtgatggagatgtttcacggttgctaattgttgtgacgggtgcaagccatgttatgtacgggccacgaggaagtggtgttcctgggagaatatctaaaaaggtgccaaagaaagaccaagttgtggtactgcttgatcctgaaagacaggttataaggagggaaggtgaagtccccattgctgatttcttatggtattcagcggctaaaccttgcactagaaattgttttgaccgtgccgaaatcgctcgagtgatgaatgctgctggtaggaggcctgaagctttacctcaggatcttcagaaaggactagatcttggtgtagtttcacctgaaatattgcagaacttttttgacctcgagaaataccctgttatgacagaactgattcatcgatttcaaggtttcagagaaaggctgttggcagaccctaaattccttcaaagattagccattgaagaggtcatatcaataacaaccactctactagcgcagtatgaaaggcggaaagggaggttctttgaagaaattgactatgtcctcacagatactattagagggtctgttgttgatttctttacagtgtggcttcctgctcctactatttcagtccttcagtatgctgatgatggttctggttcgagtttggagtttgtcaaaggccttttaggatcattgccagataatgcattccaaaagaacatcttgggccaggattggagtatcaagcaaagaattgcagcagtgttggttggtggtctgaaacttgccagtgttggtttcatttctagtgttggggctggggtttcctcagatctcatctatgctgcccgaggaattgtgaaaccttcagaaaatgtggaaacgggaaggaagagatctcccatctggaagtcagcagctgtttatagttgctttcttggaacatcagcaaatttgcggtatcagattattgctggtctagtggagtatcgactaggagagagcctggtgacatactacaaccaaccccttattgctggtttgttgtcattcgtggctaggacactgaactcatactggggaacacagcaatgggttgatcttgcgcggtacactgggttacagagaagcgaggaaaagcctcctgctgaggccactatgccacctgattcagcacatttggagggttgtacgacggaaggacatgattttgatgacagcagcaataacaccaacaaatcgactggtccgagctagtgatttgattacttcacagtggctgcagatcacatggcctattttcatagacaatgaaagtggctgccttcctgctcttgggatcacaaggaagcggaaatttgaggaaatattagtcacaaaaatttgttcagattctttttcagcgttaccacaagagtgcacatacagttctcgtttctattcgttagagtaagtattgttttgtacaatctacatctgtaagaactgcagcacctaaaggatgttcagcaatgagggctttaacttgtcgcattgcatgctcgtaagcatgtttgttgcggctttaatcaagctgtttgttgcggctttaatcaagccgcgactacggcttctacaatattttgtctctatagattgcagctgcagcagtccgaaagtgtagggcataaaaaa

SEQ ID NO: 146947 - DNA, 2058 bp, Zea Mays
ccgcacgctgccgctacggagtacggacagccagagccgaaaaaccgcagcagcgcttacagtcacgggcgcccacctgggcaggacaggagtacaggacactgccattgcccttccccgccgcgcccccccccccaagaccccagtactccactaacactcatcagcgcgccgcggggcgcgggcggacgtgcggcgctcctcggacggccgcgatggcggaagtggcggcgcggcgcgccgtcggcgtcccagcagggggcggcggcgaccaggcgaaccttgcggcggtggcggcggctatgcgggggcgcggcgaggtggacacgtcgtcgccgttccagtcagtgcgccaggccgtcgacctgttcggcggcggggctgccgccgtctcccagtggcgccacccgcaggctccgccgcgcgtccacctccgcccagaggaagaagaacttatgaaagttgaggaacaaacagtgaagctggagatggaactgttcgttaaggaaaaggaaacatttaaggtcttgaaggaactacaggaaacaaagcaggttatagatggcttgaaaatacaaatagagaaggtaacatgggaggacacaaatgctgcaaaaggccatgctgatacagggatggtacatccacttcctgctgtcgaacaaaataccgagccaccagtccagagcgcaaaaggtacacagtccccactaaccacgttgatcaagctcaatcaggcaaaagcattccttaacacggataccgtcaacatgctaaagagccagatacagaaggagaaaggctcgcttgagaaaacccgcgaaaggttacaattcaacctggggaaggcttcatcgttagaagcagatttgacgaaaactgtcgcacggctgcaagcagcaaaagctccacagcctgtccttgagccttctgaaatctggttgcagatgaagcacctgaatgctgacaaggcgaggcacaagaaggcgtcagaggatttgaggaacgagatctgtgagctgacagctgcaatcgagcacacgaggtctaagacgaagactctgcagttcagaatcctcatggctgagaaactgaaggaagcttcccaacgtggagaatctgttgctcttgcagagatggaaaaactgagcaacgggcgggacccgaacggcagtacttctgatgctgtcacactctccgttgaggagcactccacgctcgtgctcaaagcgcaagaagcggatggtgccgccaggaagaaagtggacgcggcaatgcaagggctcgatcaagcaaaccggtgtaagctcgaactcttggaaagagtagaggaagcaatggcggctgtcgagacgagcaggaaggctctggaggaggcccagaggagggaggagtcagagaccaaggcaaagctagtagccgaagagacgctccgaaagctgcggtcggaccaaataatccagaactggcgcccgaccaacagcagctccgtaaaattcaagaacacggcgctgctggcgccccggagagcagcagcgggcgctgggatatacgacgtgaacggcctgagcctggtggccgccgggccgaacagcgtgaagacggtgtccatcgggcagatcctgagcatgaagctggaccgcgagctcgagatgacgaggacgaccacgacgagcgcgaggaagaagaaggtctctctcgggcagatcctgagccagaagtacgagatgttctccccgctgcggatcgaccacgactgtgcctcgcacaggcagttccagcagccgaggaggaagaggatgggcttcgtcgtgtacgcgctgctgctcgcgcggcagaggcataggaggcggaaggctgcctcctgcactcgtggtggcttgagctagctagctagtttggatggtcggtgggtgctcagccgcgtcgtagtcgtttatatgcttttattaagagataagcgatcggaataatcgttatatttgtaatatagctagttctatgaacaaaaagttggtatttttagcagctactcgccttgctctggccacgttgatt

SEQ ID NO: 146948 - DNA, 2692 bp, Zea Mays
cgcctgccgcagccccattcccgcgccccgacctttcctgtaccatccccgctggcccgctcgctctcttccggcctcgcgttccgtctccgaagccgcaggcagccatggacgtcaacgaggaggcaatggcggcgcacaagcgcgccttcctcgacttcctcgaccaagacgtcgggaagggggtttacatgcaggccgtccgcgacatggtccagaacaagcgccaccggctcatcatcggcatggacgacctccgcaaccacaacctcgatctcgcccgcagggtgattcggagccccggggagtatatgcagcctgcgtcggacgcggtttcggaggtagcgaagaaccttgatcccaaatttttgaaggaaggggagcgggtgatggtgggcttctcgggtccgttcgggttccacagggtcacgcccagggatctcatgtcctccttcatcggcaccatggtctgcgttgagggcatcgtcaccaaatgttcattggtaaggccaaaagttgttaagagtgttcacttttgccctgtgactggggcctttctctcgcgtgaatatagagacatcacttcttttgtaggcttgcctactggctctgtttatccaacaagggatgacaacggcaacttgttggtcaccgagtatggaatgtgtgaatataaggatcaccagacattgtccatgcaagaagtgcctgaaaattctgcacctggacagcttccaaggactgttgatgttattgtagaagatgatcttgtagattgttgcaaacctggcgaccgtgtctcaattgttggtgtgtacaaggctctaccagggaaaagcaagggaagtgttagtggtgtgttcagaactgtccttattgcaaataatgtgtcgcttcttaacaaagaggcaaatgcacctgtgtatactcgggaagatttgaagcgtatgaaagaaatatcaaggagaaatgacacctttgacttactgggaaactcacttgctccgtccatttatggccatctatggataaagaaggcagtagtactattgatgcttggtggtgttgaaaagaatctaaaaaatggaactcacttgagaggagatataaacatgatgatggtgggagatccttcagttgccaagtcccagctcctaagagctgtcatgaacattgctcctttggctatatcaacaactggcagaggttcatctggcgttggattgactgctgctgtgacttctgatcaagagactggggaaagaaggcttgaagctggtgccatggttcttgctgatcgtggtgtcgtctgcattgatgagtttgataaaatgaatgatcaagaccgagttgctattcatgaagttatggaacagcaaactgtaaccattgcaaaggcaggaatacatgcctcgctaaatgcgagatgtagtgtgattgctgcagcaaatccaatatatggaacttatgatcgttcattgactccaacaaagaatattgggcttcctgattcactgctttcccgttttgatttactttttattgttcttgatcaaatggatcctgagattgaccggcaaatttcagaacacgttgcacgaatgcatagatattgcactgatgatggaggagcaaggtctcttgataaacagggatatgctgaggaagatgatggtgatgctaatgcagccatctttgttaagtatgatagaatgctccatggtcaggatagaagaagaggaaagaaagccaagcaggacaggctaactgtcaaatttttgaagaaatatattcattatgcgaagaaccttattcaaccaaagctcactgatgaggcatctgatcatattgcgacttcatatgctgagctcagggatggtagtgcaaatgcaaagtctggtggaggtacacttccaattacagcaaggacattggaaaccataattcggctatcgacagctcataccaagatgaaactgaggcatgaggtactgaaatctgatgttgaggctgcattgcaagttctaaattttgcaatataccacaaggaattgactgagatggaagagcgagaacagagagaagcggagatgaaacagcaagctgatcacgatgcagatgcaactggtggcactgtggatggacatggaagctccggaaatgatccaatggatgtggatgttgggaacacttcaaacgatcagaatgttcctttagcgagaatggaagcatttgaagcatttctgggtcagcatgtgttggcaaaccatatagatcaaatgtcaatcgatgaaatcgagcaggtggttaatagggaatcaactgcaccttacaccagaagccaagtagagtttattttggagaggatgcaggatgcaaacagggtaatgatacgagatggtgttgttcgaatcatataactgccagtctaccgggacgtttacctgtggattccctggtcatgctggatcaagttggctgtctgtctgtaaccaacttacctgttgaagtatttgtttgttaatttttgtcaacaaaggattgggacaatcattggtccccttggtacttctagttcatctaatgtattgcttacctgacctagtgatattagtacctagtcatatctatttgtgttcgagttaatttgcaactcgtttgcaatggcattctgacgagtaaaattcacaca

SEQ ID NO: 146949 - DNA, 666 bp, Zea Mays
atgtacactatcctattcaaccgtaaccctacgactaaggccccgtgcggccgtagtcgcctagcgctgcctctagcgagccccatcgcgcccccatttctagtgcgcgttgtcgtgctgccatctccatcgagcgtcgtcgcgctatcatctccaagctctagcgcatgtggagctggtcccggccaacgatctccacacctacttggatcgatctccggccggcctccgtcacggcatgtagagctggtcccggcacctgcaccgccacgcctccgggtagtactccgactccggggtgaccaagtccagaaccccccgcggcacgggcaggggcacggacaccgggtagcaagggtcgcagcgtccgcatttggaggcgcaccgtggcgggtgcgaccccaagccgcctcccgcgagccgccggcgtcgtcgtcgtgcgatgtagaacagctcctgcaactgccaaatccatatccatcatcagtgaccgagccaagtctgaggaggcgggggcggggggagggtggattaattcggcgagcagcgaagccctggcgtcaaccgcaagcaagaggtggtcaccgaagccgagcgcagacacccatgagtcgccgccgcctgatcgccgggatgatgggctcctgctgccgctgccatggtccc

SEQ ID NO: 146950 - DNA, 2117 bp, Zea Mays
tttttcttccagccatccgtccgtccgccgacaacacgagacgtcgcgacactcacccgtccggccgtccgccgaccgccgtccaggccatcctgctgttcgccgaccgccgtccaggttgtcctgctgttcgccgaccgccgtcgaggccgtcctgctatcgccaacactgctgtccaggcgtccaggcgtcgttctccagccgtcgaagccgtcccgtcggtccagccgtccaggcgtcgaagacacggccgtcgaagtcgtcggtccagccgtccaggcgtcgttctccagcctccaggctccatctgccgtctgccgagccgagtgccgaagacacggccagtaccgcagccgcagtacgtacgttagttgagactcgatatgtctcactctggaacaggacccggaggaggaggagcacgccattcagactcaatgcctgcggagtcagagactgggaacaacaacctaggtttggaaagcatattgccactgcctccacagccgcagcgaccaccactacctccttctgtgagaggcagcagcagcagctctgtttcagcaggaaacaagagaaaaacaagtggaagctctatgggtgcaccaattgttcagtcgtcatcttcagcacaagcagctgaaaataaagatgcaaataaattggttgtcgcagacacaagtaatactggtactagagctgtagcttctgttgatatagcgggccttgatgatgatgaggaggacataccagaggatatgactggaacaggaaagagacaaaagaggcgcacatctattgtatggaagtattttaccaaagaaactgtggaagtggaggtgaatggcaagaagtttgagcagctttgggcctactgtaactttccaaaatgtaagcagagatatagagctgagtctaatcatggaacaaatgcattccgcaaccatctgaggtcacatcatagtattgtcaaaggacagctagaactaaaggcagaaaaggataatggaaaagatgtcaccactattcagccttttaggtatgatccggatgctagtcttagaaaattctatttagcagtaatcatgcatgagtacccattcaacattgttgagcatgattattttgttgatttcatcaagtcgttgaggcctaattttgccttcaagtctagagtgactgctaggaaagatatacttgacatatactttgaagaaaaagaaaaattgtatgcccaattgaaaaatgtaacatgtcgctttagtgcaacaatggatatttggacatcatgccagaacaaatcatacatgtgtgtgacattgcactggatagatgattcttggcatattcagaagagaattgtggggttttttcatgtagaaggaaggcatactggtattaagttggcacagtgctttactgaagtgatggtaaaatggtttgctgagaagaaattgttttcattgaccttggataatgcatcaaataatttagtggcagtcaaagacattattcaagatcttagagtgaatgcttcttcttgtttgatttgtgatggaatattctttcatattagatgtgcatgccacatactcaacttggttgctagagatgggcttgctgttatttcaaaagcactggaaaagataaaagatttggtactaactgtgaagggctctcccttgcaatgggaggaacttatgaagcgtgctactgagtgtggattggatacatcaaagggaattcaactagatgtttccacaaggtggaattcaacttacatgatgctaagggatgcattgcactatgtgtgtttgatgtccgagatagtgattcccaattcatgaatgaagatggcgagctgtgaagaaatcttgcaaatgtgtgtttgatgtcatggactcatgaagacattgaagaacttatattgtgtccatatgtgtgtgtccgtgtgtgactgagactattattttgttaactattattgtgtctggactgaatttatgtaagtttacttgttggatttggatttgtgctatgtgctcatgtactattgtggacttattttcttgttgttcaatggctatgtcggtggacttattttcctgttgttcaa

SEQ ID NO: 146951 - DNA, 677 bp, Zea Mays
gctggtggcaacgcgggcggtagcgcgggcgagagagagctgctaccgcccgcgcgtgggcgagaggcgggcgagaggcgggcgagagggaggcgagagcgaggcgaggcactagcggggcgagagcgacgtggcgcgatctgactggtccacgtgtcacgatctgattggtccacgtgtgctagccgttgcaactagccgtttttgaccgtttggagtccaaaaaattcgaaaaaaaattgcaaaaaatcacttaaagctagctagatcaactgcattagagtgtctagagaagttttgtgagggtatcattcattgttatggggaggagttctgtcgtcgaccaaatgtcgcggatattcagcgtctactagcaaaagcagaatagcgtggctttccaggcatgctaggaagtatcgattgtatgcattggcaatggaggaattgtccggtcgcccatgccggtcaattcacaaggggggatatcaaatatcccaccatcatcttagaagttgttgcatcgtatgatcggtggatctggcatgcttttttttggggtggccgggtccaacaatgacattaacgtactgaatcagtcgccattattcaaagatgtccttcaaggtcaaacacccatagtgaacttcatggttaatggacatgaatacaatatggga

SEQ ID NO: 146952 - DNA, 623 bp, Zea Mays
gcaatttaacaaggaatcggcgaatcgcgctttcagaagggcatagaagcgaaactatggaaaggcaaaagaattgtcattccaatatatcagacaaaaagagaaaacattctaatatattagacaaaaagagaaaacattgtaaaaaactggcaccaaagctggcgccaacaccaaaacaactaggcaagcaagacctaactagaatcactgaaaggaaaaaaaatctaaccccttgaccaggcccccagacactactatcaggccagacctctacccacaagatatttcaccatctgcaccacttgctctgtcgttctctgttgacccttgaagattctgttgtttctctccaaccataagctccaccagaaataaattagaaggtgttgagcaccaaattgagcgggcggacggtccggccctgaggccggacggtccgcgcttgcgcagaacagtttagggttccgagttttgtgctatgattgttggctagattcacggaattaactcggaatctagtcgtgtaaagggtccagcccccctcctctatataaagagaggtctacggccgatttgtaatcatcaacaatcgaatcaatacaacttctattcgcatttta

SEQ ID NO: 146953 - DNA, 2010 bp, Zea Mays
atttcccttcatccatctccgtaatcctgcctttctctctcttctgtcttctcccctgattctccaagccgagctcgagcttccaaaccctaggcctcaccggggagccatatccgccacgccagcgatgcctctcgccgcagcggcttgacggggcctgcccccaaatctacctcttcagcggagaggcgctgcgtggttgctgtgggaggcgcggcgcgggtcggaaatggagccgaggaggatctcggcgagcccgcgcccgtgcagcgtgcggcgggtggtggccaggaagaggccgaggcaggaggcggtggtgagcagcgtgcggaagctgcagcgccgggagatcagctcacgccgcgaccgcgccttcgccatgagcgccgcacaggagcgctttcgcaacatacatctgcaggaagagtttgacactcatgatccaaaggagaacactttgctactcccttacttgaggaaaaggtcaaaaattattgagatagtcgcagcgcgtgatatagtctttgctttatcacagtcaggagtatgtgctgcttttagtagagaggcaaatgagagaatatgttttctgaatggaagtccagatgaagttatccgcagtttattttacaacaagaataatgactcactcattaccgtgtcagtatatggttctgaaaacttcagtgctctgcgatgcagaacaacccggatagagtacattcggcgaggacaaccggatgctggtttccctctttttgagtccgagtccttgaaatggcctggatttgtagagtttgatgatgtcaatggaaaggttttgacttactctgctcaagacagcacttacaaggtgtttgatttgaaaaactacacattactgtattcggtgtcagataaaaatgttcaagaaataaagatcagccctgggataatgctattgatttatacaagaacaaatagctcggttcctctgaagattctttccattgaggatggtacagtcttgaagtccttcagccaccttctccatcgtaacaagaaggtagatttcattgaacagttcaatgaaaagcttctggtcaagcaggaaggggagaatcttcaaattcttgatgtaaggaacttccaattgacagaagtgagcagaactgagtttatgactccatctgcctttatttttctgtatgagctgcaactgttcctgacgttccggaatcgatcagtagcagtttggaactttcgaggtgaactggtcacatcatttgaagatcacctgttgtggcaccctgactgcaacacaaacaacatatacattacaagtgatcaagatcttattatttcatactgcaaggctgactcaactgattcctcttcagaagaaaatgctggctctataaacataagcagcatactgaccggcaaatgcttggcaaaaataaaccctggaaattcgtgcaagcaaaaggatccatgcaagcagaagaaagcatggaggttccagaatacagtctcggaggccctggaggacatcacagctctatactatgacgaagatcgtgacgagatctacactggcaaccggcatggccttgtccatgtgtggtcgaactgaaagccgaaatagtggcggctttcacccacagcatggtgatcttcacctgtatgtgtattaacagcttgtacctcacatggcaggggggcacgaagacggaccccccagccaccaggtacggacgtgatgcttcattgttgaggcaattcttatttatcccaccagcgtggcaagagctctcaccacataggcacccattcagaaatcagaacaccccctccccgatttgttgtaggattgacaatcgttgtgcgttttaaatatagcatgtgtgttaattttttgttgttgttgggaatgtcgattatgtcccacaactcagtcagtgagttcaagtgttacggatgtaccttgcaagtaatgagattcattcgttgagttgtgatttcgttcaa

SEQ ID NO: 146954 - DNA, 517 bp, Zea Mays
atctatgtaattatgcagtgccttgtcattgatgaagccgatcgcatacttgagcaaaactttgaggaagacatgaaacaaatatttaaacgccttccccagaataggcagattgttcttttttctgctacacagactccagaggttgaaaaatttgctaaactgtcatttgagaaaaatgaagaaagtaaaaaaagcctgtttatgttggagttgatgatgataagtcaaaggctactgttgaaggcctgcaacagggttattgtgtcatttctagcgataaaaggttcttggttctgtatgctttcctaagaaagaagcggaataataagatcatgtaattcagtaaagttccacgctgaacttctgaattttcttgggatagagtgttctgatatccatggaaaacagaagcaacagaagcgaactactacattctttagcttttgcaaggcaggaaagggcatcttattgtgcactaatatggctgcccgtggacttgatattcctgacgtgg

SEQ ID NO: 146955 - DNA, 417 bp, Zea Mays
ttttcttatataatttgctcttcttatgcggtaatgccccacaggttgaaaaatttgctaaactgtcatttgagaaaaatgaagaaagtaaaaaaagcctgtttatgttggagttgatgatgataagtcaaaggctactgttgaaggcctgcaacagggttattgtgtcatttctagcgataaaaggttcttggttctgtatgctttcctaagaaagaagcggaataataagatcatgtaattcagtaaagttccacgctgaacttctgaattttcttgggatagagtgttctgatatccatggaaaacagaagcaacagaagcgaactactacattctttagcttttgcaaggcaggaaagggcatcttattgtgcactaatatggctgcccgtggacttgatattcctgacgtgg

SEQ ID NO: 146956 - DNA, 318 bp, Zea Mays
atgggccccagctccggcgactccatccactccgccagggccgacgtcagcgccgacccggcctcgccggggtgcctgcccacgatgtacagctcgtgcgcgctgtccaggtcccggatggccgccagcgtgtcctcgctgttggccaccacctgctccatgtacaggatcgcgttgttgccgacgttgcgcgtccggaactcgttcaggtactcctcgtccatctgccgctcgctcttggggacgatggtgatggcgcgcgcgtggacgctggacgcgggcatgtgctgcggcggcgccagcgcgggggccctgtag

SEQ ID NO: 146957 - DNA, 393 bp, Zea Mays
atgtcgagaaacgacactaagttctttcagcgcttcccaccaccgccgcccaacttggggcccttggaacccttctggaccgcaccctttgtctgcgtcttctgggacttgctcacctccgccttcttcgctttcttctcatccttggtcttcttgatgcgctccttgatctcacgaagagcagcttctctagcagcatcgcggacctctggcttctcagctctcttcttctggattacttccaaggaagcacccacaattgacctggagtatggcttcttggtggcgcggcgcctcttctttaccgcttcagcatggatatccttcttgtgctgcttcctgtacattgctgtccaggtaagctttgcaggcttcaggcggttgtggaagtag

SEQ ID NO: 146958 - DNA, 1762 bp, Zea Mays
aaacagcgaggcagagaagcttcgggcgcggcaaagcagcggcgtcttgcgcagagctacggcgggcgtggacagaacagcggcaagggcggggagaaaagacaaggtttgatgtgttgtgtttttgacaataaggttccatgtgcatttgaattttatttcatatatgcatgtgtttgatgtggttttcaattttgtttcaatgtagtcatagttatggagttaatgcaagttttaatttattgtcaaaatagatggatagaagatgggtttatgggaaacaattcacacctgccatatgtgaaaaggagttgaagagttcatgaattttgttactgaaagatacccagaagacacaaacattcgttgtccgtgcgtgaattgtcttaatcaaaggttgcgacctcagagtgaagtagaaactcatatacacatttatggaatgtcagctacatacacgaggtggattcatcatggggagtcagcagatacagaagttgagggtatagaggaggatgtcgaaggatatgataatgactttgggatacatatggatgtggacgatgatgtttacgatgatgatcatggagtacctgagatgatcggtgaactgtttgcagcggcagaggctgatggagaagagccaagatttgcaggagttcttggagattcaaagaaggcacttagtctgggttctagccattcaaaattttcttttatggtgaggatgttgtatatgaagtctcgttatcgaatcagcaatacaacattttcagcaatgatgaagctgatgtccgatggataccctaacagtgagttgccaaaatcatataatgaggccatgaaatatcttaaagaattgggcattggatacgaaaacatccatgtgtgcaagaacaattgtgtgttgtttcagaatgttaatgctaaattgaatgagtgcccagtatgcacggagtctagatggaaagatgaaactggttcgaagcgggttccacataaggttttgaggcattttccactgttgccaaggttgaaaagaatttttgcttcaaaacaaacttcagaggaaacacaatggcacaagaaagtgaggaagccagtcgccaatgtgatgagccatccagctgacggggaagcgtggaaggactttgaccgaaagtacccaggttttgcaaatgatccgaggaacctgaggctagtcttagctaccgatggattcaatccatttggcaacatgagtacccagtacagtatgtggccagtgcttgtgacaccgcttaatctcccaccatgggaatgcgtgaatccaacaaactgctttatgtctttactcatcccaggtccaagatgtctaggaaaggattttgatttgttccttgagcccctaattgaagaactgctgaagctatggaagggtgtcaagacctatgatgcatgtactggtaggaagttcgaccttcgtgctgctgtactatggtgtatacatgattatccagcgctggccacgttatctgggcgaacaacaaaagggtattatgcatgtatttattgcgacaagaatccgttgtctatggcaataaggaacaagttatgctacattggacatcgtcgttaccttaaaaggacacattcatggcggaatagcttggatttcaatggtaagcgtgaaaacaaagttgtgcctggccggttcactgtggatgaggtcctacaagacctagagaaggtgaaagatgtcaggccagggaagcaggctgac

SEQ ID NO: 146959 - DNA, 384 bp, Zea Mays
atggccacggtggcgacgagccacccggcggcgccgtgcgtgccactggccgcgggcgtggcggctggggccgtgcgtgctggcgtcggacgccgctggtaccgagcgcgccggtgcggcagccccggtgccatggcctacgcaaggccgtggagtacgacatccagctcgagacggaggagtgcgtgcggtctgctgccgcttgcgcacagtgtaggaggcggggctggcgccacgcggtcagtggcggggcttgcggacgagcaccgggagcttgaggcggtgctcaggaagatgacgccgcccaacggccgtaccgtgcttatcttccgtgcgccatgcgggtgccctaaggacaggatggaggtctggggcgccggatga

SEQ ID NO: 146960 - DNA, 453 bp, Zea Mays
atggttgttccttctggagaaccaaatgaactacattattgcaagaatgcgtttgaggctggagaggagggatgtaaaaaaattgtgtattctattaagaagggatgtgattgcttgggctacgtaaaagaatttggtgcgcatttcacaaacttcactggtgctgtccaaccaatgtggatccaggaggaattgttgcaaaaactggttattcatggtcaagatgaagcaggtttctcaactcagcaagttggggaacatttggctagggctgcaacttaccaaaaagtcaagagattcttttggttgaagggggtgctgtcaatgacaatcctcacaagtcgaagatgtggttgcctcttgttggattatgaaagatcagccttccttgctatgctgaagaagaaattggcagaggctcagaaatctgtggtcaatcaagcttgtccgtaa

SEQ ID NO: 146961 - DNA, 1898 bp, Zea Mays
tgcagtctactccagcctcaccgcctcaggtcggtcctacacggtcccgttctgcctggtgcctgcaacctgccttttcttcttccgtcgccacccagcgtgctctctctccctctttctctctctctcgtggcggcgcctgggcagccgtcgctgccgcctgcgctaggtgccaggtcttcttcgggcccttcgccggcgacgagtaccaccaggttgtacatgtatacacccatgtgctttactgggtcggaccctactcatcctccacactaaggccatctccatagactgcactgtttagactccactgtttagagagtggagatagggagtgagatagagagtggaatagggaggatgctggagatagcctaaggttgccactgagtgtgtgcatgattcagaggcaatgtcatcacaaactggaggtggcaaagagagtgacgccggccctgggcaacacaggcagatgcaaagtttggcaagacaagggtctttatacaaccttaccctcgatgaggtgcagaaccatttgggggagccattgcttagcatgaattttgatgagctcctgaagagcgtgtttcctgatggtgtagattcagatggtgctgtcacaggcaagcctgatcggacctcgagcctgcagcgacaggggagcatcctgatgcctccgcagttgagcaagaagactgttgacgaggtgtggaagggcatccagggtggaccagagaccagtactgtggtggatggtctgcagaggcgagagaggcatccaacacttggggagatgacacttgaggacttcttggtcaaagctggggttgttactgaaggacttgtgaaggattcagctgattttccaagcaatatggatacagctggcagcagtgttgttgtggctgctgcttctagtttgaaccctggagcacagtggttgcaacagtaccagcagcaagttttggggtcccagcaattgagtttggcaggttcatacatggctagtcagttgcgccctcagccattgtctattgctacaggtgctactttggattcaatttactctgatgaccagattacttcgccatcatttggtgcactttcggaccctcagacacctgggcgcaagcgtggtgccttaggggaggtagtggataaggtggttgaaagaaggcagaagaggatgataaagaatagggaatcagctgcgcgatcaagagcgagaaagcaggcttatactaatgaacttgaaaacaaggtattccgtctagaagaggagaataagaggctaaagaaacagcaggagttggatgagatactgagctctgctcctcccccagaacccaaatatcaactcaggagaacgggttcggctgccttttgagtttcggcgctgacaatgctcatagtgatttttgtacattatacaaggattctactttatatggtttccttccttttgtattagaaacatttgatagattgagggtatagctttttcccggcccggtaggtcagtgtatgtaggtcgctagcaagctgtagcatgtcctggcggatcatttccttggtgtctgtcagtgtgtacatcttctagacacatgtctaagtctgagagcttccttatacgagaaggtattcaggtatgtgttgcgcaggtgtctcctgctgttctgtttcaacggtgcaggctattttttgtgaggtcatcattttgatcacacatttgtgaggtcagaatattgcaagcgctcctcttaacgtctgtgtcaaatcgttcacaggatctatgtatcttaacttcttaacacaagattataatcttgtgactaacgtatattttgtagagctaatttaagttaggtcataataatgattattgtttgggagatcaa

SEQ ID NO: 146962 - DNA, 926 bp, Zea Mays
accagtggtgtttacactatttagctgatttcagcatggtgggatcaaggtttgttatttcgcaatgctacgaccttacagtccgtttctttttagcccattgcaatgggagtatgttgctcccttctgttgtggtgatgcacaaaattttggcagcatgaagtaattgagctacatgctgctcttcctgttgacagtgggtaaacagtagcatggtgctaaaatgcaatgggttacgggtctaataaacattttatgacgttattatgttcaggttgacagccttgctaacattgcctttttgttggggtccttcacttcaccttactttcaggagttggatgagatactgagctctgctcctcccccagaacccaaatatcaactcaggagaacgggttcggctgccttttgagtttcggcgctgacaatgctcatagtgatttttgtacattatacaaggattctactttatatggtttccttccttttgtattagaaacatttgatagattgagggtatagctttttcccggcccggtaggtcagtgtatgtaggtcgctagcaagctgtagcatgtcctggcggatcatttccttggtgtctgtcagtgtgtacatcttctagacacatgtctaagtctgagagcttccttatacgagaaggtattcaggtatgtgttgcgcaggtgtctcctgctgttctgtttcaacggtgcaggctattttttgtgaggtcatcattttgatcacacatttgtgaggtcagaatattgcaagcgctcctcttaacgtctgtgtcaaatcgttcacaggatctatgtatcttaacttcttaacacaagattataatcttgtgactaacgtatattttgtagagctaatttaagttaggtcataataatgattattgtttgggagatcaa

SEQ ID NO: 146963 - DNA, 855 bp, Zea Mays
gcgtcctcgtctaatcaatctccgcctccctgcctccataccctgaccggaccccgatcccgccggcgtctcgcggaatcgcggcggtcaaagcctatacgccaccccacctcacgtcgcgccgcatcgccgcggtttccgcgtgctagtgctctcgggagctcggatcagaggggcgggctagggttcgccaatcgccagcgtgggtactgccgtcgggcgccggcggccgagtagtacgaggagagatggacgcgttcctgcacaggctcaagcggctggacgcgtaccccaaggtgaacgaagatttctacaagcggacgctctccggaggcatcgtcacgctcgtcgccgccgtcgttatgctgctcctcttcatctccgagaccaggtcatatttttattcgtcaacagagactaagttagtcgtggacacatcaagaggggaaaggctacgagtaaattttgatattacttttccgagcattccttgcacactcctcagcgttgatacaacggatattagtggagagcagcatcatgacattaggcatgacatcgagaaaagaagattaaattcacatggtaatgttattgaagcaagaaaagaaggcattggcggagcaaaggtcgagaggccgttgcaaaaacatggaggaaggcttgacaaaggtgaacaatattgtggcacgtgttatggtgctgaagagtcggatgagcaatgctgtaattcttgcgaagaagtcagggaagcatataagaagaaagggtgggctctaacaaatcctgacctaattgaccagatgtcagtaaagttgctggaaattttcacttcgccccaggcaaaggatttta

SEQ ID NO: 146964 - DNA, 1670 bp, Zea Mays
cgtcctcgtctaatcaatctccgcctccctgcctccataccctgaccggaccccgatcccgccggcgtctcgcggaatcgcggcggtcaaagcctatacgccaccccacctcacgtcgcgccgcatcgccgcggtttccgcgtgctagtgctctcgggagctcggatcagaggggcgggctagggttcgccaatcgccagcgtgggtactgccgtcgggcgccggcggccgagtagtacgaggagagatggacgcgttcctgcacaggctcaagcggctggacgcgtaccccaaggtgaacgaagatttctacaagcggacgctctccggaggcatcgtcacgctcgtcgccgccgtcgttatgctgctcctcttcatctccgagaccaggtcatatttttattcgtcaacagagactaagttagtcgtggacacatcaagaggggaaaggctacgagtaaattttgatattacttttccgagcattccttgcacactcctcagcgttgatacaacggatattagtggagagcagcatcatgacattaggcatgacatcgagaaaagaagattaaattcacatggtaatgttattgaagcaagaaaagaaggcattggcggagcaaaggtcgagaggccgttgcaaaaacatggaggaaggcttgacaaaggtgaacaatattgtggcacgtgttatggtgctgaagagtcggatgagcaatgctgtaattcttgcgaagaagtcagggaagcatataagaagaaagggtgggctctaacaaatcctgacctaattgaccagtgtgcaagagaggattttattgatagagttaaaactcagcaagatgaaggttgcaatgtccttggctttttagatgtcagtaaagttgctggaaattttcacttcgccccaggcaaaggattttatgaatcaaacatagatgtgcctgagctgtcattacttgagggtggtttcaacattagccacaaaataaacaaactgtcctttgggacagaattccctggtgttgttaatccacttgatggtgctcagtggacacagccagcttcagatgggacataccagtatttcataaaagttgtccctacaatatacactgatattagaggacgcggtattcattcaaaccagttctcggtaacggaacattttagagatggaaatgttcgtccgaaatcccaacctggagtatttttcttctatgatttctcacctataaaggtgatattcacagaagaaaatagatccctactccactacctgacaaacctttgtgctatagtgggagaaggcgctcaagaagaaaatggagttaggcaaatacagatgatcaacttggaccttgtactggccccgtcgtttccaaattttgaggcatgtaaggagcttatatgcctgctaaacatgacgagtaccacttaagtcggagactgcaaggccatcaaactgatgttattgcacattagctgatcagataacttgtaaaatgacaaggaatagcctggtctgaggggtgggtggcggtgtgtgtgggtgtgtgctttgatgcctatcattgttgactgttgttgaatgacatgtttgaaggtggataggtcagatcacagaatgtttctcatgaaagtttgttcaaggaaacagcttcact

SEQ ID NO: 146965 - DNA, 1806 bp, Zea Mays
ccggaccccgatcccgccggcgtctcgcggaatcgcggcggtcaaagcctatacgccaccccacctcacgtcgcgccgcatcgccgcggtttccgcgtgctagtgctctcgggagctcggatcagaggggcgggctagggttcgccaatcgccagcgtgggtactgccgtcgggcgccggcggccgagtagtacgaggagagatggacgcgttcctgcacaggctcaagcggctggacgcgtaccccaaggtgaacgaagatttctacaagcggacgctctccggaggcatcgtcacgctcgtcgccgccgtcgttatgctgctcctcttcatctccgagaccaggtcatatttttattcgtcaacagagactaagttagtcgtggacacatcaagaggggaaaggctacgagtaaattttgatattacttttccgagcattccttgcacactcctcagcgttgatacaacggatattagtggagagcagcatcatgacattaggcatgacatcgagaaaagaagattaaattcacatggtaatgttattgaagcaagaaaagaaggcattggcggagcaaaggtcgagaggccgttgcaaaaacatggaggaaggcttgacaaaggtgaacaatattgtggcacgtgttatggtgctgaagagtcggatgagcaatgctgtaattcttgcgaagaagtcagggaagcatataagaagaaagggtgggctctaacaaatcctgacctaattgaccagtgtgcaagagaggattttattgatagagttaaaactcagcaagatgaaggttgcaatgtccttggctttttagatgtcagtaaagttgctggaaattttcacttcgccccaggcaaaggattttatgaatcaaacatagatgtgcctgagctgtcattacttgagggtggtttcaacattagccacaaaataaacaaactgtcctttgggacagaattccctggtgttgttaatccacttgatggtgctcagtggacacagccagcttcagatgggacataccagtatttcataaaagttgtccctacaatatacactgatattagaggacgcggtattcattcaaaccagttctcggtaacggaacattttagagatggaaatgttcgtccgaaatcccaacctggagtatttttcttctatgatttctcacctataaaggtgatattcacagaagaaaatagatccctactccactacctgacaaacctttgtgctatagtgggaggtgtgttcaccgtttctggtatcattgactcgttcatataccatggacagaaggcgctcaagaagaaaatggagttaggcaaatacagatgatcaacttggaccttgtactggccccgtcgtttccaaattttgaggcatgtaaggagcttatatgcctgctaaacatgacgagtaccacttaagtcggagactgcaaggccatcaaactgatgttattgcacattagctgatcagataacttgtaaaatgacaaggaatagcctggtctgaggggtgggtggcggtgtgtgtgggtgtgtgctttgatgcctatcattgttgactgttgttgaatgacatgtttgaaggtggataggtcagatcacagaatgtttctcatgaaagtttgttcaaggaaacagcttcactcatggtgtcacccatctttctaactttgttcattggttatcgccgctctttattatattgctttacacctaatgaccttagaggattccgttatatcattttatttccagttgaggtatccagtaaatata

SEQ ID NO: 146966 - DNA, 433 bp, Zea Mays
ttatttttttattttctcaaccaaactttttgtggtgtgttgctacactatatagacctacatgtaccattttgggacaattagaaaagtgtttcctatagctagtagatttagttcgtttatttgaatttcttcgaaaaattcacatttgaactgcaagtcactcgaaacttagaaaaccgtgcatgcaaaaatcatatccatgctatttagcacaagttacgaccgatttcaggagcggaccggaaacttcgagcaccatgctcactcaacatggtcgtgaacttgccatccagctgtttaaaatcatgaaacttgtccacgtgtcatgatatcatatgtagaggctgtgataaaaatttgagaatgtttagaaaaagttgtgagacactatgtgtagaaacctaagagaactacacattaaatcatagag

SEQ ID NO: 146967 - DNA, 524 bp, Zea Mays
ccaaccggcggccagagcacggcccctggcggtgcaaccccacgcggacgcggcctccggcggctctgagccaggcggccatcggctccgacggcgcacggcctcgtgcggcctccggtggtgcgtgggcggcctgggcgcggccagccctagccacggcatggcggtcgcggcctcaggcgtagatgtggcggcgtgcggccctcggcctagaagcggcggcgcggggcacgacaccctggcggcccgggcgcgcggctcccccggcggcacgagcgcacaggccctggcggcgccggccccgacgcggttgcagcgcgggggtccagacccggcggcacctgcaccggcgcgtgggcgggcacggcagcccggcctcgtgcggctccgtccccgacgcaggcgcgggtgtggtggcccggcagcgcgggcgcgatggcctcttatcaggttgggccccggtgcgggctcagcctccggcgcgatgcctcagcaccggcgtgtgtgggccccgcggtcccgtc

SEQ ID NO: 146968 - DNA, 252 bp, Zea Mays
atgtgggctgcaacaacaattacagaggcagcggcagacaggaagagcatgacatggcgcttgaagatggatcacgcgttcctagacagagaatggtaccgcaagggagtgaatcaacaaagggcagtcaatagctccatgaaaaagatcgaggattttgcaatcagtggtgatggcggcagcactagcattattggactacctgatcatagatatggcccacatgcatttgctcctagttcagcccaatga

SEQ ID NO: 146969 - DNA, 624 bp, Zea Mays
atgatactgatgtgtactcaaaagggacatggcaaagtacagcttgtgtgcctgatatttcacttcaattcattcatagataacggggatcgctcctcacttggccatcatgaccttgacgaactcctcgtagttgatctggccgtcgccgtcaacatcggcctcacggatcatctcgtcgacctcctcgtcagtcagcttctcgccgaggttggtcatgacatggcggagctcagcagccgagatgaaaccattctggtccttgtcgaagacgcgaaaggcctccttaagctcctcctcggagtcggtgtccttcatcttccttgccatcaggttcaggaactctgggaagtcaatggtcccattgccatcagcatcaacctcgttgatcatgtcctgcagctctgcttcagtggggttctggccaagggagcgcatcacagttccaagctccttggtagtgatgcagccgtcgccatccttatcgaagaggctgaaggcctccttgaactccgcgatctgctcgtccgtgagctggtccgccatggaagatggctgcggcgagggcacgcgatggggaagaaggggaaacgatggatgctcgtgctcgcgtcactttgttga

SEQ ID NO: 146970 - DNA, 1336 bp, Zea Mays
ttggtccccttgtcgcgcgtccataaagacacaaacacgacgcgaatcgggtccgtgtccgtgtccgtgtccgcgcacagcgcactgcacctgaccgccggcagcggacgggcgtatataaccggctacggcctgtgaaaattgcggcacgccgatattggacaccgaatgagcgagctgcgagcaccagtttaggcaagtgagcagctcgccagttgtcggtcgcggcctcctgcgctcagcgcttcgctcgcggtgccggtgcgtgaggtgaggttgatgggcgcggagggatgagcgagagcgccttgaccataaggcggctgagcgggccgtcgaacggcggcggcaatgcgggagctagctcttgcgcggtcggcacctggggaggaggaggcggcggcggcggcaatgcggcgcgcatccggggcgtcaacgtggggctcatggacgagaaggtgctgcagctcgtgttcctggcgctcaactgggacccgcagtcgctgtgcgcggtggcgcgggtgagccggcgcctgcgcgccgtggcggagcgggtgctgtggcgggagctctgcgtctcgcgggcgccgcggatggtggcggcgctgacgggaggccccgcgggctcggcgccggcggccgggcgcgtcggcggcgggtggccggcgctggcgaagctgctgctcttctgctgcggcgccgcgggcgcgggcgtgacgggccacttcgccccggtctcccgcttctccaagacgtccgggcggagcttcctgccgcgccgctgcgcgggggacctgctgtacgtgtcggacccctgcgagcacgccgtggcgggcgccgacgacgtcggcgtctaccgcggcgtgttccgcggcttcatgcggtcccggacgcgggcgtggctggtgggccaccgcgccgcgctggacccccgcgcgcgatgcccctactgcggcgcgcgcgtctggagcatggccgccgcgggtctcgccccgcgcagcgcgtcccgcaggctcggcgcctacgagggccggctcgagtacttcgtctgcgtcagcggccacctccacggcagctgctggctcgcgcgcctctccgacagcgagggcaccggacccgacgccgacgacacgtccgccggcgccagcgacgaggacgacgccgacctgtgacgccgatcgacgggagggacgtgtacagagtattagatagcgtcaacttgccatttctccaccttgttgtctttgattcatcttgtaaagttgtaaattgtaatgcggtagttctagcgttctgcacttgccctgttggctattgctgcattgcatttcactgc

SEQ ID NO: 146971 - DNA, 279 bp, Zea Mays
atggatcccctccggcagcttgatcgccctgtcgagggcatcggagacgacgttgccaatgtcaccgagggctcggcgtgtcccggcggcggcggcggcggcattctgtttcccggcgaccctcgcggcacctctgttcgccggctgcggagcggcagcggcgcggtggttcctcgtcgccattgcttagtcgccaacccgcggacaccgacgccaagaaatgctgcggctgcgcccgggctatccttgaaaagacacgggacaaggagaagctcgtaa

SEQ ID NO: 146972 - DNA, 1505 bp, Zea Mays
ggcatcgagcagtctgcgagatctcgattcgtctggaagacatcgctactaccccagccacagtacccattgggtatttatctgctcccttgctgaagctggaatgtgcagctcgatcggttagcgctacgagtcctcgctgaatccagccaaatgatccccttgagcttgccagttagagcacggtgagtcagcaaagattaaaatagcctccgcacctaatataatgctggccttccgtcagaagtaacagctagctaagagaagcacaagaaaaatctggtagcttgagttctgactcgaactcagagatggcttatgcaagccccgggactgatgatacgtcgacagatctagatactgacgagaagaatcacatgttggagctagggcagcttgtgtcccttacagcttctgattccggcaacaaagcaaaggacaagctactaggtcaaaaggcactgcgccgtctggcccagaaccgtgaagctgctaggaaaagccgtctaagaaagaaggcatacgttgagcaacttgagaatagcaggctgaaacttagccagctggagcaggaactccagcgtgctcgccaacagggcatcttcattcctactccgggagacgaccagcagccaaactctactagtgaaaaaggtgctttggcgtttgacaaggactacgctggatgggaagacgagcacaggaagcagataagcgagctgagggccgcgctcagcgcacacgccggtgacgacgagctccggcgcatcgtggacggcgtcatggcgcatcaccacgaagcgttcaggctcaagtgcgtggcagccagggccgacgccttccacgtgctgtcggggatgtggaagacccccgtggagaggtgctttatgtggctgggcggatttcgaccgtcagagattctaaagttcctcgcaagccatctggaccccctcaccgagcggcagctcgcgagcgtacacggcctgcagcagtcctcgcagcaagccgaagagggcatctcgcagcgggtgcaagcgctgcagcagtcggtcgcggagaccctcgcgtcgtcagggtccccgtgcctgcctgtgcctgcaggtcgtgctcctccgcctggcgacgacgccgctccagactgctcggggacgatggcggcggcggttgcgaagcttgtcgctcttgaaagcttggtgcatgaggctgacggtctgcggaggcagactcttgagcagatgcagcgcgtgctgaccacccgccagtccgcgcgggcgctgcttgtgatcagtgactacctttcccggctacgcgctctgagttctctctggatcgcacgaccacgggaatgaattcagctcggcttatgtatctttgtttgacccggccgtggagaaaaataagaatcgaagatgcctccgctccttccatcatcactgcatgtaattgtaatctgaacatcattataaacagccgtaaccgttggccatcatcagggttaaagacgc

SEQ ID NO: 146973 - DNA, 1480 bp, Zea Mays
ggcatcgagcagtctgcgagatctcgattcgtctggaagacatcgctactaccccagccacagtacccattgggtatttatctgctcccttgctgaagctggaatgtgcagctcgatcggttagcgctacgagtcctcgctgaatccagccaaatgatccccttgagcttgccagttagagcacgcacctaatataatgctggccttccgtcagaagtaacagctagctaagagaagcacaagaaaaatctggtagcttgagttctgactcgaactcagagatggcttatgcaagccccgggactgatgatacgtcgacagatctagatactgacgagaagaatcacatgttggagctagggcagcttgtgtcccttacagcttctgattccggcaacaaagcaaaggacaagctactaggtcaaaaggcactgcgccgtctggcccagaaccgtgaagctgctaggaaaagccgtctaagaaagaaggcatacgttgagcaacttgagaatagcaggctgaaacttagccagctggagcaggaactccagcgtgctcgccaacagggcatcttcattcctactccgggagacgaccagcagccaaactctactagtgaaaaaggtgctttggcgtttgacaaggactacgctggatgggaagacgagcacaggaagcagataagcgagctgagggccgcgctcagcgcacacgccggtgacgacgagctccggcgcatcgtggacggcgtcatggcgcatcaccacgaagcgttcaggctcaagtgcgtggcagccagggccgacgccttccacgtgctgtcggggatgtggaagacccccgtggagaggtgctttatgtggctgggcggatttcgaccgtcagagattctaaagtacagttcctcgcaagccatctggaccccctcaccgagcggcagctcgcgagcgtacacggcctgcagcagtcctcgcagcaagccgaagagggcatctcgcagcgggtgcaagcgctgcagcagtcggtcgcggagaccctcgcgtcgtcagggtccccgtgcctgcctgtgcctgcaggtcgtgctcctccgcctggcgacgacgccgctccagactgctcggggacgatggcggcggcggttgcgaagcttgtcgctcttgaaagcttggtgcatgaggctgacggtctgcggaggcagactcttgagcagatgcagcgcgtgctgaccacccgccagtccgcgcgggcgctgcttgtgatcagtgactacctttcccggctacgcgctctgagttctctctggatcgcacgaccacgggaatgaattcagctcggcttatgtatctttgtttgacccggccgtggagaaaaataagaatcgaagatgcctccgctccttccatcatcactgcatgtaattgtaatctgaacatcattataaacagccgtaaccgttggccatcatcagggttaaagacgc

SEQ ID NO: 146974 - DNA, 1478 bp, Zea Mays
ggcatcgagcagtctgcgagatctcgattcgtctggaagacatcgctactaccccagccacagtacccattgggtatttatctgctcccttgctgaagctggaatgtgcagctcgatcggttagcgctacgagtcctcgctgaatccagccaaatgatccccttgagcttgccagttagagcacgcacctaatataatgctggccttccgtcagaagtaacagctagctaagagaagcacaagaaaaatctggtagcttgagttctgactcgaactcagagatggcttatgcaagccccgggactgatgatacgtcgacagatctagatactgacgagaagaatcacatgttggagctagggcagcttgtgtcccttacagcttctgattccggcaacaaagcaaaggacaagctactaggtcaaaaggcactgcgccgtctggcccagaaccgtgaagctgctaggaaaagccgtctaagaaagaaggcatacgttgagcaacttgagaatagcaggctgaaacttagccagctggagcaggaactccagcgtgctcgccaacagggcatcttcattcctactccgggagacgaccagcagccaaactctactagtgaaaaagcaggtgctttggcgtttgacaaggactacgctggatgggaagacgagcacaggaagcagataagcgagctgagggccgcgctcagcgcacacgccggtgacgacgagctccggcgcatcgtggacggcgtcatggcgcatcaccacgaagcgttcaggctcaagtgcgtggcagccagggccgacgccttccacgtgctgtcggggatgtggaagacccccgtggagaggtgctttatgtggctgggcggatttcgaccgtcagagattctaaagttcctcgcaagccatctggaccccctcaccgagcggcagctcgcgagcgtacacggcctgcagcagtcctcgcagcaagccgaagagggcatctcgcagcgggtgcaagcgctgcagcagtcggtcgcggagaccctcgcgtcgtcagggtccccgtgcctgcctgtgcctgcaggtcgtgctcctccgcctggcgacgacgccgctccagactgctcggggacgatggcggcggcggttgcgaagcttgtcgctcttgaaagcttggtgcatgaggctgacggtctgcggaggcagactcttgagcagatgcagcgcgtgctgaccacccgccagtccgcgcgggcgctgcttgtgatcagtgactacctttcccggctacgcgctctgagttctctctggatcgcacgaccacgggaatgaattcagctcggcttatgtatctttgtttgacccggccgtggagaaaaataagaatcgaagatgcctccgctccttccatcatcactgcatgtaattgtaatctgaacatcattataaacagccgtaaccgttggccatcatcagggttaaagacgc

SEQ ID NO: 146975 - DNA, 1475 bp, Zea Mays
ggcatcgagcagtctgcgagatctcgattcgtctggaagacatcgctactaccccagccacagtacccattgggtatttatctgctcccttgctgaagctggaatgtgcagctcgatcggttagcgctacgagtcctcgctgaatccagccaaatgatccccttgagcttgccagttagagcacgcacctaatataatgctggccttccgtcagaagtaacagctagctaagagaagcacaagaaaaatctggtagcttgagttctgactcgaactcagagatggcttatgcaagccccgggactgatgatacgtcgacagatctagatactgacgagaagaatcacatgttggagctagggcagcttgtgtcccttacagcttctgattccggcaacaaagcaaaggacaagctactaggtcaaaaggcactgcgccgtctggcccagaaccgtgaagctgctaggaaaagccgtctaagaaagaaggcatacgttgagcaacttgagaatagcaggctgaaacttagccagctggagcaggaactccagcgtgctcgccaacagggcatcttcattcctactccgggagacgaccagcagccaaactctactagtgaaaaaggtgctttggcgtttgacaaggactacgctggatgggaagacgagcacaggaagcagataagcgagctgagggccgcgctcagcgcacacgccggtgacgacgagctccggcgcatcgtggacggcgtcatggcgcatcaccacgaagcgttcaggctcaagtgcgtggcagccagggccgacgccttccacgtgctgtcggggatgtggaagacccccgtggagaggtgctttatgtggctgggcggatttcgaccgtcagagattctaaagttcctcgcaagccatctggaccccctcaccgagcggcagctcgcgagcgtacacggcctgcagcagtcctcgcagcaagccgaagagggcatctcgcagcgggtgcaagcgctgcagcagtcggtcgcggagaccctcgcgtcgtcagggtccccgtgcctgcctgtgcctgcaggtcgtgctcctccgcctggcgacgacgccgctccagactgctcggggacgatggcggcggcggttgcgaagcttgtcgctcttgaaagcttggtgcatgaggctgacggtctgcggaggcagactcttgagcagatgcagcgcgtgctgaccacccgccagtccgcgcgggcgctgcttgtgatcagtgactacctttcccggctacgcgctctgagttctctctggatcgcacgaccacgggaatgaattcagctcggcttatgtatctttgtttgacccggccgtggagaaaaataagaatcgaagatgcctccgctccttccatcatcactgcatgtaattgtaatctgaacatcattataaacagccgtaaccgttggccatcatcagggttaaagacgc

SEQ ID NO: 146976 - DNA, 824 bp, Zea Mays
acagccttatactaataatgcataactgaaccagtaagtggactaggggttataccacagaaagtaaaattagaagcaaaccagaaactagattaaacattagtaggggtcctaaaagaaaatttgggtatttgggaccataaagaatacgatgcacatatgctcaagtacctacaatttcagtaacaaaacaattttgctcaatgaaggtatgtatgtcaagaaagagttcttgctggatatcagcgcaaatagtggacctgagccatcagatgaggcatgcagattaataaggacagcttcaaaataaaggtagtgcaaaggagtagcctaaccttagctccaaatggatccaatttccaatgtaaaatggcagtatgagcaaagagtatttgagtgcctcctcactcctaacatccaagcattaattctctcaaataactggaaaccaagcaaaccaccaaaaatccaaatcaaacaattgaaatggaaagtgatatgcagtcaatattcaggaacagtagttagtgcaatctctggacaatgtatcgtctcggttgtgatcatgtagatcatataactatagcatggaggattcaaagcatctgaaacagtagatcagtccaagtaatcaagcttcaatacacactatgcacactatctgaaagttctctggctagcaaaattgaaggtactaaatttcagaagataggcacacattatgatcaggatcagactgaactttaaagtttcaagtgcaaaacctacatttactaaagagaccatctatgatgatttgtctattttggttcagtgataggctt

SEQ ID NO: 146977 - DNA, 669 bp, Zea Mays
gttgtaggtttgaatagatctggatccttctgtgcccatgcaagtatcccacctagagatctgcaatcagcaagaccaacctctggtaactatccaattgatagtgagaacagagaacacttaaacagcacgaacattcgtcaaataatgtgggataggaagtccaatcatccgccaacaagttcaactgcaaagtcctatctccattgcgatgcctccaaaactgcagattacaatcgaatcattgaaggtagcctacaagtgaactaactttagaagaacatttgacatataggatgggttttttttttgaacaaacaaggaaccctgaagagttcagaacttattattgctgacgcagaagcagaatcgaactcaggcaccaatccatccatttacaatccagttgctggagaagaacaccagcccaaaaataagaaacaacaaattcaagagtaccaataaaagagagcatgcccatgaacttagtccagtcaaagcttcaatctacgtccaaaacatcacctctgttgcctctacatttttccaatcaaggacaatcaagtttaattaatcgggtggcgatcttcacgccaccatgatcataagaatagccatgtaacaaatcaaaaccaacgaatttaagcaaacctccacccttcaacggat

SEQ ID NO: 146978 - DNA, 700 bp, Zea Mays
gagttcagaacttattattgctgacgcagaagcagaatcgaactcaggccccaatccatccatttgcaatccagtcaaagcttcaatctacgtccaaaacatcacctatgttgcctctacatcatttttccaatcaaggacaattaggcttctaattaatcaggtggcaatcatcacgccaccatgattgacataagaacagtcatataacaaatcaaaaccaacgaaagtaagcaaacctccacccttcaactgatctttccataacaaggcggacctttccttccacatctaggaggacaaaaccagaaggtacctttcattttgcagcaacacaaccggaatgatttctgacctgcccccagttttaaatatcagttcttcgctacagggatttttgattgccaaacttaccctacaaccacatgtaaaagcaaccacaacatagataaagctagacaaaagcatccacagaaatcccaaaccaaaacaagtatcgtgaccgttggactaccaattatttgagccaaatgatctgcagacacagaaattccagcagcacaagaattaaagctccagtcgaagcatatagcatgataaagcagaaacaagtttgattaaatgaaagttgtagggctgtagttctaccaatatctgcttaaatctcccacatcccaaacttgcccagtgacttctatcg

SEQ ID NO: 146979 - DNA, 363 bp, Zea Mays
atggccgcgtgcaaggccgagccggggctgcggcgggcacgccgcgcggggctgcgccagccggacgggcgcgagggagaagggcgagggggggtcggggcgagcgcgccccgcgccgaggccgggatgccacgcctccatggccgagcgccagaggccgggccgggggagcgggcaggcgagcgagccacgcgccgccacgccgaggggagcgggcgggcgcgcaggggccgcgccacggcgaactcgcctggctgggcgcagggcgagggggagcagacgccggaccaagccgggaaagcgggcgggcgagccgcgcgccgccacgccacgacatccgccgcgccgagcaagccgtggtga

SEQ ID NO: 146980 - DNA, 106 bp, Zea Mays
cggttcccactcgtccgccgcgaaatcgcgtacgaggatctgtaattgagtctcgactcactggtaaatcatccgtggtcgtggaaccagatgttcagaccgcagg

SEQ ID NO: 146981 - DNA, 537 bp, Zea Mays
atgccactgggcgacgacgcggaggcgaaggacttcgtgctgccggacgagctcctggcggcgctgccgcgggacccctacgagcagctggcctcgacgaagaggagctccccactgacgatgagacggtttatgctgatggagatagctcagtgtcgacatatgaaaggcgagcaagccttagggaattctatgcagcttgagagtagtttgatcgagagggacctaaaagggaagggccgatgcaaggatatagtgagtaggaggaggatggaggattggaaaaagccgccgcggcgcctccaggagtccaggccgccatcgcctgtgccaggcagcgccatccctgtccgcgtccgcccatccgccgcccccacaaggccacaacagggacgtccgccacccgccaagcagggccagtccgcctgctcgcttgctccagcactatctggtatgctcaagcactatccccatcagacgacgtttaatctatctggtatgctcattgctcaagcgaacaacattgcattcagttga

SEQ ID NO: 146982 - DNA, 1919 bp, Zea Mays
gcaagtttgcgctgggatttggtatttctggccgcccaaccccacaaaacccccacgaaacccacccgcatttcccctgtgcagctgtgctggccaagtcgtctggactctggagcctgtctgcccgtcccggttcagcttgctcgcctcgcttatgagttctgagctgtgacaagaactcaggaggtggttgacgggtgaagcgatggtggggagctacgcgaacggtggcggggctgcgccggcggcggtagcggcggagaagctcgacgagctgcggctgctgctggggaagtcggacggcgacacgctgcgggtcgtcggggtgggcgccggggcgtgggggagcgtgttctgcgcgcttctgcaggacgcgtacggccggcaccgcgaccgggtgcaggtgcgcgtgtggcgccgcgccgggcgcgccgtagaccgcgccgacgccgagcgcctcttcgaggtcatcaactcccgcgaggacgtgctgcgccggctcatccgccgctgcgcctacctcaagtacgtcgaggcgcggctcggggaccgcacgctgcacgccgacgagatcctccgcgacggcttctgcctcaacatgctcgacaccccgctctgcccgctcaaggtcgtcaccaacctgcaggaggccgtttgggacgccgacatagttataaacggcctgccctccacggagaccagggaggtattcggggagatcgggaggtactggaaggagcggatcagccagccgctcataatctcgctggcaaaggggatcgaggcgtcgctcgaccctgtgccccggatcattacgcccacgcagatgatcagcaatgcaactggagttcccttggagaacattctatatcttggaggcccaaacattgcttctgagatttataacaaagaatatgcgaatgctcgcatatgtggagctgacaagtggaggaaacatcttgcaaatttcttgaggcaacctcattttattgtatgggacaatagtgatctcattactcatgaagtcatgggcggcttaaaaaacgtatatgccattggggccggtatggtggcggcccttacgaatgagagtgcaaccagcaaatcagtatacttttcactttgcacatcggaaatgatatacatcactcatcttctagcaccagagcccgagaaacttgcaggacccttattagctgatacatacgtcacactgctgaaaggtcgcaatgcatggtatgggcagaagttagctaagggagaactgactctagaaatgggggacagcatcaagggcaaagggactatccagggtgtttctgcagtcaatgcattttatgaactgctgagccagggaagcctaagcgtgatgcatccagaaaccaagaaggctgttgctcctgttgagctatgcccaatactcaaaacactatacaaaattttgatcaagagggagcttacgaccaattccatcctccaggcaatacgtgatgaatcaatgtatgatccacgggaaagaattgagatggcacagaggcagtctctttaccggccatctcttcttggcctgcctaaagctgatgcgaaggcctaagatatggtgtttcttcctacctgatgagagcttgcaggagccaggaggcgcttactggtcttcaagatccttacgtgcctcagatgtgtgttgtgtcatgcgtgtacactaatacactatagagttgggtgatggcatatttagcatgccaggataaactttattgcccgtgtctgaaatacaagctgttgtgattcaaatttatttgtcacttagactggagtaaagatgtgtatgccttttattttatgatggcttcagagtctcaaaattggttgtaagattactccctgcgtctcaaaatataattcgttttagattaatc

SEQ ID NO: 146983 - DNA, 253 bp, Zea Mays
ttaactatttttaaaatatgttttatgtttcctggaaacgatttgcactggcggttttattacgtcgaccgccagtgaaaatcgattttcactggcggtcctcagttacccgcctgtaccaacgaaaacctaaacaggcgggtggggtgggcctaataaaaataaattttttaactatttttaaaatatgttttatgtttcctggaaacgatttgcactggcggttttattacgtcgaccgccagtgaaaatc

SEQ ID NO: 146984 - DNA, 1671 bp, Zea Mays
ctcgcccgttgcctgctctgtgccttatataaacgcagcagagcacggcagccggaagggagttcagacatcaatcaggcggaggagagaaactcccggccatttccaagcacaagaagtgggaagagagaacaggagggcgctgagctctctgatcgctgttctgagtggtggcggctgcagctgcccgcgcggcgaagatggctgcgccatggcttcttgcttgcagcttgctgctgctctccctggcgacctttcacggagctgagggcgcgatcggcgtgaactacggcatgatcgccaacaacctgccggcgccggagcaggtcgtctccatgtacaaggccaagaatatcagctacgtgcgtctgttccacccggacacgaccgtgctgaacgcgctccgcggctccggcatcggtgtcatcctgggcacgctgaacgaggacctcccgcgcctggcgtccgacccgtccttcgccgcgtcgtgggtggccaccaacgtgcagcccttcgccggcgctgtccagttccggtacatcaacgcgggcaacgaggtcatcccgggggacccggcggcgcaggtgctcccggccatgaagaacctggagtcggcgctccggtccgcgggggtcgcgggcgtccccgtcacgacggccgtggccaccagcgtgctcggcgcgtcgtacccgccgtcccagggcgccttctccgaggcggccacgacggtgatggcgccgctcgtctcgtacctgtcgtccaggggcgcgccgctgctggtgaacgtgtacccgtacttcgcctactcgggcagcggcgggcaggtggcgctcgggtacgcgctgctgtcgggcgccggcgccggcgccgcgtcgacggtgacggacggcggggcggtgtacactaacatgttcgacgcgatcgtggacgcgacgcacgcggcggtggagaaggccggggtgcaggggctggagctggtggtgtcggagaccggctggccgtcggccggcggcgagggcgccagcgtggagaacgcggcggcgtacaacaacaacgtggtgcggcacgtcgacggcggcacccctcggcggcccgggaaggccctggagacctacctgttcgccatgttcaacgagaacggcaaggccgagggcgtggagcagcacttcggcctcttccagccggacatgagcgaggtctaccacgtcgacttcacggcgggatccccctagggaggctcacccgcttctgtgtttactttatttatgtagtaggaatgatcattcttcattcagagactgatcgacttcatcggagctgctcgatactcgagcggcgcggataggcttactgcgtactggtagtattgttggagacttggagtagcattactatcgacgtgattcattacagtgcatgtcgttacacggcgccatggatttatcttctctgttcagcactgtcgtcaagtggcgaaatcagggtactatgagatcgtagaatcaagaagagagtacatagacgatttatagagatcaaggctgtggaagcctaatactctataccttttttgacggatgaattgacgaagacgaagataaaaaagattgcacgcttagatgttgtatgatctagatgactgaaaagctcacctttttctttcgattgtgg

SEQ ID NO: 146985 - DNA, 1484 bp, Zea Mays
gtgccttatataaacgcagcagagcacggcagccggaagggagttcagacatcaatcaggcggaggagagaaactcccggccatttccaagcacaagaagtgggaagagagaacaggagggcgctgagctctctgatcgctgttctgagtggtggcggctgcagctgcccgcgcggcgaagatggctgcgccatggcttcttgcttgcagcttgctgctgctctccctggcgacctttcacggagctgagggcgcgatcggcgtgaactacggcatgatcgccaacaacctgccggcgccggagcaggtcgtctccatgtacaaggccaagaatatcagctacgtgcgtctgttccacccggacacgaccgtgctgaacgcgctccgcggctccggcatcggtgtcatcctgggcacgctgaacgaggacctcccgcgcctggcgtccgacccgtccttcgccgcgtcgtgggtggccaccaacgtgcagcccttcgccggcgctgtccagttccggtacatcaacgcgggcaacgaggtcatcccgggtagggatgaaaacggtcggaaacgttcggattaccactttcatccctaatcccgggggacccggcggcgcaggtgctcccggccatgaagaacctggagtcggcgctccggtccgcgggggtcgcgggcgtccccgtcacgacggccgtggccaccagcgtgctcggcgcgtcgtacccgccgtcccagggcgccttctccgaggcggccacgacggtgatggcgccgctcgtctcgtacctgtcgtccaggggcgcgccgctgctggtgaacgtgtacccgtacttcgcctactcgggcagcggcgggcaggtggcgctcgggtacgcgctgctgtcgggcgccggcgccggcgccgcgtcgacggtgacggacggcggggcggtgtacactaacatgttcgacgcgatcgtggacgcgacgcacgcggcggtggagaaggccggggtgcaggggctggagctggtggtgtcggagaccggctggccgtcggccggcggcgagggcgccagcgtggagaacgcggcggcgtacaacaacaacgtggtgcggcacgtcgacggcggcacccctcggcggcccgggaaggccctggagacctacctgttcgccatgttcaacgagaacggcaaggccgagggcgtggagcagcacttcggcctcttccagccggacatgagcgaggtctaccacgtcgacttcacggcgggatccccctagggaggctcacccgcttctgtgtttactttatttatgtagtaggaatgatcattcttcattcagagactgatcgacttcatcggagctgctcgatactcgagcggcgcggataggcttactgcgtactggtagtattgttggagacttggagtagcattactatcgacgtgattcattacagtgcatgtcgttacacggcgccatggatttatctt

SEQ ID NO: 146986 - DNA, 2002 bp, Zea Mays
gtgccttatataaacgcagcagagcacggcagccggaagggagttcagacatcaatcaggcggaggagagaaactcccggccatttccaagcacaagaagtgggaagagagaacaggagggcgctgagctctctgatcgctgttctgagtggtggcggctgcagctgcccgcgcggcgaagatggctgcgccatggcttcttgcttgcagcttgctgctgctctccctggcgacctttcacggagctgagggcgcgatcggcgtgaactacggcatgatcgccaacaacctgccggcgccggagcaggtcgtctccatgtacaaggccaagaatatcagctacgtgcgtctgttccacccggacacgaccgtgctgaacgcgctccgcggctccggcatcggtgtcatcctgggcacgctgaacgaggacctcccgcgcctggcgtccgacccgtccttcgccgcgtcgtgggtggccaccaacgtgcagcccttcgccggcgctgtccagttccggtacatcaacgcgggcaacgaggtcatcccgggtagggatgaaaacggtcggaaacggtatttattcggtaatcagttttttctttgattgcaaataaataggatatagaatatacaatataaatttgtattcttgtttttaacatccagcttgttaagattcataaaaggtaaatctcaaattcatcctacattttttcaaataatagatataaacttcggtattgattcggaaacaaattcggtaatttttttaactttttgtgttgtagagagcaaataatacataaaacaacttatataatattttattcgtatttgtactaatgtgtttgataacataagaaaagatcagcatcaaattttatacatatcttttttaaaatattaaatttattctaacagttcggattaccactttcatccctaatcccgggggacccggcggcgcaggtgctcccggccatgaagaacctggagtcggcgctccggtccgcgggggtcgcgggcgtccccgtcacgacggccgtggccaccagcgtgctcggcgcgtcgtacccgccgtcccagggcgccttctccgaggcggccacgacggtgatggcgccgctcgtctcgtacctgtcgtccaggggcgcgccgctgctggtgaacgtgtacccgtacttcgcctactcgggcagcggcgggcaggtggcgctcgggtacgcgctgctgtcgggcgccggcgccggcgccgcgtcgacggtgacggacggcggggcggtgtacactaacatgttcgacgcgatcgtggacgcgacgcacgcggcggtggagaaggccggggtgcaggggctggagctggtggtgtcggagaccggctggccgtcggccggcggcgagggcgccagcgtggagaacgcggcggcgtacaacaacaacgtggtgcggcacgtcgacggcggcacccctcggcggcccgggaaggccctggagacctacctgttcgccatgttcaacgagaacggcaaggccgagggcgtggagcagcacttcggcctcttccagccggacatgagcgaggtctaccacgtcgacttcacggcgggatccccctagggaggctcacccgcttctgtgtttactttatttatgtagtaggaatgatcattcttcattcagagactgatcgacttcatcggagctgctcgatactcgagcggcgcggataggcttactgcgtactggtagtattgttggagacttggagtagcattactatcgacgtgattcattacagtgcatgtcgttacacggcgccatggatttatcttctctgttcagcactgtcgtcaagtggcgaaatcagggtactatgagatcgtagaatcaagaagagagtacatagacgatttatagagatcaaggctgtggaagcctaatactctataccttttttgacggatgaattgacgaagacgaagataaaaaagattgcacgctt

SEQ ID NO: 146987 - DNA, 438 bp, Zea Mays
atgtggctcataacgtcagcaactccgaccttctcaacggcggcgacagagtctccacctccgatgatagttgtcacacccttgcggctaagttctgccaacttctttgccacagcctcagttcctatagcgaacttgtcatattcaaaaacacccatgggcccgttccagatgacagtctgggttgtttccagggctgcgttgaatgcagcaatggaatctgggccaatatccagccccatccaaccatcaggaattgcagatgctggaacaatctggctgttagcatcaggagcaaacttatcagcgatgacaacatcggttggcaacataagggagacacccttttccttagcctttgcaagtagagatgttgcaagatcgagtttgtcttcctcaaccaacgaagcaccgacagaaagaccttgtgccttgtaa

SEQ ID NO: 146988 - DNA, 1687 bp, Zea Mays
ctagcccacgcgactgccagatcggagcgccaatagacagctcggcaccccacccaaaagtccaaagccccaccagctctgctcagccaccaccatcctcctcttcctcgaacggtcgaaccgccgaaagcacgcaccccgccgccgcgtaccctcccctcacccgctcaccatcgccggccgccgttcggcgcgacgcggattcgaatccggaaagcgggcgatgggggcgaagcgcgcggtgctggtgggcatcaattaccagggcaccaaagcggagctcaagggctgccacaacgacgtcgctcgcatgcgccggtgcctcgtcgaccgcttcggattcgacgagtccggcatccgcgtcctcatagatgacggctccgcgccgcagcccacgggggccaacatccggcgggaactcgcgcgcctcgtcggggacgcgcggcccggggacctcctcttcttccactacagcgggcacggcatacggctgcccgccgagaccgggaaggacgacgacaccggctacgacgagtgcatcgtgccctgcgacatgaaccttatcacagaccaagatttcacggagcttgcgcaaaaagtccccagtggctgtctctttaccatagtttctgattcgtgccacagtggagggctacttgacaagaccaaggagcagattgggcacagcaccaagcagaagcagaagcagacccagacccagacccagagccgggaacttgaggaacggtctccttctggcaccagcttccgggaattcctcaaaggtactgttcgggaagcgtttgagtctcaaggaattcacctgccccaccgtagccgtagccaccagcaagggagcggtcacggcgacgacggtgaccaagagtcgcgctacatcaacacagccgatgcccacgtcaaaaaccggtcgctacctctctcgacattgatcgagatgctgaaggagaagactgggaaggacgacattgatgtagggtcaatccggctaacgctttttaacctcttcaaagacgatgccagcccgaagataaagaagttcatgaaggtcatgctgaacaagttacagcaggggcagcacggaggcattgtgggcttcatgggcgctctggcacaggaggtcctgaaagccaagctcgatggcaaggaagaagaagagttcgacccggcaatgaaacagcacgtgcacagcgatcaagaggtgtacgccgggacgacggcaagggtgccgagcaacggtgtcctgatcagtgggtgccagaccgaccagacgtctgccgacgcgaccacgccgaagggggtgtcctacggtgcgctcagcaatgccatccaggccatcctcgcggagcgtgggacggtaacgaacaaggagctcgtgctgaaagcgcgcaagatgctgtcgaaacagggctacacccaacagcctgggctctactgcagcgatgagaatgccagtgcggcttttatatgctgatgatgattcattgggtttgtcctgtggattgcaatatttgtattttgtctctaagtgcatgtgagttggactggtggttatgttttttcgctgagatttgggaatgtatcgtttctttcgcaggatgacattctttgaggatattagtcatttaaacataaaataaattttattttaataaagcacaaaatatac

SEQ ID NO: 146989 - DNA, 231 bp, Zea Mays
gccggcagcgccgcgcacccgtgggccgtgggggcgtcgaccgcacgctcacgttactcccgagatcacgagcggaaagggcaaccacgacctgccactgccactgccagcccagcgcacgcacagcacagcacagcacacaggcaggacgatcgcgccgtacgcgcacaccgacggacgggggcggcgaaagatccatccgcccctgctgccctgccgggctgcggccgc

SEQ ID NO: 146990 - DNA, 200 bp, Zea Mays
aattccctgccaacatcccaagatcctccacttcagctcacaagtacctcttcttctcccctcctttgcttttcatctcaataccttcctctacaattcctctcctttccttcctctgttcagaagtctgaactatattgcttatgcttgcttggatcctagacttgatatacttcttgatgtggtatcctgcttgtgct

SEQ ID NO: 146991 - DNA, 561 bp, Zea Mays
cccccttcccctgcctcgcgttcgcgttcgcctagtctccttccttttcctctcgctctccgcctccatcagctcgagccgcttccttccacccaccacgcaccacctgacctcccttccctcatcggctcctcctcgttcccactaggcaggaacgccgcgcgccgagccgagctagcggccggaatgcccgcgcagaagcgcccgctcccgtcgtctgcctcgcccggctccgacgccgacgtcgaggaagctcctggcgccgacgcggacggctgcggcggggccgaccaacggtcgccgaaggtgacgctgaacggagtggaggagcgggacggcgggccgctgcaggccaaggaccagcgccacgattccgacgctgacgacgaggaggaaggagaccgcgaaggcggcggcggcggggacgggagcgggagcggaggcgacgacgactgcgacagccagtcgtcgcagagtgacggcgtgatggacgagtttacgcttgtgaaattagtggatgttcggaaggaagtgcaatgccctatatgcctaggtaatgat

SEQ ID NO: 146992 - DNA, 1532 bp, Zea Mays
gaaataacgaatgcccagcgtgccgcactcattgtgctagtagacgttccttgagggatgatcctaactacgatgctttgattctagctttatatccagatattgataagtatgaggaagaggaacttgcattcagtgaagaggaaaggacccgtaacaaaaggattcaagaatccattgctgagacatttcggaggcaaacagaagcacttgtgaagaagcgctccactgtaaaagcaacagatgcagcttctacaaggaagactcgacggaatatgcgaccaaggaggagaggacgaattagttctcctgatattgccccaactgattttgacgatgatgatagagaagagaacggtgatgatggaagcaaggagtcgtcttctgttgatgatcactccccagatgtaaggccaaaaagatctcggaggtggcccatgccacgccgttcccctgctaaggccattggcaataccgacaatagcattgaggataatgacgactcaggaggtgctagggactttatgactgcttctccgctgcggggagagatgcttgcatgggggaaaaatggcacccgcagccaaacccggcatggcaactccagtggctccagcggaaggatgggcaggagtggccgtgttgccaagttggtagatcagttccgtaatgctgatgacttcgataatgagttgaacctgtatcttgtcctgcttccacttgatggtcaaagtgtgcctaaactggaaaagccctacctcagttgcctgccaacactatctgttcggcatctctgccagtttgttgctctccagttgtctcggcaacccaaagaagtcgagatatatatcaggaaaagcaaggatgcatgcttgtcagccaattacacctgtaaatacgagacaaagccagaacagcctaatggtttagagagactgtgggaagagaagtctctttcggatctctacccttccctcgccacccgtcaaggagatctggaattgttatactctctgaaagcacaaggacaggggtagatcagatattcactatcaactcgaccagtcgcctcaacgccactgtctgcaaggaccttcaactggtggaagcttgtacataaggctttcaatatagaaaaagatctgaaagtagcttacttgttttaaatttgctctgatatcttgtgaggtatatggtatacccaggttcattagtaaaaatgtgtggagttgagcagtagcaaaccaaccatctgaaacaggctgagcaaagcttgtctatttctgcagccagtattaattgtgtcccatttgaactgatgcaagtactgaggacctctgttccaggatgatccgtggcttgctgtcgtcgccttgtgtgacgcgttcgcgttatccatgttgtcacgccacgtgtccgcgaattagaatgtccagttgttaaccagtaggaaatggtaaacatctgcagctttgtagggacagtattgaaatttttattgtttatacaataaagctcacgggtcgttgctg

SEQ ID NO: 146993 - DNA, 1409 bp, Zea Mays
gttcttattgttattgacatgggcttcatttctcatgtaagattcaagaatccattgctgagacatttcggaggcaaacagaagcacttgtgaagaagcgctccactgtaaaagcaacagatgcagcttctacaaggaagactcgacggaatatgcgaccaaggaggagaggacgaattagttctcctgatattgccccaactgattttgacgatgatgatagagaagagaacggtgatgatggaagcaaggagtcgtcttctgttgatgatcactccccagatgtaaggccaaaaagatctcggaggtggcccatgccacgccgttcccctgctaaggccattggcaataccgacaatagcattgaggataatgacgactcaggaggtgctagggactttatgactgcttctccgctgcggggagagatgcttgcatgggggaaaaatggcacccgcagccaaacccggcatggcaactccagtggctccagcggaaggatgggcaggagtggccgtgttgccaagttggtagatcagttccgtaatgctgatgacttcgataatgagttgaacctgtatcttgtcctgcttccacttgatggtcaaagtgtgcctaaactggaaaagccctacctcagttgcctgccaacactatctgttcggcatctctgccagtttgttgctctccagttgtctcggcaacccaaagaagtcgagatatatatcaggaaaagcaaggatgcatgcttgtcagccaattacacctgtaaatacgagacaaagccagaacagcctaatggtttagagagactgtgggaagagaagtctctttcggatctctacccttccctcgccacccgtcaaggagatctggaattgttatactctctgaaagcacaaggacaggggtagatcagatattcactatcaactcgaccagtcgcctcaacgccactgtctgcaaggaccttcaactggtggaagcttgtacataaggctttcaatatagaaaaagatctgaaagtagcttacttgttttaaatttgctctgatatcttgtgaggtatatggtatacccaggttcattagtaaaaatgtgtggagttgagcagtagcaaaccaaccatctgaaacaggctgagcaaagcttgtctatttctgcagccagtattaattgtgtcccatttgaactgatgcaagtactgaggacctctgttccaggatgatccgtggcttgctgtcgtcgccttgtgtgacgcgttcgcgttatccatgttgtcacgccacgtgtccgcgaattagaatgtccagttgttaaccagtaggaaatggtaaacatctgcagctttgtagggacagtattgaaatttttattgtttatacaataaagctcacgggtcgttgctg

SEQ ID NO: 146994 - DNA, 1387 bp, Zea Mays
atggcattgatgcgaggactgcaaagggcggttgcatcccggacgcaccctcccggctcccgcacgccgcctctcagtgagatgttgccatcgctggtgcgcgctcgcagcgcccctctccgccgcctcgtctccacgttctcctcgacgctagccgtattgcctcgcgtcccgcacgtcatcagtagcggcggtaacctcaacctcccgttctccgctcacccctcgccggcccgcgacggcccgagcggtccggctggtggagcccagcgagggataagcttcagcacccgcgcggtggacgccagggacgaggcagcctccagctccgccgcggcggactctgacctctccgcgccttacctctccgtccgcatacgatgccgcaggcacgacgtggaagtactctccgaggcgctcttgagcttcggtgctagctccgtgaccgtggatgacatttccgatgctgaaaatctcgatgaaatctccataacttcattatatgctgatggggaagacgtggactccagtgtaagaagtgccgcgaggtcagctggtgtgaactacagtccagtgtatgaaacctctgtcgggaagcagtgcgattggatagcaactgtgcaggaaacatacgagtcgactgaagtggctgatggcctttgggttgttcctaaatggagaactccccctgatccagaggccacaaacataatcatcgatccaggtttggcttttgggatgggggagcacccgacaactaagctgtgccttctatttctacgagaagttattaaaggtggtgaatgtgtgttggattatggaacaggcacgggagtattggggattgcagctctgaagatgggtgctactcaatcaactgggatagatattgaccctcaagccatagcctctgcttcagaaaacttgttgctgaatggtttacattcgaaccaaatgcctgtttatttggtatcaacaaatgcccagccttcatgccttccaagcttcatcgacaaatcagaagagcatcactcaaccaataaccttgacttgaagttatcaagaggaacttatgatgtagttgcagcaaatatccttctaaatcccttactggagctggtcgaggacatagttggttatgcaaaacctggtggaataattgctgtttctggaatattggaggagcaggtgccaaaaatcaaagaagtttactcgaggtatttggacagaatattggtatccgaaatggatgggtgggcctgtcttcagggaaccaggagagtgtagaggaattaagtatttcaccacgttgaagaagggttttgaccttacatgtttttttttttaagagaggactaggtatatacccgtgcgtgcaacagggaca

SEQ ID NO: 146995 - DNA, 432 bp, Zea Mays
tttttttattctgtactcactgaatggctttctgattacatttcaggttcatatggcctgtgtaatgcaagggcgtagagttggagtggcatactatgattcagatacacgccaactttttgtgttagaaatctgggaagacagcgttggggaatttcctctgattgatcttgtgaaatttcagtcaaaagcgagcacaatatacacaagcacaaaaacagaagaagcacttttgtcggctttacaaaggaatgatggtaacggtgaggctcctgttgtgaagctcacgaaaagctcaacattcagctatgagcaagcctggcacatattgatctacttgaaagttgcagctatggatgatggactaagtgcaaaagaaaggatatgctttgtaagtgatcttgaatgagaatattgccaaactaattgcta

SEQ ID NO: 146996 - DNA, 1596 bp, Zea Mays
atttccataagtgttttcttcgactccgagaacaccttcttccagttgctcgccagatcgagacatctccagcaattccatctcttactcgctgtcagcgttgcagctgctcgttgccgctctggcttcgaccaggtcgtcgatgaggcgatgcagatcacgggacgacgagccgccctccgctacggcagcgtgggccttcactgcgagatcccgcgccctgcccctcgccgcctcccccggcccgcctggctccaagaacctcgccaccgcccgagccaccgcctccgccggcacgagctccctctcctcgtacctcgtgctccgcgccccactccagacccgctccccgatcccgagcacgtccgtcaccagcctctcctcgatgaactggtcgaacaccagcggccacgtcagcatcggcacgccggccgccgccgcctccagcaacgagctcgacccgcagtgcgtcaggaacgcgcccaccgctggatgggccagcaccgccgtctgcggagcccaccctctcaccagcatccccctctccccgacgcgctgctcccagccctccggcggcgtccacccgtcggccctcaccacccacaggaacggctcccctgaggcctccaggccgagcgccagctcccggagctggtcctccgagatggcggcgtaggtgccgaagcacacgtacaccaccgagcagcttggcctggagtcgagccacctgatgcatggagactcgctggtgcctgccgctgccgccggcagcggcagtgagacggggccgacgaagtagcagcgcttcaaggatttggcgcgcacgttcgcctcgcggtactcctgctccatgcctgcgaacgtgttgtaggcgacgcccaaacacctggcctgcgccgcgttgcaggggctgaacgtgccttggtccttcgccgggcgtctcaggaactccggcagctcgctgacggggatccgtatctccggccctggcaacccgggaacggtaacgtcacgcgacccagagacgacggcgccggcgaggatgcgcatgacgagacccgagaagggggcgatgacactgaaaacgacgcacggcaggcccagctcggcggcgatgctgctggtccagaagaagtggtagtccgacacgacggcgtcgggggaccgctccctgaggagcgcctcctgcgccggccgcgagagggcctcgtcgatggcggcggcgtcgatgcgccacgcgtcgtctccggcggtggagaggttctccacgcccggagcgaggccatccacgcgcgggaacgggtacgtgacgatcctgaccgtgccgctcgccgcggggccgtggcgctcgagcgccgaccggaccaccgcaacattggccggggtcacggcgacggtgggctcgacggctcctggcctggctgccgcgagacggacggcgaagtcgatgtagggcccgatgtggctggtggcgaagaatgggatcagaagtatgcgcatcttcttgctctgcttcgctgaagccatggctgttgctgcagcttgtattggtccgagccttttttgaggagcagcaagactgctgcaagagctgtc

SEQ ID NO: 146997 - DNA, 495 bp, Zea Mays
atgtctaggcgtggtaaatctgctaaacaaaggaagggtccattgaccggaactgccttcgacctgcttcctttgccaactggtgttctagtgcctatgtgtttttgtgatgatccttacaagattgacaagtctgaggatcatgacacatatcgacaaaggtattggatgtgtgctaactatgcatttgagccaacgattgttcagcgctggatgaatttaatgaaagacaagaagtggttggagaatcttaaaaagtgggacgcagaggacaaagagaggatagagaaaagacgagaggagcttgcggtggagcaacaacgggtagacgagcaggaaatgaggcgtgttgctgaatgcagggaggagatggagaagaagcttgagcgtgcacgtcgtgcaaaggacgaaatggaggagaaccctgatgcttttcgcaagggcaaatggccccgttgcactcagtactcaaggtgcttatatgatgttgtgtag

SEQ ID NO: 146998 - DNA, 1228 bp, Zea Mays
aatcatcgatggcatagccagcgaacggcagacggaatcgcgcctcccatcctctgctttccccaaaggccagctccaccgcggcggcgccgctcctataaaccgtcagttccctctaggcgcgctttccccgcggcagcctgagcagccagccatgccggggcggcgggcgatcgaggtccggcagctgctgccggccggcggtgacgccgcgacgccgaggtggcgcatgtcgctgctggagaacacgttcagcgggttcgtgcagggcgccggcgccgaagccgtgttcgcggatgggtccctgttcagcccgttcctgttcggcaagttctttgacccagccgacccgttcccgctgtgggagttcgagccggacgtgctgctcgccgcgctgcgccgcggcaacgccaggaccgccgtcgactgggccgagaccgactccgagtactacctcacagcctacgtgccaggtggaaggagatgcgacgtggaggtgagcggggacgcgatgaaggtggtcgacatcagcggcctctggcgggcgccgccggcggacggccgggactggcgcgcgggccggtggtgggagcacggcttcgtccggcgggtggagctgccagaggacgcggagtggaggaaagtggaggcatgcttcgacgacagcgaggggtccctggagatcagggttcccaagaccgccgatgcccgccaggccacggcctgacgccgccgagaatcggaacctcgccgcggtattggaggaggacagcttattcttcgaacagcagcaggcagaaatggaaaacgacggcataatcttgttgataaaaaaatttgcaagatacggagacgcagagatggagcgaactagatagagatcgtcgcagcatgttgcatgcgtgcgtgtcactgaaaaacgatgcatgtgatatgttcttcagtgccagctgttcaattggctagctaattagcagtgtcactgttccgtatagagatgattccgggatcggtagatcgatgagttcgtgaatttataaattcacaggtcgcggttttccgaaaggcggattcagattctccagtttctttcggcctgaaggctatctatcgccctagctcgtcgtttttatcctccaatcaggcacatgatcgagcatcagagctctgacggaagaccggcgctttcggttcgtcaggatatatattctactattcttcagagaaa

SEQ ID NO: 146999 - DNA, 2589 bp, Zea Mays
acggggacaggggctacgaaaaacgaacagcggcagcacggagcagagacgacgagcccgagcccccggccctgccgctgcccatctataaatatcgcgcacccacacctcgctcctgtcacacaagaacacacgcgagctccagatcgcacttgccagccttgagccactaatcacctggcagcactctacacggcgagagggaatcgaggagagcttacgaggtagttagtagctacaagacacagcaccataggcatgccggaggcgccggtcgtcacaatgcgagacacggcggcggcggcgccgcccgcgactcaccgcgacctgctcgagtacatcgagcgcgtgacggcgggggcggcccaggtgcagcgccgcgtcctgtcggagatcctggcgcagaacgcgccggcggagtacctgcggcggctgggcgtctcgggcgccgcgccgggcgccgtggaggcgttccgccgcgccgcgccgctcgtcacctacgaggacatcctgcccgacgtgctgcgcatcgccaacggggacacgtcgcccatcctctccggcaagcccatccgcgagttcctcaccaggtgagccagcctgcctgccccgtgccgtgtgaggaggtctgtagtgtgtgtatgtgcatgtcgacgtcgcacgcgcgcgtgaagagtgatagtaataatggccgtacccgtacgtgcgatgatggtggcagctccggcacgtccggaggggagcgcaagctgatgccggcgatagccgacgagatggaccggcggtcgctgctgtacagcctgctgatgccggtgatgagccaggccgtgccggggctggacaggggcaggtgcatgtacctctacttcgtgaaggcggagtcgcgcacgccgggcggccacccggcgcgccccgtgctgacgagcttctaccggagccgccacttcctggagcgcccgcacgacccctacaccgtgcacaccagccccgacgaggccgtcctctgcgtggacgcgtaccagagcatgtacgcgcagctgctgtgcggcctggtgcaccgcgccgacgtgctccgcgtgggcgccgtcttcgcgtcgggcttcctccgcgccatccgcttcctggagaagcactggcagcgcctgtgccgggacctccgcaggggcgcgctcggtgccgaggtgaccgaccgctccgtgcgcgccgccgtggcgcgggtgctccgcgccgacccggcgctcgccgacgccgtcgaggccgagtgcgccaggccgtcgtggcaggggatcatccggagggtgtggcccggcaccaagtacatcgacgtcatcgtcaccggcgccatggcgcagtacatccccacgctcgagttctacggcggcgggctgccgctcacctgcaccatgtacgcgtcctccgagagctacttcggcatcaacctcaaccccatgtgcaagcccagcgaggtcgcgtacaccctcatccccacaatgtgctacttcgagttcctgcccttgccacagcccggccccggcggcaccgacgacgccgatcccgaccatcgcgacctcgtggacctcgtcgacgtcaagctcgggcacgagtacgagctcgtcgtcaccacctactcaggtctgtaccgctaccgcgtgggcgacgtgctgcgcgtggccgggttcaagaaccaggcgcccatgttcaagttcctgcggcggaagaacgtggtgctgagcatcgactccgacaagaccgacgaggcggagcttcacgcggcggtgagcggcgcggtgcagcacctggcgccgttcggcgcgtcgctggtggagtacacgagctacgcggacgcggggaccatcccgggccactacgtgctgttctgggagctgcggctccgcgcgggggacgtgccggtgccggtgccggcgtcggtgttcgaggactgctgcctggccgtggaggaggccctgaacagcgtgtaccggcagggccgcgccgccgaccgctccatcgggccgctggagatccgggtggtgtcggacggcacgttcgacaggctcatggactacgcgctcgcccgcggcgcctccatcaaccagtacaaggtgccgcggtgcgtgcacccgggccccgtggtggagctgctggacgggcgggtgcaggccagctacgtgagccccaagtgccccaagtggagccccggcggcggtaagcagtggagcagcgacgccgccgccaagaagcccgccgccgccgccggcagcaataatggaggaggggcggtcgtcgcctgatcgtcgtccgtcgagatatactagtgaactttaattaattagctggctaattccggaaccgtcgttgttgttcgtgggagagagagactcgatcttgtggtcgatcgattgtgatagctgatctatccgtgtgcatgtatgcatgcatggctacgatcgaatgattatctagctgggtaatcatcgggtgtgtggtagcttattaagtattgtacgcgtcgtgatatcatgtgagctagcttttgtttctttttattttcttttatgtggttttgtaataaagttggagtacgtagta

SEQ ID NO: 147000 - DNA, 2574 bp, Zea Mays
acggggacaggggctacgaaaaacgaacagcggcagcacggagcagagacgacgagcccgagcccccggccctgccgctgcccatctataaatatcgcgcacccacacctcgctcctgtcacacaagaacacacgcgagctccagatcgcacttgccagccttgagccactaatcacctggcagcactctacacggcgagagggaatcgaggagagcttacgaggtagttagtagctacaagacacagcaccataggcatgccggaggcgccggtcgtcacaatgcgagacacggcggcggcggcgccgcccgcgactcaccgcgacctgctcgagtacatcgagcgcgtgacggcgggggcggcccaggtgcagcgccgcgtcctgtcggagatcctggcgcagaacgcgccggcggagtacctgcggcggctgggcgtctcgggcgccgcgccgggcgccgtggaggcgttccgccgcgccgcgccgctcgtcacctacgaggacatcctgcccgacgtgctgcgcatcgccaacggggacacgtcgcccatcctctccggcaagcccatccgcgagttcctcaccagctccggcacgtccggaggggagcgcaagctgatgccggcgatagccgacgagatggaccggcggtcgctgctgtacagcctgctgatgccggtgatgagccaggccgtgccggggctggacaggggcaggtgcatgtacctctacttcgtgaaggcggagtcgcgcacgccgggcggccacccggcgcgccccgtgctgacgagcttctaccggagccgccacttcctggagcgcccgcacgacccctacaccgtgcacaccagccccgacgaggccgtcctctgcgtggacgcgtaccagagcatgtacgcgcagctgctgtgcggcctggtgcaccgcgccgacgtgctccgcgtgggcgccgtcttcgcgtcgggcttcctccgcgccatccgcttcctggagaagcactggcagcgcctgtgccgggacctccgcaggggcgcgctcggtgccgaggtgaccgaccgctccgtgcgcgccgccgtggcgcgggtgctccgcgccgacccggcgctcgccgacgccgtcgaggccgagtgcgccaggccgtcgtggcaggggatcatccggagggtgtggcccggcaccaagtacatcgacgtcatcgtcaccggcgccatggcgcagtacatccccacgctcgagttctacggcggcgggctgccgctcacctgcaccatgtacgcgtcctccgagagctacttcggcatcaacctcaaccccatgtgcaagcccagcgaggtcgcgtacaccctcatccccacaatgtgctacttcgagttcctgcccttgccacagcccggccccggcggcaccgacgacgccgatcccgaccatcgcgacctcgtggacctcgtcgacgtcaagctcgggcacgagtacgagctcgtcgtcaccacctactcaggtctgtaccgctaccgcgtgggcgacgtgctgcgcgtggccgggttcaagaaccaggcgcccatgttcaagttcctgcggcggaagaacgtggtgctgagcatcgactccgacaagaccgacgaggcggagcttcacgcggcggtgagcggcgcggtgcagcacctggcgccgttcggcgcgtcgctggtggagtacacgagctacgcggacgcggggaccatcccgggccactacgtgctgttctgggagctgcggctccgcgcgggggacgtgccggtgccggtgccggcgtcggtgttcgaggactgctgcctggccgtggaggaggccctgaacagcgtgtaccggcagggccgcgccgccgaccgctccatcgggccgctggagatccgggtggtgtcggacggcacgttcgacaggctcatggactacgcgctcgcccgcggcgcctccatcaaccagtacaaggtgccgcggtgcgtgcacccgggccccgtggtggagctgctggacgggcgggtgcaggccagctacgtgagccccaagtgccccaagtggagccccggcggcggtaagcagtggagcagcgacgccgccgccaagaagcccgccgccgccgccggcagcaataatggaggaggggcggtcgtcgcctgatcgtcgtccgtcgagatatactagtgaactttaattaattagctggctaattccggaaccgtcgttgttgttcgtgggagagagagactcgatcttgtggtcgatcgattgtgatagctgatctatccgtgtgcatgtatgcatgcatggctacgatcgaatgattatctagctgggtaatcatcgggtgtgtggtagcttattaagtattgtacgcgtcgtgatatcatgtgagctagcttttgtttctttttattttcttttatgtggttttgtaataaagttggagtacgtagtagtgagtggcccttttgtttttttgacagattttggcatgttgtgtttagacgttgattgctgctctgagcttatctcctccagacatggctaagagaccgtacatggagtagtttg

SEQ ID NO: 147001 - DNA, 1751 bp, Zea Mays
gacgccataattattaattaatatgggtccgattaccaaatttcacacaacaatacaatcgaaaccaccacgaaaacatggaatgcatatcatacctcgtgtacatgtaataacgaggacatatctggtgtacatggaagcttagtatatatggtgcacatattaaatcatcactatttattttagatttaacgtctctagttgatcattgcaatttataaataatattttccaccgctatacttcaccacgtcggagggtgttcttagcaaaatataccaacaactagagacattatatctaaaatgagtaatgctgatttaatatatgcaccatgtacactaaatttatatatgcaccagatatgttccctataataattatgtatacgtataggagggtgcgagcgatatcaggcggagccgcccttgagcctcttggcgatgccggcgaagtacttgccctggtggaaggcgtgctccagctccagttccgtcggccaccgcgacccgtccccggcgaacgtgcccgcgccgtacgggctgccgccgtgcacgctctccatgtcgaatatcttggcgccgaacgtgtaccccacaggcacgaacaccatcccgtggtgcgtcagctgcgtcaccgccgtcagcctggccgccacgccaagggggaaacgttacccactgcttctgcgattcgatcggttggtgctgcaaggggaaggaaacatgttgtgaaaaaaggagaggagacggctgctcacggcgtggtctcctggccgccaccctgggagccggtgctgaagaagaggccggcgggcttgccggccaggctctgctcgcgccacagcccgccggtcgcgtcgaagaaggccttcatctgcgccgccatcatgccgaaccgcgtggggaacccgaagaggacgccgtcggcctccgccagctcctgcggggtgatgaccggcgcgtcggtcttgggtggcgcgcccatcttgccgagcacctcctcggacagaatctccgggaccttcgcgtgtgaaagtgaaaccgatgggaatttggcggtgaccattccagactcacacaacacattggttctagctaactcgaagattgcaccgttgctgacagacactgacctgccatactttgacctccacgccttcaactgaagcggcgcctttcttcatctcctcagcaagcttggcaacgtgcccgtaggtggagtaaaacctgttgagaaaatgggagcgctttttactgatgcccgatcgagaagagaaccaaaacaatctagtagtacagtacacaggtcagtttctcactttcagtaaatacacaattctcattcatcaatcaaggaacattatgaatagtaagtgtcaaatagatttcggcgtaaagatgtactggaaagaaacaggtgttcgacatcttctaatcaagggtttctagatgctcttgctttttgggtagttggacaatctcattcaggcaggcagcaaaactaaggcatgggtgtaatattatttacttataccaaacggcattagagtggttgtctatccttttaacctgtcatatagatgtgactacagccaaagatcgagatgcgttgtggattgaaacctacaccgtgggttaccaataacaatatgatgctaattttttgctgctcaaaagcgacatcatgtgaggtgtgtgtgttcctcaaaactgaaatgctgcctgttccatggtgaatcgtactcagaa

SEQ ID NO: 147002 - DNA, 2973 bp, Zea Mays
cacttaagccgacgggtctgttcgtatgggcctgatccgaagcccagatctaccactaaaactgcagtgtccgtcccaatggcaatgacggactgaccagacgcctgaccacgacacgagccaaccatacgggtgctgtcatcttgtccaccccgtgcgactgcgagctcgttgctccgctagttcactcgccgcgacgcgatggttctgactctgctgctgcttctgcttctccccgcggcttcccgcgccagggacaccatcacgccgggccagccgctgcggggaaacgacacgctcgtatcgtccggcgccggcagcttcgtgctcggcttcttctccccgccgggctccaacagcacctacgtcgggatctggtacgccaaggtgcccgtccgcaccgtcgtctgggtggccaaccgcgccgcccccgtgcgcggcgcggcgagcgagagcgccggcgccacgctctccgtgtccagcgagtgcgcgctcgccgtggcggacgccaacgccacggtggtgtggcggtcgttgtcgtcgtcttccccgcggccgtgcgcggcgcggatccaggacgacggcaacctggtggtgtcggaccagcgcgggcgggtggtgtggcaggggttcgaccaccccaccgacacgctgctcccggggatgcggctcggggtggacttcgcggcgggggcgaacatgacgctgacggcgtgggcgagcccctccgacccgtcgccgagccccgtggtggcggccatggacacgtcgggcgacccggaggtgttcatctggaacgggccggccaaggtgtggcggtcggggccctgggacggcgtgcagttcacgggagtcccggacaccgtcacctacaagggcatgggcttcagcttccgcttcgtcaacgacgggcgcgaggccacctacagcttccaggtccgggacgcgggcatcgtctcgaggctggtgctcaacagcacgggcgtcggcggcgggctgatgcagaggtggacgtggctggatgtcgccggcgcgtgggccctctactggtacgcgcccaaggaccagtgcgacgccttgtccccgtgcgggcccaacggggtgtgcgacaccaacaaggtcccggcctgctcctgcctccccgggttcacgccgcggtccccggcgtcgtgggcgatgcgggacgggcgggacggctgcgtccgggccacgccgctggactgcgccaaccgcaccgacggcttcctggtgctgccgcacgccaaggtgcccgacgcgacgcgggcggtggtggacttcaactccagcctggagcagtgccggcagcggtgcctgaggaactgctcctgcacggcgtacgccagcgccaacctcaccgccgcgccggggcgccgcggctgcgtgatgtggaccggcggcctcgaggacctccgcgtgtacccctccttcggccaggaactctacttccggctcgccgccgcagacctcgcttcaaaaggcaagtcaaagaaggtcagtattgtggttgcaattgctgtcagcataactgctgccctggccgttcttctagcaatcacagggttttacatttggagagcaaataaaacaaaagcaagaaaatcaggtgacatactatcgctacagaatgttgatctccccaaaggggatggaaaaacatattttattgtatcaatgtaaattttttggttgatgcaattctaacttcggtattttcataggatcatccatatgggcagctggttcacacaataaggatggcagtgaaggaaaggataatggggacgacctggaactgccagtatatgatttcgagacaatagcagcagccacggagggtttctcagctgagaacaagcttggtgaaggcggctttgggcctgtatacaagggtaagcttgaggatggacaagaagtagctgttaaaacactttcaagaacatcaagacaaggtcttgaggaattcaagaatgaggttttgttgatagctaaactccagcatcggaatcttgttcgactaattggatgcagcatttctggaccagaaaagatacttatatatgaatacatggaaaacaagagcttggacttctttatgtttgacacgaccaggagcaagctacttgactggcaaacacgatatcgtataatcgagggaattgcccgaggtttactgtatcttcaccaggactcgcgatatagaatcatacacagagatctcaagacaagcaacattcttctggataaggatatgactcccaaaatttcagacttcggcatggctagaatgtttggcagtgatgacgcagagatcaatactctcagagtagttggcacatatggttatatggctcccgagtacgcaatggatggggtgttctcggtgaaatcagatgtatttagctttggcgttatagtgctggaaatcattgctggtaaaaggaaccgaggtgtctacagatactctggccacctcaaccttctagcacatgcctggagcttattgaatgaggggaatggcttagatttagtcgacgagaatctgaatggctccttcaactcagatgaagtgctaaaatgcctcaaagtggggcttctttgcgtgcaagagaacccagacgaccgtcccctgatgtctcaggtgctgatgatgctggccagcactgacactgcctcgttgccgactcccaaacagccaggcttcgctgcaagaactgcggccgctgaagacacgtcgtggagcaagcctgactgcagcatcgtggacagcatgaccatcacaatggtcgaaggtcggtagaaagctactccctccgtctcgttttagttgtcgctggatagtgcaaaattgaactatccagcgacaactaaaaagaaacggagggagtatatcagagcacaagatgtatgtatactcatgatatcagtcagagcaaaagatgtatactgtagagt

SEQ ID NO: 147003 - DNA, 1317 bp, Zea Mays
tactcgaagtcgaaggcagcgcggcaggtagcagcagtacgccagcacgcacaccaccagcagcagttgccggttggccaccacccgacgccggaggcctggacgaggaggcggcggcgatggcggggaagcacgggcgcaacggcttcgacgacgacaacgtcaaccccttcgcgggtggaagtgttccacctgccaccaattctcgtctctcacctctatcacatgaaccggctgatttctacaatgtggacattcctctcgagtcgtcaaaggatctgaagaaaaaggagaaagaactccaggctatggaggctgagctaaacaaaagagaacgggaattgaaaaggaaggaagatgcggcatcccgagctggcattgtgatagaagagaaaaattggcctccctttttccccctcatccaccatgacatttctaatgagatacctatccatctacaaaggatgcaataccttgcattctcgtcatttttgggattgatagcgtgcctcttttggaatatcatagcaactacaacagcatggattaaaggggaaggtgttatgatctggctgcttgccattatctacttcatatctggtgtgcccggggcttatgtgttatggtatcggcctctttataatgcaatgagaactgagagcgctttgaagtttgggtggttttttctattttacatgattcatataatcttctgtgtctgggcagctgtggctcctccatttcctttcaaaggaaaatctttggctgggattttgccagcaattgatgtcataggcaagaatgctattgtggggatattttacttcgttggattcggcttgttctgccttgaatcacttatgagtatcggtgtcattcagcaagtatacatgtatttccgtggaagtggaaaagctgcagagattaaacgtgaggcagcacgtagtgctctaagttcagccttctgatgaacatctttttgtaaggtctggttacagccagtcgatggatagaagggaacgagatgtgccgattgagccacgggacggtgtcttgtacatcactgcagtacgtggatttggatctctgaaagcgtacagctgatacctgataatctttttgcacttctgtaaaatatgaactatcctcatggatgcgtcagtgtgctggtgccatttcttgtcatggtttaggtgtggttgatagggaaaacggtgttttttttttagtggcgaatataatgtatcttcacgtgagtgtaatagccagtttatttttgtggcatgaatgcagttcgctgtgttttttggccaagac

SEQ ID NO: 147004 - DNA, 586 bp, Zea Mays
gaccaactacttgaacattccggtcgagcattatcatgagatggccattatatctggcaacagttcggcaaccgctgctgcatatgttcaaggatcaaatgagccacttggtgttgaagtgactgaaacagatagtgcaccagctgtgactgaaacaggcaatgcaccaactgtgactggaagacccacgtgtagtgtgccaagtgaacaattcggtggtgacgacggaacgcactcaggcaacaatggcgcagaagagtcttcagatactaagcagccaccaccgtcgaagaagcagagggtatacactgacgatgacttggttgtgacaatgagtcggagcctcggcgagcttgcttcggctataaaaaggctttccgaacaacccggccttcctgttccgaaggggttgtacgaagagctgaagagcatcccagggttcgaggaggcacatcttgagcactactatgcttacctgtgcgagaatcctccgcttgcgagggcattctatgcgctgcctcagctttctagcaaagttacgtgggttgctaggtacgtcaagagtcacagctccgaactgatgtag

SEQ ID NO: 147005 - DNA, 811 bp, Zea Mays
aatcaatgagctgattgtccaaaccacccgcagcttaaaccccccgtttgtgtagaacgactccgggatgcttcctgaatcgacacattcatcaggttcagtgcggccaccgtcaacagagggagcggtgctcgtgctatctgagtcagcggaggagggcgagaccgaggccgaggccgaggccgaggatgctccaaggatgacgcagctgcccagtgtggacccaaagtcggccttccacttgagcatcacgccgtcgtccatatcgagctcgcccgccgggagctcgatgcgaaggtggcggagctctttgaaggagcggagcacctccgagggagagtggtgcgacacatccgcaagaggcagtggcaaagatgaggaggacgacgatggcgaggaatcggaggatgccggaaagccagaggcggagttggcgggggagaggatctgaccgagcgcctgtatgggcttcacgatgccgccgagcacgatgcgcgcgatctgtgagaagaccccacgggctcgcacggacgccgtaggagagaacggcgtcgacggcgaggacgaggaggggggctcgtcggggatgacgcagtcgacgcggacgaggacggagtcgacgagggggacgagctcgtggaagcggagggagacgagggagcagcggccgagcgccttgacgtcgccgatgcggttgaagatgacgaggagaagcgcgtccgggaggcggtcgaagtggtcgtcgccggcgggccccgagagccagcgctcgtcgccgccgaggtcgcaccgcgagcggcgggagcacgcg

SEQ ID NO: 147006 - DNA, 204 bp, Zea Mays
ggtctctgtgtgatggaattatgtcattttataatctctgttcattcagtcaatcgttgtgaactctcttctaatcgctcacttcattggccgtgttgtaccaagacatatttgcatggagtaaacaataacatcagttagccaaatcaaaaaatatattatacagagagcggagacaatcaataaaaaatcttgaaatttttt

SEQ ID NO: 147007 - DNA, 904 bp, Zea Mays
aagatatttgtgtagataacagtagattaaagtctaaaataagagaggagatggtggatgaaataggggagttttgacagcctaattgtaattggaagcctttcttggcctgccctcggcgcggaaccgtcccgcactcacgcatcagcgtcgcacactcgcacgtgcctccgtcttcgctccctcggtccctccgcagcgtcagatcgaccgtcgctcgcggagccctagcgacgccgttctcaagtccgagccggagtagcacgagagccttgcggatatgagtcgcgccgcggcagcaagaacgatggatgaggaagccgagtacctggagacggctcgggccgaccgctccgtgtggctcatgaagtgccccccggtcgtttcccgcgcctggcaggccgcctccgcctcttcctccgatgctgccaacgccaaccccgtcgttgccaaggtcgtcctttcccttgacctgttgcgccaagaagaacgcccggaagagcctacgctccaggcaagtacccacaatcctctccaccctgctggtcccttccccgtgattcggctataaattctagaatctccaggagcgaactggtggggaatttttgaaatcctgtctttgcttaattggctactacactgaaggcgtatgctcgaaaaaattgtgtacctgttgtcctgtttgagttacttcaagggttggtgagaaatatgcatatggatgggggtgggagccctaaattttgtttctagatgcaggactggttttgactatactggattggctgtatatttggcacgaaacagattggtagactcactggaccgcaggaagaacaagaggaataattcactgttatcgtggataaactaaatttgtattcaacgaaagcaagtgttc

SEQ ID NO: 147008 - DNA, 1284 bp, Zea Mays
aattgtaattggaagcctttcttggcctgccctcggcgcggaaccgtcccgcactcacgcatcagcgtcgcacactcgcacgtgcctccgtcttcgctccctcggtccctccgcagcgtcagatcgaccgtcgctcgcggagccctagcgacgccgttctcaagtccgagccggagtagcacgagagccttgcggatatgagtcgcgccgcggcagcaagaacgatggatgaggaagccgagtacctggagacggctcgggccgaccgctccgtgtggctcatgaagtgccccccggtcgtttcccgcgcctggcaggccgcctccgcctcttcctccgatgctgccaacgccaaccccgtcgttgccaaggtcgtcctttcccttgacctgttgcgccaagaagaacgcccggaagagcctacgctccagttcaagatggaattggctcaaactaacaccgggaatacacctaagagctactctttgaatatgttcaaagatttcgttcctatgtgtgttttctccgaatctaaccaagggaaactttcatgtgaaggaaaagtcgagcataaatttgacatggaacctcacagcgataatttggcgaactatggaaagttatgccgtgaaagaacacaaaagtacatggttaaatctagacaagtgcaggtacttgacaatgaccatggaatgagcatgaggccaatgcctggcattgttggtctcatatcttctagttcaaaggaaaagaagaagcaagcaccagtgaaaccatctgatgccaaaagaactcgtagggatcgcacggagatggaaaacgttatattcaagctttttgaaaggcagcccaattgggccctaaaggcactcgtgcaagaaactgaccagccagagcaattcctgaaggagatattgaacgatctgtgtgtgtataataaacgaggtccaaaccagggaacgcatgagctcaagcctgagtacaagaaatccacaggggacactgatactgcttgaagatgagagacgacttggtagaatcgatagttctctgttggtaactcaggccacacaaacacaattgtgatccagtttcatgtgtatgctttcagaggcgttcttttctgtaacaatataagctggatacacgttttttagggaaaggaaaaaagttttgaaacaattgcctgataaatgtgcttcatgggtataaaatattactatatataacgctaagttttagccacgtaacacagagaaagtggaggatctgaaatttcagtaa

SEQ ID NO: 147009 - DNA, 1638 bp, Zea Mays
aattgtaattggaagcctttcttggcctgccctcggcgcggaaccgtcccgcactcacgcatcagcgtcgcacactcgcacgtgcctccgtcttcgctccctcggtccctccgcagcgtcagatcgaccgtcgctcgcggagccctagcgacgccgttctcaagtccgagccggagtagcacgagagccttgcggatatgagtcgcgccgcggcagcaagaacgatggatgaggaagccgagtacctggagacggctcgggccgaccgctccgtgtggctcatgaagtgccccccggtcgtttcccgcgcctggcaggccgcctccgcctcttcctccgatgctgccaacgccaaccccgtcgttgccaaggtcgtcctttcccttgacctgttgcgccaagaagaacgcccggaagagcctacgctccagttcaagatggaattggctcaaactaacaccgggaatacacctaagagctactctttgaatatgttcaaagatttcgttcctatgtgtgttttctccgaatctaaccaagggaaactttcatgtgaaggaaaagtcgagcataaatttgacatggaacctcacagcgataatttggcgaactatggaaagttatgccgtgaaagaacacaaaagtacatggttaaatctagacaagtgcaggtacttgacaatgaccatggaatgagcatgaggccaatgcctggcattgttggtctcatatcttctagttcaaaggaaaagaagaagcaagcaccagtgaaaccatctgatgccaaaagaactcgtagggatcgcacggagatggaaaacgttatattcaagctttttgaaaggcagcccaattgggccctaaaggcactcgtgcaagaaactgaccagccagagcaattcctgaaggagatattgaacgatctgtgtgtgtataataaacgaggtccaaaccagggaacgcatgagctcaagcctgagtacaagaaatccacaggggacactgatactgcttgaagatgagagacgacttggtcaaggataccatcaatgctaaaggaagatcatcgcctctttaaaaagcttatgaacatgtgaacaagccgatggtacacaaagtcaaagatatgcaacgtgttcgttttgttttaatccgtactgacttgtactgcttgtagaatgttttatctttatggattgcagttgcagcagtctgaacacctggttttaatctaaagcgaatagattggaagacaaagcttcaatgtcgatgagaggactttagaggagagaagaaataagaagcttctacgaatagaagagaaggcgtgtgtgacaagtctgtggagcaaaatgatattattgtactctcttggatacaaagagtgactatgtaatagctagagaagagtgtaattttatagaaatgtgtaaaggactcgactcatatatagatgaacaatataatcactataggagtcagctacttgtaaacatcacacttgttacattcttaccagagagctttcgaagacagtggtgtagctgcaggatggtcctacgacatatctatggtccggcccatcgaaccgaaccaccagcccaccatatccaataaaaaaacgcatgtgcagtccac

SEQ ID NO: 147010 - DNA, 514 bp, Zea Mays
atctaaaggggcacaagaaaaggtcaaacaattaaggaggaaaagcgaaactacaaatcagggttatgacacgtgaattgcacacttccaccccttcatatccacggcgagctttttatcaatattccactccttcaggtccatcttcacaacctctgttcacgtcaaggttggtcgacctctacctctcttcacattctcgggacgcctaattattctgatatgcaatggtgcctcttcaggtcttcgttggatatgtccaaaccatctcaaacgatgttgcataagcttctcctcaattggcgccactcctactctctcttgtatatcatcattccagactcgatctctccttatgtggccacatatccagcgcaacatacacatctctaccacacttagttgttggacatgtcgtcttttagtgggccaatattctgctccatacaacatagccggtcggattgctgccctgtagaatttgtcttttagtttgtgtggcaccctggggtcg

SEQ ID NO: 147011 - DNA, 1330 bp, Zea Mays
atacgggcccgtgtctcagcgcacacctcttcgtgctcgctcccatggaggccaccccgatctccatgaagccaccggcgccacccccggtcactctggagcccatagaattgtcaacgcatgccgtcggactgaccgagctggagcgatccagcatgaaccagctcgcaatagcgccggaccccaagcggcagagggtggaggaggctgcggatggcaacgggtgcaagcattgcgcctgcaagaagtccagatgcttgaagctctattgcccatgttttgctggaggtggttattgttccgataagtgtggctgccaaccatgtttcaacaaagaagccttttcagaaacagttcagactactcgcaaggtgttactttcaagacagaagcgcatgtcgatgaaaattaataggagacctgaggcaaatgctgaaccaatggaagatgctcaccattcttcttcttcaactccaccaaggagaggttgcaactgcaagaaatcaagttgcctgaagaaatactgcgattgctaccagaaccctttcgggaaaaatgacggcataattgctgatgacagtaagcgctatctgtacactggtgctgatttggatcacagcgagggcgaacatgacttcgttgtggagcgctcgcctcgtctgcagtcacccatgtcgaaggagtcttctttccaccagaccccaccccatctcagggcctcgagcagagacgcgcacgtgttcccgcaggcggtatcccagtggcaggcgctgccccgctcgtggcactgttccaacaagaggaacggcaacgacagggcgatggacgactcctccgccaacggcaactacaagagctcgagccatgactggcagatgtccaagctcgaggacggctacagcatatcgagatgcgtccagatcctgaacggcatggtggagctgtcgcaggtggagaagtcagttgcccccgacgtcttcctgctgccgggcaaccgggaaattttcgtctccctcggcggcgatgtgcgcgccatgtggctgaagcgcaagattcagcacctggcttaggggagggtgtgtttcattgcgccatgtgccgtcctctcgagtgaggagattggaggggaaattgagttttcttttagatcctgcatgttctgctgctggtcgtgggcgtgcacaggattctaggctcttttttcctgtttactgaggtgtatttatggattgacattacgtattgtctttgtagagatagcggtttcgagcctggtatcggatataataaaaaaatgagattatacacctactacatgttgtttcgcggc

SEQ ID NO: 147012 - DNA, 112 bp, Zea Mays
gtcgttgtacatgtcataagatttttcctctgaaccaaaagccattccaacttctggagcaatcaagtatgactgattttatcattcacctgttgtacgtgggtaaaaaaaa

SEQ ID NO: 147013 - DNA, 1061 bp, Zea Mays
gacgacactgcacacctctcaccagtccccacacggccacaccacacccagctgtccccatcgcgcgcacactctctcggtctctccctcccagtcccagcgtttgcggtccagtccagagagctcgagcagccatggcggctcccctgttcctcctcctcctgctgctggctatgttcacaggctcagacgcggcgttctgcgtgtgcaagacgggcgtgcccgaccaggcgatgcaggcggcgatcgactacgcctgcgccaagggggccgactgcgcctccgcctccaagggcgcgccctgctacggcaacggcaacaaggtggccgtctgctcctacatctgcaacagctactaccagagccgcagcgccacgggcgccacctgcgacttcaacggcgtcgccacgctcaccggcaccgaccccagctccggcacctgcaagttcgcctccggccccagcagcgcaggcaccggcggtggcatgggcgctggcgcgggtaccggcggtggcatgggcgcaggggtcgcgacccccgggagcgccctgagcccaccgttcggcggcactggcgcgtacggcccgtcaggggcaggcagcacggactacaacgacgccgtcgccccgcgcgccgccgggctgcacgtggtggctgccctcgctctcgccgtcgccgtcgccgcacctctccaccgctaggggcggtgccatggcaactgggagctggcgggcacgacactcgcagacgggatcccgcctcggcggcccgccagcgcgggctctggtcgatgtccggcgttagtgcgtgcgcgtacctgatgaagtgatgatgggttttgatcgaccagccgtcagcgtagtgcggtcacggggtttacagtgttattcgaactgacctctctgcttcctcgtgctagtagtggtggctgccatgtgtgtgtgctgctggtagagaactagggattctttttttttcttctgtcgcttccttgcttatatgtcccgtcgtgttaggctgtgtttactatgcagtgtttggtggtggccgctttccatgag

SEQ ID NO: 147014 - DNA, 1151 bp, Zea Mays
gacgacactgcacacctctcaccagtccccacacggccacaccacacccagctgtccccatcgcgcgcacactctctcggtctctccctcccagtcccagcgtttgcggtccagtccagagagctcgagcagccatggcggctcccctgttcctcctcctcctgctgctggctatgttcacaggctcagacgcggcgttctgcgtgtgcaagacgggcgtgcccgaccaggcgatgcaggcggcgatcgactacgcctgcgccaagggggccgactgcgcctccgcctccaagggcgcgccctgctacggcaacggcaacaaggtggccgtctgctcctacatctgcaacagctactaccagagccgcagcgccacgggcgccacctgcgacttcaacggcgtcgccacgctcaccggcaccgaccccagctccggcacctgcaagttcgcctccggccccagcagcgcaggcaccggcggtggcatgggcgctggcgcgggtaccggcggtggcatgggcgctggcaccggcgccgggacaggcgttggcaccggagcaggcacgggcatgggcaccgggacggggaccagcaccggcaccggcgccggcgcaggggtcgcgacccccgggagcgccctgagcccaccgttcggcggcactggcgcgtacggcccgtcaggggcaggcagcacggactacaacgacgccgtcgccccgcgcgccgccgggctgcacgtggtggctgccctcgctctcgccgtcgccgtcgccgcacctctccaccgctaggggcggtgccatggcaactgggagctggcgggcacgacactcgcagacgggatcccgcctcggcggcccgccagcgcgggctctggtcgatgtccggcgttagtgcgtgcgcgtacctgatgaagtgatgatgggttttgatcgaccagccgtcagcgtagtgcggtcacggggtttacagtgttattcgaactgacctctctgcttcctcgtgctagtagtggtggctgccatgtgtgtgtgctgctggtagagaactagggattctttttttttcttctgtcgcttccttgcttatatgtcccgtcgtgttaggctgtgtttactatgcagtgtttggtggtggccgctttccatgag

SEQ ID NO: 147015 - DNA, 1154 bp, Zea Mays
gacgacactgcacacctctcaccagtccccacacggccacaccacacccagctgtccccatcgcgcgcacactctctcggtctctccctcccagtcccagcgtttgcggtccagtccagagagctcgagcagccatggcggctcccctgttcctcctcctcctgctgctggctatgttcacaggctcagcagacgcggcgttctgcgtgtgcaagacgggcgtgcccgaccaggcgatgcaggcggcgatcgactacgcctgcgccaagggggccgactgcgcctccgcctccaagggcgcgccctgctacggcaacggcaacaaggtggccgtctgctcctacatctgcaacagctactaccagagccgcagcgccacgggcgccacctgcgacttcaacggcgtcgccacgctcaccggcaccgaccccagctccggcacctgcaagttcgcctccggccccagcagcgcaggcaccggcggtggcatgggcgctggcgcgggtaccggcggtggcatgggcgctggcaccggcgccgggacaggcgttggcaccggagcaggcacgggcatgggcaccgggacggggaccagcaccggcaccggcgccggcgcaggggtcgcgacccccgggagcgccctgagcccaccgttcggcggcactggcgcgtacggcccgtcaggggcaggcagcacggactacaacgacgccgtcgccccgcgcgccgccgggctgcacgtggtggctgccctcgctctcgccgtcgccgtcgccgcacctctccaccgctaggggcggtgccatggcaactgggagctggcgggcacgacactcgcagacgggatcccgcctcggcggcccgccagcgcgggctctggtcgatgtccggcgttagtgcgtgcgcgtacctgatgaagtgatgatgggttttgatcgaccagccgtcagcgtagtgcggtcacggggtttacagtgttattcgaactgacctctctgcttcctcgtgctagtagtggtggctgccatgtgtgtgtgctgctggtagagaactagggattctttttttttcttctgtcgcttccttgcttatatgtcccgtcgtgttaggctgtgtttactatgcagtgtttggtggtggccgctttccatgag

SEQ ID NO: 147016 - DNA, 375 bp, Zea Mays
atggaaactccggcagtcccctcgccggacgaactctcgccggacctcgcagtccacgcagccggcgagttagcctcgtcgttgcctccaggcgatgtcgtaggcagcgacacagggctggccctcaatctgtcgccgttcgtcgatgctgctctgacgatcgccgacgttgacaacttttggttggaggcaccaccagattgtcgtgaagatcctgttgaaacgggcactgtcaattttcagttaacagtgtttgacccatcgcaagtatttgattttgagggtattggacctgatcttcgatgggatgaagaagggcctcaacatgtacccagtgagttagctatgtattcgaaacttggattggcggagtga

SEQ ID NO: 147017 - DNA, 1257 bp, Zea Mays
gccgaattatttccccccggcccctgcacgagtctagagtctagacactagactgtcttgttcagttctgacttattatctgatgatgatccgttgttattaggtgtgtgtgtgatcatgagtggataataagagatgataagcggcaacctcaccaatgaagacctgggggccgggcgcaccaaggccgaggggccgacgaccgcggccagggccgtcgcgaagagtcccgtgctgccgagctcccggcactggccgccgtcgacggagtccaggatcgtgcgcgtgtcgcgggtcttcggcggcaaggaccggcacagcaaggtgaggacggtcaaggggctgcgcgaccggcgcgtgcggctgtccgtgccgacggcgatacagctctacgacctccaggaccggctgggcctcagccagccgagcaaggtggtggactggctgctcgacgccgcgcagcacgagatcgacaagctgcctccgcttcagttcccaccgcaggcagcgcaggacctcgtcgcccatctgccgccgccatccatggtggcgcccttcgcagccgaccgggccgaggccgacggcgacaaacgccactgccacgccggcgtcaaagggctcatgggcctcaacaattccatccgcctcgtcaacgccaccatgccgctggctcacggcttgtactacacgcccggcgagtcttggaccggtaccaatgccgatgatgccgccgcccatgatcatcagacggtggctcacggccactcgcccttctcatctctgctgtctcttgctgctccggggcctcagctcgtcttctactcgtcggaaggcggcggattcaccatgaaagaagaagccaccggttatcagttcccagtacaaaatagcctcgaccactcgcaaggccagctctcactgagctcagctagaagcttccttcgccccggcaaccaggtatgattaggtcactgatctctactgctccaagaaggtacgtagaagaataaagcttggtgtagtagtaatcaagtactcatttgaaggttccgtaacggttgtaactgcagttttgagatgctattgtttggtatgatcgagtagagggtctctagcatgcataattgaggttatttttgcaggacatgcaatgcaattcgttgcttcttttttatacaaggaagcaacgacaggtcatatgggtgtgtgtgtttgtttgtattgtaataacaattttaataatccattcttgatttt

SEQ ID NO: 147018 - DNA, 80 bp, Zea Mays
cacttgcattttaatttctctcctttttacagcgttactatctacttaaaaaggattattggcattatcttgcagattac

SEQ ID NO: 147019 - DNA, 1110 bp, Zea Mays
gccttttgccttgcctgcctgccttccttctcgtagaagataagcaaagcaaggcaaccgttgtcgttgtctctgttcctccgcttcctgctctcttggcttgctgcttgccctcggagcagtgccttccgccgccgccgccgccgcctgttgtgagaaggagaggccggggctgggaggagatgagcgtgaccaagttcatcaagtgcgtcacggtgggggacggcgcggtgggcaagacctgcatgctcatctgctacaccagcaacaagttccccacggattacatccccacggtgttcgacaacttcagcgccaacgtctccgtggacggcagcatcgtcaacctgggcctctgggacactgcaggacaagaggactacagcagattgcggccactgagctacaggggcgcggacgtgttcgtgctggccttctccttgatcagcagggcgagctatgagaacgtccttaagaagtgggtgccagagcttcgcagattcgcgcccgacgtcccggtcgttcttgtcgggaccaagttagatctccgtgaccacagggcctaccttgctgaccatcctggagcgtcgacgatcacgacggcacagggcgaagaactgaggaggcagatcggcgctgcggcttacatcgagtgcagttccaaaacgcagcagaatgtcaagtcggtcttcgacacagccatcaaagtggtccttcagcccccgcggaggagggaggcgacgcctgccaggaggaagaacaggcgtggctccgggtgctctatcatgaacctcatgtgtggcagcacgtgcgctgcttaggagtctagaacactgatctggaaggaggtgaaggtgaaggcatggtgtctatgtgctatggcgactggcaagttaatggggccgcatggatgactgctgctcttgtttttttaagctcgtctgccgtatgctttgtttttttaggcttcaaggactgacaattgcaagaatgcagtgtttatgtaagaggttgtttgctggaataggattgctgtaactgtaatgttgttctccgagagcaatgtggcattacctgctggctgctgctgccgcgccgcctgtgttctca

SEQ ID NO: 147020 - DNA, 1095 bp, Zea Mays
atggcactcgccggcatcaccaaccaggacttgctcgacgcacaggttgagctatggcacagcaccttcgcctacatcaaatccatggcactcaagtccgccttggaccttggcctcgccgacgccatctaccaccacggcggcagcgccacgctgccgcagatagttgacagggtcacgctccacccgtccaagaccctccacctgcgtcgcctcatgcgcgtgctcgccaccacgggcgtgttcagcgtccagcacccatcgccgttgggtgacgacagcagcagtgccagtgacagtgagcctgtctacaagctcacagcagtgtccgccctcctggtcggcccgcgccgcagccacgtcccgctcgccgcctttgtcgtcgacccggccctcgtcacgcccttcttcgagctcggcaaatggctccagcgcgagcttcccggcccgtgcatcttcgagcacgcgcacggccagaccatctgggagcacgccaacggtgacgcggccttcaacgcgctcctcaacgacgggatgctctcggacagccacttcatcatggacatcgccagcaaggagtgcgcgcacgtcttccaggggataagctccctggtcgacgtcggcggaggtctcggcgcggccgcgcaggccatctcgctggcgttcccgggcgtcaagtgcagcgtgctagacctcgaccacgtcgttgccaaggctcccagtgacactcaagtgagctacatcggcggcgacatgttcgagtctgtaccgccggcagatgccatgttcctcaagtgggttctgcatgactggggccacgaggagtgcgtgaagatactgaggaactgcaggaaggccatccctccgagggaaggaggagggaaggtgataatcatcgacatggtggtcggggctgggccggcggacccgaggcacagggagatgcaggccctgttcgacctctacatcatggtcgtcaacggcatggagcgggacgagcaggagtggaagcggatcttcgtcgaggccgggttcaccgactacagagtcacgccggtcctcggcgtccgctccatcatcgaggtgtacccttga

SEQ ID NO: 147021 - DNA, 103 bp, Zea Mays
tatacatatttgtgctatatattatttatattcaaattttctcaaaaatcttggtattcaattgaattgcatcaatggtgtagcaggcgtttaaactacatac

SEQ ID NO: 147022 - DNA, 384 bp, Zea Mays
atggcgccggcggcactgtggcgacctctatgttgtctgcatgtacctgttgtcccgctgcagcggcgtgtgtacgactttcaccctggagaagcagctccgagactggctctgattgatgatggagaaggtcctgcttatgatggcctgactgcccagcaccgatgccaagatcgccagcaccaggtcatcgtacggttcccgtgttcatcacagatgcaaaagtcgtgtgaatctctgaaagcatactgcaatgtagagtacatacgcgaaccagatagtggcagtagtgctacgtaccaggaactgcaatgtagaacctggtctggtagcttgcgtcaaggttatggtgctgggtcaaggttatggtgctgggacagataa

SEQ ID NO: 147023 - DNA, 139 bp, Zea Mays
ctagcggtgggtcgctatagagcaaggatcactatcaaatcttatagcctgaacgtacctgtagatgttagtgactaaaaattaattaaaacaagtaaacattgatcgctaaattatagtaaagaaaaaaagaattgta

SEQ ID NO: 147024 - DNA, 414 bp, Zea Mays
atggtgagggtggtggcggctgacatgccgcccgcgctgcagcgccgcgcgttctgctgcgcccacgacgagctcgcggcgatgccgcacttcccgcgccggctcgagcccaagcgcttcgcgctggcgctcaagaagctcatttggaaggttctcagagttgctgatcccaccattggcagttcaagtatcaagaggccattggtgacagaagctgcaacatccatggttattagatcgttgccagagaaaccatcgaaggctttctgtgactttgattcggtgatctctgttagtacttcagcacttgagtgtctatgcgttcgggttactaggacatgggacttctatgatcctggagatgataaaaaacttctgcattctgatcttgtactgctcgatgaggaggtataa

SEQ ID NO: 147025 - DNA, 703 bp, Zea Mays
aggccgcctggcttatcccgtcgttccctgctccgatctttccagtgccgcgcctggctcaccggtgttccagctccagccaccgctcaactcgagaataaaatcaagcacgcgcgtcctgaattcacttgacgcatcccggccaggcccttgctcgactgctcggccgtccatctctctcctgctcggccgcgcactggaccttgctccagctcgccgaccggagcttcgctcgtccccatggcgactgctcggtctgcgcgctcggcgtccatctccagccagcgctctctccaaccaaggtcttcttcctgtgcgcgctatcctgcgcacgcaccgtgacctgctcggcctaatcgtcccctttaccgctccctcagctcgcccgagctcctcccctgctcgccgtgctaaccgtctatgtcgtcgccggacttgtctcctcgaccatcttggcgttgttatttcctgctgctccatgacatcgtcgagccattctcagttgctcgccgtcgaagctcccctgttggctgcgtcctgctcgcctttgcgtcgcgcgcatagcgtctgttgttcttgcgcgcgcgaagctctttgctcgtcaatgctccagcccggatttcgctttgtcgcccagctcggctctacatctcccatgactgtctgctctagctcgctgtagtccctgcgcgcatcgagtttt

SEQ ID NO: 147026 - DNA, 1050 bp, Zea Mays
gtcgatttttttttccagctccacttgagtcatgtgacgagaagatttgcagctagtatatcagaacggtggatttgggcccgagtgatagcgccggaggaagcgtgctccgtgtgggccctccctccggagcccgcccgcgaccgtttctgccgcatggaggaccgccgccgcgtgcggcgttagtcggccgggcggccccgccttccagttccagccgcttggaagccgtcgaggtactccccgccggcgtccaaccttacacagtccgtgttacggggcttgcccgtggcagcttcttctaccagtgcgtgtgcgtctacctccttctggagcccacccccgaggaggtgggagcgagcgatcactgctgtgccgacttcggttataggagaaaaactcactcttatatggagactttacagatgatgatgatgaattgatgaggaggcaaagaagaagatagatgagctgatcaaggatatctgtggaatagagtttgatatcactgagcttgtgctttatagaaggatgccatagatataagcttggagtcatgggaattggtggaggtgtgccatcttgagaagaagtgattagtttcctctccaagtgtagtgttatggagtccagcaggaggcaaacatgcccgcatgatgctgaagccgaaggagcggtgcgctccgtactcctcggtcaatattaaacatgagaaaagaagaagcatatcttccccggagataacaaaaaaatgttcgcaaaaggcacgcgatccaatacgagaacactcggaacactgcttttgtatatctttactgagtggacgatattcgcctgcccttgtgattctctgttttgctcgaatggaatggaatgtacatagcctggtgtaggttttcttgcacatgctggtcgtctagatagccatcgtcaggatcatgtgtcgctggacttgtaatgaaagtatatgattttactggagtaacaatgcctcctctcgtaatggaagtatatgtaatgtaatccgctggtgttgtttgccagcattcc

SEQ ID NO: 147027 - DNA, 3212 bp, Zea Mays
atggcggccgccggcacgtcgttctccatccgggagtacgcggtgcgtgcgcgggcgcgggccgagggcggcgggggcgggagctggcctttcggcggggacgcgggggcgctaccgcccatggaggtgcggcggttccggtggtggcgggacgaggcggcagcggtggaggaggaggaggccgaggtggagaggaggttggcggccaagcgccgcaagcgctccgtcgccgagctcttcgccgcggtcccgcgggtgccccgaggcggccaggggcgtggcaaggggaaggctgccaagaggaaggcggagaaagacaagggaaagctagtgctcgctgccagtgttaagaccaacaagaagaaaaaggtcccgactgggatcgatgccagaccaaaggagaaaaacagtggggtaaaggtgaactcagttagcatttctaagtcatttcagcatcctataaaaaatagggaacccaagagttcttgcaagaaaaagggaaaacaagaggtctcagtcttactggataagaaaagtaagaagggaaacagaaagtcagttttggaaatacacaaaaaggatatggcaaacagtgttcaaactcaaagcatttgtaaggatcagtcaaaagcaggttctagcacagcaccgaatacaacagatatgaggtgtaaattaaattcttgttgcaaatcaaagcatgttaccttttctgatggcgctgacatatttggaaggaccgcacatctacctgcagataatacaaagcaaccacaatctgtacagacattccagcaagccactcaggaaggtcgtgaccaccgtgatagagatgatcaacagttggtttatcaacaagctgaagctatatcccggactgttgagattaccaattctttgtctgaaaatgtagtactagctggtgtttgccgtacaatcccacttaccaaaccaaaagatatcactatactgggaaactcagtggatctgaatcactgcatagaaacttgtcatggcagtaactgtttgaactccacgagtttggcaagcttatctagtaagatgccatgtcaaaaattccaaggtgtgaactctcatctgaatggcaacaatgtttcaagtcttgatgttcagtatcttggagaacaaaaccatatgatatcacaagcatcatttaatcctgttagtttggcacccaagggagtatcaggtgatatgagcccattgtcagagccttccagttgttgtttatatgataggagcagtatcacgttccacgagaaggctgatgctaattaccacttgggaaaagttagttctgagattcttagatctggtaacgtggtgagaagcataagctcttcaacaggatcaaataaaccagcacaagccatcgattgtgtatctgctgcattcaggaacatgcacagccgccgtgacgattatgtcggccttcctatcaattcacgaggtgaattcgtcaaggttcatcctggtggcacccctaattctgttgacatttttacgaggcagtgtttgggggagaattcctcatgcccctcagattatccaaccatcttcagttctattacccgcatggatcatgtacccaactatcatgctcgacaattctatacaatagaccagtctgcttttcatgcagatcctcgttttcctccagcgggcccaatggcatatgggatggatgtgaggcagtggccaagttctgaaagagcaaaagttcattactacacaattccaaacaaaaagtatccatgcgccaaacagcaagagctttcaatggatcacaattcacagcagaagctacttgggctgcgaagccgctgtcccagccagaactctgggcagggtatgcagcacaacgccgaaacgacactgcgcctcatgggaaaaacggtcacacttgggaccagcagcagcatgcactgtagaggcctgaacaacggaaccccagcttgttccagtaaacaaagccaagctgaagaccggggaacgcgtacgaaagttttcccacagctgtttcacggaggactggctctggctgatcccgctgctgcgtgtaggatatcagatggagagaggcaaccgtctggacacccgtcacgtttctctttggctccagcagctgttcgggcttttctgcctggtaccagcagtttcagaacaggtggccacaaccagcaacctgaactagcaacagccagtaagaatccttatctttcaatacactgcagacatgcaccggagtcatctttcaatgcaaggaacagtttcagaaacttcacggaaaaggggccagcggcaccgtaccagtcgtccagttacctgacgcagcagctcagcagcaacatggcgcagagaaccgccgccgccgcctcctcttctgcgtcaggctacggcgttcagagaccccctggtctaagtctaacaacagcccagacgaaattcacgtcgctccggccgttgccgccttcggtcgtcccttcccatgcctacggcgcgccgcctcacggacccgtcaccgtctttcacccgtcagctcctcccgtgccgtatccagcgagcaattctggcggtcctggcagcagcgacgcggtgttggagatcgagagcgtgaggtggagcgtggtgggatcgaagcctgagggctcggagcgtctgaggagctgcaaaagggcagcagagatggacgccgacgtgtccgtggcgttgctgaagaagcctctcaccgtcgccgccgccgccgcagcacggcaggggctagatatgttgctaccggtcgcagagacggggtcggagttccgtggatccaccaggccggagccggaggcgcagccgcggcctagtggtacgagtacgacgcctatttgtgtcgacgacgagccttgagctgatgatcttcgacttggagacgcaggcaggatcgcgtcccacacggtcatcgaaagatgtcagcgcgatggtaaggtactactactactaccagtggagctgaaacctggagcgaagcgtgtatggcagtcagcagccaagtgccagcagcagcgtgtgccagccagggaaatcccctggcctgtgcgcgcgttcggttacaccgctagcccctcgaggaggcgcgggaggtcagcatgcatgttctaggtgtggtctttggccctctttgttcacctgtatacattgaaacactcatc

SEQ ID NO: 147028 - DNA, 3462 bp, Zea Mays
atatcactcgtgtgctcgcaaacaagcgtccgagttggaggcgtggcggcccgttttgcatgccgtagctctcccggtgttcctccccttccgaacccctcgccgcctctccgtctcgtgattcgaatcactgccccattgcgaacgagccgccacagctgctgccagcctcaaggaagggccccggttcccaatcccagacgggccagcggatcgatcgaacaggcggccggccactcgggatcgggtgggtgagtcgttccgcttccgaaaccagcctccctgcgtgatgggcctgcttgggtccgcctgttgccgcctcctcgtcgtcgctcaccgctcgcgtccgcctaatgctgcaggccggggccgcggcggcgcatgagctctgacgccgcgagggggcagcgcggcatcaactgcacgaggggcgacgcggcggcgatgccaacctcatcgccctttgtcggcgacagcggcggcgcgggctccccgatccgcgtcgagcgaatggtccgcgagcgtagccgccgctacgacatcttcgcgtcggacgcgatggataccgacgccgaggcggccttcgcgctggatggggtccagtcgcctggacgtgcgtcacccgccaacatggaggatgctggcggcgcggccgcagcgcgaccgccgctcgccggctcccgcagcggtttccgccgcctaggcctccgtggcatgaagcagcgcctcctcgtcgtggccaaccgcctgcctgtatccgccaaccgccgcggagaggaccactggtcgcttgagatcagcgccggcggccttgtgagcgccctccttggcgtgaaggacgtcgacgcgaagtggattggctgggcaggcgtcaacgtaccggacgaggttggtcagcgagccctcactaaagctcttgcggagaagagatgcataccagtgttcctggacgaggagattgtgcaccagtactacaatggatactgcaacaacatcctgtggccactgttccactacctaggactaccacaggaggacaggctggcaacaacgaggaactttgagtcacagttcgacgcgtacaagcgtgctaaccagatgttcgctgatgtcgtgtacgagcactaccaggacggggatgtgatctggtgccatgactaccacctcatgtttctgcccaagtgcctcaaggaccatgacatcaatatgaaggtcgggtggttcctgcacacgccgttcccgtcatcagagatttaccggacactgccgtcccgcttggagctgcttcggtcggtgctgtgtgccgatttagttggatttcatacttacgactatgcgaggcattttgtgagtgcttgcactagaatacttggacttgagggtacccctgagggcgttgaagatcaaggaaggctaaccagggttgcagcgtttcctattgggatagactctgatcgtttcaagcgagcattggagcttccagcagtgaaaaggcacgtcagtgaattgacagaacgttttgccggtcgaaaggtaatgcttggtgttgaccgacttgacatgattaagggaattccgcaaaagattttggcctttgaaaagtttcttgaggaaaacccagactggaacaacaaagttgttctactgcagattgctgtgccaacaagaactgacgtccctgaatatcaaaagctaacgagccaagtgcatgaaattgttgggcgcataaacggtcgatttggaacgttgactgctgtccctattcatcatctggaccgatctcttgatttccatgccttgtgtgctctttatgcagtcactgatgttgctcttgtaacatcactgagagatgggatgaaccttgtgagctatgaatatgttgcatgccaagggtctaagaaaggagttctgatacttagcgagtttgctggggcagcacaatcacttggagctggtgccattctagtaaacccttggaatattacagaagttgcagactcaatacggcatgctttaacgatgccatccgatgagagagagaaacgacacagacacaactacgcacatgtcacaactcacacggctcaagattgggctgaaacttttgtatttgagctaaatgacacggttgctgaagcactactgaggacaagacaagttcctcctggtcttcctagtcaaatggcaattcagcaatatttgcgctctaaaaatcgtctgctcatattgggtttcaattcgacattgactgagccagtcgaatcctctgggagaaggggtggtgaccaaatcaaggaaatggaactcaagttgcatcctgacttaaagggtcctctgagagccctctgtgaggatgagcgcactacagttattgttcttagcggcagtgacaggagtgttcttgatgaaaattttggagaatttaaaatgtggttggcggcagagcatgggatgtttttacgcccgacttacggagaatggatgacaacaatgcctgagcatctgaacatggattgggttgacagcgtaaagcatgtttttgaatactttacagaaagaaccccaagatcccatttcgaacatcgtgaaacatcatttgtgtggaactataagtatgctgatgttgagttcggaaggctacaagcaagagatatgctgcagcacttgtggacaggtccgatctcaaatgcagctgttgatgttgttcaagggagtcgatcagttgaagttcggtctgttggagttaccaagggtgctgcaattgatcgtattttaggggagatagttcacagcgaaaacatgattactccaattgactatgtcctgtgcatagggcatttccttgggaaggatgaggacatctacgtcttctttgatcccgagtacccttctgaatccaaagtaaagccagagggcggctcagcatcacttgaccggaggccgaacgggaggccaccatcgaatggcaggagtaactccaggaacccacagtccaggacacagaaggcgcagcaggctgcatccgagaggtcatcctcatcaagtcacagcagcacgagcagcaaccacgactggcgcgaagggtcctcggtccttgatctcaagggcgagaactacttctcctgcgccgtcgggaggaagcggtccaacgcccgctacctgctgagctcgtcggaggaggttgtctccttcctcaaagagttggcgacagcgacagctggcttccaggccacctgtgctgactacatgcatgttcttggataggcagtaaatagactgaagttgaagcctccgtgctttaccagagacagagagaagaagaatattcattcctcgtatgcgcgacagagctacacccgtagctagtcagcgtgctgtacaatcatgtacaaaatttatgctcgtgataaaactgcgagaggggagctagcaaatgggaaaggataaaggagtttagttgct

SEQ ID NO: 147029 - DNA, 552 bp, Zea Mays
atggaggagttccaagaagccgacgtcctgtggacatggccgatgccggacacgccaacgccgtcgccggaggaggggagctacgacctggcggcagcggcctacgagctgtacgagtacgatgccgccgcagtcatcgacttctcgtgcgacgaaccgttcagcaaaccagtcgcggcgtggagcgcaagctcgacgacgagctcaacgttgagcgccctactgtcgtctgacaacggcggcggcttcttcctctctggcccttccaccgtttctgccaccgggctcgggctcgacgcggcggaggagttcctggaggcggacgtgctgtggccggacccggacacagccgacgacgacacggcggggtttttgtggcgtcgtcgtcgttctcgttcccgtcgtgtagaggaggccgccgcatcggctgcggccgctgtcttctgcggtcaacgagaagggtgcagcgggcctttggtggcgtcgtctccgatcgatatccccatggccgccagaggtgctgctgccgccgcgcgtcgccgtcggccttga

SEQ ID NO: 147030 - DNA, 947 bp, Zea Mays
cctacccacgccaactatacacccacctctttttattcacactccggccgcctctcgctcttccggtcttcccccatctccgtgaaaccaacgccccccagcccagcggccgcgcgaatggaggttgctgcggcgaagcaactcctccccatggcgctgggccccaactccccgtcgtcctccacctcctcctcctctccctcgtccgccgccgccgccgcctcctccccgtcgccgcgccagcagcacccccacgcgcccgcgccgccgtcgcccacgcccaggcccgtgccgcgcatcatcgacaccacgcccttccccaccaccttcgtgcaggccgacaccgccagcttcaagcaggtcgtccagaggctcaccggctccgacacgccgccgccgccccacaagcccgtcaagagctacccccaccaccacggcagcgggcccaagaagccggccttcaagctgtacgagcgccggatcggcaagagcaacctcaagatgatcgcgccgctggcgatggcggcggccgcggcgccgcctgaggcgctgtcgcccagcgtgctcgacttcccgtccctggcgctccggagccccgtcacgccgctgctgcccgaccccttcaaccggtcgcagggcgcggaggaggacgaggaggccgccgagcgcgcggccatcgcgcggaccggcttcttcctgcacccctcgcccaggggcgccgagccgccgccgcgcctgctgccgctgttccccgtcacgtccccccggatggcgcagtgacgacccccccctgccgcagaatttcctagtaccgcgtccgcgtgagatatactttattgctcaattaactccttggtgcgtcatatgtaatttttgcttggccatgcatggtactcaactctcgagcgatcgcgaagaaaggatcacgctctttgagcttccttgtc

SEQ ID NO: 147031 - DNA, 2422 bp, Zea Mays
cttgtcgcggcgcggaacgagcttccttccagtcccatgcgggccggtagccgccagcagagctcgcgtctgcctgggactgggagcgacgtctcgctcgctttcccccctttcctgtaccctgtgtgatgtgaggaatgacggtctccgcactcatggtcctccccggtcgcggtcgccctccacggttgctcacccttgaggaggcggaggcggctcacgggctctgattggcggatggcgcgtcggatcggagcagtcgagcttcggggatttcctgtccctctggaagggatgaaatgcggcgactacctggtgaactgggtggagctctagtgccagccagtgttcctgctgacgcctgcctcatctagtccccccttcgttcagttcttgtggcgagttgttaatccaccgtgtccgggatccgtttggcctggggttttgaggagatggacgacgaggactactcgtgggtgcggcgcaccaggttctcgcagtccatcgtcagatccagctctggcagggagcagtatggcgcgttcatcgagcagttcagccgtggcgccgagctgaggcagaatgggttgggcacagggtacaggaaccctcgccagagtgtacagcccttggcgaagggatccggggtctccaactctgcaaggctgccgattcccaaggcgaagtcagcagttgcccagtcggaacggaagctgaagcatgcgtcttccgaaggccaattgaacagagacggtgatcgcccgttgcaagaatcatcggcgaagcagagccggaaaggggccgtcggcctcagtctggacattccgcagctgcatgtggttcggccatccaaggagagcccagacgcgctggatttctctttccactcggacgagcacagccagaggctccagagagtgtgttccagcccggctcctttctctacgaaggatggtacggcaccagctggtgattccagagcgagcagtgcatctatgaagatcatcggacaagtgtccaaacccgcgccgaaacgaagagccaagtcccctatccccaagcgcgtcatctcggatgtgtttaaggaggcgaaagcagccaccaagaggttctccagcccgcagcggcagaggaagcccacatctccacggtcactagatgacagccctccattcggctttgcttcgctaagaacaccaagcaagctgaagattaatagcagaacctcctcatggccgagaaggaacctcgacagtgggctggcgaaagttgctgcactggagatccttgagaggtggacggtcgatcgctctgagttgctcattggacataggtttgcatccggggcttatagccgattgttccatgggatctacaaggagcaacctgttgctgtaaagtttatcagacagcctgacgatggtgaggatgacgaattatctgctaagcttgagaagcagttcacttcagaggttaccattctggcaaggctccaacatcgtaatgtcattaagcttgttggggcctgtaattgcccgccagtattctgtgtaatcactgagtttctgtctgggggttctttgagggctttcttgcgaaagttggagcgcaaagctcttcctttggagaaggtcatttccatcgctttggatatcgcccgcggcctggaatatattcacctccagggaatcgtacaccgtgacgtcaaacccgagaacatcttatttgatggagaattctgtgctaaagttgtcgattttggagtggcgtgtgaagaaacatactgcaatttgttaggggatgatccaggtacttatagatggatggcaccagagatgtacaagcacaagccctatggccggaaagttgatgtgtatagctttgggcttctcttgtgggaattggtcaccggttcactcccttatgaagatatgactccgcttcaggcagctttcgccgttgttaataagaacttgaggccggtcattccattgagctgcccagcagcgctgaagcttctgattgagcagtgttggtcctggcaaccagaaaagaggcccgactttcagcagatagtttctatcctcgaagatctcaagacagttcttgaaacagacggaacactccacaaggtcccaagctcgatctgccaggccttggaatccaatgatcagaacaagaagaaggccggtaactggatccagaggctgtcatacgctcaacctgatttctccgggcctccacccccaaagttactgtagctacgcgtcttcttgttcttggtagcttgtttatctggttggtagcaactgtgtaaattgaacctttcttgtttcttgttgagagaccacagatttcgtcatggtatatactcggacaaagtacatacatcaattcttttttcggctaccttaacaacttc

SEQ ID NO: 147032 - DNA, 146 bp, Zea Mays
tctttgttatttcttgggccttggtggaggaggttacaacggcagtggtggacaatttggctggttggatcttatttgggcgctcgtattgtatgttttatgcaaagtcggaaggacgtggagggtcgctcttagtcatcaagaag

SEQ ID NO: 147033 - DNA, 1863 bp, Zea Mays
atgaggaacaaaatcaacctgggttcaaatcagaaagtttttccagatgcagctgctatggcaaatgactctaaacaagatgacgcatttgatcttccatcagatgactcagacgacaatgactttgaccccaatatgcctgaagagcatgtggttggtaaggatgaagaatcgtctgaagaggatgaggatggaggatcagactctgatgactcagactttttgacatgttctgatgattcggaacctttgatagacaagaaggttgatgacctcagattaccttctgaagattcagaggatgatgactatgatccagcaggtcctgattcagataaagatgtcgaaaagaagtcaagttctgatgaatctgacttcacatctgactcagatgatttttgtaaggagatttcaaaatctggacatgatgaagtttcatcacctctattacccgatgccaaggtgggtgatatggaaaagattactgctcaagctaaaacaacaagttctgctgacgaccctatggagactgaaatagaccagggtgtggttttaccagattcaaggagacggcaagctgaacggttggactacaaaaagttgtatgatgaggcatatggtgaagcatcatctgattctagtgatgatgaagaatggtctgggaagaacacgccaataataaaaagcaatgaagagggtgaagccaattctcctgcgggaaaaggctccagagttgtgcaccataatgatgaactgactacacaaagcactaaaaaaagcttgcattctattcatggttcagtagatgagaaacctggagaccttacttctaatggcagcaacagcacagccaggaaaggacattttggcccagtaattaatcagaagctacatgaacattttaagacacaaccataccctagtcgttctgttaaagaaagtctggcagaagaactagggttaacatttcgtcaggttaacaaatggtttgaaactaggcgtcattccgcaagggtagcttcttccaggaaaggcatcagtctagataagcatagcccccaaaatactaatagtcaagtgacagctagtatggaacctaaagaacctgaggggactgtggtggaagaatctaatgtatgcctaaatgggggtactaccatctctaaagaagcagtgtcttcaaaagttggatcaagaacccctggaagtgatgtgggagggtcaaaagttgattctgctgaggatcagaatccggggcctgatcttgcagagaaggcaaggcaaaaggcaatacagcaggagttgaggaagaaaaaaatgggacgatgaagtttgtagacaaagatatgagccagaatttggactgctcctgaaatttccaggtcgggtcgtgatttcgctgccggtgctatggaccttgaaactttggctttgtatggctctatgtcggcagccaaaaaacatagatataccattacaactttacaagtcagctagctctcattagttcgtgccagtcaactagcaagcgcatcattcagtttttttttgtggggccattgctttccgttcttaggcaactgagagcttcctctgatttctggggcgctctataggaattagttatccttcagatttgtttgcagcgactcctggcattgcaaaagcgtacggctccgtaacgacagcagtgtactgcagaagatgtgtgttgttttcatcgatgttgaattttctggtaagatggaatgttgtaccaaaccccttgcgtgatgcgaacagaggactttgtaatttcagtgtgcggccatgggtctgtacctgcttttcatgcaaacgcattttcggtaacgtcagtgtccc

SEQ ID NO: 147034 - DNA, 738 bp, Zea Mays
ctacactataaaatgcttaaacgtgcaactaggtccatcatccagttgacaagagctatactattccatggggcagcacaaataaatttccgtaagatgttaaatattatgtagggtacagaggctttatatatcacaagaggaagttcaacatttcatgttctaccaggaaaggacaattacacggtatattgtgccactgcgtttattgtgatcgacgatcacaagaaagtaaatcaaagtttttattgtgagtgtcatttccatccctctcaacttctcaagcatcagcgtgaaacaagttgccatggatctgcttaggaactaactacatcagtaaaactgacataaaaataaaactgcacatcagcttcaaactcaacgagttaatggcttccaagattgtttgctacaaatggacttaaaatcaggttgcaggactcttctgttgtgtatacatagtattctttgccgttgtccacattatatctcagagataccactgtccagtcatgttgcaggtggcagatttcttaaaatcaggttgcatgttgcaggtttcttgatgctgtcgtccatgaacagccacatctgctcattctccagtttcaccttctcctacatgttgttaataatgacaaagcactaatgaaataaaatttatttgggaaaacccactaaggtcatgcctttcaaacaacaattagagataggtacaagaatgtctgaacaattcta

SEQ ID NO: 147035 - DNA, 344 bp, Zea Mays
agaggaactgtcaagtcagaaacaaaatagagttatactttaagtaattaggtctctgagatactcacagagatctatatttttcattttctgcaaaggcgattgagcacatctatctcaatcattgcagcgtcacagtacttgcggatactgcgaacaacttttatggcaacatattcacgtgtttcacggtcccagcattccaaaacacgctcaaatgtacctacaaaaacccaactcgtagccctcttcattagaataataacggagatacccagcagaagaggagacgacagattgcagaaaacccaaaccttctcccattttgctcaagattttatctg

SEQ ID NO: 147036 - DNA, 435 bp, Zea Mays
atggcgaagcaagtgagcgtgagcccaccgtcggggccggcggtggcggcggtccccgcgagtgcgctgaggaggcggcggaacgcgaccacggggaaggggatgtggagtaggtcccgacgcgcatacctgtactcctgcgcggcgcggcggagtagctcgacgatgggcgggcggcccagcagctccacagggacgatgaaccgctgcgtatcctccccctctgcgccgaccaccacaggcacgtgctctgatggaaccttcccgcatgtgggccccggcaacgccggcactggcttcaccatggcgcccgacgccaccctacacacccccgtggacacgcaccagagcagtgcagagaacgcggcgggggcgaggatgtcgatgcgggggcatggtgtagcatctgtggacgccctccttactgttttatag

SEQ ID NO: 147037 - DNA, 112 bp, Zea Mays
gctacccctagttttactctgtgctcagttttccccttcgcgatcaaactgaggcatcagtgccatccttccgtcaacttccatgccgtttccgtcaaccgttaaaatgtag

SEQ ID NO: 147038 - DNA, 113 bp, Zea Mays
gcaccattaggtcatctaacagttacaaacttacttcatgtaaatatgccacttttttattatctactaatttatatgctttaaatgccttttcatgccgaaaataaataaat

SEQ ID NO: 147039 - DNA, 1108 bp, Zea Mays
gttgcgcctcacctcttcgcctcgtcctgtcgctgcaaacctgcactgctgcctcctcgatgcagacctgcactgctctggtgcatgtccacgggggcgtgtagggtggcgccgggcgccgtggtgaagccagtgccggcattgctgggggccacctgcgggacacgtgcctgtggtggtcggcgcggagggggaggatacgcagcggttcgtcgtccctgcggagctgctgggtcgcccgcccatcgtcgagctgctccaccgcgccgcgcaggagtacaagtacgcgcgtcggggcccgctccgcatccccttccccatggtcgcgttccaccacctcctcggcgcactcgtggggaccgccgccgccgccggccccgacgatgggctcatgctcgcttgcttcgccatggtcgtctgagatgagatccctagcgtagcgggttccttcttctattgcttctccttccttgaggcatgtgttgtgctgtcagtgttcttgcttttctagattccatttgtttcttcttccttttctcgtttgcgctctggcagctgctccacctctacaaggctacaagctctacaacaagagcgaccgtgtccgggtcaactacagatgtgcctcaccttctccttccaccgcttttccgtcgaggccgccgacaaggcctggcgtcacagtgacacccgctcgacgccccctcgtccacgctcgtgatgtccccgacgtgatgccccatccccccgcgtgcgtacacctctggtgcgcgcagcagtacgtcgcctgcaatgtcgtcctcttgtccatccatgctgcatccatcagcgtctgctcctgctaggagaacattgctggggccaaaatccccaagttcacctgcttcgtcgacccgccgcgaccttcatcaggtagctactcatcacctcggtccaccagccgcatcgaacagggaaatcaaacagatctattccttagagttttgtttcctgtgtagcgtgccatattagcatttttgtcgttgcgctcttgtttattcagattccgtagttcgagagatgaacaatgcaatttaagcgtcatcagaaacatgttctggttcccccc

SEQ ID NO: 147040 - DNA, 446 bp, Zea Mays
cagaggctttatatatcacaagaggaagttcaacatttcatgttctaccaggaaaggacaattacacggtatattgtgccactgcgtttattgtgatcgacgatcacaagaaagcaaatcaaagttttattgtgagtgtcatttccatccctctcaacttctcaagcatcagtgtgaaacaagttgccatggatctgcttaggaactaactgcatcagtaaaactgacataaaaataaaactgcacatcagcttcaaattcaacgagttaatggcttccaagattgtttgctacaaatggacttaaaatcaggtcgcatgactcttctgttgtgtatgcatagtattctttgccgttgtccacattatatctcagagataccactgtccagtcttgttgcaggtggcagatttcttgaaatcaggttgcatgttgcaggtttcttg

SEQ ID NO: 147041 - DNA, 2118 bp, Zea Mays
gaggggtatatgcggaagctgaaaaaattcggggtgcgcccgtgcatcccagcacccgaagctggatccgcccctgcggtggcagcatgagcggcggggcgtcgctggggctcaggtcgtcggggagctacggatcgctgccgcagcagcagttaggcggctgccagtcgtcgtccccaccgctggccgcgcggaagcccgcgaagatgtccctcggcgggaccagcggcccgcgcgtctgcgcccggatctgcaagctcgccggacgccgccagcggatgctcctcctcctcctcgtctccgtcgccgtggcattctgcttcctcttctcatcacttgtcagtaaagacgaagatgcatcacctggtgttgagaccatgcttgtgttttctgatcatgtccggagctttgtgaaccctgtttggacatcgtcaggcagaccagtagctcagagaggttcgctgactgtgaatggtttgaatacaccatcgcagatggaaaaacaatctgatagtaaacaagttcaggaactcatgcagagttttccaccggctattgttgtggatcaccatccttgtgaaaacttttcattgtctcctccaccagttgatagaaaacgcactggaccacgaccttgtccagtttgttatttgccagttgagcaagcactggcactgagaccagctaaaccatcattgtcaccagtccttcaaagcttaaattatgttcttgaagagattttgattcccaaagagtccaagagcggttctttgtttggaggttttccatccctggaggaacgagataagtcttatgacataaaagactcgatgactgtacattgtggatttgtaagagggaaggtacctggtcttaatactgggtttgacatagatgaagctgatcattctgagatgcagctgtgccagagtacagttgttgcctctgctatttttggtaattatgacgtaatgcaacaaccagaaaatatcagcaaattttcaaaagatacagtttgcttctttatgtttctggatgaagaaacagaagctgcaataaagaacactactattggtcatactaaaaagattgggctgtggcgggtagttgttgtccgcaacctaccatttacagatgctagacgcaatggaaaggttccaaagctattacttcatcggctttttcccaatgcgcgatattcaatttggattgatgggaaacttaagctagtgagggatccttatcaggttcttgtggaggaagaatgttagctttgcaatttccaggcattacagacgcttcgatgttttcgaggaagctgaggccaacaaggctggtggaaaatatgataacacatcaattgactaccagatagagttctacaaaagagagggtctaacccattattcatcagccaaacttcctataacgagtgacgtcccggagggctgtgtgataattagggaacatatccccataacaaacttgtttacatgcctttggttcaatgaagttgaccgcttcacgtccagagatcagctaagcttcagcacagttagggataaaataaggtggcgagttaattggactgcagacatgttcctggattgtgaaaggcgtgattttgttgttcagtcgtaccaccgagaactgttggaacagaggcagtctgccttacgaagatggcctccccagcggtctcccgtcgcgcgcttccaacctagaaagatgcttccagacaatgcagcaagggaaccatggaaggcttctgcaaccaagaagttatcacggaagcgagcacgggataagaaatcaagctcgagacgaactcattgaactagtgggaaggaagcaattcaactgtaaatgctggcgattttgctcctacacaactgcatatctaacggacagcattccaacattgttttactacttttaacttcctttcatgctcctagctcccctccccaagggcgccaaaattttgtcagggattgttgatagagagctgaaattctttgttgtaaataaacatttttagatcagagatgtattcaactagcagctgattcaattcaatccattttggaggtagtctttggcagggtttcaaataca

SEQ ID NO: 147042 - DNA, 2560 bp, Zea Mays
gtgggaagctaaatgtttccagaccttttatcaaggtctcgtaacggacaaaatattctatgtgatgccaataagttctgacaaattttatgggatggctttctacttatagatgcacaccatcttcttgcctccagtttttcattagcttgaaaatttattgagaaaataagaaaagagtttcactgggatttagtgtaattgaatgttttttctagcaatatgccaaacaagaagtctatcttctactacagctaatgccattaacatatttctgagcttgcagctgcagttagagcgcatctttcacatgcatctgttcacgttagtgattcaactggatttctgtttgcgaaacccactgttgtgtgctaaaaacattcttattttgaataataattgactgaaaaatctgttgtaaaaaatgccatactgaagtaggatgtaacattcagttgtaagaatatgttttcttgtccttttttcaccatagtatgtgtgttccaatactgacctactaaacatttttttcctgttttagacgaagatgcatcacctggtgttgagaccatgcttgtgttttctgatcatgtccggagctttgtgaaccctgtttggacatcgtcaggcagaccagtagctcagagaggttcgctgactgtgaatggtttgaatacaccatcgcagatggaaaaacaatctgatagtaaacaagttcaggaactcatgcagagttttccaccggctattgttgtggatcaccatccttgtgaaaacttttcattgtctcctccaccagttgatagaaaacgcactggaccacgaccttgtccagtttgttatttgccagttgagcaagcactggcactgagaccagctaaaccatcattgtcaccagtccttcaaagcttaaattatgttcttgaagagattttgattcccaaagagtccaagagcggttctttgtttggaggttttccatccctggaggaacgagataagtcttatgacataaaagactcgatgactgtacattgtggatttgtaagagggaaggtacctggtcttaatactgggtttgacatagatgaagctgatcattctgagatgcagctgtgccagagtacagttgttgcctctgctatttttggtaattatgacgtaatgcaacaaccagaaaatatcagcaaattttcaaaagatacagtttgcttctttatgtttctggatgaagaaacagaagctgcaataaagaacactactattggtcatactaaaaagattgggctgtggcgggtagttgttgtccgcaacctaccatttacagatgctagacgcaatggaaaggtacctatgcggttggcgattttgatttttctcatccaaacctgtgttattcgcaatctaccatgttgttctgtgtttttctccatgaactgaataaggaatactggactcatgttatccttgttatcccattctgaaactttgcttgacttgacatttgttaatgcaaatcagaaccaacaagttaattgggtctggttttaccatctatggcccctgtgatcttttcctcctacaggttccaaagctattacttcatcggctttttcccaatgcgcgatattcaatttggattgatgggaaacttaagctagtgagggatccttatcaggtattagaaaggttcttgtggaggaagaatgttagctttgcaatttccaggcattacagacgcttcgatgttttcgaggaagctgaggccaacaaggctggtggaaaatatgataacacatcaattgactaccagatagagttctacaaaagagagggtctaacccattattcatcagccaaacttcctataacgagtgacgtcccggagggctgtgtgataattagggaacatatccccataacaaacttgtttacatgcctttggttcaatgaagttgaccgcttcacgtccagagatcagctaagcttcagcacagttagggataaaataaggtggcgagttaattggactgcagacatgttcctggattgtgaaaggcgtgattttgttgttcagtcgtaccaccgagaactgttggaacagaggcagtctgccttacgaagatggcctccccagcggtctcccgtcgcgcgcttccaacctagaaagatgcttccagacaatgcagcaagggaaccatggaaggcttctgcaaccaagaagttatcacggaagcgagcacgggataagaaatcaagctcgagacgaactcattgaactagtgggaaggaagcaattcaactgtaaatgctggcgattttgctcctacacaactgcatatctaacggacagcattccaacattgttttactacttttaacttcctttcatgctcctagctcccctccccaagggcgccaaaattttgtcagggattgttgatagagagctgaaattctttgttgtaaataaacatttttagatcagagatgtattcaactagcagctgattcaattcaatccattttggaggtagtctttggcagggtttcaaataca

SEQ ID NO: 147043 - DNA, 269 bp, Zea Mays
atggagatttttgagtatgttcggcaaatggatccgtatccaaatattttaatcgcttattggatattatttactgtgcttgtggctgtgacatcggcttagagaagcttttcaaagttgaaattgttgaagaactatttaaggtcaacgatgtatcaagatcggctcaacggattggctactttatgcattgagaaaaaatattagacgaggttgatagcaacattattatcaatgacttcgcatcaagaaacgttagaagaattttt

SEQ ID NO: 147044 - DNA, 1828 bp, Zea Mays
gcggacggttgtgggctgtggctttatttactccttaagaatcgttcatctctgctgaccccccctccctcgtcgtcctccacgccgctctgcaacgctacggatgcctcacaattaaaccctactctttctctctctttatttccggctgcctctctacgcacgaaggaagaaaaaataagcggaggggagggagaagaggacgagaacaaaagacaaattctcagcggtgaatggaggtttcgcccgagtgcgcggacggcgggagggtcaagacggaggtggacctcttccttgtcgacgaactcctcgacctgccgtacgacgaggaggaggatgcgcgggaggcggtggtgggcgatggggaagcagcaggggacggtggtaagcaggcttcggtgctgcaccgggcttgtggcgacggcggggaggagggtgccgccggcaacgcgtcgaacgactcgtcagcggtgactgcgctggacagctgcagcaataattccctctccgtttccgggctcgccgacggggacttctccggcgggctgtgcgagccgtacgaccagctcgttgagctggaatggctgtccaactatatgggcgaggacaacctccccgcggaggacttgaagaagctgcggcttatcaacggcattccgccggccgccaccgccacggctcccgcggccgccgcgcaggcacagccgccagccgacggcgcgctgccaccggaggcgccagtgccaggcaaggcgcgcagcaagcggccgcgcgtcgcgccatgcagctgggccacccgcctgctggtgctcccgccgaccccggcgtcgccgccgtccgcggccatctcgccgtccgagtccggcaccgcggcgccggtggcgttcccggccaagaagccgtcgaagcccgcgaagaagaaggaggcgccgacgacgccggtgcccgacaacagcgccggcgcgggggagtcgaggcggtgcctgcactgcgagaccgacaagacgccccagtggaggacggggccgctgggccccaagactctgtgcaacgcgtgcggcgtgcggtacaagtcgggacgcctggtgccggagtaccgcccggcggcgagcccgacgttcgtggtgtccaagcactccaactcccaccgcaaggtgctggagctgcgccgccagaaggaggcgcacctccacccgcacccccaccagtaccagtaccagccgcagccgcagccgcagccgcaggcgtttgtccacggcggcggcggggccttggtgcacgcgccgacgccgctgttgttcgacgggccggcggcgccgctcatcggcgacgaccacttcttgattcacagccacatagtagggccggacttccggcagctcatctagggacgtcgtgtcgtcgtctggtctttttttttgctcgctctagagtttgatacatgaatagcccagcaataatcaagcaaaaccaaaaaaccgatcttttttaggtgtttttcctctccatttgtttctgtctctttacattttcatcggacagtcttttctcgaatctttatttttgtttctctctcgattatttctcatctttgttttccccttagactcttctcggattttgagtttctgacagcttagacaataactctagggagttttttttttggtagcctccttttcccctctcgttacgctagtagcactttttgatttgtagctcgtagtaccttttgatttgtataatgcagagctcctagaggaagagtaaacaagcagtttttaagttcagacttcaaagcaagcgtgagagctttttttttgtttgc

SEQ ID NO: 147045 - DNA, 531 bp, Zea Mays
atgccttggcgtctagctagcagacagacggacgccgccgcccccacgcggtggggctcgtcggagggcggtgacccggcggcggacggcggcggcggcggcggcgtggaggcgcggagcgtgcggtgcgagtgctgcgggatggcggaggagtgcacgcccacgtacatcgggcgcgtgcgggagcggttccaggggaagtgggtgtgcgggctgtgcgccgaggccgtcaaggagcggcaggcgcgggagcccgcgctcggcgtgggcggcgccgtggcggcgcacgcggccatgtgcgagcgcttcaactccaccgtccgcctcaaccccaagctgtccctcgccagctccatgcgcgacatagcgcgcaagagcagcatgcgccggacgagccggaggaacagcatcaacggcggcggcggcggcggcggcggcggcggcggcggcggcgccaccgccacgccgctgtccgcatgcggctgcgacaagctcagccgctccagcagctgcgcgctcccctacgtctga

SEQ ID NO: 147046 - DNA, 1305 bp, Zea Mays
tgcttgttgagcagagaattaactttttaaaatggcaacaaagaaggtggcggatgtggcgcacgagcgccgtataacaatttgaaacggccaccgttaatgtcgcctcctgctgcctttaaatacctttccctcccacctcctctccagtcattcgttccatcccttcaccacacacacaccgtcgattcctgggcgacaaggccacacacgatcgccggcagtttccgaaacgagaaaaaggaagaaacaggaggcgagagatcgagatcgatgagcagcggtcagtcgtcgccaacggaggcaagcggtggaccgccatgcccctccaagaagctgtggcgcggggtgcaagccgtctacctcgtcctcgtcaagaagcaccagccgaagctcgcggcgctcggcgtccacatgcaccgcctcctctccagcagcaagcgccgccgccgcctcgccgcgcgggggcgggagcagaacccggcgctgacgtacatgtcgtgccggtccatggaccccgctgccgcggtggtgcacccgtatccgcacggccacggccgcgcgtcgtcgaggctcgcggccccgtcgtccctgtcgtgccggtccttggaccccgccgccgccgtgcgcagcaagtaccagtaccgtccccgcgaggtggagttcagctgcaagagcacgccgatgcacacgcgccggcgccgcctgcgcctgcatcagagccgcggccacccgtcggagccggagccggagccggagcggcacgtctcggccgcggcggtgacgaggctgttcgcgctcatggacgacgtcgaggtcgaggaggcggcggacggcgatctggggctgggcctggacgccccggcgccgcgtcaggtgcggatcacggactcgccgtacctggcgagggaggaggacaataacgaggaattgaggagcgcggtggacaggcgcgccggcgagttcatcatgtggttccacgagcagctgcggacgcagcagcagcacgggcagctgggtcagataaggtaggggcgcagaagagaagcagtgccattgccgcctctagtctagtcttatggttttgttgtgattgtgattattagtcatgtatgcatggattacgtgtattagataagggtacattccttggaggagatgcgaacattttcatacggcagtagtactttttttttcctttcatgtatatgaattgcagtgcttgattttttttatttattttttgctaccttcaagatcgacttgaacaataatgaacacaacactcgttgcattggacttgtt

SEQ ID NO: 147047 - DNA, 695 bp, Zea Mays
aaaataggaaaaaggaaacggcccatcatgttgagaagggcagaaggccctggcgggctttgttccactccaccttggccgctgttctcctcaccgcgcgtgcgctctctctctctctctctcggcgccgactcggctaccgccgccgccctacggaagcttcccaggtcttcgtcaggcttttctccggcaacgagcaccctgcacagatcgtgaacctgcacacctcaacgatagatggcggggttcagaagccttgcacccaagaccaggaacctggtggtggccgggggactgtctgccttcgtgctcggggtctactactacaccatgagagcggtgggaggcacggacgagctccaggtggcgatcgacaagtttgaggagacgaagaagcaggatgccgctagaaactctagctccagcgcaggaggatcataattcataaacacgcggacacgccctggatctgctgcaggctgacatggtagtggtacgacgacagtcacgtcgctcagtaggccatgaccatgcgttctgcttgtactgtggaataaataaatgatgggttatggtactctttatctggtagagcttggcagcttgtgctttgagggatgtaatagtggccccgatgtttgtattttcctggcgagccggaaattttgtggagtatttgcttgtgtgactccctt

SEQ ID NO: 147048 - DNA, 690 bp, Zea Mays
aaaataggaaaaaggaaacggcccatcatgttgagaagggcagaaggccctggcgggctttgttccactccaccttggccgctgttctcctcaccgcgcgtgcgctctctctctctctctctcggcgccgactcggctaccgccgccgccctacggaagcttcccaggtcttcgtcaggcttttctccggcaacgagcaccctgatcgtgaacctgcacacctcaacgatagatggcggggttcagaagccttgcacccaagaccaggaacctggtggtggccgggggactgtctgccttcgtgctcggggtctactactacaccatgagagcggtgggaggcacggacgagctccaggtggcgatcgacaagtttgaggagacgaagaagcaggatgccgctagaaactctagctccagcgcaggaggatcataattcataaacacgcggacacgccctggatctgctgcaggctgacatggtagtggtacgacgacagtcacgtcgctcagtaggccatgaccatgcgttctgcttgtactgtggaataaataaatgatgggttatggtactctttatctggtagagcttggcagcttgtgctttgagggatgtaatagtggccccgatgtttgtattttcctggcgagccggaaattttgtggagtatttgcttgtgtgactccctt

SEQ ID NO: 147049 - DNA, 1357 bp, Zea Mays
ccccggccgcttgctagttctcgcaggccagcggtgaccgcggccacagggcacctccaccgcgcgacgacgacaaccatggccgtgccatcgcggctcctcctctgctccgccgtcgtcgccgtggcgctgctcgtcgcgccgggagaggtggccggcgccgcgggacacgggcacacgcacacgaggcgcctgcggcccaagaagagcgcggcggcggccgccgcgaagctgtacccggcgaacgcgacgcgggcggaggcgatcgagcggcagttcacgcggtgggtgcgcttcgtgggcggccgcctcggccacggcacctacaactacaaccggccggcgctcacgctcctgcccgcgcgcacgctcgtcgtcgacaggaggccgggcgccggggacttcacgtccatccaggccgccgtcgactcgctcccgctcatcaacctcgcccgcgtcgtcatcagggtcaacgccggcacgtacacggagaaggtgaacatctcgccgatgcgcgcgttcgtcaccgtggagggcgccggcgcagacaagacggtggtgcagtggggcgacacggcggacacggccgggtcctggggcaggcccatgggcacgttcggctccgccacgttcgccgtcaactccatgttcttcgtcgccaagaacatcaccttcaagcagaacacggcccctgtgccgcggcccggcgctctgggcaagcagggggtggcgctgcggatatcggcggacaacgcggcgttcgtggggtgcaacttcctgggcgcgcaggacacgctgtacgaccacctcggccgccactactaccgcgactgctacatcgagggctccgtcgacttcatcttcggcaacgcgctctccctctacgaggggtgccatgtgcacgcgatcgcgcggaactacggcgcgctgacggcgcagaaccggcagagcctgctggaggacacggggttctcgttcgtcaagtgccgggtgacggggtccggcgcgctgtacctgggccgcgcctggggaaccttctcccgcgtcgtcttcgcctacacctacatggacaacatcatcatcccgcgcggctggacggtgttctacgggcagtacaagtgcacggggccgggcgcgaactacgccggcagggtgcagtggtcgcgggagctcaccgacgaggaggccaagcccttcatctcgctcgacttcatcgacggcttccagtggctccggttgtagcacgccacattgttgacacacacacacacacacaccatgcatgaccttaattagttgatgtgaatgaagagcaaacaaaaacacaaggcaaatacaaatccaattgttggcgcaa

SEQ ID NO: 147050 - DNA, 1388 bp, Zea Mays
ccccggccgcttgctagttctcgcaggccagcggtgaccgcggccacagggcacctccaccgcgcgacgacgacaaccatggccgtgccatcgcggctcctcctctgctccgccgtcgtcgccgtggcgctgctcgtcgcgccgggagaggtggccggcgccgcgggacacgggcacacgcacacgaggcgcctgcggcccaagaagagcgcggcggcggccgccgcgaagctgtacccggcgaacgcgacgcgggcggaggcgatcgagcggcagttcacgcggtgggtgcgcttcgtgggcggccgcctcggccacggcacctacaactacaaccggccggcgctcacgctcctgcccgcgcgcacgctcgtcgtcgacaggaggccgggcgccggggacttcacgtccatccaggccgccgtcgactcgctcccgctcatcaacctcgcccgcgtcgtcatcagggtcaacgccggcacgtacacgtacggagaaggtgaacatctcgccgatgcgcgcgttcgtcaccgtggagggcgccggcgcagacaagacggtggtgcagtggggcgacacggcggacacggccgggtcctggggcaggcccatgggcacgttcggctccgccacgttcgccgtcaactccatgttcttcgtcgccaagaacatcaccttcaagaacacggcccctgtgccgcggcccggcgctctgggcaagcagggggtggcgctgcggatatcggcggacaacgcggcgttcgtggggtgcaacttcctgggcgcgcaggacacgctgtacgaccacctcggccgccactactaccgcgactgctacatcgagggctccgtcgacttcatcttcggcaacgcgctctccctctacgaggggtgccatgtgcacgcgatcgcgcggaactacggcgcgctgacggcgcagaaccggcagagcctgctggaggacacggggttctcgttcgtcaagtgccgggtgacggggtccggcgcgctgtacctgggccgcgcctggggaaccttctcccgcgtcgtcttcgcctacacctacatggacaacatcatcatcccgcgcggctggtacaactggggcgacccgacgcgggagatgacggtgttctacgggcagtacaagtgcacggggccgggcgcgaactacgccggcagggtgcagtggtcgcgggagctcaccgacgaggaggccaagcccttcatctcgctcgacttcatcgacggcttccagtggctccggttgtagcacgccacattgttgacacacacacacacacacaccatgcatgaccttaattagttgatgtgaatgaagagcaaacaaaaacacaaggcaaatacaaatccaattgttggcgcaa

SEQ ID NO: 147051 - DNA, 751 bp, Zea Mays
ggcgtcgtcggcggtcttccgccgcccctgcgcacgcgcggaccgtccggccctagggcgcggaccgtccggccgtcaggcaaggaactcgggctcctgcaccaggtcgcggaccgtccggccctgtgccgcggaccgtccgcgcctgaccagaaagcaccgccgcctcgcaccaggccgcggaccgtccggccccggcgcgcggaccgtccgcccctgtgcagagagcaccgccgctgttcatcaacatttatcatgcacaagtacatctgatcgtgaacctgcacacctcaacgatagatggcggggttcagaagccttgcacccaagaccaggaacctggtggtggccgggggactgtctgccttcgtgctcggggtctactactacaccatgagagcggtgggaggcacggacgagctccaggtggcgatcgacaagtttgaggagacgaagaagcaggatgccgctagaaactctagctccagcgcaggaggatcataattcataaacacgcggacacgccctggatctgctgcaggctgacatggtagtggtacgacgacagtcacgtcgctcagtaggccatgaccatgcgttctgcttgtactgtggaataaataaatgatgggttatggtactctttatctggtagagcttggcagcttgtgctttgagggatgtaatagtggccccgatgtttgtattttcctggcgagccggaaattttgtggagtatttgcttgtgtga

SEQ ID NO: 147052 - DNA, 408 bp, Zea Mays
atgagcgcctgcagcctgcgcagcgtcatggcggtccgcttcctcgccaggtacccacgcaccagagcctgcagcttcaccagcgacctgagagcgcggagcgccttccgagccaagtatcctctgaaggccttctggatgacgacggcggcggcggccacgcgctcctggccgcagctgcacgggcgcacctgcgacagctccccggcggcgacggagggccgccgggcgccgccgtcagccacgctgttcctcggcttggcgaagctccaccgcctcttctccgcgggcggcaaggcggcgcacgcggcgttttgcgccttgcgatccctgtccccttggtgcttgctgccggcgagcaccttcttgagccacctcatcgcgcggcccatggcgtggttttcgtag

SEQ ID NO: 147053 - DNA, 2056 bp, Zea Mays
aaaacgccggtgccagtggctgcctcccgtctccctcttctcctacgcgcacggggagggaagaattggttcgttggcgttggccttggcctcggatccagagcgcggaacgcgtgcggcgttcggatcgacccgctcgaaggccggggggcgcgaggtaggggccaggatcggcggcgatggtgaaggccgtggtggtgggcgcggcggtcgtggcgtgtgcggcggtcggggtggcggtggtgctggagcgccgccggcgtaagcgagacgccgacctcctggggtccgcggaggcggagaggaggaggcgcgcggccgccgtgatcgaggaggtcgagagcagcctcgccacgcccacggcgctgctgcggagcatcgcggacgccatggtcgccgagatggagcgcggcctgcgcggggacatccacgcgcagctcaagatgctcattagctacgtcgacagcctccccaccggagatgaacatgggctgttttatgcactggatcttggagggaccaacttccgtgtgctgcgagtccagctaggaggaaaggagaaacgtgttgtcaaacaacagtatgaggaggtttccattccaccacatttgatggtcgggacttccatggaactatttgatttcattgctgctgcattggctaaatttgtcggtactgaaggtgaagatttccaactcccagagggtaggcagagagaacttggtttcactttttccttcccggtgaaccaaacatcaatatcatcaggaacactcatcaagtggacaaagggcttttccatcaatggcacggttggtgaagatgttgtttctgagttgagcagggccatggagaggcagggactagatatgaaagctacggcattagtcaatgatacagtgggcacattggctggtgggagatatatggataccgatgtagttgcagctgtaatattgggcactggtacaaatgcagcatatgtggagcatgcaaatgcaattcctaaatggactgggttactgcctaaatctggaaagatggtaattaatacagagtgggggagcttcaaatccaacaaacttcctctttcagaatatgacaaagccatggactttgaaagtttgaaccctggagagcagatatacgagaaaatgatttctggtatgtatctcggagagattgttcgaagaattttactgaagttggcacatgaagcttctctatttggggatgttgttccacctaagctggagctgccatttatattgaggacgccagatatgtcagccatgcatcatgactcctcacatgacctcaaaactcttggagctaaactgaaggacatagtcggggtcgcggacacttccctggaagtaaggtacatcactcgtcacatctgtgaccttgtcgcagagcgtgcagcacgcctggccgccgcaggcgtgtacagcatcctgaagaagataggccgggacaaagtaccaagcggtggcggtaaaatgccgaggaccgtagttgccttggacggtgggctctacgaacactacaagaagttcagcagttgcgtagaagcgactctcacagacttgctcggcgaggaggcttcttcctccgtggtcgccaagctggccaacgacggctctggcattggagctgcgcttctcgcagcctcacactcccagtatcagtatggcgcgagtgactagtagtcctgaaatgggcgcggatcgagattttgagtgtagctctcatttatcttttcttttttcccttttcaaaacatctttttggggatttttttcggcttccttttgttggctattccgtggatgcacttacggctctgcattgggatgtagctagtatagagccaatgagtttggaggttatctaatggcacaaggcaggagcatggaaatggaagcagagcaatgacattcatgctctgcccattcttttttccccttgtatggtgttgtaaaccaataaaaaaatgttaacccttttttttgtgtgtgttggcaataaagagaatacgataatttgaccatgt

SEQ ID NO: 147054 - DNA, 2136 bp, Zea Mays
ctccctcttctcctacgcgcacggggagggaagaattggttcgttggcgttggccttggcctcggatccagagcgcggaacgcgtgcggcgttcggatcgacccgctcgaaggccggggggcgcgaggtaggggccaggatcggcggcgatggtgaaggccgtggtggtgggcgcggcggtcgtggcgtgtgcggcggtcggggtggcggtggtgctggagcgccgccggcgtaagcgagacgccgacctcctggggtccgcggaggcggagaggaggaggcgcgcggccgccgtgatcgaggaggtcgagagcagcctcgccacgcccacggcgctgctgcggagcatcgcggacgccatggtcgccgagatggagcgcggcctgcgcggggacatccacgcgcagctcaagatgctcattagctacgtcgacagcctccccaccggagatgaacatgggctgttttatgcactggatcttggagggaccaacttccgtgtgctgcgagtccagctaggaggaaaggagaaacgtgttgtcaaacaacagtatgaggaggtttccattccaccacatttgatggtcgggacttccatggaactatttgatttcattgctgctgcattggctaaatttgtcggtactgaaggtgaagatttccaactcccagagggtaggcagagagaacttggtttcactttttccttcccggtgaaccaaacatcaatatcatcaggaacactcatcaagtggacaaagggcttttccatcaatggcacggttggtgaagatgttgtttctgagttgagcagggccatggagaggcagggactagatatgaaagctacggcattagtcaatgatacagtgggcacattggctggtgggagatatatggataccgatgtagttgcagctgtaatattgggcactggtacaaatgcagcatatgtggagcatgcaaatgcaattcctaaatggactgggttactgcctaaatctggaaagatggttagtgcttgaattctttatactagggatcacatagttgtatgaaaccatcgtatggtcttacaccattagaaccgtgtaaccatgaaatattattcttggtgctctaggtaattaatacagagtgggggagcttcaaatccaacaaacttcctctttcagaatatgacaaagccatggactttgaaagtttgaaccctggagagcagatatacgagaaaatgatttctggtatgtatctcggagagattgttcgaagaattttactgaagttggcacatgaagcttctctatttggggatgttgttccacctaagctggagctgccatttatattgaggacgccagatatgtcagccatgcatcatgactcctcacatgacctcaaaactcttggagctaaactgaaggacatagtcggggtcgcggacacttccctggaagtaaggtacatcactcgtcacatctgtgaccttgtcgcagagcgtgcagcacgcctggccgccgcaggcgtgtacagcatcctgaagaagataggccgggacaaagtaccaagcggtggcggtaaaatgccgaggaccgtagttgccttggacggtgggctctacgaacactacaagaagttcagcagttgcgtagaagcgactctcacagacttgctcggcgaggaggcttcttcctccgtggtcgccaagctggccaacgacggctctggcattggagctgcgcttctcgcagcctcacactcccagtatcagtatggcgcgagtgactagtagtcctgaaatgggcgcggatcgagattttgagtgtagctctcatttatcttttcttttttcccttttcaaaacatctttttggggatttttttcggcttccttttgttggctattccgtggatgcacttacggctctgcattgggatgtagctagtatagagccaatgagtttggaggttatctaatggcacaaggcaggagcatggaaatggaagcagagcaatgacattcatgctctgcccattcttttttccccttgtatggtgttgtaaaccaataaaaaaatgttaacccttttttttgtgtgtgttggcaataaagagaatacgataatttgaccatgt

SEQ ID NO: 147055 - DNA, 249 bp, Zea Mays
atggcgtggaggagaagagccaaagcaaatacgccgggaggaaggcctttgctttgttgttactattattggaagtcgaaactcgaaaccatcgtcgtcgacatgcattccagctggtacgtagtagttacatgccctgttcaagcaggtagtcgcccagcctttccaccaccatgttgcactgcccaggcgtcatcggctcgtcgtagatgccaaccacgagtgcctgccctgtcttcttcacggtga

SEQ ID NO: 147056 - DNA, 739 bp, Zea Mays
gccgacgcgcagagggagcccaaggaagcgaagcggaagagaccgagagggagaagcgtttctcctgggttgttcgggtgagccgctagcgagagcgagacggagcgaggctttgccgctgcagagcagagcgacatgagctaccggcttggaggcgcggcggaccgcgaggagggggacgaggagctgttcgagacggcgccgtccgtctccggcggcgagggctcgtgcgaccaggagcgccgcgcgttcgtgccgccgctgcggaggatgaactcggacagcatctacgacatggcgtccatggtgtcgcagcagctcccagccaagtaagtgcgcgcgcgcctgcacccatggtctgtcttctcacgcctcacggtatttttgctcatgaatcggggacctggctggctggcttgcaggaaagggctatcgcggtactacgagggcaagtcgcagtcgttcgcgtgcatgtcggaggtgcgctgcctggaggacctgcgcaagaagggcagcccctacaagcacaggaccaacaagagctacggcgcgctgggactgggactgggagggatgatgtggccaagaagcccgcctccagctcctgcgccgacctcggcctcgccgccgccaacgggttcaggacggcccacggccccaattcagaacgggtaccaccagtgaggctgtagcctgtaggcagacgacgagagcactgcaactgttttttcgttctctc

SEQ ID NO: 147057 - DNA, 830 bp, Zea Mays
gccgacgcgcagagggagcccaaggaagcgaagcggaagagaccgagagggagaagcgtttctcctgggttgttcgggtgagccgctagcgagagcgagacggagcgaggctttgccgctgcagagcagagcgacatgagctaccggcttggaggcgcggcggaccgcgaggagggggacgaggagctgttcgagacggcgccgtccgtctccggcggcgagggctcgtgcgaccaggagcgccgcgcgttcgtgccgccgctgcggaggatgaactcggacagcatctacgacatggcgtccatggtgtcgcagcagctcccagccaagaaagggctatcgcggtactacgagggcaagtcgcagtcgttcgcgtgcatgtcggaggtgcgctgcctggaggacctgcgcaagaagggcagcccctacaagcacaggaccaacaagagctacggcgcgctgggactgggactgggagggatgatgtggccaagaagcccgcctccagctcctgcgccgacctcggcctcgccgccgccaacgggttcaggacggcccacggccccaattcagaacgggtaccaccagtgaggctgtagcctgtaggcagacgacgagagcactgcaactgttttttcgttctctcttttttttttttacttctctactcttgttctgcgggatttccttcacgggcttgacttgacttgactgtgagaattttacgaggtggtgtgaactgttgcttgctctgctatcggagtacctgtagagcactagagggactcactcacaacataattgaccgttctgcactgttgctgctcggc

SEQ ID NO: 147058 - DNA, 834 bp, Zea Mays
gccgacgcgcagagggagcccaaggaagcgaagcggaagagaccgagagggagaagcgtttctcctgggttgttcgggtgagccgctagcgagagcgagacggagcgaggctttgccgctgcagagcagagcgacatgagctaccggcttggaggcgcggcggaccgcgaggagggggacgaggagctgttcgagacggcgccgtccgtctccggcggcgagggctcgtgcgaccaggagcgccgcgcgttcgtgccgccgctgcggaggatgaactcggacagcatctacgacatggcgtccatggtgtcgcagcagctcccagccaagtaagaaagggctatcgcggtactacgagggcaagtcgcagtcgttcgcgtgcatgtcggaggtgcgctgcctggaggacctgcgcaagaagggcagcccctacaagcacaggaccaacaagagctacggcgcgctgggactgggactgggagggatgatgtggccaagaagcccgcctccagctcctgcgccgacctcggcctcgccgccgccaacgggttcaggacggcccacggccccaattcagaacgggtaccaccagtgaggctgtagcctgtaggcagacgacgagagcactgcaactgttttttcgttctctcttttttttttttacttctctactcttgttctgcgggatttccttcacgggcttgacttgacttgactgtgagaattttacgaggtggtgtgaactgttgcttgctctgctatcggagtacctgtagagcactagagggactcactcacaacataattgaccgttctgcactgttgctgctcggc

SEQ ID NO: 147059 - DNA, 1053 bp, Zea Mays
tctagccactccccactcctcacggctcacgagggtacggcacctcgccgtggcccgcggctgtttccgaggcaagcggactcaccggcgtcctgcgcacgcgaggcgagcagcggctccgtcgacctgcgagccaatccgtctttatttctccaccccaatatccaaacataagataaaaatctatccaacactcatttcccacgccactcccccactccctctccaccctgcttccgttttcggccggcgatggcgacgaccgccgccgcatccacgtcgctccggccgctgtcaccgtccccacctcgcatcgcgagtttgccccgtcggtggtgttggggaatcccggtgcagtcctccgggcggagcgcattccatgctgaacggcggaggcggagcactttattatgcgctgctgataaagctcctgaagaatccctcaagaagaccattgaagtggataggcttattgatatgctgagggacgcaaatcctagagaggtaaatgtgaatcttgatcaaatagtggttgaaaatgttctggcattcgacgcaggtttctgggttcgactggcagctagaattgatctctgcaaatcagatgatgataaaaaagattatgaagagctggcggaaaatgtcatgaacattgttgaccggcttgttcacaagactaatcaaaagattgaacaatcaactgatgtgctgaaggcaattattagtcctgcaatgcatgaaggagatgtgaagtggccaccaagagatccagatacactcaaattgatggagaaagaaataacacgccgagaacaagaaggacaacttgatgagggatttctgtcagaagttagtgctcagttgaggcaagctaaacaagacggagataagccagggcttcaggctatgctgcaaaaggtgttgcagttatatgcttctaaatctctccaaaaacgtagttatgcatacaaaggggggcaagttgtagttcctgaaaagtttctcgaatgtgtaatacagggtctgtatttccacgtagagattttcttcgtt

SEQ ID NO: 147060 - DNA, 1041 bp, Zea Mays
tctagccactccccactcctcacggctcacgagggtacggcacctcgccgtggcccgcggctgtttccgaggcaagcggactcaccggcgtcctgcgcacgcgaggcgagcagcggctccgtcgacctgcgagccaatccgtctttatttctccaccccaatatccaaacataagataaaaatctatccaacactcatttcccacgccactcccccactccctctccaccctgcttccgttttcggccggcgatggcgacgaccgccgccgcatccacgtcgctccggccgctgtcaccgtccccacctcgcatcgcgagtttgccccgtcggtggtgttggggaatcccggtgcagtcctccgggcggagcgcattccatgctgaacggcggaggcggagcactttattatgcgctgctgataaagctcctgaagaatccctcaagaagaccattgaagtggataggcttattgatatgctgagggacgcaaatcctagagagcttgatcaaatagtggttgaaaatgttctggcattcgacgcaggtttctgggttcgactggcagctagaattgatctctgcaaatcagatgatgataaaaaagattatgaagagctggcggaaaatgtcatgaacattgttgaccggcttgttcacaagactaatcaaaagattgaacaatcaactgatgtgctgaaggcaattattagtcctgcaatgcatgaaggagatgtgaagtggccaccaagagatccagatacactcaaattgatggagaaagaaataacacgccgagaacaagaaggacaacttgatgagggatttctgtcagaagttagtgctcagttgaggcaagctaaacaagacggagataagccagggcttcaggctatgctgcaaaaggtgttgcagttatatgcttctaaatctctccaaaaacgtagttatgcatacaaaggggggcaagttgtagttcctgaaaagtttctcgaatgtgtaatacagggtctgtatttccacgtagagattttcttcgtt

SEQ ID NO: 147061 - DNA, 1077 bp, Zea Mays
tctagccactccccactcctcacggctcacgagggtacggcacctcgccgtggcccgcggctgtttccgaggcaagcggactcaccggcgtcctgcgcacgcgaggcgagcagcggctccgtcgacctgcgagccaatccgtctttatttctccaccccaatatccaaacataagataaaaatctatccaacactcatttcccacgccactcccccactccctctccaccctgcttccgttttcggccggcgatggcgacgaccgccgccgcatccacgtcgctccggccgctgtcaccgtccccacctcgcatcgcgagtttgccccgtcggtggtgttggggaatcccggtgcagtcctccgggcggagcgcattccatgctgaacggcggaggcggagcactttattatgcgctgctgataaagctcctgaagaatccctcaagaagaccattgaagtggataggcttattgatatgctgagggacgcaaatcctagagagcttgatcaaatagtggttgaaaatgttctggcattcgacgcaggtttctgggttcgactggcagctagaattgatctctgcaaatcagatgatgataaagcatgatttcacatataaagattatgaagagctggcggaaaatgtcatgaacattgttgaccggcttgttcacaagactaatcaaaagattgaacaatcaactgatgtgctgaaggcaattattagtcctgcaatgcatgaaggagatgtgaagtggccaccaagagatccagatacactcaaattgatggagaaagaaataacacgccgagaacaagaaggacaacttgatgagggatttctgtcagaagttagtgctcagttgaggcaattatctttatatgtgtttaggctaaacaagacggagataagccagggcttcaggctatgctgcaaaaggtgttgcagttatatgcttctaaatctctccaaaaacgtagttatgcatacaaaggggggcaagttgtagttcctgaaaagtttctcgaatgtgtaatacagggtctgtatttccacgtagagattttcttcgtt

SEQ ID NO: 147062 - DNA, 889 bp, Zea Mays
gaagcagacgttggttctactggtgtacagaccgcgtgtgcgtgtggcctgcggcctgcctctcttgtccgccggccctcttccatggcggccgccggggcgtcgaggagcgcggaggagggcaagagcgaccaaacgaggcccctcgcgctgccttccccaacagtctacccggcgccgtcggccagcgacgccgccgccagggccaggtggcggtccacgcagtacctccgcaagcgccggtgcgcgctctgctgcggcggctgctgcgtgagcgccatcgtggtcgtcggcgtcatcatcctggcgctggcgctcaccgtgttcagggtcaagcagccgcgcctggccgtcaacaacgtctggctcacggccatcagcgccgggcccgggacggggccgggggccgccgcccccgtggccgccaacgccacgctcaccgccgacgtctccgtggacaaccccaacgccgcggcgttcaggttctcgcggaccgagacggacgtctactacgagggccggacggtgagcgtggcgtacgcgcccgccggccgcgtcggcgcgcgcgggagcgtccggatgaacgtcacggtcgacctcctcgccgaccgcctcgcgcgcgccgtcaacggcaccggcctcgtgttcggccaggagtaccaactccacacctacacggcgatcaacggcacggtcaatgtgctggggatcgtcaagaagcacatccagatcaggctcaactgctccaccgtcatccaggttgggggagcggctgccgcgctggagtacggggctgcgtccacagtgcagagcaagggcgtcgattgtttagcagatgtcaccctgtgagttgtgactgtgagtgagtaggttcaagagtggcgagcag

SEQ ID NO: 147063 - DNA, 1488 bp, Zea Mays
ctcaccggcccagccgcaaaagcgcccggtggcccgccccatttccttcgccgagaggccgcgacgtggcgagcaacatgcagcacgggcctccacgcctctccacgtagtcgccccgcgccaaaccacctccccacgacgccacgccagcctccgatagctcggcaaccaacagagccctcaataccgcccatgccggttgccggatacgataccgccccagcccaacccctataaaaccccgcgccaccaaccctacggttgttatatctcctcaaggcacgttcaccacagtcctctctttccccggcaccaccaccacccaggctaaccggactggaccgagtgttgaacaacactgagggcgaggcagatagagcgacggcaggcatggtgagccgtgaaaatttgcacctggtgctggacccggcgtctctgggcgcgccgtgggccgacccgtccgccgcagagatcccgccgcagctcctcgccgcgctgggagagtacctctcctccacccgcgccgagggcggcgacgtcgcgacggaggcggacgacgagttcatgatgcacgagttcaaggtgcggcggtgcgcgcgcgcgcggagccacgactggacggcgtgcccctacgcgcacccgggggaggccgcgcggcggcgggacccgcgccgcgtggcctacgcgggggagccgtgcccggacttccggcgccgcccgggcgcgggcgccgcgtgcccgcgcggggccgcctgcccgctcgcgcacggcaccttcgagctgtggctccacccgtcccgctaccgcacgcgcccctgccgcgcgggcgctgcctgccgccgccgcgtctgcttcttcgcgcacgccgcggccgagctccgcgccggcgccggcgccggcgccggcgccgccaaggacggctgctcgccgctcgcgctgtcgctctcgcccaagtcgacgctggcgccgccctgggagtcgccgccggtgtcgccggtggagggccggaggtgggtcgacgagccggcggacgccgaggtggaggagctgttgctcgcgatgcgggagctcggattcaggaaggccaaggcgtcgtcgtcggcgccggtcctgcctgcggctgcggtcacggaggacgacgggccggacttgggatgggtgtcggagctggtgatgtaggcgtccaagatgtggtggatgccgatctgcgatctccttcgctcgctgctgccggcgtcgtcaacggaacagcttcgttaagcaatattgatcgtaccattttctttcatgaatttgcatcattcttcttgtggatataaaccaaacctggtgcaactattaatactgcaatctgtaagcgtggcgtgctgctgtacatggttctcgttcgttcgatcattactaccagtgtatatacaaagtgtagttgccttcgctgtcagtacactgctgccttctggaatcggtgttcagctaatctgcaattaa

SEQ ID NO: 147064 - DNA, 156 bp, Zea Mays
ctgagagaggagctggagctgtttgaggatggggctgagcgcctccatgagcttctcgcacgggtggttgtgcacgccctcgtacgtggtcaccactatgctcgtgtccttggccagccgctgcacctgcttcttcacgtcgcacgtatggtgcgt

SEQ ID NO: 147065 - DNA, 1162 bp, Zea Mays
ctaatagttgctcatacttaggaattagttgattttgaatctatttcagcaaccctacatccgataagattgcatgatgacgttatcgacatggtagcagcaatcgtacagcatactaacagcgtcgtgaatcaaccgaacatgaactgaagcaaggtgtaattaataggattacaatgcatacatcacgtgcaccatttcaactacgataagcaaggtgcagccatatgagacgaaaaggtgctagcataggcgagcagggcaaggacggatgcgagccggcgccgtgaacctcttggccaggattttgaagcggcgaaagtatctggctgagaatgtaacatacgacgtcaataaagattagtgtatcgaaatcagttaacggaaagtatataatatcggagtggcattgataaggtcgtcagataggagcgaaagactaattactcaatgtaatcagaaccacgagggttgatcatctgaactatgcaactcatcacccgacctcatccaaaatgccaccagaccacaacgcagactcggcgaaaataaacacggacaaaataacaagatccaaattaacagaggcctcagaaggaaggcagtaatgggttttgtaatcagacgtgagacgtcatacagaaatagcatccacatatttcatctttggcctcaaaggaatggaaatctcaagacacataaaagtttataatacgtgatcgacctcatagagaagattaggcttatccacatacaaggattcggacatatgcttgtctttttttgaaaatttaatcataggccaggaaatataataataaatcaaacatcaaaatctaaagggaatgaaaaagttgatagaaactgacgaccgttgggagcggactcggaatatgggtggtgatatatcaggatggtcggcaaaggcaatcaaatgcctgttacgacgaacgagaccaatagatacaatcttcatcgtcctcagccagatgcgcagctcaaatccccatcagaaccaaaaccgcgaccaaaaaagaaagatacaaagaacaaagacaccgccgatccaaattcaaatgctggaaacaaaagctgtggagaactggcgaggggcaagggtagttgagagcggcggcggcggcggcgtgagagcctgagaggt

SEQ ID NO: 147066 - DNA, 652 bp, Zea Mays
gatagatggaaattcgatgaaccaccatcgttatatatcttcatgaacagcagcatgcatcaccttgcttctatagagaagtatgtggaaaagtttgccacatttgttccagtcctctattcaatcttgatctagatacattgcgttttggtcgggggctcatggggtttcccccaaaaggtttgcactaccggtttctttcttagttcatcccagtattttgtatcagacgatgtgactacttcaagacaatcccagttgatccatacatcgtgaattacactggagttgtattctgccaatattcaggccctatcatgctgaagcaagttgatggttcatatgcatgtttcgcagatagtgaatcttggatcactttgggacaggcgaaagaactatcgagagttattggtttacaagaagagggaagctcccttgaatttctaagaggacacaagatttgtctcatcctagctaaacagttggttgcaacttcaaagtgtctgctcataaattacatttcactatagcacatgatggagacatcacgagttacaataatcgagtttctgtgctgcagaatgctacatggtgggaataggacgttgatcaggagacttcgcctgcctagaaaacttgaggtgttgcacct

SEQ ID NO: 147067 - DNA, 1341 bp, Zea Mays
atggagggttccaattccagctcgcagccgccgccgttcctcatcaagacctacgagatggtggaggacccggcgaccaaccacgtcgtgtcgtggggccccggcggcgcaagcttcgtggtgtggaacccgccggacttctcacgggacctgctgcccaagtacttcaagcacaacaacttctccagcttcatcaggcagctcaacacatacggtttccgaaagatcgatcccgagagatgggagttcgccaacgacgacttcgttagggggcacacgcacctcctgaagaacatccaccggcgcaagccggtgcacagccactcgccgcagacccaggtgaacggcccactggcggagtcggagaggcgcgagctcgaggacgagatcagcaggctcaagtacgagaagagcctgctcctgacggacctccagaggcagagccagcagcggtgcgggatcagctggcagatgcagtcgctggaacgcaggctggcgcagatggaggagcgccagaggaacatcgtggcctccctgcgcgacatcctgctgccggtcggacacggggtcgtttcgtgggggtcggcgacgggggcggaccacttcagcaagaagaggagggttccgaagatggacttcttcgtcgacgaacccaaggtcgaagaacagcaggtgccgttcctgcagacggtgggcgcggagacgccaggcatgtctccgatccgccttctgagcgccgagccgtttgagaagatggagctggccctggtgtcgctggagagtttcttgcagagggcaacagcgcatacgtctgctgctcaaggcatgttgtacgccgctggtgttgctgaacccagccctgctctggctctaggcgagatgctctcggcaccaatggataccgagatcgatctgcagccatcagcttgccagaaccccttcgcttcgacctcagggcaagaccagtcgtcttctccgttggcagaacccccgagctactacgcccagagcccgatgctgccgatggcacagctccatgaacatgcccataggacagctgctggagtcgatatgaactctgacaccacaaccggcgacacctcgcaagatgataccaccagtgaaactggaggttcccatgtgccggccaaagtgaacgatgtattctgggagcggtttctcacagacgccgccgagggtaaaagcgaggcaatagaagcaaaagaggatgtgaagactgccgtagaccgctgctgtcctcgtctccaggacaatgttgatcagatcactgagcagatggggcagcttgattcagcttcttatgcacccgagaattactga

SEQ ID NO: 147068 - DNA, 5001 bp, Zea Mays
atggagggttccaattccagctcgcagccgccgccgttcctcatcaagacctacgagatggtggaggacccggcgaccaaccacgtcgtgtcgtggggccccggcggcgcaagcttcgtggtgtggaacccgccggacttctcacgggacctgctgcccaagtacttcaagcacaacaacttctccagcttcatcaggcagctcaacacatacggtttccgaaagatcgatcccgagagatgggagttcgccaacgacgacttcgttagggggcacacgcacctcctgaagaacatccaccggcgcaagccggtgcacagccactcgccgcagacccaggtgaacggcccactggcggagtcggagaggcgcgagctcgaggacgagatcagcaggctcaagtacgagaagagcctgctcctgacggacctccagaggcagagccagcagcggtgcgggatcagctggcagatgcagtcgctggaacgcaggctggcgcagatggaggagcgccagaggaacatcgtggcctccctgcgcgacatcctgctgccggtcggacacggggtcgtttcgtgggggtcggcgacgggggcggaccacttcagcaagaagaggagggttccgaagatggacttcttcgtcgacgaacccaaggtcgaagaacagcaggtgccgttcctgcagacggtgggcgcggagacgccaggcatgtctccgatccgccttctgagcgccgagccgtttgagaagatggagctggccctggtgtcgctggagagtttcttgcagagggcaacagcgcatacgtctgctgctcaaggcatgttgtacgccgctggtgttgctgaacccagccctgctctggctctaggcgagatgctctcggcaccaatggataccgagatcgatctgcagccatcagcttgccagaaccccttcgcttcgacctcagggcaagaccagtcgtcttctccgttggcagaacccccgagctactacgcccagagcccgatgctgccgatggcacagctccatgaacatgcccataggacagctgctggagtcgatatgaactctgacaccacaaccggcgacacctcgcaagatgataccaccagtgaaactggaggttcccatgtgccggccaaagtgaacgatgtattctgggagcggtttctcacagacgccgccgagggtaaaagcgaggcaatagaagcaaaagaggatgtgaagactgccgtagaccgctgctgtcctcgtctccaggacaatgttgatcagatcactgagcagatggggcagcttgattcagcttcttatgcacccgagaattactgataccacaccatcggtgttgccgctgtacattatagtttaggctagctaagtcttttctagcatttcctactgtaaaaagtaaaatcatatgctgacccatgtacattacgtatgtcctcgtgctgttgagctagagcacagattcagttatttgctgccctaatctcttccgttgttgtgcttgcacgtgtgccctttctcataaatcctctggagatgcatcttacaatacctaaaatagtaattttatctgatgaagtgatgattgtgcacttgctgtgacatctaattactgtctctcctgttatgtcagagttgacactggtacatcaacgggtaaactttcttttcagttttcaatggaacattttcagccttaggtaccatgctagcacgatcaccttagggcatcgggatcaaatgggattggagtgattaaatctctcactagtcaaaattgaatataaggggatttaatccccctcaagctttgtttgaataatctagtatttacatctatgcacatggattgaggtgtaagttagtttaatttacattttaatctatcccaatccatatgtactgagataaatactagagtatccaaacaaagcctcagggctaatttggtgatacgggaaatagagaggatgcatgggagagatatccacttgctattcaatttcaaataggaaggagatttctccccattaatcccctccatttccctggtcatcaaaccagctctcaatctcctttgatccaaacacaaccaaacaaggcaaagaaaaaaacatgtccaaggactaaagaaaggccgaacaaaactcgcataatctaattgaggaagaaggcctggggctcgcatgtggcctcttgtttaggaccttaggtgacaatcatctcggcaaccaggacatacctgtacggtccacatgctccagaaaatataatctaccggaggattatatatggccattatgtacagcacgaatgtaatttgaaagtccatggggtgcatcaaggattgtgcttgggaagccaatcatgtcatcaggctcaaagaactctcagctgcgttagaaaggcggaacacaagtccagaaagaggagttgtggtccactgaccctttgcaggtcaagaaggtacttctcatccctcgttttgtaaagctgcaatcagtggaagtgtattagaattgggtacattttccaagtagactttatgctaacaaaaagggagcgtctaatctataggtatgaacggaagtacaaattatggagtatgctaattttaatcacaaatatacttggtcctaagggattgtgaacattgaaacaattcagaaataatctggcatgcaaatgtaatcctaacaaaattatgtttgttgcataaacatagcacataaagaagtcaaggacatatgttaaagagttatgcatagtgtggttcatagcctgcacagcaagtcttctcaaaactgagagcacctagaggggggggtgaataggtgatcctgaataacttcaaaacttaagccacaaaaacttgttaagtgttagcacaattatggccaagtggctagagaggagtcaaaacacaataaccacaagaaatcaatcacagagatgacacggtggttatcccgtggttcggccaagtacaaaacttgcctacttccacgttgtggcgtcccaacggacgagagttgcactcaactcctctcaagtgatccaatgatcaacttgaataccacggtgttcttgcttttcttttctcaatcccgcttgcgaggaatctccacaatttggagcctctcgcccttacaaaagatgttcacagagaatcacggagcaggggagggaatgagcgacgcacacaagacttcaaaagatcagagcaacacgcacacaagcagcaataagagctcgcaacacaactcaaagagtacacaactccacaagagctctatatgctatcacaatgaatcgaatgcgctagatcaatgtcttggtgcttagaaaggttgtaggaatgcttggttgtactcctccatgcgccaaggggtcccttttatagccccaaggcacctaggagccgttgagagcacatctggaaggctattcttgccttctgtcgtcgggcgcaccggacagtccggtgcacaccggacagtgtccggtgcccgattcctttccttaattggcgaagccgaccgttgccgaccgttgcagatctggcgcaccggccagtccggtgcacaccggacagtccggtgcttccctccgaccgttggctcggccacgtgtcgcgcgccgatcacgcggccgactgttggcccggccgaccgttggctcaccggacagtccggtgcacaccggacagtccggtgaattttagccgaagtcgccggagaaaaacccgagagcggcctcttcggccaaggcggcttggcgcaccggacactgtccggtgcaccatcggacactgtccggtgcaccaccggacagtccggtgccctagaccgaagcagccccttggctgcacacagccaagtcttctcttctcttcttctttctgtttctaacacttagacaaatatattagtacacaaaaccaatgtactaagacttagaaacatacctttgttgaagatttgcagtttgttcatccatgggcattgatttacatttaagcacttgtgttggcacttaatcaccaaaatacttagaaatggcccaaaggcacatttccctttcaatctccccctttttggtgatttatgccaacaccacataaagcaactagaacaagtgcaaaatcacttcaaataaaaactcaaattggttttgattcaattttggcatatatggatcatcctttgccaccacttggtttgtttttgcaaatcaaactcaaatctctatctctaagtcaaacacacatgttgaagcataaagagagtcattccaaaagagattgatcaaggatttcaaaaactccccctatttcccataatcaacacttctccccacaagaagccaacttttgacaatagagacaataagagacaataaaagcttttgacaaaacaaaaactctattctactattttcaaaatctctcaagtggtagctgatccatttatcactttggcctttattttctccccctttggcatcaagcaccaaaacgggattaatcttggcctcttaaccccattgcctcaccaaagtcttcaattaagagcaaatggcaataagatttcatgagatgaacttggaattagttagcctctcatcggagtgcagtggaagtctttcatggtccaagtccaccttttccctttcaatcctccttcgagactcaatcaagcaaactcaagcaaatggttagtctcaaagggtcaagttgtaacacatctccccctaaacatgtgcatcactttgcaacggatttgtgaggtccagggagtgttggtacaacttgagcaccataataagcaacaaaatgcaaaaaggaacatgatcaaaagcataagtacatgtatgctacaattcaatccaggttccgcgaatctatgacatttagctcactacgcaacctgcaaaaggtcttctcatctagaggcttggtaaagatatcggctagctggt

SEQ ID NO: 147069 - DNA, 1303 bp, Zea Mays
cctccgatcccaccctcccagcccagcgcgtcaagtaccccgcctcggttcgctccccgtgtgatctggttcccacccgcggccatcgcatcgccgccgccgccgccgccgccgcagaacctcgcgctcccggcgcgggatctcgcgggccccggccccacggtccggcgatcgggatgacagcggcgcgccggcgatgaccggctcggcggcctcgctgggcctgcggtccgggagctacggctccctcgcggccgccgccgtcgtcggcagcggcgggaggaaggccggcgccaccgcctgccgcacgctgcgcgtggagaaggagcgcctgcaccgcgcgctgcggctggtcggacgccgcaggaccggcgtcctgctgctgctcgccgtcgcgtccgccgctctcttctgctccctcttcgccgtcgtcaaagatgacgccaattcaactagtattgtaaataattacgaagtcccaaatgccatacagaagtcagtgtatcccagcagaacacgacctctaatgatgtctggaaaccaagagtccaccagtgttgtcaacaaaattgattttccaaatcggcttcatctttcatttgcaaacttcacacatccttgtgaaggtttctcagttcctcctcccctggttgataagaaacgcactggaccccggccatgccctgtttgctatgtttccgtggaccaggcatttgccttgatgcccctacaagcttcaccatcacctgtcctaaaggacttaaactatgtatcagaagatggtgttactgcaaatttatcaaatcagggatctggatttggagggcatccatccctggatcagagaaacgattctttcaacattaatgagtcaatgactgtccactgcggctttgtcagaggaaagaagcctggccaaggtactggattcgatatcaaggatgacgatctgctagagatggagcaatgccacgatctagtcgtagcttctgctatttttggaaattatgatatgattcagcatccgaggaacatcagtgatttttcaaaggcaaatgcatgcttttatatgtttgtagatgaagaaacagaggcttatgtcaagaattctagttctctgtacaacaataataaagttggactgtggaggctggtggttgtccgaaacctcccttatgaagacccaaggcgtacgggaaaggtgcttatcttataaattgtgataatcaacaaattttccttgtgatttgtgtttctattatcagcatccatttcaagaatcaacaaaaagttaatggttttc

SEQ ID NO: 147070 - DNA, 3196 bp, Zea Mays
actccgtttaccctgcaaccccatcctcctcggcttcccatgtcgtgctcggcggcggcgggcgccgaggccaccgctctcctgttccgcagcgccgctccgtccacgatcgtcgggcgtcaccgcctcgctatgtctcgccggacttcgcgccgaaacctcaggactggtgtgcaccctcatcagaagagtgcacctagtgctaaccatcgtaacagggctagcattcagagagatagagcatcagcttccattgatgaagaacagaaacagatgtctgaagatgaaaatggcctactagacattcaactggaagatctggtaggaatgatacagaatacccagaagaatatattgcttctgaatcaagctcgtcttcaagcattggaacgtgctgacaaaattcttaaagagaaagaaactttgcaacagaagataaacattttagagatgaaactgtcagaaacaggtaaacaatctgtgctttctagtgaagtaaagtctgatgaagagagtctggagtttgatgtcgtaaaggaagagaatatgctactgaaggatgagatgaattttctaaaaggaaagcttattgagataactgagacagaggagagtctattcaagttggagaaagagtgtgctcttctaaatgcttcccttagggagctcgagtgtacatccacttctgcccaatctgatgtgttgaaacttggccctctgcaacaagatgcctggtgggagaaagtagaaaatttggaagacttgcttgattccacagcaaaccaagtggagcatgcttctttgacgctagatggttaccgtgatttccaggataaggttgacaaactaaaagcatcattgggaacaacaaacgtatcagagttctgtctttatttggttgatattttgcagcaaagggtaaaatcagtagaagagcgctttcaagcatgtaatcatgaaatgcattcacaaattgaactttatgaacactcaatagtggagtttcatggtactctcagcaaactaataaatgaaagtgagaaaaagtcaatggagcattatgcagaaggcatgccatcagagttctggagtaggatctctcttctgattgatgggtggtcgcttgagaagaaaatatccattaatgatgcaagtatgttgagagaaatggcttggaaaagggataatcgcctccgggaagcttacttgtcatccagaggaatggaagagagggaactgatagatagttttctaaagatggcactaccaggaacaagttctggtttgcacattgtccacatagcagcagagatggctcctgtcgcaaaggttggtggtctggcagatgtgatctctggtcttgggaaggcacttcaaaaaaaggggcaccttgtagagattattcttcccaaatatgattgcatgcagcataaccaaataaataatcttaaggttctagatgttgtggtgaagtcttactttgaaggaaatatgtttgccaacaagatatggactggaactgttgaaggtcttccggtctactttattgaaccgcaacatccaggtaagttcttctggagggcacaatactacggagagcatgatgacttcaaacgtttttcgtactttagccgtgttgcactggaattgctttaccaatctgggaagaaagttgacataattcactgccatgactggcagactgcatttgttgcacctctttactgggatgtatatgcaaacctgggcttcaactcagctagaatttgttttacctgtcacaattttgaatatcaaggaatcgctccagctcaggacttagcatattgtggtcttgatgttgatcacctggatagaccagacagaatgcgggataattcacatggcagaataaatgttgttaagggtgcagttgtatattccaacattgtgacaactgtatcaccaacatatgcacaagaggttcgctcagagggtgggcgtgggctccaagatacactcaaagtgcactccaagaaatttgttggaatacttaatggcattgacacagatacttggaatccgtctacggataggtttctcaaggttcaatacagtgctaatgatctatatggaaagtcagcaaacaaagcagctcttaggaagcagttgaagcttgcttccacacaagcttctcaaccattagttggttgcattacgaggctagttcctcaaaagggtgtacatctcatcaggcatgcaatatataaaataactgagttgggtggtcaatttgttctgctgggttcaagtccagtacagcatatccagagagagttcgagggtattgcggaccaatttcagaacaacaacaatgtcaggctgcttttgaagtatgatgatgctctggcacatatgatctttgcagcatcagacatgttcattgttccttctatgtttgaaccatgtggcctcactcagatggtagctatgcgatatggttctgtgccagttgttcggagaaccggcggtttgaatgacagtgtcttcgatttggacgatgaaacgatacccatggaggtgcgaaatggcttcacctttttgaaggctgatgagcaggattttggtaatgcactggaaagagctttcaactactaccacagaaaacctgaagtttggaaacagttggtgcagaaagacatgaagatagatttcagctgggatacttcagtttctcaatacgaagaaatctatcagaaaacagccactcgagccagggcagcggcataaacagcagagacattgagacagttccctgctgtctccatgaagtctcctagatgctgtgcttaaccgtatggtaaagaaatatggtctgtatcagctcagaattaagcatctgccgaggaagcgcggtgcatccggactcgggtgtacaaggggcgacgtggcgttacgtgcagtccccaacgaagcaaagagacagaagtacagctgtacagaacggatatcttgtgaagcacacattgggatcaggacgtttggtgctgcagctactttcggtgcagaagcacatatatacgagacctgccagggcgagcaaatacccagttatacacgcgattgctcagctctatcaagctgtgaattgaaagatttctatagtgtattcacgcgacgttttcataaactagtgtgagttatgtactctgaccag

SEQ ID NO: 147071 - DNA, 332 bp, Zea Mays
gcttattaggcatggatcaaaaatgaagtcagcaagataatgttcttggacttctttttcctttttcgacttgctctctactaattcttgtggttcatagcgtttattattttcatgacccgcaacagttcttgagatttttattgttattgatctgaagtatgttatttgccatcagccttattttatttcacttcgcatcaattgagttttcatttcaaattttatacactaaccgaggatattatatttgaaatttttccaaagcataaataattcaggtattgatatccatcttaaaaacatccaatagtctctagcagatttgctac

SEQ ID NO: 147072 - DNA, 1034 bp, Zea Mays
caatcgccacggcccgctccgccgcgcagcgatgcggagcagaagcaatggaggtgctcagctccagccgcttcgctagggcactcttactcccgacaattctctacccggtctccaggcacctcagcacgcccccgtgccgccgccacgccgtccataccctagcctcaggctcagcccccgttcccgccgccgatgccgccgcgccttcgccgtcgctcgcccggctcctcgccgccgcgttgcggggcggccgcgcgggtcgggagctccccgacctcgcggccgcgaccacgggcggcgccgggatagggacgctgctcatgagcaccacggcggcagcggtgaccaaggcgcgggagagcccgtacctgctggcgctggcggccaacccgaccttcgtgtcggggctgctggcgtgggccgcggctcaggccgccaaggcccttctcacctccgtcgtcgagcggcgctgggacctgcggatgctcttcagctccggcgggatgccgtcctcgcacaccgcgctctgcaccgcgctcactgcttccgtcgcgctctgccatggtgtcagcgacgcgctcttccctgtttgtctcggtttcactctgatagttatgtacgatgccacgggcgtcaggcgccacgccggaatgcaggccgaggtactcaataagatcgttgaggacctgtttgaaggccatccgattagtgaaagaaaactcaaggagctgttaggacatactccgtcacaggtctttgctggagcaattttgggcatcttggtggcctggtattgctgccaaggttgcattgttcccgtttgatgttgttattactgtatgaatgacccagaaacgaaactattccatcacgtggattttgcatgtagcgtaaccagtgaccgggaaagtatttggtcttgactgtttgatttccctgtatatatgtaacctgatagtacggaacaatcaagatatccgtcctttcgaatgtcaatgccaagttgaggctcgatttatttgtgatccaaa

SEQ ID NO: 147073 - DNA, 837 bp, Zea Mays
atggaggtgctcagctccagccgcttcgctagggcactcttactcccgacaattctctacccggtctccaggcacctcagcacgcccccgtgccgccgccacgccgtccataccctagcctcaggctcagcccccgttcccgccgccgatgccgccgcgccttcgccgtcgctcgcccggctcctcgccgccgcgttgcggggcggccgcgcgggtcgggagctccccgacctcgcggccgcgaccacgggcggcgccgggatagggacgctgctcatgagcaccacggcggcagcggtgaccaaggcgcgggagagcccgtacctgctggcgctggcggccaacccgaccttcgtgtcggggctgctggcgtgggccgcggctcaggccgccaaggcccttctcacctccgtcgtcgagcggcgctgggacctgcggatgctcttcagctccggcgggatgccgtcctcgcacaccgcgctctgcaccgcgctcactgcttccgtcgcgctctgccatggtgtcagcgacgcgctcttccctgtttgtctcggtttcactctgatagttatgtacgatgccacgggcgtcaggcgccacgccggaatgcaggccgaggtgagagcagctcatggttcgcttgcctttttttttcccttccttgcaatgttttggtggcattatgcaattcgtttgggaaatcttgctttcgttgagctagttttgcagtctgaggaaaaccgttttgatactctgcagcaaagtgtaattctcataccactaaaatcagaaggcaacggctacgtttgtcatctatcactatatttagtctgctga

SEQ ID NO: 147074 - DNA, 1083 bp, Zea Mays
acgcaaatggtaaaacgcttgggaaacacaattcagccctggcctttttccagttgagttcacctcttggctcttgcctcctgcatctctagagaggcacatcccagctccaagcttcgcgccttgttggatcgtggcgtccaagcaacggtggtagcggagcgcgaggcagtggccgcagaaggaagcgcgaagcatccatggaccaacgccaggtggttagcgagaattatgccaatcccataacatgcttcttccatgtgctattcaaggcgggggcgctagccttctacatcctattctcgctctttgtgaagagcttcgtcatcatcttcgtgatcacggtgctcctcgcagcgcttgacttctgggtggtgaagaacgtcagtggcaggatactagtcgggctgcggtggtggaatgagatcgatgatgacggaaacagtgtgtggaagtttgaatgccttgatggggagtctctcgctcggatgaacaagaaggattcatggctgttctggtggactctttacttgactgctgctgcatggatcgttcttggtatattttcactcatcaggcttgaggctgattaccttcttgttgttggagtttgcttgagtctaagcattgcaaacattgttggattcaccaagtgcaacaaagatgccaagaagaacatccagactttcgctcaaaatgcactcgcttcccgtgtcacatcatcgctgcaatcagcattcggtgtcatctgaagtcccacgcggaggccctggtattagtatattactcacagcggtgtacaatttgtcaaaaggatgagcttgcattctacgtttactgcctttcctctgattgcaaggatgtaattctaccagcgtagacagcaagcatattgtactgtcccgttatcattcttttttacctcatacaacaaataggtcgattttgatgtcattaccagaatcctttggtttatctcttgggtgatttatccatgaagcatacacttgtctcatgcactgaggagtctgcatcaagcgctgtttttactttttttttctggccatggaaattaaaagtacg

SEQ ID NO: 147075 - DNA, 695 bp, Zea Mays
gggaacatgcttctcttgtcagtgcacgctgaacattcgtcgccccattgtcatacagaacttgtttggctttgtctcaacttaccgagatggcttgtctgacctcgccgacgatctctgtgatcttcttgtcccactgatcggacggtgtgtgcgccacaccaaccatgtcgttgtggccgatgtccatcatgtacagagcgctctcaaacccctccttgctcaccgggccttccagtcctgatgaaagcacgtctttcaggctcagaactgagtactgtgtagattcgatggcacagatgtccaacaaacctcgttcgaacatctcaagggatctgtgcctgaagtagacgaactggtcgacctggacgttcaaggagtagggagagacgccgtgggtcaccgtcgagcctgccatggcgaagttgacgccgttgctgtagtccgaaccaattcccctgaggtatgggttcagttcacgcgtgcccagactctcacctgaatagcaagagtgagaaaccgttaatgaatttaatctctgtttttactggtgttcagacttcagatagctcttattagtcactgtatgcatgtagattgctcgtgtgttctttttaatttaccatgtgtttgaaccttctcacaaagaataaatttaggtcccgtttgtttcctttcattttgaggaattagaa

SEQ ID NO: 147076 - DNA, 576 bp, Zea Mays
gtgatcttcttgtcccactgatcggacggtgtgtgcgccacaccaaccatgtcgttgtggccgatgtccatcatgtacagagcgctctcaaacccctccttgctcaccgggccttccagtcctgatgaaagcacgtctttcaggctcagaactgagtactgtgtagattcgatggcacagatgtccaacaaacctcgttcgaacatctcaagggatctgtgcctgaagtagacgaactggtcgacctggacgttcaaggagtagggagagacgccgtgggtcaccgtcgagcctgccatggcgaagttgacgccgttgctgtagtccgaaccaattcccctgaggtatgggttcagttcacgcgtgcccagactctcacctgaatagcaagagtgagaaaccgttaatgaatttaatctctgtttttactggtgttcagacttcagatagctcttattagtcactgtatgcatgtagattgctcgtgtgttctttttaatttaccatgtgtttgaaccttctcacaaagaataaatttaggtcccgtttgtttcctttcattttgaggaattagaa

SEQ ID NO: 147077 - DNA, 1932 bp, Zea Mays
acccgtccgggtgtaccggtgtactatcatccctcggctccaggccgcatcgcgatcagtcatctctttccctcccagccttcctcctgcgtctcgctctcgccggaggtcaggcgcaccgccgccgggcgatggacgcctcctaccgccgcgccggcaccgggagcggctccgctccccgctccgtcgaggacatctacaaggactaccgctcccgccgctccgccatcctccgcgccctcacccacgacgttgaggagttctacgcgctgtgcgatccagagaaggagaacctgtgcctgtacggctacgcgaacgaagcgtgggaggtagcgctgccggcggaggaggtgcccacggagcttccggagccggcgctcgggatcaacttcgcgcgcgacgggatgaaccgtggcgactggctcgcgctcgtcgccgtacactctgactcgtggctcgtctccgtcgcattctactacgccgcgcggctcaaccgcagtgatcgtggatggatctgattatggggtttgcttaagtactctacttcaagctttttactaatctttctgcagaaatagctattgataaccatggccaaatatgtagcaaagccttttagtcctcatcttattgttttctactttgttttgttcttttttccagttattttttttctagtgcaacaagttaaaatgattcctattctattgtatttaagttgttctccatccacaaaagctttaattttttaacatatttttatttacatgattttttcgaatcagaatctatcttatcagccaaacggttccataaagtgattctgattcatcatcagaaacatttcttgagagaatctggatccataacatttctgttaaaatccggagctctagtaagccactataaacaacgttaatgtcggtcggttgcatcttgcaacttataagtttgactttgtttttttcatagaatgttcttacagtttacctttggctagtcagtcatactaattcaaaaggtattaagtagccttcacttgaaccacaatggaagtgaaacatttcttattccaccctgcaattgtttttggttctagtagcagtatccagtggtaatttaactgccactagaggagttgatattgcagtaaccattttgcgtaatgcgtctcctctctaattgagcaggaagcgtttgttcggcatgatgaatgatctgccaactgtttttgaagtcgtctccagtggtgtgaagcaatcaaaagagagggatagatccggtactgacaatggtggtagaaataaactgtcggtaaagcaaacaagcgagccacgattagaaaataacgccagggagcctgatgagggctacgatgaagatgacagcaaccacagcgaaaccttgtgcgggacatgtggtggaatatacagcgctgatgagttctggatcgggtgcgacgtgtgcgagaagtggtaccatggcaagtgcgtgaagatcacacctgcaaaggcggagagcataaagcagtacaagtgcccaagctgctgcaattcaaaaagacctaggccgatttaggcctatagcatcgccctcctcccgggaggacggccatggatggaagaagactggacaagcaggtcagagtttcctcttgcgcaaggtcaatgccgccttgcgatgtttactgtaccttttcgattaagcttacatatgacgaacgatgatgatgctaatgttagcagggaaagatcacacattaatttataatctttttgtggtttctccatgccgtggagagttatggtagtctgtatgttgccggagaaggaataggggcagaggaagcctttgtaatctttctataggtggaatgtgcagcttatgcgaagataataataatccgtgatgttcatgttaatatattttatt

SEQ ID NO: 147078 - DNA, 1251 bp, Zea Mays
acccgtccgggtgtaccggtgtactatcatccctcggctccaggccgcatcgcgatcagtcatctctttccctcccagccttcctcctgcgtctcgctctcgccggaggtcaggcgcaccgccgccgggcgatggacgcctcctaccgccgcgccggcaccgggagcggctccgctccccgctccgtcgaggacatctacaaggactaccgctcccgccgctccgccatcctccgcgccctcacccacgacgttgaggagttctacgcgctgtgcgatccagagaaggagaacctgtgcctgtacggctacgcgaacgaagcgtgggaggtagcgctgccggcggaggaggtgcccacggagcttccggagccggcgctcgggatcaacttcgcgcgcgacgggatgaaccgtggcgactggctcgcgctcgtcgccgtacactctgactcgtggctcgtctccgtcgcattctactacgccgcgcggctcaaccgcagtgatcggaagcgtttgttcggcatgatgaatgatctgccaactgtttttgaagtcgtctccagtggtgtgaagcaatcaaaagagagggatagatccggtactgacaatggtggtagaaataaactgtcggtaaagcaaacaagcgagccacgattagaaaataacgccagggagcctgatgagggctacgatgaagatgacagcaaccacagcgaaaccttgtgcgggacatgtggtggaatatacagcgctgatgagttctggatcgggtgcgacgtgtgcgagaagtggtaccatggcaagtgcgtgaagatcacacctgcaaaggcggagagcataaagcagtacaagtgcccaagctgctgcaattcaaaaagacctaggccgatttaggcctatagcatcgccctcctcccgggaggacggccatggatggaagaagactggacaagcaggtcagagtttcctcttgcgcaaggtcaatgccgccttgcgatgtttactgtaccttttcgattaagcttacatatgacgaacgatgatgatgctaatgttagcagggaaagatcacacattaatttataatctttttgtggtttctccatgccgtggagagttatggtagtctgtatgttgccggagaaggaataggggcagaggaagcctttgtaatctttctataggtggaatgtgcagcttatgcgaagataataataatccgtgatgttcatgttaatatattttatttact

SEQ ID NO: 147079 - DNA, 1349 bp, Zea Mays
acccgtccgggtgtaccggtgtactatcatccctcggctccaggccgcatcgcgatcagtcatctctttccctcccagccttcctcctgcgtctcgctctcgccggaggtcaggcgcaccgccgccgggcgatggacgcctcctaccgccgcgccggcaccgggagcggctccgctccccgctccgtcgaggacatctacaaggactaccgctcccgccgctccgccatcctccgcgccctcacccacgacgttgaggagttctacgcgctgtgcgatccaggtgagtctccttcccctcgcgatctctccgcaccgtggctttcgattcaatttgggtgcgaggtgatacggtctgtggttggggttgggtgtcggtagagaaggagaacctgtgcctgtacggctacgcgaacgaagcgtgggaggtagcgctgccggcggaggaggtgcccacggagcttccggagccggcgctcgggatcaacttcgcgcgcgacgggatgaaccgtggcgactggctcgcgctcgtcgccgtacactctgactcgtggctcgtctccgtcgcattctactacgccgcgcggctcaaccgcagtgatcggaagcgtttgttcggcatgatgaatgatctgccaactgtttttgaagtcgtctccagtggtgtgaagcaatcaaaagagagggatagatccggtactgacaatggtggtagaaataaactgtcggtaaagcaaacaagcgagccacgattagaaaataacgccagggagcctgatgagggctacgatgaagatgacagcaaccacagcgaaaccttgtgcgggacatgtggtggaatatacagcgctgatgagttctggatcgggtgcgacgtgtgcgagaagtggtaccatggcaagtgcgtgaagatcacacctgcaaaggcggagagcataaagcagtacaagtgcccaagctgctgcaattcaaaaagacctaggccgatttaggcctatagcatcgccctcctcccgggaggacggccatggatggaagaagactggacaagcaggtcagagtttcctcttgcgcaaggtcaatgccgccttgcgatgtttactgtaccttttcgattaagcttacatatgacgaacgatgatgatgctaatgttagcagggaaagatcacacattaatttataatctttttgtggtttctccatgccgtggagagttatggtagtctgtatgttgccggagaaggaataggggcagaggaagcctttgtaatctttctataggtggaatgtgcagcttatgcgaagataataataatccgtgatgttcatgttaatatattttatttact

SEQ ID NO: 147080 - DNA, 85 bp, Zea Mays
gttctttcatttcatagttcatactgtaccatcttacactagtacaatttggctctatacaagcggtaggatttttacatcacag

SEQ ID NO: 147081 - DNA, 1272 bp, Zea Mays
ccatcatctccatctcagcctcgtgccagcttgagcattccactttgctagccagcatacttacacgtagctagcttaatcaacagcaggagtaacagctagcgacgacgaccatatatatggcggcgaagcaggcggtcgtcgctgctgctgcctccggccaccccaagatgggggaggagaagctgatcatccggccggagaaggtgcggttcatagacgtgctgtcgatgctgctcctgaggcgccccatcaccagctacgcgttcgtggaggccggcgaccggaccgccgccgacctgggcagcacgcccggcgactggctcgtcgcgctcacgcaggtcatccagaaggcgctcgccggcgcctactacccggctctcgtggtcggcgctgtcgtcgagttcctcctcaacttcgtcgcgctcaacaatggcatactcggcatctttctcaacctcttcagatgtacgtcaccaccacacgcacgtgcggtttattatacgcacattcacatgggatgggactaacatatatatgccatgcatgcacgaattaatgtctgaatatgctgcgggtgcgggcttgctaatgatactaatacgtgcagcacctgatgaacaacgccaatgaacgaccaaaacttcttggacattttagggaaaaaaacttgaggtcgttattttgcaattaacataaaagttgatattgactcgcaagaggaatgatgttcaattcattaagcacgtgttgtagctaataacgccacactgcttactgatgttatgcatgacgtattaattataacgtgcaccgagagaaagaagaatgcatgcatagttactgaaactgaagcgtgtacgaacgtcacagtacgatggtcgtcgcaaggtaaagtgacaaagcagtacaatatgaccccagaacgtctctctctctctctctctctctctctctctctctctctctctctctctctccattatatcgtctttctatttctcatctttatgggacgtacgttcttcttatttcttgtgctacaatttgttttctttatgttttgtttgttttctcttcattattattgtatgtgtcctttgctaattgagctttctgttgtgttagtttaagcatttgttaactttctgtgttagtttaagcatttgtttgtgcctatctctttgttgtttcttattacacatgattctgttttcgaacagatcgttttctttttacaagccaattattaaggcccgtctctcttgttta

SEQ ID NO: 147082 - DNA, 2049 bp, Zea Mays
ccatcatctccatctcagcctcgtgccagcttgagcattccactttgctagccagcatacttacacgtagctagcttaatcaacagcaggagtaacagctagcgacgacgaccatatatatggcggcgaagcaggcggtcgtcgctgctgctgcctccggccaccccaagatgggggaggagaagctgatcatccggccggagaaggtgcggttcatagacgtgctgtcgatgctgctcctgaggcgccccatcaccagctacgcgttcgtggaggccggcgaccggaccgccgccgacctgggcagcacgcccggcgactggctcgtcgcgctcacgcaggtcatccagaaggcgctcgccggcgcctactacccggctctcgtggtcggcgctgtcgtcgagttcctcctcaacttcgtcgcgctcaacaatggcatactcggcatctttctcaacctcttcagatgtaagctggtgatcccactgaaccgggaggcgcccaacttccggtccatgatcgggatgatcgacgggaggacggagctgaagccgctgccagccagcggcggcccagaggaccggcggctgcaggtggtgggcgtctccgccgccgccggatccggcggcgatgactactacttggacgtggagagcggcagcgcggcggtgccgctggtgcagcagcagtacgtgaacgggcggctcgtccgcctccgcaccttctccgtgttcgaggtgagcatgatggccgccaagatcgcctacgagaacgccgcctacatcgagaacgtcgtcaacaacgtctggaagttccacttcgtagggttctacaactgctggaacaagttcgtgggcgaccacacgacgcaggcgttcgtgttcaccgacaaggcagaggacgcgagcgtggtggtggtgtcgttccggggcacggagcccttcaacatgcgggactggtccacggacgtgaacctgtcgtggctgggcatgggcgagctgggccacgtccacgtcggcttcctcaaggcgctgggcctgcaggaggaggacggcaaggacgccacgcgggcgttccccaaggccgcccccaacgccgtcccgggcaagccgctggcctactacgcgctgcgcgaggaggtccagaagcagctgcagaagcacccgaacgccaacgtcgtggtcaccggccacagcctcggcgccgcgctggcggccatcttcccggcgctgctggcgttccacggggagcggggcgtcctggaccgcctgctctccgtggtcacctacgggcagccgcgcgtgggcgacaaggtgttcgcgggctacgtgcgcgccaacgtgcccgtggagccgctccgggtggtgtaccgctacgacgtggtcccgcgcgtgcccttcgacgcgccgcccgtcgccgacttcgcgcacggcggcacctgcgtctacttcgacggctggtacaagggccgcgagatcgccaagggcggcgacgcgcccaacaagaactacttcgaccccaggtacctgctgtccatgtacggcaacgcgtggggggacctcttcaagggcgccttcctgtgggccaaggagggcaaggactaccgcgagggcgccgtctcgctgctctaccgcgccaccggcctgctcgtgcccggcatcgcgtcgcacagccccagggactacgtcaacgccgtccgcctcggcagcgtcgcctcggcgtagcttttggattgcatgttcgtttccatgcatgtgtatcattgcatgcaataattggatgaaataaacagcaataagcttcatcagtattattattgttgttgttgaatatatgcatcctctcctctctatatagaattatagatacatgaggcctggccggccgcgcacgttgctgaacagttgaagcgcttcccaaaaaaaaatgtatcaactgtgaagcatatatatccatgcatgcatgtgtgcccgaaatttttgtttttagccctttttgggacaaaaatttacaattagacccggaaaacttatatgcattttttgactc

SEQ ID NO: 147083 - DNA, 1974 bp, Zea Mays
ccatcatctccatctcagcctcgtgccagcttgagcattccactttgctagccagcatacttacacgtagctagcttaatcaacagcaggagtaacagctagcgacgacgaccatatatatggcggcgaagcaggcggtcgtcgctgctgctgcctccggccaccccaagatgggggaggagaagctgatcatccggccggagaaggtgcggttcatagacgtgctgtcgatgctgctcctgaggcgccccatcaccagctacgcgttcgtggaggccggcgaccggaccgccgccgacctgggcagcacgcccggcgactggctcgtcgcgctcacgcaggtcatccagaaggcgctcgccggcgcctactacccggctctcgtggtcggcgctgtcgtcgagttcctcctcaacttcgtcgcgctcaacaatggcatactcggcatctttctcaacctcttcagatgtaagctggtgatcccactgaaccgggaggcgcccaacttccggtccatgatcgggatgatcgacgggaggacggagctgaagccgctgccagccagcggcggcccagaggaccggcggctgcaggtggtgggcgtctccgccgccgccggatccggcggcgatgactactacttggacgtggagagcggcagcgcggcggtgccgctggtgcagcagcagtacgtgaacgggcggctcgtccgcctccgcaccttctccgtgttcgagttccacttcgtagggttctacaactgctggaacaagttcgtgggcgaccacacgacgcaggcgttcgtgttcaccgacaaggcagaggacgcgagcgtggtggtggtgtcgttccggggcacggagcccttcaacatgcgggactggtccacggacgtgaacctgtcgtggctgggcatgggcgagctgggccacgtccacgtcggcttcctcaaggcgctgggcctgcaggaggaggacggcaaggacgccacgcgggcgttccccaaggccgcccccaacgccgtcccgggcaagccgctggcctactacgcgctgcgcgaggaggtccagaagcagctgcagaagcacccgaacgccaacgtcgtggtcaccggccacagcctcggcgccgcgctggcggccatcttcccggcgctgctggcgttccacggggagcggggcgtcctggaccgcctgctctccgtggtcacctacgggcagccgcgcgtgggcgacaaggtgttcgcgggctacgtgcgcgccaacgtgcccgtggagccgctccgggtggtgtaccgctacgacgtggtcccgcgcgtgcccttcgacgcgccgcccgtcgccgacttcgcgcacggcggcacctgcgtctacttcgacggctggtacaagggccgcgagatcgccaagggcggcgacgcgcccaacaagaactacttcgaccccaggtacctgctgtccatgtacggcaacgcgtggggggacctcttcaagggcgccttcctgtgggccaaggagggcaaggactaccgcgagggcgccgtctcgctgctctaccgcgccaccggcctgctcgtgcccggcatcgcgtcgcacagccccagggactacgtcaacgccgtccgcctcggcagcgtcgcctcggcgtagcttttggattgcatgttcgtttccatgcatgtgtatcattgcatgcaataattggatgaaataaacagcaataagcttcatcagtattattattgttgttgttgaatatatgcatcctctcctctctatatagaattatagatacatgaggcctggccggccgcgcacgttgctgaacagttgaagcgcttcccaaaaaaaaatgtatcaactgtgaagcatatatatccatgcatgcatgtgtgcccgaaatttttgtttttagccctttttgggacaaaaatttacaattagacccggaaaacttatatgcattttttgactc

SEQ ID NO: 147084 - DNA, 1886 bp, Zea Mays
agaaaatacgcacctgctcctcactcttctttatattttttttctccatttggcaacttttgcttgtcgttcatgtatatgcatgaccctttcacacatatgatcagaagataagcacatgcaagacgatctcgcgtggatatgatgcatggatcagacctaacctctatatcatcaccaaacgctcgtagatgatactatacaattccatgattaaattatatataagtaaaaaaaaagaaccgtacgtgcatacataaaattaagaattaatggctgccaatggacgacatatgcatggacaggtaagctggtgatcccactgaaccgggaggcgcccaacttccggtccatgatcgggatgatcgacgggaggacggagctgaagccgctgccagccagcggcggcccagaggaccggcggctgcaggtggtgggcgtctccgccgccgccggatccggcggcgatgactactacttggacgtggagagcggcagcgcggcggtgccgctggtgcagcagcagtacgtgaacgggcggctcgtccgcctccgcaccttctccgtgttcgaggtgagcatgatggccgccaagatcgcctacgagaacgccgcctacatcgagaacgtcgtcaacaacgtctggaagttccacttcgtagggttctacaactgctggaacaagttcgtgggcgaccacacgacgcaggcgttcgtgttcaccgacaaggcagaggacgcgagcgtggtggtggtgtcgttccggggcacggagcccttcaacatgcgggactggtccacggacgtgaacctgtcgtggctgggcatgggcgagctgggccacgtccacgtcggcttcctcaaggcgctgggcctgcaggaggaggacggcaaggacgccacgcgggcgttccccaaggccgcccccaacgccgtcccgggcaagccgctggcctactacgcgctgcgcgaggaggtccagaagcagctgcagaagcacccgaacgccaacgtcgtggtcaccggccacagcctcggcgccgcgctggcggccatcttcccggcgctgctggcgttccacggggagcggggcgtcctggaccgcctgctctccgtggtcacctacgggcagccgcgcgtgggcgacaaggtgttcgcgggctacgtgcgcgccaacgtgcccgtggagccgctccgggtggtgtaccgctacgacgtggtcccgcgcgtgcccttcgacgcgccgcccgtcgccgacttcgcgcacggcggcacctgcgtctacttcgacggctggtacaagggccgcgagatcgccaagggcggcgacgcgcccaacaagaactacttcgaccccaggtacctgctgtccatgtacggcaacgcgtggggggacctcttcaagggcgccttcctgtgggccaaggagggcaaggactaccgcgagggcgccgtctcgctgctctaccgcgccaccggcctgctcgtgcccggcatcgcgtcgcacagccccagggactacgtcaacgccgtccgcctcggcagcgtcgcctcggcgtagcttttggattgcatgttcgtttccatgcatgtgtatcattgcatgcaataattggatgaaataaacagcaataagcttcatcagtattattattgttgttgttgaatatatgcatcctctcctctctatatagaattatagatacatgaggcctggccggccgcgcacgttgctgaacagttgaagcgcttcccaaaaaaaaatgtatcaactgtgaagcatatatatccatgcatgcatgtgtgcccgaaatttttgtttttagccctttttgggacaaaaatttacaattagacccggaaaacttatatgcattttttgactc

SEQ ID NO: 147085 - DNA, 644 bp, Zea Mays
caggttataagtttgttctgttgtggatggtgctaagtgccggtgggctcggccttcttatataagtatatcccatctttagcttctttattgaggattgtcacttaagctagcatgtatcttcatatttacaaatattttataacatttcaaatttgtaattcttttgaataattttctcttgtaatcactctgataattgaataatgtaaaattattgtaacatgtaatcattttgtaataaagaatttatttccgctgcaagtgtttgtatgtgagttgtgtttacttaatcctgcgatcttggcggtaagtcgtttatccggggtcctcggggcactcggacagatcctgctaagttgtttggtgcacatgcatagccgtcttaggtcgttgaaacaaggacaggtgcatgtgggcccgataacttgggaggttctgcgacatccgatgtctctccctaacatctatgttcgtgagtcttgctcagtaagcgctatctttgtcaggatatccctaccacgactccaaggaagacgaggactacgcgcgtgacggagagcgaggacgactgcaaagcctctcaacgtgctgccaggtccagtggagttcagattcaaatatgaatcatatgctaaccctgt

SEQ ID NO: 147086 - DNA, 1067 bp, Zea Mays
caggttataagtttgttctgttgtggatggtgctaagtgccggtgggctcggccttcttatataagtatatcccatctttagcttctttattgaggattgtcacttaagctagcatgtatcttcatatttacaaatattttataacatttcaaatttgtaattcttttgaataattttctcttgtaatcactctgataattgaataatgtaaaattattgtaacatgtaatcattttgtaataaagaatttatttccgctgcaagtgtttgtatgtgagttgtgtttacttaatcctgcgatcttggcggtaagtcgtttatccggggtcctcggggcactcggacagatcctgctaagttgtttggtgcacatgcatagccgtcttaggtcgttgaaacaaggacaggtgcatgtgggcccgataacttgggaggttctgcgacatccgatgtctctccctaacatctatgttcgtgagtcttgctcagtaagcgctatctttgtcaggatatccctaccacgactccaaggaagacgaggactacgcgcgtgacggagagcgaggacgactgcaaagcctctcaacgtgctgccaggtccagtggagttcagagtcaagttcagtcatctacctctgttaaactatctggatttcacaagagagttatagccaattcaagctacgcagagattcctgtactgctggacacataggatgcttggaaacctcggaccacaacaccgttcatttcaacccagatcatcacactacataccacttgaagactattcgacgttcgttgattcaaattccaaggcgtcgtttcatcgacagatttcttgagaacagacgggcacatttcgcaactgtgatatcggattgagacatgtgttctagcttgttatagtagatactttgttagttatgtattagatgaaacttaggaataatgatttgtgctctatttgtattagtcgtgtgtctggtcttaatggtgactgctttgtataaaactatgtgacatctctgtgagctaataaataagttcaccatcattagttttc

SEQ ID NO: 147087 - DNA, 712 bp, Zea Mays
tgcaatgcaacgtaagagggaaagagaaagagcacgatatgcaacaatgagtgatgaaaaaaaaacgaactaaagaagcgtcgtgagtcacgcacaaaagaaaaccttgagcaccataaacactcaaacgatgaatgtccagatatgtctataagcgacggaagcatcattgattgtactataccgtgtgataccactccaggaggatgtgatgatgcaagacaacgtaagagggaaagagaaagagtacgatatgctacgatgagtgctgaaaagaaaaatgaattgaagaagcgttgtgagtcacgaaaaaagggaaatgttatgcaccatgagtattcagaagtttgcaacatccctgcaaacaaggacaacaataatcatcaaaacaatgaaattgaggatgttgatgatgattcttatcagttgcataagaataactcatttgaggtgcatagaagacttggcagtgaaaaactttccacacatttgtcaggtgctagttgagatgatgttttatttagaagtagttagatttattatgtttcataatcattgttgatataaatatctactaaaaatctgttataatgactgttattgcaactatctactaaatcaatgtttacattgtgtagatgaatgtccacaggtgtttgtaagcgacagaagcatcaaaaatccgactatacattgtgataacactttaggt

SEQ ID NO: 147088 - DNA, 570 bp, Zea Mays
atgttcagtatgcaaatctcgtttataaggaggtccttacccccgcacgttctgaagatatggagggacatcacgactccagttcaaggagagctcccacaaccaccaaatgcatttggtgggcaaggtatggttccatctttattcacactccactgtctcaagctagaaaaaaaaattcaatcgtggcttcctgaaaaggtatcttctgtggagcaggttatgtaccgaccagcattccagcaatttatgaactattcgtcaccacatggtggtgatcctaatgcaaacatgaactcaactgcaacacgaatagcagctgatcttgatacacatcaagattttgagccaaagagcagaagttcagacatgcctttgcatgccgctattactcaggatatcaaggagaacccagtcttgatctacatgaagggttttcctgagtctccaatgtgtggcttcagtgcactggctgttaaggtctttcagcaatatggcgtccctacctgtggtagagacattcttggggatctcaagctcaaagagagtgttaaagcccacacacagtaa

SEQ ID NO: 147089 - DNA, 1895 bp, Zea Mays
ggggtttgggtgcttctctacggccgccgccagcaccgagttccggacctccgccgcctcgtctccgctccctcgcactcgcactcgcagctccggctgctattctgcagaagtcggtagattggttttcctcatgggtcgcaccatcaagaaggccaagaaggctcaatccaagaagtccaagaagaaaactgaatcgtcctcgtcgtccaaccctgcgattgcctctggtccggctaaggtctggcaaccgggtgtagatacactggaagatggggaggagctgcagtttgatcctcaggcttacaattatctccgaggttttggcattggctggtcttgcttgagttttgatgttgtgcgtgatcaacttggactcgtccgttcagagttccctcatacattctatggtgttgctggaacgcaggctgagaaagcttcatggaactatattggcgttttcaagctttctaacataagtggcaagaagcgggaacctataccagcttcagcagttgaagctgacactgatgtggatagtgacagcagcagcgatgaagaagatgaagagattaatgaggatacaaaacccatcctacatctaaaaaaggtggctcatgcggggtgtgtaaatcggatacgctcaatgactcaaaaaccacatataagtgctacgtggggagatactggtcatgttcaggtgtgggacttgagctcattccttaattctttagctgagtcagggacagctgcacccaaagaagacgacataatccacaaacacttacccctgaaagtatttagtggtcataaagatgagggatatgccattgattggagtccacttgttactggaagacttgtttctggcgactgcaataagtgcattcacctatgggagccgacttcaaacaactggaacgtagatgcaaacccatttgttggacactctgcaagtgttgaagatctacagtggagtcccacggaagccgacatatttgcctcatgttctgtggatggtacgatatcaatatgggatatacgtacagggaagaaaccttgtatttctgtcaaagctcatgaagccgatgtgaatgttatctcatggaacaagcttgctagctgcatgatagcttctgggtgcgatgatggcagtttctcagttcgtgatcttagatcaattgaggaggactcgttggtggcacattttgagtaccacaagaaagcaattacatctatcgagtggagtccacatgaagcatcatcattagctgtaacatctgaagatcatcaactaacaatctgggacctttcactggaaagagatgcggaggaggaggctgagttcagagcaaagatgaaggagcaggcaaacgcacctgaagatttgcccccacaacttctctttgctcatcagggccagagagacttgaaagaactgcactggcacccacagataccgtcgatgatcatatcaacggcaattgatggcttcaacgtgttgatgcctagcaacattgatacaaccattcctggcagcactgatgcagcaatgccatctgctgagccacagcactagccaacattgatacaagcattcctggcagccctgatgcaatgccatctgctgagccatagcactgatgtaggcgtttcttgtagcatggctcccagcttagaattccaggtctacgcagtggtgtatccgagtgcggttggcatttgtgttgagagtgctatgatgctatgtttgtgtttgagcatgatgggaaaggtttggttggctggcattccatgatatatgataagatttattaatatgtgcattctatgatatatgataagatttattaatatgttggcattctattaaaattcggcagccgctggtttgt

SEQ ID NO: 147090 - DNA, 4259 bp, Zea Mays
atggccaccaccaccgacgccgccccagtcgcgcccgtggaggaagggaacgccgccccggcggccgccgaggaggagccgcccaagaaagtcgaggcagccgtggccaccaccgacgccgccccagtcgctcccgcgtccgtggaggacgaaaatccggccctggcggcggcggccgaggaggagctaaccgagaaattcgagtcggcagcggcggcggcggcggaggaggaggtggatgatagggaggcgccgaagcaggtcgtggcggatgtgggagagagggaggaggaggaggaggaggtgagattggaggcgaagagtgagggcgttgcgggtccagaggccgagaacggaaaggcggagggtgttgtcgtcgggggacatgatggcagggatgtaaatgaggcggaagaggatcgtagagttgggaagttgggcgccgcgacggccgtgaaggatggcggcggcgaagaaccggcgtcggaggatggagaggcggccgcttctgtgtcagcgccagtgtcagaggtggagtccaagtcggagaacggtgaatcgggggagggggatccttctctggcttcccctgatgcgccggaaagtgatgagaagggcgaattgcaggaggaggagcagcatgatgaggaaagaggtgctgcagtagaggtaaatgttgtggataagatagcagaggatgtcgagtcgcctgtggctgaagaggagaaactggtaccggaagttgagaagggcgaggaggtaggttctgggagtgcagttggtggcgagttgagtgatgaggaggaggttgaggtctctccctctcctctgggcgaggaggtggcagaggtggcagaaccacaggataaggtagcccatgtttctgaagctaatggtgaattgggtgatgggaaagaagcgagtgatgatgtggttgctctgggaggtggagaagccactaacaaggatgctgttggtgatgatgtggtggctctgggaggtgaagaaaccttagaagaatcgacaaacaaggatgctgatggtgatgattctctgggaggtggagaagcttcagaagaatcggctaacaaggatgctgatggtgatgatgtggtggctcagggaggtgaagaagccctagaagaatcgaccaagaaggatgctgatgttgaagatgaggccatcaggcctgagccaccgagtgaggcaactgcagtggttatgaatgatggaagcatagaggagcttgcccctgcaagtgctgaggagatcatagacagtgtgcgtgaggatagtcctcagaaggagcagagcgctgaagaccaggccgttgccggtgaagtggtggaagatgttggtgttgacaagcccacagaggttgaaaatgttgatgctactagtgctgatggtatcctctctcgagaattggctccagaatcaatcaaagaaactaatggtactggtgagattgaaggtgccactgaggttgttgatcatgaagaggaggctgctgataatgacataattgaggctgtgccagatgatgcggatggggatggtaatgaggctgaggacgatgacgacgggacaaactctgacacgagtcctgcacgggttgcaattttagagagctctgaagccgcgaagcagatcatgaaggagcttgcagaaggctcctctagtggtggggatatcacagttacttcacaagatggttctagaatatttaccatggaccgacctgctggtcttggttcatcagccccttctctgaggccgactgcgcctcgccaatctgcccggtcaaacctattcagcccctcagagctagcagttacagctgaccctacagaagagatgacagaggaagagaagaagctgcatgacaaggttgagttgattagagtaaagtttctgcgtctggtttacagattgggagctactcctgaagaaacggttgcagcacaagtgctgtaccgtctgagccttgctgagggtatccgacatggcaggcagacgaaccgagcattcagccttgataatgcacggaggaaggccttacttcttgaagcagagggaaaagaggatctgaacttctcatgcaacatacttgttctaggaaaaactggagtcggcaaaagtgcaactatcaattctatatttggtgaagagaagtccagaactgacgcctttagctcagcaaccacaaatgtgcgggaaattgttggtgatgtggatggtgtcaagattagaatcattgatacacctggccttcgacctaacgtgatggaccagggatcaaacagaaagattcttgctgctgtcaagaactataccaagaaatgtccgccagatattgttctatatgtggatcgtctggatagtctgagccgtgatctcaatgatttgcctcttctgaagactattactgctgttcttggctcatccatatggttcaatgccattgttgcactgacacatgctgcctcagctcctcctgaaggcctcaatggtgctcccatgacatatgaggtcttgatggctcagagatcccacatcatccagcagtccatcaggcaggctgctggagatatgcggttgatgaacccagtagcacttgttgagaaccatccttcgtgcaggaaaaaccgggagggccagaaagtgcttccgaatggccaaagctggaggcatcagatgttacttttgtgctactcctcaaagatattatcagaagccaactcactcctgaagcttcaggatcctaatcctggaaagctttttggtttccgtttccgctccccgtctcttcctttcttgttgtcctcactcttgcagtctagagcccaccccaaactttctgctgagcagggtggcaatgaaggtgattctgatgttgaattggatgactattctgatgtagaacaagatgatgacgaagaagaatatgatcagcttccacccttcaagcccttgaccaaagctcagcttgcaaggctcacaaaggagcagaagaatgcttattttgacgagtatgactacagggtcaagcttctccagaagaaacaatggaaggatgagatccgcaggttgaaggagatgaagaagagggggaaaactgatctggatgattatgggtatgctaatatcgctggtgagaacgatcaggatcctcctccagagaatgtatcggttcccttgcctgacatggtgcttcccccttcatttgattgtgacaatcccacataccggtaccgctttttggagtcaacctcgactgtcctagcaaggcctgttttggatgcgcatggatgggatcatgactgtggttatgatggagtgagcgttgaagagacactggctatccttagcaggttcccggcaaatgtagcagttcaggtcaccaaggacaagaaggaattcagcatccatttggactcttccatcgcagcaaagcatggagagaatgcatcatcacttgctggttttgatatccagactgttgggcgccagcttgcctatattctccgcggcgaggcaaaaatcaagaacatcaagaagaacaagaccacaggaggcttctcggtaactttcctgggtgacattgtggcaactggactgaaggtcgaggaccagctctcccttgggaagaggctgtcgctagttgccagcactggcgcgatgcgagcccaaggggaaactgcatatggagctaacttggaggcacgcctgaaggacaaagactatccgattggccagtccctctcaacgctgggtctctctctgatgaagtggcgccgggaccttgctctgggcgcgaacttgcagtcccagttctccatcggaagggggtcgaagatggcagtgcgacttggtctgaacaacaagctgagcgggcagatcacggtcaggacaagcacctcggagcaggtccagatcgcacttctgggtctcgtaccggttgcagcctccatctacaggagcttccggcccagtgaaccgtccttcgcttattagcctgtcaggagtctcagtccaattacttcataaccatgtggtttctcttggcaattttcttcttcacatgaaccatgtttcttgctgtttcagtttactcccttgtaattggcagatcgtttcctaccataattttggctgaagagggttgtgcgatttatctggaactgtagctgaataaataatgtcgagaaatgtaccatccttgtgtttatcaatatctattgcagcgtctattctga

SEQ ID NO: 147091 - DNA, 2575 bp, Zea Mays
atggcgaggctgcaggtggaggagggggagggcggctacggacaaagcaaaccgagggagcacgacaggtggaggagggggagggcggctacggacaaagctgtggtcggcgacaagggagcgcggcgggtacccgtaatagaagaaatggaaaaaaccaagtatgaggtggcaagggatgagactgtaaagcatgttcagcaagtttttaattctttgggcattcatgtcttagcacagactgttagagatgttatttcaccaaaaaagaaagagggaagagggaaggctatagattctgacaatgattacgatccatgctctgacattgaaaaccaatctgacactaatgatgactatgatgatgacctcaataatgaggtcaatactgaggcgacacagatggttccaggaactcgccctcaccaaaagaagcaaaaggcaggaacaatgccggctgccaaccaccagccaccatgcacaccagtcagattgacaaggcaaagtgcagccatgcctttgcctggaggccgcccgccacctaagccaagacatcccttgcctcctaagaccacttcgaaagccacccctaaaagaaatgccatttccagtagtacccaacaacaggtccgggccagtacaaccactactgagaccactgaaactacaaacccagtgtcttttcctccaaaaatgaccaggtccactcaagcaatgtcttcaccagttccaaacacaatgcctagacctactagatacacaaggactagtggaaccatgtctacgcctggtggacacaccatgcatagtcctcctagattcactagggctagtgcagccatgtcttctcctggtgcaaaccctcaccatagtcctcctagattcactagggctagtgcagccatgtcttctcctagtgcaaaccctcaccatagtactcctgcagccactgctattgtatctcagcaacctactcccacaactagtgttaacaaaacagttcctacggacaactcaccaggtgggcacagctctaggcaaagcaatgccatcaatgagtcagctgagcaatttgatgctgctacttcagagggtaatccgaatgaaggagaaccagttggtgacttagttccagggcccaaaaagaatgtccgcaagaaaaccatgggttatggcttagagaagatgcttaataggggaaaccggttggctatccacgtggctgaagggaagaaaagaccggaggtcccacttcaagtagcgaagctggcatcagaaactggtgttgcccttagagacaacctacctatctacaaatcttggaagctttatgacaattccgtggggcaggcagaagtaggaaaagtgcttgacaaagtcacttcaaggttggatgtcgatgttaagaatgagggaccaagcaaagatgcatgcatatatatcataaagaggggagtgaggcagacgaggtataacctgaaaaggaagtacttcgacgagtcactgacaaaagaacagttgttggccatgcaacctccacctaaaatgaagaaagaggattggactgggctggtagagtattggtgtgacccaaagaatcaggaaaaatctgctaagaacaaagcaaatcgaggcaacgtgcagcttcaccaaaggactggagctaggtcctatatagcccatcgttacagcctgaggactaagtacaacaacatggagccggatgctgttgatttctttggggaatgtatgaatagtccccgaaatggtcgtactccgcttgcaaatgagatatatgagcaaatggttgcagagaaggaaagagagctagaagaaggagaagaacaaaagtcaccctccaagattgttgctgatagtctcagccagattagccgctcatccaacttccttccaaacattggtgtccctacaatgtccaagactggtcggtccacatcgctagctgcacaagcacgcatgcaagctcagtttgaggaaaaactccaagctgaaagagaggaagctgctaggaagcaggaagagttgcaagcacaactacaagctcaacatgccgcacttgaagaaaaccaaagtttgctgcaccagacccaagaggaagtgaaggggatgcataccaagtttgaagagaccaatgcactgctacgagctgtcctgaaacttcagaaagattgaggtagggatgcataccaagtctgaggatgatgcctttgcttaaggttttctaccttgctagaacatatctatggttagaactttgtcagaactacgtgcaatctgtttgaatgcttcaaacctttgtggtggaacctttgtatgtttgaacctctgttgtggaagaactagtgtgctagaattgtgtatgacttgtgatgagaatgttgtgtatgatggcttttctgtgtattatgattctgtgagctatcatgagagctcagtgtgtcgtcactatatggtcactgtatgtgggtgccatattaaactaaacaaaaccaagctgtcacattatccacaaactaatatatgacggtcctgcatcgtaaaaaaatacacaaaa

SEQ ID NO: 147092 - DNA, 1274 bp, Zea Mays
atttatatttgctataaaaaacgaatacatatagaaatcattcgaactgtcaacgaattgaattggccgcgagtttcctacctataaaacgacccggatcccccacccccacatttcctcatcgtcacaacgcgtcctcgaataaaaatccagacgaaacccaaaatccccaccgaacgcaacctaaaatctccccatccctcctcgatccagccccgcggagaagagccatggccgattccgcaaccaacgacgcccccctggtcgccagcaaccagcccacggaggaggaggtgacggtggagagggccgcggcgacggaggagcaggaggaggagaggctgcggtacctcgagttcgtgcagcaggcggcggcgcaggcgctggtgctggcggccgcggcgtacgcgtacgccaagcagggcgccggcccgctccgccccggggtcgatcaggtcgagggcaccgtgaaggccgtcgtcggccccgtctacgaccgtttccacgccgtcccgctcgacctcctcaagttcatcgaccgcaaggtgaggaggcggttctccgtatgttgaaattgtgctgcaaattaggcgttctatgaaatgaaatttacaggtgcaggtttccacggtggaattttgccaaaaaatatatattttggattgaaatcttgtcaacttaactatttctagcagttaaccatctctatattcaatctccactctgtaaatattgtcatctattttgagtgaccgtatgattgaactgccggacacagtttaagggtctggattggataatgttaattgacctgttgctagaaatatgttcttgttgtcacgtgtactggcagtctgaaagggtttagttgcaatgcgttggtatcatggtattattagtttgacaactgaagtagcaaattaggttttttttggaaggcagaagcatcaagcaccactgaaccaaccaaacaaaatgtgtatgaccaagatttgaggtttattgcttaaggattacaagcaccaacttctggcgagttctattaggaactatactatgtttgtttatgtatttgactaatcatcatggtacaattttaactgatgtttcagatacgttcatcagctccttgaatctgcctacccatgtagagctggtcacttactcgtgcccagtatattgttcatttttcacacgcttcttgcaagtcaggccgttatacgttattgtatacgcactacaaactctgaagtcgttgtgttgccattgtcttg

SEQ ID NO: 147093 - DNA, 2131 bp, Zea Mays
atttatatttgctataaaaaacgaatacatatagaaatcattcgaactgtcaacgaattgaattggccgcgagtttcctacctataaaacgacccggatcccccacccccacatttcctcatcgtcacaacgcgtcctcgaataaaaatccagacgaaacccaaaatccccaccgaacgcaacctaaaatctccccatccctcctcgatccagccccgcggagaagagccatggccgattccgcaaccaacgacgcccccctggtcgccagcaaccagcccacggaggaggaggtgacggtggagagggccgcggcgacggaggagcaggaggaggagaggctgcggtacctcgagttcgtgcagcaggcggcggcgcaggcgctggtgctggcggccgcggcgtacgcgtacgccaagcagggcgccggcccgctccgccccggggtcgatcaggtcgagggcaccgtgaaggccgtcgtcggccccgtctacgaccgtttccacgccgtcccgctcgacctcctcaagttcatcgaccgcaaggtgaggaggcggttctccgtatgttgaaattgtgctgcaaattaggcgttctatgaaatgaaatttacaggtgcaggtttccacggtggaattttgccaaaaaatatatattttggattgaaatcttgtcaacttaactatttctagcagttaaccatctctatattcaatctccactctgtaaatattgtcatctattttgagtgaccgtatgattgaactgccggacacagtttaagggtctggattggataatgttaattgacctgttgctagaaatatgttcttgttgtcacgtgtactggcagtctgaaagggtttagttgcaatgcgttggtatcatggtattattagtttgacaactgaagtagcaaattaggttttttttggaaggcagaagcatcaagcaccactgaaccaaccaaacaaaatgtgtatgaccaagatttgaggtttattgcttaaggattacaagcaccaacttctggcgagttctattaggaactatactatgtttgtttatgtatttgactaatcatcatggtacaattttaactgatgtttcagatacgttcatcagctccttgaatctgcctacccatgtagagctggtcacttactcgtgcccagtatattgttcatttttcacacgcttcttgcaagtcaggccgttatacgttattgtatacgcactacaaactctgaagtcgttgtgttgccattgtcttgcattgttccatcatctgatttgtgccactgagcgaagaaatgatcgacgatttgcacgttctgccccccacttgcaggttggtgagtccgttgaggagatagaccgccgcgtccctccagtggtgaaggaagccccaaccttggcccgctcggctgcgaaggaggttcgccaggccggcctggtgggcacggccactggccttgccaagtcagccatcgcccgcgccgagccaaaggcccgggagctctacacccgctacgagcctgtggcagagcggcgtgccgccgaggcctgggtggccctgaaccgtctccctctggtgccctcggtcaccagggccgtcctccccactgccgcacagctctctgccaggtacaattcggcggtgcgtgatggtgccaagcgcgggaacgccgtggccacctatctcccgctggtgcccactgagcggctcgcccgcgtgttcaggtaccccgtggctgacgttgctgcagcaccagagatgcagcccattccttcccagtagaagatgaaatggaatgtgaactgcataaaccaatatcaagaagtattactgtgttttgtctttgcgtaccttatggtgaactcatgcgtggttcagtatcgtttcattcctttttgttgcagtgagcctacacaagttcgtctttgttttatggataatatgtataacattatctattggaatagcaatgttgatgcttgtgctttgtcatcattttgagtacccaacgcgtatgtgcctattggcatttcggctgttgtgttccaagtaaatttaacagaatttaggatgcaaaaaagaagataataaagagatcacaattagtgctct

SEQ ID NO: 147094 - DNA, 1325 bp, Zea Mays
atttatatttgctataaaaaacgaatacatatagaaatcattcgaactgtcaacgaattgaattggccgcgagtttcctacctataaaacgacccggatcccccacccccacatttcctcatcgtcacaacgcgtcctcgaataaaaatccagacgaaacccaaaatccccaccgaacgcaacctaaaatctccccatccctcctcgatccagccccgcggagaagagccatggccgattccgcaaccaacgacgcccccctggtcgccagcaaccagcccacggaggaggaggtgacggtggagagggccgcggcgacggaggagcaggaggaggagaggctgcggtacctcgagttcgtgcagcaggcggcggcgcaggcgctggtgctggcggccgcggcgtacgcgtacgccaagcagggcgccggcccgctccgccccggggtcgatcaggtcgagggcaccgtgaaggccgtcgtcggccccgtctacgaccgtttccacgccgtcccgctcgacctcctcaagttcatcgaccgcaaggttggtgagtccgttgaggagatagaccgccgcgtccctccagtggtgaaggaagccccaaccttggcccgctcggctgcgaaggaggttcgccaggccggcctggtgggcacggccactggccttgccaagtcagccatcgcccgcgccgagccaaaggcccgggagctctacacccgctacgagcctgtggcagagcggcgtgccgccgaggcctgggtggccctgaaccgtctccctctggtgccctcggtcaccagggccgtcctccccactgccgcacagctctctgccaggtacaattcggcggtgcgtgatggtgccaagcgcgggaacgccgtggccacctatctcccgctggtgcccactgagcggctcgcccgcgtgttcaggtaccccgtggctgacgttgctgcagcaccagagatgcagcccattccttcccagtagaagatgaaatggaatgtgaactgcataaaccaatatcaagaagtattactgtgttttgtctttgcgtaccttatggtgaactcatgcgtggttcagtatcgtttcattcctttttgttgcagtgagcctacacaagttcgtctttgttttatggataatatgtataacattatctattggaatagcaatgttgatgcttgtgctttgtcatcattttgagtacccaacgcgtatgtgcctattggcatttcggctgttgtgttccaagtaaatttaacagaatttaggatgcaaaaaagaagataataaagagatcacaattagtgctct

SEQ ID NO: 147095 - DNA, 1005 bp, Zea Mays
gcggaggaaccagtctaagccaccacccaggcccagctcacctctttcctctcttctcatgcccacgcgctcgcctatctcatagtccttccccattccgcctctctagctggcctgtcgaggaccctcgccatcctccccaggcgcaccaccaaacggtccaaacccccagcggcggcgctaggatttgagtctcagcgcgccggcaccgccaccgccaccggcggtgatggcagggcaggagcgtaggacaatcgatctggaggagggatgggcgtttatgcagaagggtatcaccaagctgaagaacatcctcgagggcaagcccgagcctcagttcagctccgaggactacatgatgctctacacgacgatatacaacatgtgcacgcagaagccgccgcacgactactcgcagcagctctacgacaagtatcgggagtcgttcgaggagtatatcacctccatgatttcctactcagagaggagtaaggcagcttggatgggagtttttttagcttttgttgacggggaacaaatcgtgctctcagagcctggggctcacatgagcacttcaaatctggtacgttctgtgagcaatcaacgttaaggtgggaggggataaatggaaaattgccatcgaatcgaaactgagttgaagggaggctcgcgagatgcaggaagcgctagtttggttgcttggtccagctaccgagctaggctcccagcatgcaaaagtgcccactctaccaggcgccggggagacgtgagaatctgttgtttcgggcgagccagtctcgagcggtgcaagaacgagctgctttggcaagcatgcagagaagaaaatgctgctgggcccgagacatgcaggcaaccaatcgttctgtgagcaatcaacgttaaggtgggaggggataaatggaaaattgccatcgaatcgaaactgagttgaagggaggctcgcgagatgcaggaagcgctagtttggttgcttggtccagctac

SEQ ID NO: 147096 - DNA, 2796 bp, Zea Mays
tgcccacgcgctcgcctatctcatagtccttccccattccgcctctctagctggcctgtcgaggaccctcgccatcctccccaggcgcaccaccaaacggtccaaacccccagcggcggcgctaggatttgagtctcagcgcgccggcaccgccaccgccaccggcggtgatggcagggcaggagcgtaggacaatcgatctggaggagggatgggcgtttatgcagaagggtatcaccaagctgaagaacatcctcgagggcaagcccgagcctcagttcagctccgaggactacatgatgctctacacgacgatatacaacatgtgcacgcagaagccgccgcacgactactcgcagcagctctacgacaagtatcgggagtcgttcgaggagtatatcacctccatggtactaccttcgctaagggagaaacatgatgagtttatgctgagggagctagtgcaaaggtggtcaaaccataaagtcatggttcgttggctctcgcgtttctttcattaccttgaccggtacttcatatcaaggaggtcacttaccccacttaaagaagttggtcttacttgcttccgagagttgatatatcaagagattaaagggcaagttaaagatgcggtgatagctctgatagacaaagaacgcgagggtgaacagattgaccggggtctgttgaagaatgtattggatatttttgttgaaattgggctgggtcaaatggagtgttatgagaatgactttgaagatttcttgctcaaggatactacagagtactactctgtcaaggctcaaagctggattcttgaggactcatgcccagattacatgattaaggctgaggagtgtttgaagcgggagaaggagcgggttggtcactatttgcatattagcagtgaacaaaagttgttggagaaagtgcaaaatgaattgcttgctcagtatgcaaccccgctgttggagaaggagcattctggatgttctgctttgcttcgtgatgataaggttgaggacctttctaggatgtacaggctcttctccaaaatcagccgcggtctggagcctatttctaacatgtttaaaacgcatgttacaaatgagggcacagccttggtcaagcaagcagaagattctgctagcaataagaagccagaaaagaaggatatagttggcatgcaggagcaggtctttgtgtggaaaatcatcgagctgcatgacaaatatgtagcttatgtgacagaatgtttccagggacatacactcttccataaggcacttaaagaagcctttgaggtcttctgtaacaaaggtgtctctggcagttcgagtgccgagttgttggctaccttctgcgacaatattctgaagaaaggttgcagtgaaaagctcagtgatgaagccatcgaagatgcccttgagaaggtggtgagaatgcttgcatacatcagtgataaagacctgtttgccgagttctataggaagaagcttgcaagaagattactttttgacaaaagtgctaatgatgagcatgagagaagtattctgacaaagctcaaacaacagtgtgggggacagtttacttcaaaaatggagggcatggttactgaccttactgtcgctagagatcatcaaactaagtttgaggagtttgtagctggacatccagagttgaatcctgggatagacttagctgttactgttttgacaacgggattctggccaagctacaaaacttttgacataaaccttcctgccgagatggtgaaatgtgtagaggttttcaaggagttctatcaaacaagaacaaagcacaggaagctgacatggatttattccttgggaacctgcaacatcaatgctaagtttgatgctaaacctattgaacttattgttacaacatatcaggctgcattgctactactgtttaatggatctgacaggcttagttattctgagattgtaacacaattaaacctgtcagatgatgatgtagtgcgtttgctccattctctttcttgtgcgaagtacaagatccttaacaaggaaccggctagtagatccatctctcccaatgatgtttttgagttcaattcaaagtttactgacagaatgagaagaatcaaggttccactccctcctgttgatgagaagaaaaaggttgttgaagatgttgacaaagacaggaggtatgcaattgatgcatcaattgtgcgcattatgaagagccgcaaagttatgggtcatcaacagctggttgctgaatgtgttgagcagctgagccgcatgttcaagcctgacttcaaagccataaagaagaggattgaggatctcattacaagggactacttggagcgcgacaaggacaacgctaatacgtacaaataccttgcctgattggtggtcagtggcaaaagtccaaaacagctcccagactagtgcaataccacgggggtggcgatctcctgcaaggtggtggtgcgtcaacttttaccatgatttgaggtgcgttatggtgatttgcgtgcttatgggtcctgccacagcaagggctgctcgcatttgtaaattggccgttaaaatagacaatcttgacctgcattagatgatatgatgatgatatgaggaataggagaggcactcaagtacttgtttgccatctatgccaatgttttacctatatgtctgtatcaatgtttcagttaactgagatgagattatgcttgggggttgctttgctatatgaaatgagtggatactatgcgaatttgcagtatcggtttgtatc

SEQ ID NO: 147097 - DNA, 2762 bp, Zea Mays
atggcagggcaggagcgtaggacaatcgatctggaggagggatgggcgtttatgcagaagggtatcaccaagctgaagaacatcctcgagggcaagcccgagcctcagttcagctccgaggactacatgatgctctacacgacgatatacaacatgtgcacgcagaagccgccgcacgactactcgcagcagctctacgacaagtatcgggagtcgttcgaggagtatatcacctccatggtactaccttcgctaagggagaaacatgatgagtttatgctgagggagctagtgcaaaggtggtcaaaccataaagtcatggttcgttggctctcgcgtttctttcattaccttgaccggtacttcatatcaaggaggtcacttaccccacttaaagaagttggtcttacttgcttccgagagttgatatatcaagagattaaagggcaagttaaagatgcggtgatagctctgatagacaaagaacgcgagggtgaacagattgaccggggtctgttgaagaatgtattggatatttttgttgaaattgggctgggtcaaatggagtgttatgagaatgactttgaagatttcttgctcaaggatactacagagtactactctgtcaaggctcaaagctggattcttgaggactcatgcccagattacatgattaaggtacctagaactcatgcccagattacatgattaaggctgaggagtgtttgaagcgggagaaggagcgggttggtcactatttgcatattagcagtgaacaaaagttgttggagaaagtgcaaaatgaattgcttgctcagtatgcaaccccgctgttggagaaggagcattctggatgttctgctttgcttcgtgatgataaggttgaggacctttctaggatgtacaggctcttctccaaaatcagccgcggtctggagcctatttctaacatgtttaaaacgcatgttacaaatgagggcacagccttggtcaagcaagcagaagattctgctagcaataagaagccagaaaagaaggatatagttggcatgcaggagcaggtctttgtgtggaaaatcatcgagctgcatgacaaatatgtagcttatgtgacagaatgtttccagggacatacactcttccataaggcacttaaagaagcctttgaggtcttctgtaacaaaggtgtctctggcagttcgagtgccgagttgttggctaccttctgcgacaatattctgaagaaaggttgcagtgaaaagctcagtgatgaagccatcgaagatgcccttgagaaggtggtgagaatgcttgcatacatcagtgataaagacctgtttgccgagttctataggaagaagcttgcaagaagattactttttgacaaaagtgctaatgatgagcatgagagaagtattctgacaaagctcaaacaacagtgtgggggacagtttacttcaaaaatggagggcatggttactgaccttactgtcgctagagatcatcaaactaagtttgaggagtttgtagctggacatccagagttgaatcctgggatagacttagctgttactgttttgacaacgggattctggccaagctacaaaacttttgacataaaccttcctgccgagatggtgaaatgtgtagaggttttcaaggagttctatcaaacaagaacaaagcacaggaagctgacatggatttattccttgggaacctgcaacatcaatgctaagtttgatgctaaacctattgaacttattgttacaacatatcaggctgcattgctactactgtttaatggatctgacaggcttagttattctgagattgtaacacaattaaacctgtcagatgatgatgtagtgcgtttgctccattctctttcttgtgcgaagtacaagatccttaacaaggaaccggctagtagatccatctctcccaatgatgtttttgagttcaattcaaagtttactgacagaatgagaagaatcaaggttccactccctcctgttgatgagaagaaaaaggttgttgaagatgttgacaaagacaggaggtatgcaattgatgcatcaattgtgcgcattatgaagagccgcaaagttatgggtcatcaacagctggttgctgaatgtgttgagcagctgagccgcatgttcaagcctgacttcaaagccataaagaagaggattgaggatctcattacaagggactacttggagcgcgacaaggacaacgctaatacgtacaaataccttgcctgattggtggtcagtggcaaaagtccaaaacagctcccagactagtgcaataccacgggggtggcgatctcctgcaaggtggtggtgcgtcaacttttaccatgatttgaggtgcgttatggtgatttgcgtgcttatgggtcctgccacagcaagggctgctcgcatttgtaaattggccgttaaaatagacaatcttgacctgcattagatgatatgatgatgatatgaggaataggagaggcactcaagtacttgtttgccatctatgccaatgttttacctatatgtctgtatcaatgtttcagttaactgagatgagattatgcttgggggttgctttgctatatgaaatgagtggatactatgcgaatttgcagtatcggtttgtatctgaatgtaccttccatatcatgccttgcatgccatggacacagtcaatcttcttcagacatcattaattactaaaaagaagcatatataaatataaaagaa

SEQ ID NO: 147098 - DNA, 252 bp, Zea Mays
atggcgtccgtggccgcggcggaggtcgcggcggcggcgctccggtcggtgctgtcgcgcgcgcagcaggcggcggcgcgggcggggcgcgcgccggggtccgtgcgcgtggtggcggtgagcaagaccaagccggtgcctgtcatccggggcgtctacgacgcgggccaccgctgcttcggcgagaactacgtccaggagctcatcgacaaggcgcctcaggttgggttgaattggtcacccgctttctga

SEQ ID NO: 147099 - DNA, 1057 bp, Zea Mays
aatttaattttagctagttttagctaggcgtgggatgtacgtgggaatgggctttgtggggaggggagaatgagaaagaaaacatggaatggtgaccgaacatgggaatggactgtgcggagagggggaatcagaaaggcagaacagggaatggtgagaatggactgtgcggggaggggggaatcagaaaggcagaacagagaatgggaatgacagaacacggaatgacagtctaccccttactgccttaataagtagtagagattagtagcgctgcacaaaaataggtgacatgacgcaatctgattggttaattaagtttgttaaaggtgggaaagctggcgtgccaaaccttgatatggttgagagtgtcgatgatgagaagattgctaaccgtcttgatcgagtggtagctgacttggggagaaaacctcttaaggttttggtccaagtcaacactagtggagaagaatcgaaatttggagtagatccctcaggatgcatggaactagcaaagcatgtcaaactgaactgcccgaaccttgtgttctctggtctgatgacaattgggatgcttgattactcctcaacccctgagaatttcaaggcgctggctaactgccgggaagaggtgtgcaaggagcttggaatacccgaagagcagtgcgaattgtctatgggcatgtcggctgattttgaacaagcgattgaaatgggaagcacaaatgtaagagttgggtcaaccatatttggtgcaagagaatacccaaagaagaactagggtgtttaactatatttggtgcccaaagaactagggtgcttatgcattcctgtcatgatggtagtggcacagaatctgcaacagatccaaatctgatgatgcatcatatatgtgcagttgtgtgcccattctactcagcttaaaacattttgacacccttttttggcccaaagtatcaataaggaaagttaataaaaagcattagaccacatgagtatcgattgtattttgatgtcgacagattttgtttacagttcaaacatccctgttacatta

SEQ ID NO: 147100 - DNA, 1077 bp, Zea Mays
atgagctgcaactatggactttggcaggtgccaataacatttgaactctatttgaccctggctaaaggaggagaatttcttaggttgtgtgcgctggaaagcgaggaagaggtaactgatgtcgagcaggcagaaaattggttttccttaacttcagctcagcgcatatgtgacatgtttcttgcactagataaggatacaaacagtacactgagcaaacaagaactcaaggaatatgcagatggcacattgactgagattttcattgaaagagtttttgatgagcatgtccgccggagcaaagttggaggtggaaacagtcgcgagatggacttcgaaagctttcttgattttgttttggctctagaaaacaaagatacccctgaaggcttgacatatttatttagatgccttgatcttaatggaagggggttccttacaactgcagacatccacactctatttagagatgtacaccagaaatggattgagggcgggaactacgagctttgcatcgaagatgtgagggatgaaatctgggacatggtgaagcccgcagatcctctcaggatctcgctatcagatcttctttcttgcaagcaaggcgggactatcgccagcatgcttgtagatgtgcgtggcttctgggcccatgacaacagggagaaccttctccaggaagaggaagagcaagtggaagagacatgagttctgttctccagctgccaagtaactgtatccagatccagtgcatcaaaaccgcaacatcctcgggaactgcatgcaccgcggtatcattcactgtaacttagctagtgtattagattcgtcgccacctgtttcccctgaagcttattgtaaagtgtgccatattggtcttttgaggctagcgtggcttggccatgttgacatctgaacactatcccgagggcctgattgaatgctcacagcctctgctgcctgtatgtacatgtaaattgtgccaagcgcgcaatcctgactactctatatgtaaatacattgtgttcagctcgtacatgattgttacgtggtcttgaaagtccgcctcaatttcca

SEQ ID NO: 147101 - DNA, 132 bp, Zea Mays
gtttgttagggcgtttgccggtttttctactgtacgctctgggtaggttttgggcccggtttttcttaaaactaggtcaattccattcttcttaattgagaggcagagttcctgccattacgttaaaaaaaa

SEQ ID NO: 147102 - DNA, 752 bp, Zea Mays
aaagttctcaacactccaaaaccggagagcgtcgggcccatttcactcagtgctcccccacgcgcccgccctgagcacccgatccaccaccgcgacggcgatgagcaccgcctccggcgatggcacggacgccggcggcgacgaggcctcgtctgcggccgccgggaggcggatcccacctgcctcttccatgtcgtgggtacgcaacctccgccgcttcgtcggcatgggcgccggcctcggatccgaggccctcatggaactggagactaaaaggatattgcttgagattttcaaggagcggcagcggaagagtgctgaagctggttccatcccaagtttctacaagaagaaacctgaagaaggatctattagctctagagttcaaaggttggccaagtataggtttttaaagaaacaatcagagatgctgctgaatgctgatgatcttgatgccatgtgggtttgtctcagagaaaattgtgtaatcgatgatgctactggtgctgaaaagatgaattatgaagatttctgccatatcgctacagtctgcacggagcagattggtcagaaatgcaaacgcttcttcagcccttcaaacttcatgaagtttgagaaggatgactctgggaggattgctatcctaccattttatctttatgtcatgcgaacagtgagttattttctgcgagaaagagcagttaaacttgccagctagttttgtcccagatgcttcattttgtttctaatag

SEQ ID NO: 147103 - DNA, 826 bp, Zea Mays
atgttggtggacaacgacaacgacttcgcggagtcagagtgcccgagctgtgcttgcgttgtggcacgccggcgttacctgcaccgagtacaggaacagaaggggggcaggggcgtcgaggacatgatgctgcttgagatggctaaagggaagaattggaagcggtgccccaagtgcgagttcttcgtggagaagcgtgatggctgcctgcacgtcacttgcagaaatccactgcagactgcagcgctacaaatattaaaggtacttgatgctttccttgcgccaggatcagagttgtggatgtttaatgatgtccctgaggttgacagagaaagaaagctaattgatggaggtttggacttcagtcgcctcgataatattactttggtgcatcgtgagggaaatgttgttattcgccgtcacttggagagccttcctttagaatcattcgattatgtagaagattcagcaatccaagctgagtcgaggtcacttgcaactttgctgctgataagagatattcaggcaaaacgtcttacatgcaaggaatcattgatttcacatgttccccgagggaccttttctgaaggttcttggataggggagatgcaacaagcatctgataaatctgtcataatcagtgaaattttggaccctaggacaaaaaatttgttgtcagtgtcaaaaattagtgactacgttctttcaaatgaattagtgagcatggcattggcaatggtcgcagaagatcggcagataaataatgtcttggaggagctcttcgctgaataaggaaatgaaatgcaaatacgaccttctgatatgt

SEQ ID NO: 147104 - DNA, 3035 bp, Zea Mays
ctcgcattccgaaacccaccctccgcctcaagaagccaccgctccgacgagccgtgggtggcagaggacgcgcagagcaaggtcggggcgggggtctctgcaccggcaatttctcgcgctgccgccgctgaatgctatcggagtttcgggggatatttaatgcggtctcgttgattttctcgtagcctcaccgctgcaggcgggcgcgcggacagcgtcccgccctccccatggagcccgacgccgccgggtgcgacgtgtccgcggacggcctcatcgccgagctgcttgacatgggcttcgagttcgacgccatcagcgcggcggtcggcgcggtcggcccgcgccgcgcagaggtgcttgaggtcctgctgggcgggtcggacgcccgagcggggcaggcgaggcggggagggggagtgccaggccgtcccgccttgtctacggcgcagccacggccggctggcaggggcatgaaattgagtaaccctagggggaggcttaggcagtccagcatcacggaccacgttgcctcagctactggtggcggaaaggaatctggtcgggaagcgaacatttcgtttccttgttcatcggctcctggtggtcccagggtaatgccagtggctgttgatttttgttccgaaccgggtccccaatctcagtctttggttgagaactcgacagtggagtccgaccaaatggacagaattagtgctgttctgcaaaagcattttgggttttcctgcctcaaagcattccaaaaggaagtcttggatgcttggtctgctcacagggattgtattgtcctagcagccacaggatcaggaaagtccctctgttttcagatcccagctctattaacaacaaaggttgtggtggtcatatcacccttgataagtctaatgcatgatcagtgcctgaagcttgcaaatcacggggtatccgcatgcttccttgggtcagggcaacctgatagccgtgttgaaggtaaagcgatggctggcatgtataagattgtttatgtttgccctgagacaatattaagattaatggaaccgttgaagaaacttgcagaaaagccagggattgcactttttgccattgatgaggtccattgtgtttctaaatggggccacgattttcgacctgactataggagattatctgcgttgagagaaaatttcagttccagcaaattgaagttcttgaagcatgacattccgttgatggcattgacagctactgcaactattcccgtacgagaagacattactaagtccttgaaaatgtcaaaagatacagcgattgtgctaacctctttttttcggccaaatctccggttcagcgtaaagcacagcaaaacttctgcctcatcatatggaaaggacttccaagaactgataggggcatataaggcttcaagggaaggacagcaaattcttcatggaattgacactgactccgaaagcagttcatatgaatctctgaatgatagtgcatcagacgatgaagatgcaaatgttatttctgcaaaccacggggataagaatgttggaaaaacaaaaactagcatgactttggtagaagaaaacattgaaaatgagttggatttgtatcaaggagttgataattttgatgtttcatgtggagagttccttgaatgttcacagcctgagagctccaagtctcctgctcaatccaatcaaactagctcctcagattgtggtgttcaaggttctacaattgtttatgtacccacaaggaaacaaaccgttgaactagctaacttcctttgcaaatctggtctcagagctgcagcatataatgcaaagatgcctaaatcccatttgaggcaagttcatcagcagtttcactgcaacgacttagaggttgtggtggctaccatagcatttggcatgggaattgacaaatcaaatgtcaggcgaattattcactatggtttaccgcagagtttagaagcatattatcaagaagctggccgtgctggtagagatggaaagctgtcagattgcactctatattataattttttgagaacaccgacactccttcctaataaaagaagtgaggagcaggcaaaggctgcatatagaatgctacgtgattgttttcactattctctgaatacttcaacatgtagagccaaaatattagtgaagtactttggcgaagactttggtcctgatggatgtcgcatgtgtgacatctgtactaatggccctcctcaaatgcatgatttcaaggaagaagcgattgtgttcatgaatgtgctccagggtcgaagtggcggtgaaactgatgagatgatttacagcagagtaccccattacagctctggcaggagagggtttggcgaggcacctaattttagaatggttgtcagtcatataagggaaaagcttcctaggtttgctgcgactgacaagatatggtggcaaggtctttcccgtatattagagggcctgagatacgtagaggaagcagctgaaactcctcgtgtctccatgcagtaccctgaactgacggaggacggattaaagtttcttagtagctcacagtcggaggcacctctgtatgcatacccggacgcggcaatgctcttggcaatgaaggagccaaggcccttctctggtttctccgattggggcaggggctgggccgatcccgagactcgccggcagcgtctggcgggcaagaaggccgggagaagaaagcggaagtggcgctcccgggggcggcagcagcagccgggcggcttcaccacggcgagggagagactgactgcgatactggcaaagaagaaaaaaaggtgatgctgtgcaaggttggtggtagtaggattatattacatgtatcgtttgctgttatcgtcgaactttatatgagaatctgatagaagcaaagatttttttttgggccattgtgcttctatcgtatggtatgatgatgggttgggaaagaaaacagaagcccatgattgatgaggataacgagcgagcactgtgtcggct

SEQ ID NO: 147105 - DNA, 2889 bp, Zea Mays
ctcgcattccgaaacccaccctccgcctcaagaagccaccgctccgacgagccgtgggtggcagaggacgcgcagagcaagcctcaccgctgcaggcgggcgcgcggacagcgtcccgccctccccatggagcccgacgccgccgggtgcgacgtgtccgcggacggcctcatcgccgagctgcttgacatgggcttcgagttcgacgccatcagcgcggcggtcggcgcggtcggcccgcgccgcgcagaggtgcttgaggtcctgctgggcgggtcggacgcccgagcggggcaggcgaggcggggagggggagtgccaggccgtcccgccttgtctacggcgcagccacggccggctggcaggggcatgaaattgagtaaccctagggggaggcttaggcagtccagcatcacggaccacgttgcctcagctactggtggcggaaaggaatctggtcgggaagcgaacatttcgtttccttgttcatcggctcctggtggtcccagggtaatgccagtggctgttgatttttgttccgaaccgggtccccaatctcagtctttggttgagaactcgacagtggagtccgaccaaatggacagaattagtgctgttctgcaaaagcattttgggttttcctgcctcaaagcattccaaaaggaagtcttggatgcttggtctgctcacagggattgtattgtcctagcagccacaggatcaggaaagtccctctgttttcagatcccagctctattaacaacaaaggttgtggtggtcatatcacccttgataagtctaatgcatgatcagtgcctgaagcttgcaaatcacggggtatccgcatgcttccttgggtcagggcaacctgatagccgtgttgaaggtaaagcgatggctggcatgtataagattgtttatgtttgccctgagacaatattaagattaatggaaccgttgaagaaacttgcagaaaagccagggattgcactttttgccattgatgaggtccattgtgtttctaaatggggccacgattttcgacctgactataggtctgctcttgtgtttgatatcctctgttaaaggagattatctgcgttgagagaaaatttcagttccagcaaattgaagttcttgaagcatgacattccgttgatggcattgacagctactgcaactattcccgtacgagaagacattactaagtccttgaaaatgtcaaaagatacagcgattgtgctaacctctttttttcggccaaatctccggttcagcgtaaagcacagcaaaacttctgcctcatcatatggaaaggacttccaagaactgataggggcatataaggcttcaagggaaggacagcaaattcttcatggaattgacactgactccgaaagcagttcatatgaatctctgaatgatagtgcatcagacgatgaagatgcaaatgttatttctgcaaaccacggggataagaatgttggaaaaacaaaaactagcatgactttggtagaagaaaacattgaaaatgagttggatttgtatcaaggagttgataattttgatgtttcatgtggagagttccttgaatgttcacagcctgagagctccaagtctcctgctcaatccaatcaaactagctcctcagattgtggtgttcaaggttctacaattgtttatgtacccacaaggaaacaaaccgttgaactagctaacttcctttgcaaatctggtctcagagctgcagcatataatgcaaagatgcctaaatcccatttgaggcaagttcatcagcagtttcactgcaacgacttagaggttgtggtggctaccatagcatttggcatgggaattgacaaatcaaatgtcaggcgaattattcactatggtttaccgcagagtttagaagcatattatcaagaagctggccgtgctggtagagatggaaagctgtcagattgcactctatattataattttttgagaacaccgacactccttcctaataaaagaagtgaggagcaggcaaaggctgcatatagaatgctacgtgattgttttcactattctctgaatacttcaacatgtagagccaaaatattagtgaagtactttggcgaagactttggtcctgatggatgtcgcatgtgtgacatctgtactaatggccctcctcaaatgcatgatttcaaggaagaagcgattgtgttcatgaatgtgctccagggtcgaagtggcggtgaaactgatgagatgatttacagcagagtaccccattacagctctggcaggagagggtttggcgaggcacctaattttagaatggttgtcagtcatataagggaaaagcttcctaggtttgctgcgactgacaagatatggtggcaaggtctttcccgtatattagagggcctgagatacgtagaggaagcagctgaaactcctcgtgtctccatgcagtaccctgaactgacggaggacggattaaagtttcttagtagctcacagtcggaggcacctctgtatgcatacccggacgcggcaatgctcttggcaatgaaggagccaaggcccttctctggtttctccgattggggcaggggctgggccgatcccgagactcgccggcagcgtctggcgggcaagaaggccgggagaagaaagcggaagtggcgctcccgggggcggcagcagcagccgggcggcttcaccacggcgagggagagactgactgcgatactggcaaagaagaaaaaaagttgccacctgctgctcctgtggctccaagaagccctgatgattgctggccaaaccaagcggatggcgcctgtggctgcaagtgtgcgcgttcgatgtgtcacgccccggcaccgctcggtcggctga

SEQ ID NO: 147106 - DNA, 1180 bp, Zea Mays
ctcacctaacccactcagcctaagatccccacaggtgtcaggtctcatccggagtcgtcgccaagaaccacagccaccgcgatggcgcagatcatcgatggcaaggccatcgccgccgacgtccgccgcgaggtcgccgccgatgtggccgcgctctcgtcggcccacggactcgtgccggggctggccgtggtcatcgtggggagcaggaaggactcgcagacgtacgtgaacatgaagcgcaaggcgtgcgccgaggtcggcatctgctccatcgacgtcgacctcccggaggacatctccgagaccgcgctcgtcgccgaggttcatcgcctcaacgctgaccccgccgtgcacgggatccttgtccagcttccacttcctaagcatatcaacgaagagaagatactgagcgagatttccatcgagaaagatgtggatggcttccatcctctcaacattggcaagcttgcaatgaaaggcagagagccactgttcgtaccatgtacgccaaaggggtgcatggagctcttgtcaaggagcggagtcactgttaaaggtaagcgggcagttgtggttggtcgcagcaacatcgtcgggctacctgtatccctgctccttctgaaggcagatgcgaccgtatctgttgtgcactcgcggacccctgatcctgaaagcattgtacgcgaagccgacatagtcatcgcggcagctgggcaggctatgatggtatgtatgcagctatgccgacagatcctcacagtaaggtgcagcatcctgcaacccgttcaacgctgctcactgagtccgtcgatgtgctcttttcttgctcgtcagatcaaaggtgactggatcaagccaggtgctgcggtcatcgatgtcgggacgaactccgtcgacgaccctacccggaagtccgggtaccggctcgtcggcgatgtggatttcgcagcggcgagcaaggttgctgggtacctgactccggttcccggaggcgttggcccaatgacggtggcaatgctgctgaagaacacggtggatggggcaaagcgggggatagtcgagtagctacgttcatctcacttctcgttgctgtacgactgtgttgcaaggatgtgagctgactcgaaaagcgtgtgttggttggtgtaacaatctgtttcccaagaataagaatgat

SEQ ID NO: 147107 - DNA, 1942 bp, Zea Mays
ctcacctaacccactcagcctaagatccccacaggtgtcaggtctcatccggagtcgtcgccaagaaccacagccaccgcgatggcgcagatcatcgatggcaaggccatcgccgccgacgtccgccgcgaggtcgccgccgatgtggccgcgctctcgtcggcccacggactcgtgccggggctggccgtggtcatcgtggggagcaggaaggactcgcagacgtacgtgaacatgaagcgcaaggcgtgcgccgaggtcggcatctgctccatcgacgtcgacctcccggaggacatctccgagaccgcgctcgtcgccgaggttcatcgcctcaacgctgaccccgccgtgcacggtaccgcctccgtttctttttcttttattttccttcgccttgcttgctcgtgtgcctctggctgccaggcgtccagcaatccagcatggtactcttgttatgttgcaattgtagcaatctctctgcttgcctgacgataccattcctttgcataccagtatctgcaggcctccaggcttgcggtccagtggatttggtctgatcctgtctccatcaagcgtacatttctgtttgatgtttgggatttgaatccttgagcgctttctcatagcaggatctgaaaatgcaactagtcaataaaattggcatccgctctgtacagtatgtcttatctgttaaccaaggggatttcatgtcatatcccaatgtcgcttctggtttggctgcgctaatagtgctttcggagctgttgcatactatgaactccccccagtagcaaattcgcacagataagtaaatggagctcaaacatagcattgttttgatcgtaaataagaatccatagctaaaaaatctgggcacgatcaatctaagctcaatgtcctccacaaaatttgaactttttagctctgtttgtctttacataactatgtagacgagtgccatgccatatggaggggttctaaaatggacttgtctacctccccactggattcatagaaaggcagcaagttcagttttctgacgcttgtgtgagacagttcggtttcatttgattcatgccctgttctagcttcttgaaatactgactatttgatcatactggtttcatagagcccaaaaatccttgttccaaattatgaagagaagctaagtttgctttcagggatccttgtccagcttccacttcctaagcatatcaacgaagagaagatactgagcgagatttccatcgagaaagatgtggatggcttccatcctctcaacattggcaagcttgcaatgaaaggcagagagccactgttcgtaccatgtacgccaaaggggtgcatggagctcttgtcaaggagcggagtcactgttaaaggtaagcgggcagttgtggttggtcgcagcaacatcgtcgggctacctgtatccctgctccttctgaaggcagatgcgaccgtatctgttgtgcactcgcggacccctgatcctgaaagcattgtacgcgaagccgacatagtcatcgcggcagctgggcaggctatgatgatcaaaggtgactggatcaagccaggtgctgcggtcatcgatgtcgggacgaactccgtcgacgaccctacccggaagtccgggtaccggctcgtcggcgatgtggatttcgcagcggcgagcaaggttgctgggtacctgactccggttcccggaggcgttggcccaatgacggtggcaatgctgctgaagaacacggtggatggggcaaagcgggggatagtcgagtagctacgttcatctcacttctcgttgctgtacgactgtgttgcaaggatgtgagctgactcgaaaagcgtgtgttggttggtgtaacaatctgtttcccaagaataagaatgatagtcacagctgctttcctgtttaataaatgcagtgaagaaagaa

SEQ ID NO: 147108 - DNA, 1136 bp, Zea Mays
ctcacctaacccactcagcctaagatccccacaggtgtcaggtctcatccggagtcgtcgccaagaaccacagccaccgcgatggcgcagatcatcgatggcaaggccatcgccgccgacgtccgccgcgaggtcgccgccgatgtggccgcgctctcgtcggcccacggactcgtgccggggctggccgtggtcatcgtggggagcaggaaggactcgcagacgtacgtgaacatgaagcgcaaggcgtgcgccgaggtcggcatctgctccatcgacgtcgacctcccggaggacatctccgagaccgcgctcgtcgccgaggttcatcgcctcaacgctgaccccgccgtgcacgggatccttgtccagcttccacttcctaagcatatcaacgaagagaagatactgagcgagatttccatcgagaaagatgtggatggcttccatcctctcaacattggcaagcttgcaatgaaaggcagagagccactgttcgtaccatgtacgccaaaggggtgcatggagctcttgtcaaggagcggagtcactgttaaaggtaagcgggcagttgtggttggtcgcagcaacatcgtcgggctacctgtatccctgctccttctgaaggcagatgcgaccgtatctgttgtgcactcgcggacccctgatcctgaaagcattgtacgcgaagccgacatagtcatcgcggcagctgggcaggctatgatgatcaaaggtgactggatcaagccaggtgctgcggtcatcgatgtcgggacgaactccgtcgacgaccctacccggaagtccgggtaccggctcgtcggcgatgtggatttcgcagcggcgagcaaggttgctgggtacctgactccggttcccggaggcgttggcccaatgacggtggcaatgctgctgaagaacacggtggatggggcaaagcgggggatagtcgagtagctacgttcatctcacttctcgttgctgtacgactgtgttgcaaggatgtgagctgactcgaaaagcgtgtgttggttggtgtaacaatctgtttcccaagaataagaatgatagtcacagctgctttcctgtttaataaatgcagtgaagaaagaattttggctttgctgctgcaa

SEQ ID NO: 147109 - DNA, 1804 bp, Zea Mays
ctcacctaacccactcagcctaagatccccacaggtgtcaggtctcatccggagtcgtcgccaagaaccacagccaccgcgatggcgcagatcatcgatggcaaggccatcgccgccgacgtccgccgcgaggtcgccgccgatgtggccgcgctctcgtcggcccacggactcgtgccggggctggccgtggtcatcgtggggagcaggaaggactcgcagacgtacgtgaacatgaagcgcaaggcgtgcgccgaggtcggcatctgctccatcgacgtcgacctcccggaggacatctccgagaccgcgctcgtcgccgaggttcatcgcctcaacgctgaccccgccgtgcacgtatctgcaggcctccaggcttgcggtccagtggatttggtctgatcctgtctccatcaagcgtacatttctgtttgatgtttgggatttgaatccttgagcgctttctcatagcaggatctgaaaatgcaactagtcaataaaattggcatccgctctgtacagtatgtcttatctgttaaccaaggggatttcatgtcatatcccaatgtcgcttctggtttggctgcgctaatagtgctttcggagctgttgcatactatgaactccccccagtagcaaattcgcacagataagtaaatggagctcaaacatagcattgttttgatcgtaaataagaatccatagctaaaaaatctgggcacgatcaatctaagctcaatgtcctccacaaaatttgaactttttagctctgtttgtctttacataactatgtagacgagtgccatgccatatggaggggttctaaaatggacttgtctacctccccactggattcatagaaaggcagcaagttcagttttctgacgcttgtgtgagacagttcggtttcatttgattcatgccctgttctagcttcttgaaatactgactatttgatcatactggtttcatagagcccaaaaatccttgttccaaattatgaagagaagctaagtttgctttcagggatccttgtccagcttccacttcctaagcatatcaacgaagagaagatactgagcgagatttccatcgagaaagatgtggatggcttccatcctctcaacattggcaagcttgcaatgaaaggcagagagccactgttcgtaccatgtacgccaaaggggtgcatggagctcttgtcaaggagcggagtcactgttaaaggtaagcgggcagttgtggttggtcgcagcaacatcgtcgggctacctgtatccctgctccttctgaaggcagatgcgaccgtatctgttgtgcactcgcggacccctgatcctgaaagcattgtacgcgaagccgacatagtcatcgcggcagctgggcaggctatgatgatcaaaggtgactggatcaagccaggtgctgcggtcatcgatgtcgggacgaactccgtcgacgaccctacccggaagtccgggtaccggctcgtcggcgatgtggatttcgcagcggcgagcaaggttgctgggtacctgactccggttcccggaggcgttggcccaatgacggtggcaatgctgctgaagaacacggtggatggggcaaagcgggggatagtcgagtagctacgttcatctcacttctcgttgctgtacgactgtgttgcaaggatgtgagctgactcgaaaagcgtgtgttggttggtgtaacaatctgtttcccaagaataagaatgatagtcacagctgctttcctgtttaataaatgcagtgaagaaagaattttggctttgctgctgcaa

SEQ ID NO: 147110 - DNA, 1216 bp, Zea Mays
ctcacctaacccactcagcctaagatccccacaggtgtcaggtctcatccggagtcgtcgccaagaaccacagccaccgcgatggcgcagatcatcgatggcaaggccatcgccgccgacgtccgccgcgaggtcgccgccgatgtggccgcgctctcgtcggcccacggactcgtgccggggctggccgtggtcatcgtggggagcaggaaggactcgcagacgtacgtgaacatgaagcgcaaggcgtgcgccgaggtcggcatctgctccatcgacgtcgacctcccggaggacatctccgagaccgcgctcgtcgccgaggttcatcgcctcaacgctgaccccgccgtgcacgagcccaaaaatccttgttccaaattatgaagagaagctaagtttgctttcagggatccttgtccagcttccacttcctaagcatatcaacgaagagaagatactgagcgagatttccatcgagaaagatgtggatggcttccatcctctcaacattggcaagcttgcaatgaaaggcagagagccactgttcgtaccatgtacgccaaaggggtgcatggagctcttgtcaaggagcggagtcactgttaaaggtaagcgggcagttgtggttggtcgcagcaacatcgtcgggctacctgtatccctgctccttctgaaggcagatgcgaccgtatctgttgtgcactcgcggacccctgatcctgaaagcattgtacgcgaagccgacatagtcatcgcggcagctgggcaggctatgatgatcaaaggtgactggatcaagccaggtgctgcggtcatcgatgtcgggacgaactccgtcgacgaccctacccggaagtccgggtaccggctcgtcggcgatgtggatttcgcagcggcgagcaaggttgctgggtacctgactccggttcccggaggcgttggcccaatgacggtggcaatgctgctgaagaacacggtggatggggcaaagcgggggatagtcgagtagctacgttcatctcacttctcgttgctgtacgactgtgttgcaaggatgtgagctgactcgaaaagcgtgtgttggttggtgtaacaatctgtttcccaagaataagaatgatagtcacagctgctttcctgtttaataaatgcagtgaagaaagaattttggctttgctgctgcaattacagttgaaacaaagcttatggtttt

SEQ ID NO: 147111 - DNA, 1070 bp, Zea Mays
ctcacctaacccactcagcctaagatccccacaggtgtcaggtctcatccggagtcgtcgccaagaaccacagccaccgcgatggcgcagatcatcgatggcaaggccatcgccgccgacgtccgccgcgaggtcgccgccgatgtggccgcgctctcgtcggcccacggactcgtgccggggctggccgtggtcatcgtggggagcaggaaggactcgcagacgtacgtgaacatgaagcgcaaggcgtgcgccgaggtcggcatctgctccatcgacgtcgacctcccggaggacatctccgagaccgcgctcgtcgccgaggttcatcgcctcaacgctgaccccgccgtgcacgggatccttgtccagcttccacttcctaagcatatcaacgaagagaagatactgagcgagatttccatcgagaaagatgtggatggcttccatcctctcaacattggcaagcttgcaatgaaaggcagagagccactgttcgtaccatgtacgccaaaggggtgcatggagctcttgtcaaggagcggagtcactgttaaaggtaagcgggcagttgtggttggtcgcagcaacatcgtcgggctacctgtatccctgctccttctgaaggcagatgcgaccgtatctgttgtgcactcgcggacccctgatcctgaaagcattgtacgcgaagccgacatagtcatcgcggcagctgggcaggctatgatgatcaaaggtgactggatcaagccaggtgctgcggtcatcgatgtcgggacgaactccgtcgacgaccctacccggaagtccgggtaccggctcgtcggcgatgtggatttcgcagcggcgagcaaggttgctgggtacctgactccggttcccggaggcgttggcccaatgacggtggcaatgctgctgaagaacacggtggatggggcaaagcggggaagaagaatgagaaagaaaaaaagcaatccaagcgcaagagctcaaatgaacactgccatcagctcaaaaaagtggaagtgagttcaccggaggtgggcgccaatgttggggacttgttctca

SEQ ID NO: 147112 - DNA, 85 bp, Zea Mays
atggtcctaatagggcagaacgggctcagactgtatcgagcagcgtcacctagatccatttttttttgtatagtctcgctaaaag

SEQ ID NO: 147113 - DNA, 540 bp, Zea Mays
atggatcaatgtggagcgcagtgccttccccttcaccgtgtacatgcggacccaaccagcttatcgcagtgcctcctcgttgagctcgctctgccgcggctttctgctcggcagcaagcgccagctcgggatccaccccgaacgcttgggcgtaggtgttgtctatcggcgagaacactgcgcgacggtacgccgagaacagcgcggccatctccatcccaggcacggtgcgcgccgctttttccgccgcgtcccgctgagtcacggcggcgtccagcaggtagtcgagcgccttccgcggcacgaaccgctgccgtgcggcctggatctggtcggggtggtagtcagcgtcagtgtcgaatgccgggacatcgaccaggaggaagttgccgtcgctggggtgggggcggaaggcgtcggggctcttgcacgggcagagcagcgctagcgcgctgcgacgggctacctcgtcgacggcctccgccacggcgccggcgaaactactgcgggtgctgccgccctgggccgccttctcggtga

SEQ ID NO: 147114 - DNA, 1907 bp, Zea Mays
ggcccatcgacgatccgacggcggacgccttaaacccttctccttcctttggtccgcctcctccccgcccctccgcagtcgcagtgccgcagcatcgtcgccatggctctcctcaagaactccctcatgctcccggggcggttgcgccatgcggcggcggcgctcactgcgcggcgccacgcggcgacgttgacggaagagtacgcgcgccggaactacgccgataacaactccgagtacaacacggtcatcggatcgctcgtcgctcagcgcaggccctaccttctgcgtgatgcttacgacgacatgatgcttgatggcgtgaagcctgagcgggaaacgttccacacactcatagtcggtaccatgaaaggcagccggctacaagatgcgctttacttccgtgatcagatgaaagaaatgggtttgaagcctgatgttaacctttacaacttcttgatctccacttgtggaaaatgcaagaactcagatgcagcaatcatgcttttagaagaaatgaaggcacatgatgttaagttgaaaggagaaacctacatttgtctactgaatgcacttgcatcaacagggcaaactgatcaagtttatgccatagttagtgatatgagtgctgctggacttggattaaacaagttttgttatgctggattgataactgcattcaagaacaagacaccaaccgctgaggaaactatggcgaagattcttgacttcgtcgggcagtcgaaaggttggcaatatgttgaaagagtatcaaaggacattgctgagaatataatgatgaatgtgtcagaggaagaactgtacaacctcccaacagcagaatatgtaaataggcgaggaggatttgtctttaaacaacatacagtttatcatgttgctctccaagcttgtgcagaattgcgaagcaaagagacacttgaagcacttctggaaatgttcaataaggataatagagatggatctacttatgatgcctacatggtgatgcaagctatgaggtgttacctacgatgtggagatattgattctgctgttaagatgtttgaagagtattcaagctcgaggtccccacccgctgagttgtatgcgacacttgctgagggagctatgattgggtacactccaagaggaatgcaacttgctcaagaaactatagagaagatgacttcaagaaattttttcttgaatgccaagatgggaactgatctcctacttgcagctgccggtgaaacggctggtggatatacgactgcaaattatgtctgggatctcctgcaaagccgtaaaatcactccaacacttcctgctgttgaggcataccacaagggtctgacggcgcgagagattccttctgacgatccacgacttctcaatgttacccgtgttttggacaacctgaagctccgatttggaccaagaagaaacactcagtaacttagaaacaatattgtccctgatacgatgcaatcagtaatttgtctttgttaggtttctggatgcgaaggcatgtttacagtccgaaaaaccaaggaagttcatcaggatgacgtaaagcagaaccaccaggcatttgaggggcatggcaggtgtgggaatcaaggtccggaaacggaagccagttgtttccagggttttctcgagaaatcttcacctgccaagcctgaagacctgaactcggatgcactgggttttgatttgaaatttaatgtatcctatgttgcctaccattgtttgacaaccatttatccgaacttttgatctagaagacagcgggaatatagttgtgcgcgagtcaagctgtaggtcgttcgttttgacgcttcctctatgtactatctattagtactagtctaatacccgtgtaatgatattgattagatgactaa

SEQ ID NO: 147115 - DNA, 1752 bp, Zea Mays
cctcacatttccttctctgatctctccccaaggctgacccccgggtgtttgtggtgcagggcggttgcgccatgcggcggcggcgctcactgcgcggcgccacgcggcgacgttgacggaagagtacgcgcgccggaactacgccgataacaactccgagtacaacacggtcatcggatcgctcgtcgctcagcgcaggccctaccttctgcgtgatgcttacgacgacatgatgcttgatggcgtgaagcctgagcgggaaacgttccacacactcatagtcggtaccatgaaaggcagccggctacaagatgcgctttacttccgtgatcagatgaaagaaatgggtttgaagcctgatgttaacctttacaacttcttgatctccacttgtggaaaatgcaagaactcagatgcagcaatcatgcttttagaagaaatgaaggcacatgatgttaagttgaaaggagaaacctacatttgtctactgaatgcacttgcatcaacagggcaaactgatcaagtttatgccatagttagtgatatgagtgctgctggacttggattaaacaagttttgttatgctggattgataactgcattcaagaacaagacaccaaccgctgaggaaactatggcgaagattcttgacttcgtcgggcagtcgaaaggttggcaatatgttgaaagagtatcaaaggacattgctgagaatataatgatgaatgtgtcagaggaagaactgtacaacctcccaacagcagaatatgtaaataggcgaggaggatttgtctttaaacaacatacagtttatcatgttgctctccaagcttgtgcagaattgcgaagcaaagagacacttgaagcacttctggaaatgttcaataaggataatagagatggatctacttatgatgcctacatggtgatgcaagctatgaggtgttacctacgatgtggagatattgattctgctgttaagatgtttgaagagtattcaagctcgaggtccccacccgctgagttgtatgcgacacttgctgagggagctatgattgggtacactccaagaggaatgcaacttgctcaagaaactatagagaagatgacttcaagaaattttttcttgaatgccaagatgggaactgatctcctacttgcagctgccggtgaaacggctggtggatatacgactgcaaattatgtctgggatctcctgcaaagccgtaaaatcactccaacacttcctgctgttgaggcataccacaagggtctgacggcgcgagagattccttctgacgatccacgacttctcaatgttacccgtgttttggacaacctgaagctccgatttggaccaagaagaaacactcagtaacttagaaacaatattgtccctgatacgatgcaatcagtaatttgtctttgttaggtttctggatgcgaaggcatgtttacagtccgaaaaaccaaggaagttcatcaggatgacgtaaagcagaaccaccaggcatttgaggggcatggcaggtgtgggaatcaaggtccggaaacggaagccagttgtttccagggttttctcgagaaatcttcacctgccaagcctgaagacctgaactcggatgcactgggttttgatttgaaatttaatgtatcctatgttgcctaccattgtttgacaaccatttatccgaacttttgatctagaagacagcgggaatatagttgtgcgcgagtcaagctgtaggtcgt

SEQ ID NO: 147116 - DNA, 1166 bp, Zea Mays
atggatgttctgcagactgtatgtgctcatctatgcacccaacaagatatgctcttgatcttggtgctgaatgttgctgctccgttggtgccaacaaaagctagaagggacttgtttgggatgtttaagtgtctcaaacagacggtgcttgagaaggacctcaaggaacaacaagttgtgcatggtgcagtggaaaacactttagggtctggttctatcaacttgccattagagaatccaataccaaagggaactacacatgtttatggaactatctttaaaccatatatttctcagcatgagaatgaaatctaccagaatctccttgagctgagagctcgagccaccgacatggttgtcctttattttcagaaggctgcttcggcacgacaaatgtttatcttgttacccatgttaaaatcatgctttgatgtcttccaagaatcacagcagccgccacaacaacagcaaccacaagtgcaggtgcagcaggcgcaaccacaaaaacaagcagcacctgttatgcgcagagcatcatctattgctgctcggcaagcagcaatggcacaacaatctcaggagactaaacccattcaatcttcgcccaagatcaagcgtcaaacatcatcgagatctggttcagtggcatccacaaagcctccgatagctgcatccacaccaaaacctggtggtagcccaaagaaaggcgaggtcaaacctgctgctgacccagttcaaactccaaccacaggtgccgattcaccgaaaccagagcctagcgcccgatcactccctggagtcgaaggggtggacaagatggccatcgatgaggccagtggtgacgccctagagggcgcagaagagcttgaccatgcgctcgaagaggagacgtcgatggaggagacgatccgtgtgacgcgcgccaagctaaggaggcgcacgaccaccgaagttcctgttgggaattagctgttagcggcacgggcaacaaacgcatgtaattgcaacatcatacacttcaatctggtcactccttgagtatcttcaggatgtcacatccagccacaattttcagccgatagggaaacaagaacaactgtttttctatcattctctgtgtacatgtatctgtttgagtccctggtatacactgtagttagtctggc

SEQ ID NO: 147117 - DNA, 284 bp, Zea Mays
cgaggttgcgcggatgcgcagagaggaaggcaactgtccgcacagaatcggatgaataaagggctggcgtgccatggcgacagtccttcctacagatgttttgaagcgttgttgcaagtttctgaaacttgttatttagctggcttgatttgtaatcaatgctgaagaataaatactttttgcgacaatggtccttttacaatgtcgtgttgttttcgttactaattgcacttgccctaccctaatcaagcatgtgaactaatggaatgcttcagttttgtgca

SEQ ID NO: 147118 - DNA, 471 bp, Zea Mays
atggacgactgcacacatcagcccatgcccatgctatacatgcccatcccggagcttgcttctcccgcgccggtgccagtgctacccgccgccgcgccgcaagaaggcaccggcgactcggagtccgacgcccccgcagcaggggaccgtcccttggtggtagcagctggctacgccgaggacgacgctgagtcctgcagtggcgatggtagcagtcgcgctcccgcccctgctgctagcgtcgtcgtcgttgacgacttggccggggagggtgacgagagcgaagtcgacagcagcatggccgtcccgtggtggctccggacgacggtccaggacgcggcgggtggtggctgcgcgcggccgcaggcgacggcggaggccggggcggcggctgctgtggccggcggcgccagccacgcggccgagagcaacaggctcttctgggaagcttgcattgcgcatggatactag

SEQ ID NO: 147119 - DNA, 243 bp, Zea Mays
gcatccccagaccgcacccaggtagatgtagatgtagaagatgcggtcgggccatcggggtcggggaacattgcttggcctcgtcctgcgctgcgtgccattccatgacgtcaggcaactcacgtcatcatattgtctcatatcgctttgcaaactttgtgcctgtccatgagttcttcaaagaatccaaatgtgatgatacacatgtatcctatgctgaatgaatcacgtacttgagacttc

SEQ ID NO: 147120 - DNA, 1089 bp, Zea Mays
atgtgggcgtccaccaagccccgtggctccgcccccgcaacacccgtggctccgcccctgtggccccgttcgattcacgtcctcagcgcctccctctcgcccgccgccggcgccgaaaccccaccccagctcccagatccacccgacatgatgcgagagaacgacaaccgcgcggcgtccctgtcctcagcgcctcgccccgacgcccctcggccgcgacaacaacgacgacaagcacgggcccctccatcgcctcgtcgcatgtggcctcagcgctgccccgacgtcgacccgccgacctccccatcgactcccgacgccacctccctcgcctacagacccagcgcgggccacaaatgcctcgcatggcgacttcccacaaccgaactatgcgcatcacaaatctgttgtgccccacgcatcccacgcgcaaacaaacgccaccacaatagcccgcgctccgcatgtcgcggcatccaatcaccagtggccttcttcgcggacgacgatgtcgatgacctcacatgctctgttgcccatcatcatgccatcgtggaggtgtgtgtgaaggccgcctcggggaagcccgacacactcggcgactgtgagtgcttcccacccacacctctgtcggacaattccgctcggatccctagccatttcactgaccttgctttgctttgctttgctttggtatggtctggatggaactggaacctgctgccgaactggaactggaacctgctgccggcaggcccattctcgcagagggtgttgctcatggtggaggagaagaacccctacgaggtgaagctcgtcgacctcggcaacaagcccaaatggtccgtctcgctccctctcaacattctgcagcctgcacgtggtgtctcaccagtcacgactggtttggcaaagtgccacacttcatttctagaggttgttgaagccttgccagtagaagacaattccatagatgtggtgatcggcacacaggtattgtgttctgtaaataacatcgacatggcactgagagatcgttcgaatcacaccaacatgtatgggtctcattttgatttcggtaacacataa

SEQ ID NO: 147121 - DNA, 975 bp, Zea Mays
cggccggcgcctgcacggcgcccgcggctccgcgcgctcgtcctacttgccatccgtcactggacgggccacgcgactgcgatccctgccacacgagcgcaacgcgccatgggtccggcgtgccagtgagagcgggagaagctcggacatctccgtggagggacatcttctccagcgattcagcgcgggatcctgctggactggcctgatccctccgtgctggtgtcggcgagcatgcaaggaaggatgcgaggcgcgcggcggagcgcgcgcggggaatcgtcccggaaggcggcgggccgcgaggtggagccattcacgctgtgcggcgagatgtcccatctcaccagggccacgtcagagccgtgccgcagggctcgcggcgccgccttcgcccgccgggcgaggcccttctcggcgtacgagctggtgtcggcgcgggaggccggccgcgcgggcggcgccgggttctccgcggccgatcgagcctacctcggcaggcagcacatccccaccaaggggccgtggggcgtcgacgacgtggaaagcgaggcctacgtctcgcagttctccgccgatggctcgttgctcatcgcggggtttcggggaagccgcatcagagtctacgacgccgagaaagggtggaagatccacaaggatataagctgcagaagtgtgcactggacggtttcagatattgctctctcacctgaccaacgattccttgcctatgcaagtctgacacctattgttcacattgtgaatgttcagaatgctggaaaggaatcacatgctaatattactgaaattcatgagggattggatttaaccggtggtgatgaggatgaggactttggaatattttctgttaaattctccaaagatggtaaagaagttgttgttgggaacaatgaaaagtcaatatatgtttatgacctttcagcaaataaagtgtcagcccgcatccgtgctcat

SEQ ID NO: 147122 - DNA, 1056 bp, Zea Mays
cggccggcgcctgcacggcgcccgcggctccgcgcgctcgtcctacttgccatccgtcactggacgggccacgcgactgcgatccctgccacacgagcgcaacgcgccatgggtccggcgtgccagtgagagcgggagaagctcggacatctccggtatggttccactggtccaggggacaaaatctgctgccagtttctgcaattgcttgttttttttcgctgtgttttcagtggagggacatcttctccagcgattcagcgcgggatcctgctggactggcctgatccctccgtgctggtgtcggcgagcatgcaaggaaggatgcgaggcgcgcggcggagcgcgcgcggggaatcgtcccggaaggcggcgggccgcgaggtggagccattcacgctgtgcggcgagatgtcccatctcaccagggccacgtcagagccgtgccgcagggctcgcggcgccgccttcgcccgccgggcgaggcccttctcggcgtacgagctggtgtcggcgcgggaggccggccgcgcgggcggcgccgggttctccgcggccgatcgagcctacctcggcaggcagcacatccccaccaaggggccgtggggcgtcgacgacgtggaaagcgaggcctacgtctcgcagttctccgccgatggctcgttgctcatcgcggggtttcggggaagccgcatcagagtctacgacgccgagaaagggtggaagatccacaaggatataagctgcagaagtgtgcactggacggtttcagatattgctctctcacctgaccaacgattccttgcctatgcaagtctgacacctattgttcacattgtgaatgttcagaatgctggaaaggaatcacatgctaatattactgaaattcatgagggattggatttaaccggtggtgatgaggatgaggactttggaatattttctgttaaattctccaaagatggtaaagaagttgttgttgggaacaatgaaaagtcaatatatgtttatgacctttcagcaaataaagtgtcagcccgcatccgtgctcataaa

SEQ ID NO: 147123 - DNA, 612 bp, Zea Mays
agtaaatcgatatttatctcttgtacgagttgtgctaggaaaatcatttttgtgatcatttactttccactgtttctctaaggctgatgtcaatgctgttaccttcgctgatgaaactggaaacgtgttgtactctggaagtgatgatagtctctgtaaggtgtgggacaggcgttgcctttcaggggaaaagtcagcaggtattttgacaggtcatttagatggagttacatttatcgatagccgtggtgatgggcgttatttcatctccaattgcaaggatcagagaatcaaactttgggacatcaggaaaatgtcttccgtcgtgagatctcgcccagtgagtctagtggactgggactataggtggatgccatttccatcagaagctcataatcttaagcatccaggtgatcagtctgtggccacatacagaggccattcagttctgcgaacacttatccgttgctatttctcccctgtgcacaggtcaggaacagcagatatttttatttatgtcaccagcatactgaaattttcctttgaaatactttcaaaaggttacatttgttagtggaaagttgaccgttaacttgagtaggaggccttgca

SEQ ID NO: 147124 - DNA, 927 bp, Zea Mays
agtaaatcgatatttatctcttgtacgagttgtgctaggaaaatcatttttgtgatcatttactttccactgtttctctaaggctgatgtcaatgctgttaccttcgctgatgaaactggaaacgtgttgtactctggaagtgatgatagtctctgtaaggtgtgggacaggcgttgcctttcaggggaaaagtcagcagtcgcccagtgagtctagtggactgggactataggtggatgccatttccatcagaagctcataatcttaagcatccaggtgatcagtctgtggccacatacagaggccattcagttctgcgaacacttatccgttgctatttctcccctgtgcacagcacgggtcagaggtacatatacacgggatccagtgacaagtctgtacatatttatgacgtggtaaccggggaggctgtcaagaggctttcgtggcatggctccatcatcagagactgcacctggcatccatactacccaacgctcgtcagctcctcctgggacggcttcgttgcccggtgggaggcctcgggcgacgacgacgaccattcggtgctcgtcgccgacgagatgagaggaagcccttactaccggagatacggcgatcccttggtgatgtagagatgtctgcaaagtggttaacaccaaatggtagtgagcatgtactttgctttgttgtttgggaattacaactgagcagcatgtacagtgccgtttggctcatgtggttgtatagccttacgataaataatatgtagggatacagaaagaacacatgagatcgaagcgactttataaatcctatggaatttatagaaacagacaagatcctctttccttgtttttaaaaactttataaatactttttcgaattttgattggattggaatacaccgttgttggattcagaaa

SEQ ID NO: 147125 - DNA, 1060 bp, Zea Mays
agtaaatcgatatttatctcttgtacgagttgtgctaggaaaatcatttttgtgatcatttactttccactgtttctctaaggctgatgtcaatgctgttaccttcgctgatgaaactggaaacgtgttgtactctggaagtgatgatagtctctgtaaggtgtgggacaggcgttgcctttcaggggaaaagtcagcaggtattttgacaggtcatttagatggagttacatttatcgatagccgtggtgatgggcgttatttcatctccaattgcaaggatcagagaatcaaactttgggacatcaggaaaatgtcttccgtcgtgagatctcgcccagtgagtctagtggactgggactataggtggatgccatttccatcagaagctcataatcttaagcatccaggtgatcagtctgtggccacatacagaggccattcagttctgcgaacacttatccgttgctatttctcccctgtgcacagcacgggtcagaggtacatatacacgggatccagtgacaagtctgtacatatttatgacgtggtaaccggggaggctgtcaagaggctttcgtggcatggctccatcatcagagactgcacctggcatccatactacccaacgctcgtcagctcctcctgggacggcttcgttgcccggtgggaggcctcgggcgacgacgacgaccattcggtgctcgtcgccgacgagatgagaggaagcccttactaccggagatacggcgatcccttggtgatgtagagatgtctgcaaagtggttaacaccaaatggtagtgagcatgtactttgctttgttgtttgggaattacaactgagcagcatgtacagtgccgtttggctcatgtggttgtatagccttacgataaataatatgtagggatacagaaagaacacatgagatcgaagcgactttataaatcctatggaatttatagaaacagacaagatcctctttccttgtttttaaaaactttataaatactttttcgaattttgattggattggaatacaccgttgttggattcagaaa

SEQ ID NO: 147126 - DNA, 1273 bp, Zea Mays
ctgaaatttgctataggacattaaaaattattaggacactacctagtgtcttctagattttttttgacagtgtcaggcagcaataaaaaaattggacaatgccttgagcaaaattatcctgctatgtacttttaagttccatttcctttttttgcgggtctagtttctattgttttgaatttgattctgttgttttcacagtcgcccagtgagtctagtggactgggactataggtggatgccatttccatcagaagctcataatcttaagcatccaggtgatcagtctgtggccacatacagaggccattcagttctgcgaacacttatccgttgctatttctcccctgtgcacaggtcaggaacagcagatatttttatttatgtcaccagcatactgaaattttcctttgaaatactttcaaaaggttacatttgttagtggaaagttgaccgttaacttgagtaggaggccttgcagttgtgctacctgcttctaagcttgtaattagtgatatataatgaatatttggtctaatttttgtatttatctatgtaattaaggcattgcttcgccttacgctttagcgcttaaaaggtaaaaaggaggtcgataattaagatcatacatctaaaacaattatcagtgatgacatgaataatttccatgttcagttcatatcgttgtgctttctgtttcagcacgggtcagaggtacatatacacgggatccagtgacaagtctgtacatatttatgacgtggtaaccggggaggctgtcaagaggctttcgtggcatggctccatcatcagagactgcacctggcatccatactacccaacgctcgtcagctcctcctgggacggcttcgttgcccggtgggaggcctcgggcgacgacgacgaccattcggtgctcgtcgccgacgagatgagaggaagcccttactaccggagatacggcgatcccttggtgatgtagagatgtctgcaaagtggttaacaccaaatggtagtgagcatgtactttgctttgttgtttgggaattacaactgagcagcatgtacagtgccgtttggctcatgtggttgtatagccttacgataaataatatgtagggatacagaaagaacacatgagatcgaagcgactttataaatcctatggaatttatagaaacagacaagatcctctttccttgtttttaaaaactttataaatactttttcgaattttgattggattggaatacaccgttgttggattcagaaa

SEQ ID NO: 147127 - DNA, 3179 bp, Zea Mays
atggaggaactacggtgtctatctacagtcgctgaatctgatgacgctccagcagaacaggagtgcgaccacttctccctgaggggttatgttgctatgcttcagaagaaggatccaaaactttgctctcatattttccataaccagccacaatatgatgagcaccatgattcgtccccagttttggtgtcaaagtatcatcgatgggattgctcaagatgtcttgatagtgtggaagtttcaggccataggccaacatcggaaaatgtttctatgcagcagaatggaatgaatgatggctgctctatttcaattgttcggattttgcctaatagtgttgattccagaagactgttttcttgcacacagcaatcatctcaagggaatgatcgattgaccctttcaaagactgcccaagaatgcaattcaaaatgcagttctcctggcaacaaagcaattactgcgatgaatgttccagtagctgaagaaaatgttccagaggcactcgttgatacgagggttccatctatagaagttttacaggcctctcccaatagtattgatttgtcagcaaacatcttgaatgctgtctcgaagaatgtccgcgatttacctgatgatgttgaagaaaatggcacacagaatccacacagtctaaaaccttgtgtggcgccaaatgaagatgagaataacatagctaatgatgacctcaatgagcctaatgtttgtaaaccagtatctgggcacaaaagcaaacaagtctgcaacatgggtccacgccgagcatcgtcaaaaagaaatgttgaatctgatgatgccgttcaagtggaccatactaacagtgttgatctctgtgagggtggtaaaagaaaaatgcaccttgaggttggaaaaggtaatgacactactaatcagcaagtggacgaaatccagtcaagagctgtcaagaacaaggcaaaatacacaggagtagacaagttagaagatggatcctctctaatgaactggctgaaaagcactaataagaaagttagaacaaagaaaaaagactcagaacacaagaatcttgattcctcttctatttcaaggtcttacccagatatagttgcttctaatgatatgcatcatgattttctaccctcagttggggatgtgggccaggcaaatgtaccatctactaccagtgccaagcatgggaatggaaatgcacagaatgacaaactggagcaaaatatgcagaagatggatggcctgtgtgaaaatgaatctagaaacttgaaacagaggttcttctcaaatgaaaaatcaacgattttgctaaagagaaagctactgtccacttcggttgtccatgatgagaacattgagaacagtaatataaagagagatatgctcaggtcagatgatttgcctcaaatggaacctgaaggctctgtacagagatgtttggcaaaggtttctcttggtaaacaaaagatccagaatgtgtctggcctccacaagaagaatataccaaagaataagaaaggaaagcagaaggtgcacaagaaacagaatgtgatagacgacttccccatggacattgttgaacttctcgccagaaatcagcatgagagacagttgatgactgacaccaattctttggaaaactgtcatactcaacccaaggtagctcaagttgattgtgctgcatttgcagccaagggttgtcccaccaatgcatcaaatgagttcaacactaatttccaaaaatctttggcatcggaaagtaagcagaagtccttacaggatcaagcatcacccagtacagaggctgccaatgtgaatccgcaggatttacatactcagaagtcatcacagtgtcatgcagcatccagcaccagcaccgaggttccaaatggtcagcctccagaatcacaaatgcaaaattcgcttcaggttcatgtgttacccatcaaacggtctttcattgtgtacccttcaaaattacctgtccttgatgacattttggagtgtacccaagaacaacagacacaattccacagggatggaggggtcaccattgcatgtacctcacctatgttttcacatcatcaacatattgctgaagtgcctgctcggagctggaggaataacggggaaaagaagttaatgtgggattctttcaagacagcttcaagaaattcaccaacatcgtcatatggttttcaattcggaaacaggcttcaagaagttcattcatctcccagtcatgcttatggagcttctagtaactatgcagctcaccagccagtaattgtggctgtagatcagccgagaagtgttccaagcacaacatcgactatggaggctggtaggttgtatgatcgaaggattcctggacagtcaggcctctacccaaaagagcctatgcctgcaacacatcttctgagattgatggactcatcaacagctccagacttcacaaactatcaaagagctaacaggcgccagatggaacatcaaacacaaactctggattcacaatatacacagcatgatcagtataatgggtcactgagcacatcatatggaagacacataactggaaaggttccaccgacactgcaagacttatctcggcgtcaggtccagcaaaacctgcacaggcctttacgccctcatcctcgggtgggcgtgcttggttcgttgctgcagcaggatatcgcaaactggtatgaaaactgcgggccgccacagtctggatacaggctgggcgtttctaaagggacggcatcgcttgatatgaacagacatggaaactacgagaccttgaactcaggagtgttcacagcaggatggaatgcccttcaattgggttctgttagctctcttgccgatccagagtaccggttgccaaggtatggtacaggtcagccttgtacaggtggcaatgggagaacggttcacccgttggataagcttgtgcgaaaggatatctgtgtgactaacagaaacccagctgattttactgtaattagtgacatgaatgagtatatgagaagcctttgagtgtgaggcagggaggagcgttgtagttgaatacgtttagatcgataaatttcaccttatcagtgccaagcaatcatcattgatatagaggaaggctttgtcgaatcttctgcaaggtaaaaaaaaaa

SEQ ID NO: 147128 - DNA, 200 bp, Zea Mays
gatctaatgcactctagtctagcaggtgtaccagcttactgtaccaacaaaaacaattctgacttgtcagaaaaaaaatccctccgtccggagtatgtaccaaagggggtaagctatgtcatgtggttgagcaatgttggtcaactcgttctggctccgagtgttgtatagcatcagactgccctgatgaacagcctatt

SEQ ID NO: 147129 - DNA, 1113 bp, Zea Mays
atgtcgagcccgacgacgacggagcagcagcgtgtcagcttcatcgtcgacggagaggagcatgagcagcagcagaagcatgacgaccttgttagccgcgccgccgtggtggcgagggaggtgagcaagcgggtgtctcgcctggccgtcgagggaggagaaggcgacgccgaccgcaaggccaacttcgacgccggggtggcggcagcgcggcgctcgttcggtggcacgcggacgctgccgccgccgcacgcgtggctggcgatcgaggacacgaggaggaggcagaagcaacagcagcagccggaggagcacggcgacagcgacgacccggaggcggagcagtgggcgcgtctcttccggggcggcgggatgcagcagcagcagcagcaaaggcggagcagcttcagcgtggtgcggcgcgagcgcgcggcgcgggaggcgtggctggaccacgcgtgggaggcgaagcggagctggcaccagcgcaacggcggcgcccccgacgcggacacccccgtggtggtggtggtcggcacgtcgccgaggtcgtcgtcatcgtcccactcccagcatcagcaggccggtggcggggtggccatggacgtggaggaggtccgcgcgtgccgggacctcgggctggagctgccctccgactgcaccgtggagatccagtgctacgggctgtccggaggcgccggcagccccggcagcggccccgactcaccgtgcgacggcgccgactcctgccctgatgcagcaggaggaggagcggatccgatggacgtgaaggctcggctcaaggtgtgggcgcaggcggtggcgcttgcatccaccaccacccatctcgcctcatgactccatataccgccgcaacctccagctcggccgggacagcactgcactcaaacgaatcgaagcaaagtagccgagaaaacaggagtgtcgtctctagctataacgaatcaaatgtagactcccattttatatccatatacactactaagtacttactcttcgatttcgaataatgtaaacccctagtgtgagagatatctaagcgtctgtagcttgtgtgtgcaaggaattgtatcaatgtgaggttgccttttt

SEQ ID NO: 147130 - DNA, 486 bp, Zea Mays
atgccattgccatcgaccgcccagagcgctctcgtcgcggcggccgtcgccatagccaccgccatcgtcctcctccccttcccacggacgccgtcgcgggaccgcttcgccgacatggtgatggccaacggcaccatctacaccgtggaccccgcccgacccttcgccgacgccatgtccgtccgcggcggccgcgtgctccgcgtcgggacatacgagtcatctgtgtgtgggtcgtggtggctggttgcagaacgacttgctcgccgtgaaggactgcagcagttttgtaattgttaccacttaccattcgcctcctacgagctgcttttgctgcaattagcaggagtctcatttgtgttcgcgatgcagttcgagatgatggagcctaagctgtgtcagatcgcgtgcaaggttgttctgaccgagcagggagcaaaggacatcatggagaaaatccacgacgagtaccgtgtaaacatgtga

SEQ ID NO: 147131 - DNA, 2442 bp, Zea Mays
gaccgtagataaaatataagcgatactgccagaggcgcctagtcgaaataaaggactatctcagcgatttccgaaccctccccacccccacacccacccgatccaaccgagtcccggcggcgatggcggcggcggcgacgaacgccgatgtggaggtggtcgacttcgacctcgatgacgacgacctcatggacgaggacgccgggccggatccagcaccgccccccgcctcccgcctccgctccaccatcgcgggcgacgacgcgccgcgtaggaccaagggccgcggcttccgcgaggaccctaactcctccgcgacccgcgactcgcgctttggcgcggggggacgcgccgacctcgactcgcttggcggccctggacccatccagtgtacgtctacccttctctttcaatttttttctcaaagatttgcttgaaccgattattattttcttttggcaacgtagtactgaggctgaggcaagtaatacttcgttttgggtgactgaatgcctatgtagttagtatttgtgctgcctagacatattgccttctctgtgtgatttgcggatatggggtattccaacaactgaacaacctaaagatttcgcatgtatcggttagttccatggcggacttagcaaaacttgtttccgatgtggaaaagatcgatctttatcccatgtaatggatgtggaattggggctttgggcgatctagttgttgcagtgaactgttccctgttcctttccctcattattttgctgattttagtcaagttcaatgttacaacggggttcaaagagcctaaagatttcgctgattaattaattctacactgggctagtttctgcttcaagtatggactacactgattttttagggtttgtctaaggagcttcttctcaggtgataccttatcctgatattatctgcagttgaaatttcagttccctctgtgggcacgattgttcactttactcatatcacacggtactgtctgtagaacattatgttctttgttggtgtgtttatctttacgtcttttggctatgggttcttttaacacctttgaggtttttggttcttgatgtgagttggactgtcaaggcatcaatgttaaatcagcttgttagttgttagtgatgagctgagggtataatagattaaaaagttgttttaatttttttcttgtagctatgcgagagagttattttgaacttgactactgctacacaccatatttgcttctgtagttctaaagttttggtacttgtgaggttgcaattgagcttcttagcattttgttttgttgttttccttgcatcctttcagttggaaccttatacctctcttttacctctatgtgcattttaaatattgtgttcctggaaatatgaaatcttgaaactttttagttcatcatgttaattttgatgcctaggctttgctcacataacaaaatttggtagcttctaaaaaaatcagtcaccagttgaactgtgattggttggatgtgcctttataaatgtgtactctgttaatactctaggtaaaataaagcaaattgatcacattattttcaaagaacaataacttacgaagtctgaataattgtatttacggaattctttttacttctgtacaagtttcttctctatgatggtaattagttccattttgactttatatatgtatattttggtcttttgttgcagcaattgaaggatggattgtgttggtcacaggagttcacgaagaagctcaagaagatgaccttcaaaatgctttccaagaatttgggcaggtcaaaaacctgcatttgaatttggaccgccgtaccggatttgtcaaggggtacgctttgattgaatacgagaagtttgaagaagctcaggctgcaataaaagaactggatggagctgagctttataaacaaagaatgagtgttgattgggcatttagcagtggccctgctaaacgcagaaatactcggaaaaggtcaccaccaagagctcgttcaaggaccccacccaggagaaggcactgatgtttccccagcatgtcttgaactacttgctatgtgtgacagagagcaagaagtctggggattccaaatattaccttggtgtatgtggatcacctgatttcgatggtggttattaaattgcctgttgtttccttattgggattccaaatattagctttgaactctggtgtaagttgatgagacatggatgtgcacttagacgcttaccattatgtttggcatgccagttggagacgattgttggaggcgattgtatgggatcatgcttttggatttttgacgagtgatgagttgatgttggatttttatgtttctgtgtacctgtactatggtgtgttacctttcctcattctgtagtcgctcaagaaatgtttttgttgtcgctcaagaaa

SEQ ID NO: 147132 - DNA, 968 bp, Zea Mays
gaccgtagataaaatataagcgatactgccagaggcgcctagtcgaaataaaggactatctcagcgatttccgaaccctccccacccccacacccacccgatccaaccgagtcccggcggcgatggcggcggcggcgacgaacgccgatgtggaggtggtcgacttcgacctcgatgacgacgacctcatggacgaggacgccgggccggatccagcaccgccccccgcctcccgcctccgctccaccatcgcgggcgacgacgcgccgcgtaggaccaagggccgcggcttccgcgaggaccctaactcctccgcgacccgcgactcgcgctttggcgcggggggacgcgccgacctcgactcgcttggcggccctggacccatccagtcaattgaaggatggattgtgttggtcacaggagttcacgaagaagctcaagaagatgaccttcaaaatgctttccaagaatttgggcaggtcaaaaacctgcatttgaatttggaccgccgtaccggatttgtcaaggtcaccaccaagagctcgttcaaggaccccacccaggagaaggcactgatgtttccccagcatgtcttgaactacttgctatgtgtgacagagagcaagaagtctggggattccaaatattaccttggtgtatgtggatcacctgatttcgatggtggttattaaattgcctgttgtttccttattgggattccaaatattagctttgaactctggtgtaagttgatgagacatggatgtgcacttagacgcttaccattatgtttggcatgccagttggagacgattgttggaggcgattgtatgggatcatgcttttggatttttgacgagtgatgagttgatgttggatttttatgtttctgtgtacctgtactatggtgtgttacctttcctcattctgtagtcgctcaagaaatgtttttgttgtcgctcaagaaa

SEQ ID NO: 147133 - DNA, 1114 bp, Zea Mays
gaccgtagataaaatataagcgatactgccagaggcgcctagtcgaaataaaggactatctcagcgatttccgaaccctccccacccccacacccacccgatccaaccgagtcccggcggcgatggcggcggcggcgacgaacgccgatgtggaggtggtcgacttcgacctcgatgacgacgacctcatggacgaggacgccgggccggatccagcaccgccccccgcctcccgcctccgctccaccatcgcgggcgacgacgcgccgcgtaggaccaagggccgcggcttccgcgaggaccctaactcctccgcgacccgcgactcgcgctttggcgcggggggacgcgccgacctcgactcgcttggcggccctggacccatccagtcaattgaaggatggattgtgttggtcacaggagttcacgaagaagctcaagaagatgaccttcaaaatgctttccaagaatttgggcaggtcaaaaacctgcatttgaatttggaccgccgtaccggatttgtcaaggggtacgctttgattgaatacgagaagtttgaagaagctcaggctgcaataaaagaactggatggagctgagctttataaacaaagaatgagtgttgattgggcatttagcagtggccctgctaaacgcagaaatactcggaaaaggtcaccaccaagagctcgttcaaggaccccacccaggagaaggcactgatgtttccccagcatgtcttgaactacttgctatgtgtgacagagagcaagaagtctggggattccaaatattaccttggtgtatgtggatcacctgatttcgatggtggttattaaattgcctgttgtttccttattgggattccaaatattagctttgaactctggtgtaagttgatgagacatggatgtgcacttagacgcttaccattatgtttggcatgccagttggagacgattgttggaggcgattgtatgggatcatgcttttggatttttgacgagtgatgagttgatgttggatttttatgtttctgtgtacctgtactatggtgtgttacctttcctcattctgtagtcgctcaagaaatgtttttgttgtcgctcaagaaa

SEQ ID NO: 147134 - DNA, 824 bp, Zea Mays
gaaagatagctgtcatagtaatatcaatatggatctactatttatgttggaaaacacccaagttatgttgttagcagagtcactgagatactaatgacaactattaacatcgtgactctaaaaacagcgctcttgggcctgtattctcttttttccttttcttgggtgctttttgagcaccttgtttttggtcttttctagacctttttcctgatttcttaatataatgatacgtggttctcccacgtgttcgagaaaaaaaacaacgctcttgttagtagaaacaggtccaagcattggattcaatgaaactacactatagctctgctacatttaataacccctgatgaattcacatagaaatacgaattattagcacaaagaggaatacagcattctgaactgatacctcaccatgacaccttgggagaactttaatttatttctttgacatgtatcatagggtacatcagcagtagcctaaagctggtgttaataccgtttaccttattaattctgggctacaagagacaagaaaatggtgtactttagaccattttcccgttcatattatgcatattttttccccattaccttccatcagtgatacttcgtaatatgcagtatttgagcacagaaccagtcagactgtctttccccattacccatcaccagttctaattaataagatgtcagacaaagcgcttgcatgatccagagatctgttttgccttaattttttgctatgattgccttcagtttggtcaagcactcacagttgcccttatttttttaaatgtatggtgatctgcaacattaaaatt

SEQ ID NO: 147135 - DNA, 1047 bp, Zea Mays
atgtcagacgacgcgccatcgcgcctccaccaccccgaccctgaccccgaactcgccgtcgcaacaggccaagacgcagcagtagaagcaccaccaccaccaccaccggcacacgaccccggcggcagcgagtgccggttctgcgagatgacgcggcagcaccagccgcagtgcgcgcggcggctgccgaagcgcatcatcctggtgcggcacggcgagagccagggcaacctggacatgtcggcctacaccaccacgcccgactaccgcatcccgctgacggcgctgggcgcggagcaggcgcgcgccgcggggcagcgcatccgcgacgtggtggcgggcagcggcaactggaaggtctacttctacgtgtccccctacgcgcgcacccgcgccacgctgcgcgagatcggccgcgccttcccgcgggaccgcgtcatcggcgcccgcgaggagtgccgcgtccgggagcaggacttcggcaacttccaggtggaggagcgcatgcgcgccgtcaaggagacgcgccagcgcttcggccgcttcttcttccgcttcccagagggcgagtccgccgccgacgtcttcgaccgcgtcgccagcttccttgagtcgctgtggcgggacatcgacatggggcggctggaccaggaccccagctgcgagacgaacctggtgatcgtctcccacggcctcacctcgcgggtgttcctgatgaagtggttcaagtggacggtggcccagttcgagcgcctcaacaacttcgacaactgcgagttcagggtcatgcagctgggccccggcggggagtactccctcctcgtccaccacacccaggaggagctccagcagtggggcatgtcgccggagatgatcgccgaccagcagtggcgcgcctccgccaaccgccgctgctgggccgaggagtgctcctccttcatcgacaccttcttcgaggagccctacggctcgtcggagacctcctcctcggacgaagacgaagcagaggacaaggaggaggagaccaagctgctggagcaactataa

SEQ ID NO: 147136 - DNA, 1401 bp, Zea Mays
gtgagaaaaggagaggagaacgaggtctgcttcatccacagccgtgggtccgcgttctcgttgtcgttcggagcgcgagctcgaccctaggagctttgtcgtggtctctggaactcgggtgtggcggtgtctggctcagagaatccttggcgcgcggcggattgctcgccgtcgttgcgcacgtcgcgaatcccgcacctcactgtggacagagagctcaactagtcgaacataggtaatgacccgcctactagctccgctttcctgtcctcttcatgtagctccgtccgatttggttttggtgctcgggggaggccgatcggcgtctcgcctgcgtgctccaccgtgtgagaatggcggcggcgccgctgctcgaggttggtggggaagaaatggtgcggttcgtggatctctgcttggacggtttagattagcggggaggcgatacacgcgaaccgttggatcgatggcgtgcttctacgattaggtttatacgatacccctttgtagattccatcagagccgttgatcgggaaataggtgatagggatcagaccgggggcgtggtcgagtgtcaggcgtagatctcagatcctagggtatgttgcacataccgattccagctctaatctggaccatagggtgcagatcgggcagccgaggaaagaacctaccccttcggcccttcgccgcgacaaattttataaagagcccctcaagtctttctaaataaacccgccatcccctctggtgtaaatgtaatgacatataggtccaaaggtttacgaaacagaccccaactttctagaaaatcgtacccacagtatatataaggtttggtattcataaagtaaatctgaaaattgatttgcaacacacaaaaaatcctaaacatagataatccatatctaattcgttttaactccgatttgacccgttcaagttgcgttgaactcatattagtgttgtctacactttagtaaccttattttatcctataatatgtcataaaaatagttaactaattttgttgggtctatgctagaagggaaggtgttttttagaccttcggcgctccgaagcttaagagacttttttcacggatcaagctcgttacgaaaaacgatctagcaccgcgaaaggggctactgttgggtctatgcttcgtcgccgaaggtcttataggaagaagcggtcttcggctgaagctgtttgtataagatggccgaaggttcctcttcgtgaagcttcggtattacaaaccgacttaaagatagaatgacctcttagtccataaaggtctgagtcaatgttgtaagcttttataaggggcatacttgtaattcctcacaggctgcgtcctgtgcctataaatagtgaacagtattcctttactggaca

SEQ ID NO: 147137 - DNA, 300 bp, Zea Mays
atggcggtagggctgccgctcaagatggccggcttctgtgtcgtctgggcgctcttttggctcgccggctccgccaccgtgagcacgagcaccaccgccttcgccggcggcgaggcaatggtcgtggactcgcggtccgccgtcgccgtcaccgacgacgacttcgtctgcgccatattggactggtggccgccggagaagtgcgactacggcacctgcagctgggggcagtggcggaggacgccagaaaatttaggtgttgccaacgcaacgaagaataaaattgatgacatagtttaa

SEQ ID NO: 147138 - DNA, 2806 bp, Zea Mays
ctgaaaagcaagaagaaaaaaaggacaacactttggtctgacgcataaaatcttgcaggtgacaaagaaaatgagatgcacatgcacggaacgaacagcagctaagacaaggagtcttaattagcaacagatgaaaggtggacaagaggcctcttcccaactgtgtgctctgccgtgcatggagcacccgtgacacagaagtagctgcggaaaagagagagagagagggagagagagagagagaaaaccggctgctaaatgtcacagtcacttaccatggcagcaagagcatcaatccgtgtcctaataacatgaactctggtctttcaaaaaaaaataaataacatggactctgaatatggacacgcgtgtttcactttcactgggcttgtgcccgaagaaacacaccgggcatgcatgggaaccggggtgcaaaggaagatggagggtggtttaatgtaacagtttcttgcacaaaggtcacgacaattaaatatcggtggaggtggctacggggctaccccaccgattttggcaccagacatagattcttaggagatgatgaggcagacgcccacacacacagccggaagcaggccaagggaagggctaaacctccatcccttggcacaagccccacaagccacaaccaccacctccacctccaccaccacctttaaaagaagggtgctaaagggctgtcctgcgaagaaaaggagaggagtgcccctagcctttccttgctttccactgaaatctcctatctgcagccatgcagttgctcaatcctggcctcagatgaagcccaaccattcattggtatataagtcgctacaacctttgcaatttcccactacttcagaacatcgtcgaagaagctctgtgctaccggagaaggtgttcgtcgtcgtgcataattatacattccgcagacctgtaagctctgtgagtttggttggagctcccaggttctgcattgcgttgagatggggaggcattcttgctgctacaagcagaagctgagaaaggggctctggtcccctgaggaggatgagaaactcatgaatcacataacaaagcatggccatggctgctggagctctgttcccaaactcgctgggcttcaaaggtgcggaaagagttgtaggctgaggtggataaactatctgaggccagacctcaagagaggggcattcgcccaagacgaagaagacctcatcatcgagctgcacgctgtcctcgggaacaggtggtctcaaattgcagcgcagctgccagggaggactgataatgagatcaagaatctatggaactcgtgcatcaagaagaagctgaggcagaaaggcattgatcccaacacccacaagccacttactgaggctgatcgcggcggtgcagctcccaccatcagcaccgagagaacctcagggtccagcgacgtcaacccatcaagcactggtcctctggggaacttgagccccctcctcagcgagacggctcaatcatcaatgctgatgcccgtgtacgacaagaatcgtgctgaaacaccaaacttggcacgccctaagctgccaccaaaggagctgttcctggagcagcttactgctggacatgagagtccatcaacctgccactcatcaggccaaactctctatttccctttccaacagcctttaggctacaacagtgagagtggcagcagcgatggggcgaatatgaattcactctggttcaaccagagtgacttcaactgcagcacaatttctacagtgatgccgccagtttcaccatcggccctctctacatcaatggggctgaatcttccacctgataatcctcgacatggaggaactggcattggaagtaccgcagtagattcattctactgggatggtactaatcctagcagcagtagcagtactgggagcagagggagcaacagtatgggatttgaaccacagagcacgagcacaattctggagaacagtgtcttcccatggacagacattggacaagaaaaagatacaagggctcacctagttgcggaacttaagtggcctgactcctttgccgagacgaccacagccatgcagaaccagagccaaacgctttatgatgatgtgatcaaggcagagagccaattcaacatagaagggatatgtgcttcttggttccagaatcagcagccacagcaacagctgcaggtagcaccagacatgtatgacaaggacttgcaaagaatgcaactatcttttgagaatatctaggcattatgttccaccacatggaagagagcagatcagaagaagcagaaactcgtaattttcagagattcgtgggcagaattatgctgaattgctcacatagatacgttaagttgatacagaaatcatcctccacagctgttcctcagttgaagagctggcaatatcaaggaatggacagccctggcattggaagttgcagcaggatgcataggaaagtatgttctagagtctcctttcctttctcttgaaaattgatgttttccttctgtacacgactgaacttttgcatatttgagtttttgttctctctggtggaaattaaataaatatagatagccataggcaaaaatgcatgtgtcggtagctctcaacgtgcaagtagccccaaactttcaactgctgccatgcatgtccatgcaaattaattattgcatgttgtatttttcatttctttcgataagttgccgacagacggcagttgtatatttgtaaaggaagaaatttgaaatattgacctgagagctactttcgtccccttc

SEQ ID NO: 147139 - DNA, 698 bp, Zea Mays
acccaaacccgtgaacccgtgggttttttaaacccgaccaaacctagtgcatattgtcattttattttataaacaaacaacaaacttgttattccttatttacttcataatttttaacaattggtgaatgtatcggtaatcggtgagagtgttgcttgcttgctattatagtttttactagcgttatatatatggtggatggataacttagtgcaaggtcacttaattatacaacttattatttgtatttcattctctctactaataatttttataccaaatcatgaactcgttgttcattacatagattttggatcatgatatcatcaatcattacgatacttattgattatgagaagataattatattggagatgaaacccgcgggtaacccatgggtacccgttaacccgatgggtacgggtttgggcaaaatctcaaacccgtcacgggtacgggttttttaatgggcatagatatttttcacgggtacgggtttgggacggcaaaacccagcgggtttgtacccgttgccatctctaatcttgccttctgtcgactggcgcaccggacagtccggtgcaccaccggacactgtccggtgcagatctccttccttatttggcgaagccgaccgttggagcctgagagccgttggcgcaccggacactgtccggtacacaccggacagtccggtg

SEQ ID NO: 147140 - DNA, 1378 bp, Zea Mays
acgacacgtaacaagtcgaaacttaggtttgaaaggagagcccatacaaagacgacttgttgttcggcccgacttaattagttaggcccataagcgtgcccgttctttttcgcgtttcacggcggcgcggacagagagccatcggcggcgcaccgaccgccggcgaagggtacagagatgaagacggttagcctcggcgcctctaggccttccactgtcaacttccgcatgccgacgagggacaacctcgtgcctatacgcgtcgacgtcgaggtggacggccagcgctacagggacgccttcacctggaacccgcgagatcccgactcggagataatcagcttcgctaagcggacggccaaggacctcaagctgccggccaatttcgtcccccagatgctccagtccatccaggggcaacttgcggagttccgttcctacgaggggcaggagatgcaaatcaaagagaagattgtgcctctgaagattgacctccgagtgaacaacactgtaattagggaccaattcttatgggatatcggcaaccttgatagtgaccctgaagaatttgcgaggacactgtgtgatgatttgaatattacagaccctgaagttgggcctgcaatagctgtttccatccgtgagcagctttatgagattgctagtcagagcgtctctgttatgagagagaagcaaatgtcaaagaagggaaggcgagcaccagaattttcttcaaatagtaaagccgtgaacaatgcagtggatttgttcaagtattttggcagcaaagggagcgtcatccggaaaaggaaggaatggtacctgtatgagcctgttgttgatgtggtagctaatgacgaagacgggaaagaggaggctaataattctagcaggccgaagaaaagagccgacgaagagaaagctgcaagccttcagtccctttgaacacaagctgctgatagttctaaccaaggagggtttctcttgccaatcccagcagatgcctgcctttgacattcgtcgtaggatggcttcatcatagctacatatttgtatgtaagcggtgtgagagcgtgttattctctagagttgagttccacaagagtcttctctagagttgagttacaagcggctcttaatttctctacacaagacaaggaagaaacactagctgtagaattccaaaaggctcttaatttctcttaatttgtctacttgcataccttttggagaacctctatgttttcttggatcaccagctttaggagaaggcttctttgttgcactttttgataagagcatgttgattcttggagaaccccttccaaacatgttaactgatattatataacacaatattaaaccaaatttctatgct

SEQ ID NO: 147141 - DNA, 1108 bp, Zea Mays
cggtccggcagtgcctagctaactagcaatggcgcgccagttgttcctccatccggtcctgctggccgccgcctgcttgttggtctcggtcgtcctctgcaacgccggcgtggcgcaggcggcgtggtggtggccgaggtgggacagcctgttcccgagccgcggccagcagcagcaccacggcggctacgactaccatgacaacggcgacggcagcagcaagagccgcgtggcgtctatcgtgacgcaggagctgtacggggagatgttcaagcacaaggacgacgcggcgtgccccgcgcacggattctacacctacgcctcgttcctcgccgcggccgcgcggttcccggagttcggcggcgacggcgacctggccacgcggaagcgcgaggtggcggcgttcctggcgcaggtctcgcacgagacgaccggagggtgggcgacggcgcccgacggacccttcgcgtggggcctctgtttcaaggaggagatcacgccgcccatcgactactgcgacgccagcagcacgcagtggccgtgcgtcgccggcaagtcgtaccacggccggggccccattcagctgtcctggaacttcaactacggaccggcggggcaggcgctgggcttcgacgggctgggcagccccgacgtggtggccgccgacccggaggtggcgttcaagacggcgctgtggttctggatgacgccccgggcgcccaagccgtcgtgccacgacgtcatggtggggcggtaccggcccagcgccgcggatgttgcggccaaccggaccgcgggctacgggctcaccaccaacatcatcaacggcggcatcgagtgcggcaagagcggcgtcccgcaggtggacgaccggatcggcttcttccgggagtactgcaagctgctccgcgtcgacgtcgggactaacttggactgtgctcagcagcagccttactcttcctaattaatcagtccatcgaacgattaattgtactcctcctcctgctgctgctgctgctgcttgtctttaatttcggattttcgattcgagtcgtacgcgctgagttatcattgacaacatacgtacaataatgatgagcatgaaggg

SEQ ID NO: 147142 - DNA, 1833 bp, Zea Mays
aaccctctccctctagcgccggtggcggcgacgggcgcacgacgtctgagaccatggcgccgacgccggagccccgccgcccgtacaagcggccggccatctccgaccagcagcgccgccgggagctcgcactccaggcgcagtcggctcggcgggccgacgcccaggctcgcgcgcgcgccctcgccacttctctcctcaccacccgggcgcctaccgcggccaccagtcgcgacgaggaggaggaggagtacgagcatgaggaggaggaggaggagcgcgagctcactgcctccggcgtcgcggcggcggccgccgcctccaggctccgcggctccgaagcgcgccggtggttcgcgcgccaggttatgctccccgagtggatggtcgatgccccaccccacctcgccaccgactggcatgtttttgcccgaccttctggcaaacgatgtttggttgtgtcatccaatggcatgacgatcagcagggttcgtaatggatccatccttcatcgcttcccttccgctctgcccaatggttcaaagagagacatttctggaccagcaagctcgtactccatcctcgattgcatttttcacgagcctgatgaaacatactatatcattgatatgatctgttggcgaggctattcactatatgactgcaccgccgagttcaggtttttctgggtcaactctaagatcgcagaaacttctgctggtgatcctccatcaacgtaccacagatatagattcagtgcactccctgtatatgagtgcactcttgagggtctccaagcagcatactcaggcagcatgccttatgtcaaagatggtttggtgttctacaacaagcatgcacattatcaagctggaatcacacctcttgccctagtatggaaagatgagacctgtagccagtatgttatcgatacgaacaacaagggtgaaataccaagcgaacaacatcttgtgttggagctgctagaagatggaaaggtggttacttcagatgatcctcatgttgtgtttggtagcttggacagcgcattcatacagacgtcaaatctgcgaccagggaaccttctccgctttgctgttagagatgaaagtgtgaaactcatggatggaaagatgcatataggtcagctgcaatttgttggaaagccaaaccgagctcgtgcttttgctgacagccattcgaaagttttgttccagtatgcggcaaggcatgttcctctgagaattgaggatctggttgcctccattcaatcaaacaatatggaggttgaatccaccgatgttgaaatgcaagattaaggttgaagaggtaggctttcatgtcagcattttaacaaacgacatggtcgtctgaaaccatggttttcagggagtgcctcacggcctataaaaggtttaaacagcgcacgagttttttgtaagatgaacattctgaacattgccatccacgtgaatgtgactggtataggagtagcgcaactcaatgtgtgaagtgcccgtttgctctgagtttggcgatttcaatcgctgaaatttggccccaaggaaaaagtggtgtgtctacgtatcggatttctccgtgtttgatgatgaccctgactcccaatggggacatataaatctaagtgccctttaaaaaaaatatatttagcacatcaatgtggtagctgtgagtttctctcttggtttattgcagatgcaaaaacggttgcgtcagtcagttgtacatatagtttactagtcatgtgcaggttgttaagattcccatttatacttgaatagagtataaaatacaaagacatgtgttttggtg

SEQ ID NO: 147143 - DNA, 1542 bp, Zea Mays
aatatgggctgggctgcggggttatgcagttgacagagcgtgcctgcccagcgtgctggcggctggcccgcgcgacttgcaagtctagacgtgggccagctcggtgctaaagagaagattaccgttgcgacaatgccaccccttccctgcctactctactcccggtaccggagctatccaattcccttcccacccagaccgcgatccctaaccctacccaatgtcctcgccgccgccggcttcgcccatggccgccgagaacgaggcctgcgactgggcggagatgccgtcggacgcgctcgcggccgtgttcgcgaagctggacgtggccgagatcctgtccggcgccgggctggtctgccgctcgtggcgccgtctcgcggcctcggaccctacgctgtggcgccgcgtcgacatgtgctaccagggggaccagctgcagaccgaggaggtcgaggccatggcgcgcgccgcggtcgaccgctccgcgggcaccatggaggcgttctgtgccgagaccttcgtcaacgacgacctgctccgctacatctctcagagggccccctcattgaagagcctccatctctgcctgtgccattacgtcactaatcaaggttttgcagaggcagttaattgcttccctcagctcgaggagctagacattacattctgctcattgtatggcatcgtgtgtgagactgctgggagagcctgcccgcagcttaaatgcttcaggttgaatgagcgctggtctattcttcaaagcgagtttgcaccctacgagggcatggatgatgacacggaagcattagggatcgctagcaccatgcctgggctccaagaacttcagttgatcggtaacaacctgaccaacgacggactcgtggcaatccttgaccgttgccctcgccttgaatcccttgacattcgccaatgctacaacatacagatggacgacgcgctgagatcgaaatgcgctaggatacgatatctgaagcttcctcacgactccatctccgacttcaagtatcgggcttacatcgtcagcagcatagccaactcgggctctgattttgaggttgatatgtatgatgatctgctggatgtggtcactgaagatgatgatgctgatttcgatgacatggatgatttcgatgatacagtctcagatggaggcatgtacgatgatgacttggatatctgaaattaggaatcggttcaaacagcttttccgtggaccatgtaagtgctgttagctggaatggtttcccatcccttttctttgagattcgggtagctatgatggaatctccctgatgttcatacttctgcgcctctccatttgttaagaagctggagtagctgaactggttttaatcgatgtacaactgttgtttttttattctgaacctttgttaattggtattttaataataacctagggcaaaaaatgtgtatatatacctcctggccatgttagggatgtgtctagatgtttctatgcattatgcatgtgacaaatttcaatttttttgacttcct

SEQ ID NO: 147144 - DNA, 1042 bp, Zea Mays
gtaaccatttttggcaacttttgtagcacaagtttttatgctgcatgttatgatcttagaaatcagcttgggtctgagacctgattatttggattgactaaaaacaagctcatccagatttaccaactctgatgcagggccccctcattgaagagcctccatctctgcctgtgccattacgtcactaatcaaggttttgcagaggcagttaattgcttccctcagctcgaggagctagacattacattctgctcattgtatggcatcgtgtgtgagactgctgggagagcctgcccgcagcttaaatgcttcaggttgaatgagcgctggtctattcttcaaagcgagtttgcaccctacgagggcatggatgatgacacggaagcattagggatcgctagcaccatgcctgggctccaagaacttcagttgatcggtaacaacctgaccaacgacggactcgtggcaatccttgaccgttgccctcgccttgaatcccttgacattcgccaatgctacaacatacagatggacgacgcgctgagatcgaaatgcgctaggatacgatatctgaagcttcctcacgactccatctccgacttcaagtatcgggcttacatcgtcagcagcatagccaactcgggctctgattttgaggttgatatgtatgatgatctgctggatgtggtcactgaagatgatgatgctgatttcgatgacatggatgatttcgatgatacagtctcagatggaggcatgtacgatgatgacttggatatctgaaattaggaatcggttcaaacagcttttccgtggaccatgtaagtgctgttagctggaatggtttcccatcccttttctttgagattcgggtagctatgatggaatctccctgatgttcatacttctgcgcctctccatttgttaagaagctggagtagctgaactggttttaatcgatgtacaactgttgtttttttattctgaacctttgttaattggtattttaataataacctagggcaaaaaatgtgtatatata

SEQ ID NO: 147145 - DNA, 498 bp, Zea Mays
agaatatttcttttagagtagaaatttagagtagaatgagtgcggatagcctaaaactttagcgtacgatagagtgcggatagccgtggcaggccacgcaggacatgcgctgcggcgccgtgccacagaggatccatgtcagcacgtggcggcgcacgggcccccgacggaaaaatttggaccttgccgcgcgccacacgcggggcccacatgccagcactccgatttcaaacccaaacccaagccagcgtttctatcccgggatcctcgttttgtttcccttcccccacccttcctcttcctccctatctatcagcactgctcgccggcgccgcctctgcaaaaggctcacttttgcctccggaacccagcggaatccgccggcggaccggaaacactcgctcgcccccctcaccccctgtctgcccggccgtcggagcgcgtcgcctccgggcgtgcagcagcagatccgtggaggtggaacccgggaaggaggag

SEQ ID NO: 147146 - DNA, 1551 bp, Zea Mays
tttttaatctttgcagccaaagctactgattgccttgtcctgaccagcgaaagagggatctttgggaggcaatcagaggtgttcggtttggtcaaacaaagctcagctctcttgggatgcttgctgcgagctgcttgtgttcatacttgagagaataaaacagtgcatcatcttgctgtcttgtccttcgtgattggaagagaaaacgtgctgctgttcttgctatgtctgtctcggagaaggtggcgccatcgaagtcatcagtttcttcgtcgtcagatttggatccgctgctgaaggatctcacggagaagaagttgacctttaggaggaacgtggtgtcattggcagctgagctcaaggatgcgaggaacaagcttgcctcccaggagcagctgtttgtaaaggaatctcaaactagaaaggttgttgagacaaaggcaaggagcatggaagaggaagtaagcaagctgcagaaatgcttgcaggacaaggatgagcaactgcgttcatccgcaagtagcacggaacagtacctccatgagttggatgatcttagaacacaactgtcaattactcaagctacagcagaagcgagtgctgcatcagccaagtcagctcaggtgcagtgcttgtcattgctgaaagagctgaatgagaaggacatctcgctcaaagagcatgagcttcgagtgaacaagctaggtgagcagctcgatcttctccagaaggatctacaagcaagggagctctcacaaatgcaacttaaggatgaagttctaagaattgagaccgacatcatggatgcaattgccaaagctgggtctaggtctgacaaagacaatgagcttttaaagatcttatctgacgtttcaccaaggaatgtccagaacctcaacagccttttgaatgctaagaatacagaaattgcgaggttgagagaggaaatcagaatattatctgctcactggacgaacaaaaccaaggaacttgaatcacagttagaaaagcagcgaagaactgatcaggagctgaagaagagggtcctgaagcttgaattttgccttcaagaatctcagtcccagatgcgaaaattaaagaggatgggggagaaaagagacaaggctctcaaggagctcatggaccaggtggccatgaagcagcccaacagcatgtgccatggaaacaaggataatttctgggagagccagggcttcaggttcattgcctctatgtcgatgctggcgctagtgatcctcgcaaagcgttgaagcggcatagtttaagcagatgtgaatgtagcgtttacattagcttgtaggcttgggcagttgtgcatactgcatgccaaaatttgccgacatccaatcctagtctgtaaactgtaaaaatagttgtggcctgtaatccgtagcgcagtttctgctagttcatgtaaacccatataagctgtcttgtagtcacagctagtgaatgtcagctcatgtagtcaagaatctacaaccttataatttcagttccagaactgcttgagcagttgtcacatgtaac

SEQ ID NO: 147147 - DNA, 1633 bp, Zea Mays
ggccagcgcgcggccgggaccggcgtgcgctgcggccgggtcggatctgagacgagacgagttaccatctcatcccaactccggaacgaacaagttaccatctcatcccaactccgcctcgaccggatctcgtcggactcggatccgcccgaccaccccgcgccgccgcagatcaaagaagatggcagctgtcgacacattcctcttcacctcggagtctgtgaacgagggacaccctgacaagctctgtgaccaggtctcagatgccgttcttgacgcttgccttgctgaggaccctgacagcaaggttgcttgtgagacctgcaccaagaccaacatggtcatggtctttggtgagatcaccaccaaggccaatgttgactacgagaagattgtcagggagacctgccgcaacattggttttgtgtcaaacgatgttgggcttgacgccgaccactgcaaggtgctcgtgaacattgagcagcagtcccctgatattgctcagggtgtgcatggccacttcaccaagcgccccgaggagattggagctggtgaccagggacacatgttcgggtatgcgaccgatgagacccctgagttgatgcccctcagccatgtccttgccaccaagctaggtgctcgtctcaccgaggtccgcaagaacggaacctgcccctggctcaggcctgatgggaagacccaggtgacagtcgagtaccgcaatgagggtggtgccatggtccccatccgtgtccacaccgtcctcatctccacccagcacgacgagacagtgaccaatgatgagatcgctgctgacctgaaggagcatgtcatcaagcctgtcatccctgagcagtaccttgacgagaagaccatcttccaccttaacccatctggccgctttgtcattggtggacctcacggcgatgctggcctcactggccgcaagatcatcattgacacctacggtggctggggagcccatggtggtggcgctttctccggcaaggacccaaccaaggttgaccgcagcggagcctatgtcgcaaggcaggctgccaagagcatcgtcgccagcggccttgctcgccgcgccatcgtccaggtgtcttacgccatcggcgtgcccgagcctctctccgtgttcgtcgacacgtacggcaccggcgcgatccccgacaaggagatcctcaagattgtcaaggagaacttcgatttcaggcctggcatgatcatcatcaaccttgacctcaagaaaggcggcaacgggcgctacctcaagacggcggcctacggccactttggaagggacgaccctgacttcacctgggaggtggtgaagccactcaagtcggagaaaccttctgcctaaggcggcctttttttcagtaagaagcttttggtggtctgctgtgcttaatcatgcttttatatggcttctacatgttgtggttctttcttgatctgcaccgcgcttatcgtttgtgttgtactgccctaataagtggtgcttatgaggactgtttctggttttgctgcttatgttgtaatgctttgaaacaatgaaagaagctacaggccacagctattttgagaagtaatggaacctcgtgccgttttgattatatcgcaa

SEQ ID NO: 147148 - DNA, 1534 bp, Zea Mays
catgcagttcatttggttatgaggattgtcatttttgccttagccattttgtgcgtatctaacatttgtattgtccgctgcagatcaaagaagatggcagctgtcgacacattcctcttcacctcggagtctgtgaacgagggacaccctgacaagctctgtgaccaggtctcagatgccgttcttgacgcttgccttgctgaggaccctgacagcaaggttgcttgtgagacctgcaccaagaccaacatggtcatggtctttggtgagatcaccaccaaggccaatgttgactacgagaagattgtcagggagacctgccgcaacattggttttgtgtcaaacgatgttgggcttgacgccgaccactgcaaggtgctcgtgaacattgagcagcagtcccctgatattgctcagggtgtgcatggccacttcaccaagcgccccgaggagattggagctggtgaccagggacacatgttcgggtatgcgaccgatgagacccctgagttgatgcccctcagccatgtccttgccaccaagctaggtgctcgtctcaccgaggtccgcaagaacggaacctgcccctggctcaggcctgatgggaagacccaggtgacagtcgagtaccgcaatgagggtggtgccatggtccccatccgtgtccacaccgtcctcatctccacccagcacgacgagacagtgaccaatgatgagatcgctgctgacctgaaggagcatgtcatcaagcctgtcatccctgagcagtaccttgacgagaagaccatcttccaccttaacccatctggccgctttgtcattggtggacctcacggcgatgctggcctcactggccgcaagatcatcattgacacctacggtggctggggagcccatggtggtggcgctttctccggcaaggacccaaccaaggttgaccgcagcggagcctatgtcgcaaggcaggctgccaagagcatcgtcgccagcggccttgctcgccgcgccatcgtccaggtgtcttacgccatcggcgtgcccgagcctctctccgtgttcgtcgacacgtacggcaccggcgcgatccccgacaaggagatcctcaagattgtcaaggagaacttcgatttcaggcctggcatgatcatcatcaaccttgacctcaagaaaggcggcaacgggcgctacctcaagacggcggcctacggccactttggaagggacgaccctgacttcacctgggaggtggtgaagccactcaagtcggagaaaccttctgcctaaggcggcctttttttcagtaagaagcttttggtggtctgctgtgcttaatcatgcttttatatggcttctacatgttgtggttctttcttgatctgcaccgcgcttatcgtttgtgttgtactgccctaataagtggtgcttatgaggactgtttctggttttgctgcttatgttgtaatgctttgaaacaatgaaagaagctacaggccacagctattttgagaagtaatggaacctcgtgccgttttga

SEQ ID NO: 147149 - DNA, 473 bp, Zea Mays
atggcagatggatcaagaggagaggaggaagcagggcggcatatcgagaggggcgctgcgcggcggcgagttctccttcttattggcgaaaaggaagttctccggcttgaggtcacggtggatgacgtcgtgccgatggcagaaatggacgacctcgacgatggtgcgagtgacattggtggcggcgcgctcggtgtagtgcccccgcgcgacgatgcggtcgaagaactcgccgccctcgcagagctccatgacgaggtggatgcggggaagtgcgaggagctgacgtcctcccgcgcgacggcgaccggcgagcggcatcagtttcccatggccgcccgagatcgaaaggcatggcgagaggctagggttggagcggcatttggggcgctggggtggccgcgggtgggcggcgcggtgctgcgcgcggcggtgggcgcgcgggtggataagagtgagagctggtgaaagtg

SEQ ID NO: 147150 - DNA, 1208 bp, Zea Mays
cacgccaccgccatcttctactccatccaaccgcgacatcatgcagctacttccactttataaatagatcagtgccatattcttcctcatcagcttcaattctcagacacacagcaaaagcaaagcagcttccatcgtccacctccaccatggggtcggcggcttggctggcaacgacagtcgtcttggcggcgctcgcggccgccgcctcctcggtggcggtggcgcacgcctggccaccaccggcggaactggaggtcggcttctacaagcactcgtgcccgcaggccgaggagatcgtgcgcaacgccgtccagcgcggcctggcccgggattcgggcgtcggcgcggggctcgtccgcatgcacttccacgactgcttcgtgcgcggctgcgacggctccatcctcctggactccatgccgggcaacgtggccgagaaggactccgtggcgaacaaccccagcatgcgcggcttcgacgtggtggacgacgccaaggccgtcctcgaggcgcactgcccgcgcaccgtctcctgcgccgacgtcgtggcgttcgcggcccacgacggcgcccacctcgccggcggcatcgactacgccgtcccctcgggccgccgcgacggccgcgtgtcccgagccgacgaggtgctcgtcgacaacgtcccggccccgaccgacgacgtcgccgagctcgtcgagagcttccggcgcaaggggctctccgccgacgacatggtcacgctctccggcgcgcacaccatcggccgctcccactgctcctccttcacgtagcgcctctacaacttcagcggccagctggggcggaccgacccgtccctcgacccggcctacgccgagcaccttaggcaccgctgcccgtggccgtccagcgacggccagatggaccccaccgtggtgcccctcgacccggtcacgccggcgaccttcgacacccagtacttcgagaacgtcctggcgcacagggtcctcttcgtctccgacagtacgctgctccacaacccctggacggccgggatcgtccacttcaacgccgcggtcgacaaggcgtggcaggtcaagttcgcccaggccatggtcaagatgggcaaggtccaggtgctcaccggcgacgagggagagatcagagagaagtgcttcgtcgtcaacccacactactagctaaccaactttctagcagttgcggct

SEQ ID NO: 147151 - DNA, 2541 bp, Zea Mays
gcttgaactcatttgcaattgcgaacgcttcttctcccagtcccagcacgcccaaccccgtcgccgccttctcgaaccttccgaagatgagccccccggccccggccgccgcggcggcggcggcgccgcgaacggtcgcctcggcggtgctccgcgtccagatggcgctcctcgacggcgccgcggtgtccagcgaggccctcatccacgcggccgcctccgcgctcctctcccgcgccgactacgacgacgtcgtcaccgagcgcaccatctcggacgtctgcggcaaccccgcgtgccccaaccctctctcctcctcctccgccgccgccacggggccccgcttccacatcgccctcagcgagcaccgcgtctacgacctcgaggaggcgcgcaagttctgctccgagcgctgcctcgtcgcctccaaggccttggccgcctcgctcccgcacgaccggccctacggggtcccgctcgaccgcctcgccgcggtcgtcgcgctcgttgagggcgccgccgcaggggacgggagcgggttagggttccagggactggatgggaatgggaaggtggaggacgggggaaggaaggtggagatcaaggagaagcaggtcgccggggctggcgaggtcttgctgcaggactgggttgggccctccgatgccattgagggttatgtgccgcgccatgaccgcagtgctcatggacaaaagccacaggttcagcagaacgaaggtgctggacctgaactgtccagaactgagaatgtggattatggtgctgctgctcctggtgaagatggcatgacaagttcaccttcattggttaaaacacacgtgagctccgaagtaatagttgagagaatgggcagcctggttcttggtgagaatacaaggacgcctagaaagaagaaaactaaaactccatcaaagatgttagagcaagaggaagataacagtatgctgtcatcttgcatatctgattccattgccaagcagcttgaggatgtagttttggaagagagaaaaggcagtcagaaaaataaaatgagtaaagcatcatcaagagcacagaagggtaagtctacaaaaaggcctgcttcgacaaacatggaggaaaatgctatgaatcagtataactacttgtcaagttctgtattggtagacaatcacccctcatcatctcaatcttcagaaaaagattcaacacaggcttactctgaacaactgtgtgaagaattcagtgaagcagtgaacattggaaatgatgagacaagtgatgaaaagatgagacctgcatggaagtcttcgttgaaagttgccgggtctaagagcagtaggcagtctgttacatgggcagatgagaatggaagtgtcctagaaacaagcaaagcatatgaaagcccttcaagtagtataaaacgacctgaggaaggcatagacaattcactaaggcgtgcatctgctgaagcgtgtgctgcagcacttgttgaggcagcagaagctatttcttcaggcacagcagaagcagaagatgcagtttcaaatgctggaatcatcattctgcctgacatgcttaaccagcaagaacatgacaatggcaaaaacagtggcggagatgatgaccctgagatagatagggatgttatcaagtggcctaagaaacctgtacttctggatacagacttgtttgaagttgatgattcttggcatgacatgcctccagaaggttttagtctaactctgtctgctttcgggacgatgtgggccgcgctattcggatggatatccagttcgtctttggcctatgtgtatgggcttgaaaggggttcagtggaggagttgttgattgccaatgggagggaatgtcctgagaagacagttctgaaggatgggctctcattggagattagaagagctctagattcttgcgtttgtaacgccgtgccagtactcatatcaaacttgaggttgcagataccggtttcaaaactggagattactctgggctacttgattgacacaatgtcgtttgttgacgccctgccttctctgcgatcgaggcagtggcaggctgtggttctggtaatgcttgacgcgctctctgtgcaccagcttcccgcccttgctccagtcttttcgaattcgaagcttgtgcaaaagatgttgaacgctgctcaggttagcagagaggagtatgactccatggtggacctgtttctaccgtttggaagatccgtccaggcgatcacgcccatgtaaacgagaagccgtgtgaatctgcattccggaagctgcgtgaatcgtagggtctgatctgatatttagttttacacaagtcgctgtctagaacgagccatgtatgtatgattgattggttatctattgagcaagatgcgctctggcaatttgtggaagctgaaatacttgcgaccatgacgcctgcctgtcagtttgcgatattctttcaggttgtgagaaattgatttgctgtcgttctcagctaaaacaacaccagtctattaaaaaacatataaaa

SEQ ID NO: 147152 - DNA, 273 bp, Zea Mays
acatcgcagttaaaggagatggtgctggctctgctggacgaatcagatttggatattgcgagcgatgctatcgagatgattattgacaggacatttgatcaggccgacacaaaaggtgatgggaagatagatcaagaagaatggactgaatatgctaaagacaatccatatgtgctgaggaatatgacccttccatacctcaaggacattactatggtattcccaagctttgtgatgcactcagaaatcaatgaaatagacatggctgtctaa

SEQ ID NO: 147153 - DNA, 2604 bp, Zea Mays
atgatgcaggctagacagaaggaagctgcaaaattagcagctgaagcacgaaaaacagcatttgaggctgctaaaaaggacgcaacagaaaaggaagcagcagaaaaggaggttgttcttagagccataggaacaaaattttctgaggactgctatagatatggaagcgaaaataatgcaagcgacgaagcccttagaaaagcagcatcactatacggaggtgctttgagaaatattgagaaagagtatgaagatttcaacagaattttatcttctcagtttgaggctgcacgggacggccgttcagacttgattgaggctggacaaagagaaacaattcatatgcttgcagatcgtcgtaccattgaaaaatcagttcctgaaacacaaggacatgcattcacactgactaagccgaaagagacagacagaacaagctgtaaaagaatgagtttactttcaaaaattgcatgcaacagaagtggtcccctggaagatgctcgtggtcttgcacatcgctatagcaggatgagacatgaagcaaaaaaatatatgctcatgaggcttttcattggggaaccactctggaccccattaaaccgccctcaggaggaccacccggcgaggcaagagtatgtcaagaatcaaatagaaagaagaaatatagccagcaaatataatttccacttgtgttgttgccagcaaatagaaagaagaaatataacagggcaggggtacaagaattggagttccacccaagcgccagaggatgtcgtggagttcacgggtgtcgttgacggggtcgaggacatggacaacagggatgacagtaggtcgaacatctcccaccacgacagggggtggactacggcctcgcgccagccatcccgcgctccagctatcgcgcccagccagccgccatcgcgccaggagccaccatcgcgccagacgacgccgactgccctccaggctccagtggagatgccaagaggaaggaggaagcagaccgttgaaagcaatgaggagtatctatcagaggaccatgtagggcaaaaaaaattacagaaaactcttgcacatgaatcagataccgagatggaagaagaatcgtttgccgtaggtggacatgatcaaagtggtgaggtttctgaaatggagcctaattcaaagaacccaactgatatggatgcagacattgaggttgaagacgaagagacaaatgtggaggtgaaaaggcggggtaagacaaaactattacaggtctggaacattcctagagggcataggattgtagtacaatgtaatgaacttgaccagccaattggagaagaggcaggaatcatgggaaaattccttggcatggtagccaggaatggaaacttgtgtagcttaagctacaaggattggaggcttttgataggtaagaaagagagattgactaatgagcagaaaaataaggaggatatacttaagcaagtaaagaggagattcctttatcctgctcgtatggaaaaatgggtactaaaaaccattggagagagatggaggcaacataaatctaacttaaaatccatatattatgatgcacataagggtttggaagctaattacaacaacgttccacctggggtaattgcggatcagtggattgcacttgtgaatcattgggtgaccacaaaagcaaatgttcatggctacctttacattaatcagttatcttgtgcaacttgtcagttgcgattacattatctatgtaatcattttatggaactgttagcagagcatccagaatttgcagacactagccaaggaaagattgcatggaatggagatgcactaaacaagatattaggagaagagaagcctggtcatggatgtttcgacgatcttccagcgaatcaatttccaacgtcttcaaaacgtaaacgtgtatatgttgagccacaaaatcaagaattcaggatggacaatgaaaaaacttactctcagagagagcaagaggcaaaggagtacgaggatttgcaacaaacattcagaaaaacttctactatccataaggtcctctgctacctcataactcatctttctagatttcatggtataatgcaaacattaataatatgtattgaattaaagaagattaaggtggctgatactaggcaaggtaaattacaacgaactgatagactacccactacccataagacaaggcaatttgagttggaaagagacattaccttcgataatactaagctcgctaattcatcgaagagtatgaccaaggaaccaacttctacttccttaaatgaagaagcatctaagaaccaggtaaaaaggaaagatatgcaatctgcaactacctttgataaaaccaagtgtgctaccacatcaaagactggagcacaagtgttcttaaaaagctggagatgtccaaccaagactgttgccttaggcacagtacttggtcgagacccaaatcataaagttggaggtgttaagttaggcagagaattttggatggtgcgtgttagacttgtaatactgcctattgagcctttgattcgaccatacgacaacatggagattgaagacgacaaaaactga

SEQ ID NO: 147154 - DNA, 707 bp, Zea Mays
gaacaacatagaatgcattggcttgtactgtttgaagttaataaagccttctcttcactgaaatacatcttttaactgttagacattgcaatgatatcccatgattagatacagtcatgtaaaacacacatctagaagcccttcagtaaatactgccattttctttaccttcaaattttatatattgttgactcttgccacttgttaccttatttttctgggggatgaacaagagatagaagaacttatggtcggccttgaaacctacctggttctacaatgtcctgtcaaaatataccagacatttccaaatctagattatttaaacattttccagtgtcttatgttcttgagtcagcttaaaagtgttgcaagcatcttggacaagcttatttctggaagcaaggatgacgctctccttgcgtaccaaactgcttttgatcttgctgaaaatgaaaaccaggctttcctcctaaatgtgcggaatcaccttgatgcattgagttcacatacttctgcccatgtgtaccctgcgagcagactggttgtacaaagtaatcaaactaatgctgctacagaaccatctgaggatgtccagatgagggatgacataaccatgccaaatgacagtgctgccactatggatccaaatgcagcaacacatcctgataggctgacaaatcaagggtatattgtcaggagagaca

SEQ ID NO: 147155 - DNA, 3645 bp, Zea Mays
ttcttttgtttttctgtttttaggcatggcagccactggcacaatatatagcctaacgtgtctcttcgtggccgaggctagctgcagggttggcgttcggccggccgtacgcaccgtacggcggcgcggcgccttccttccctaccctacaacgacgatcgacgatgtgctagccaccccgaccgacacatccatccagcggtgcccaccatggcccgccgccgccgcctctcggcgtcctcgttgccagaggcggctggtgccattcccagtgcgttgcctcccgagctccggtggcctttcgcgcgcctcgaggccctcacccaggacgagctccgggaatccgtctacgagatcttcttctgcgcctgccgctccgctcccggcggcggcacacgcccatctgccgccgccagaggcagcaggggaggcgcggcgaccccaacgagaccaccaccggaggtgtcgtctcctacctccggtggagcaaagaacatggcggtgacgagccgcctgaagcgcgcgctcggcctgcgcgcgaggaacacgaggcccacggtgggggcgggcgggcgccccttgacgtcggcggagatcatgcggcggcagatgggggtgagcgagcagaccgacgcccgtctccgcaagaccctcgtgcgctccctcgtcgggccccagatgtccaggaaggtggactccctcgtgctccccctggagctcctccgccacctcaaacccgccgactttttcgacgccggcgagcaccgcgcgtggcagctccgccagctcagggtcctcgaggcaggcctcgtctcccacccctccgtgccgctcgaccgcggcaacgcctcggcgtccgctctccgggacacggtccggtccgccgagctgcagacgcggcccgtcctcgacgcgcgcgccctgtctgccgtcgtggcggcgctgtgccggcggtccgtggacgcctgccgctgggccgacggctaccccctcaacgtgcacctgtacctgaccctcctccgcgccgtgttcgacgccagggacgagacggtggtgctggacgaggtcgacgagctcatggagctcatcaggaagacgtggaacgtccttggtctcaacgacaccatccacaacgtctgcttcacgtggctattcttggagaagtacgtgacgaccggggagacggagccggacctgctgtccgcggcgctggcgatgctcgagcaggtccgcgacgacgcccggagacaggccgaggccggcacgctggaggcggcgcacctcagggtcttgtcggcgactctggcgtccatgcactcgtgggcggaagaaaagctgctggattatcacgagtcgtttggtgacgaccaaggagctggtggctccattggtgccatggagaatgccgtgtcccttgctgtcttggcggcagcgatgctcagccaggacgtgccgtcgtctttcgcagtggcggtggcggctgccggcggcgatctctcgtcagctagatcgccttcgtcattctcagccagggagagggagatagtggaacggtatatcaagtcgtcggtgaggcgtgctttcaccaggctgcacgaaaccggcaccgccgagaagatggacagcatgatcgtggaggtggacgaggacccttgcgagaccctgatgtatgtggcgtcgcagaccaaggagctggcaaggctggaaaaagaggtgtacgaccgcgttgtccggcagtggcacccgtgcccgacggccgtggccgccgccaccctccacggttgcttcggcgcgctcttgaagcggtacgtgtccagaatggcggcgtgcggcctgagcagcgagactgtgcgcgtcctgcacgcggcctctaagctggacaagtggttgctacagatggccagcgaggacgacccgccgccagaccagccgccgatgaccccctacgacgtggactccatcatctttggcctggtcaagggctggatggacgagcggctcaaggtaggggacgagtgcttgagaagggcccaggaggcagagacctggaacccgaggtccaaggccgagccgtacgcacagtctgcggtggatctgatgaagctggccaaggtcaccgtggatgagatgctggagatccaggtggcgtcggcctgcaaagaggagctgctgcaacgccttgttgacggcatcgatcacctcgtccaccagtacgctatgctgcttgcctcgtgtgggtccaaggacagctacgttccacctctgccgacattgacgcggtgcaaccaggactccaagctcgtgcagctctggaagaaggcggcgccgccgtgccaggtgggcgacctggaggctctcgactgcggcaggatcgacattgtcacgagcagcaagaagcccaggctggaggcgagccggtcgggacgaggagagcgagaccacgcggtgcgccccgccaccagccgcggcacgcagcggctctacgtgcgcctcaacacgctccactacctcctcgccgtcctgcacagcatcgacagggcgctctcctcctcccagctgcaggccccgcagcggcgccgcctcgcgaggagctcggccttcggccacgcccgccccgccctcgacgcggccgtccaccacgtgtccgagctcgccgcgtaccgcctcgtcttcctcgactccgcccagtttttccaccaggcgctgtacctggggggcgtcaccgccgcccccgctcggcccacgctccgcctcatgaagcagaacctcgcgttcctctccagcgtcctcaccgagcaggcccagctgccggccgtgctcgaggtgatgagggcctccgtggaggccttcctgacggtcgtcctcgctggcggcagcgggcgggccttcgcccgcggggaccacgccgccgtggccgcggacttcgcgagcttgaagcgcctgttctgcagtttcggggtgggggaggaggcggtcgagagggagacggtgcgggcggaaggggtgctggcgctcatggccgttccgacggaacagctcatccatgagttgctcggccactatgcttccactccgatgagagcggcgggtgacgagttaccgcagctgccgatgatgccgatgacgcccacggcgagacgctggagccggtccgacgccaacaccgtgctccgcgtgctgtgctaccgagacgatgagcctgccaacagattcttgaagaaaacctttaatctgcccaagaggaggtagccgattacgcagttctatcgccggcccataggatcggattggatctatcattcgcgacccaaagggcctgttcgtttctgttgggtttcacaaaaattattccggctaattaaaccttatataaattagacaagcaatctacataggaattgttccgagtgttcaattctctggaaccgaacaaggcctaatactttttttgaaagcacgttcttattatacacatgtaacaggaaagcacgtagacggtggtgtaggtttggtgaggtgagaaacgggaggtcttgccttcctattgatttttcatcgatctgtgttgtttttatttacgccattggccgacattatttaatgatgtcatgagccatgtggtatacatgagcatgcatctccacc

SEQ ID NO: 147156 - DNA, 1534 bp, Zea Mays
ctggatgcttccttccacccgacccatcccatcccatacagccccgggacgtacggtgatcggtgaccccaccccaccccacggccacgccacacctcctctccacctcctcgtcctcgatccccaagcagtcagtcttcctcttccctcccctcctcccgttaggtaggctggcgagccgccggccgccgtcccttcctccctggatttgattggtgctcgcggctgcggcccagcgagttccttgattcggcggggagcaccgccatcgccatgggagggcgccgctggctgtcgtgacctcaccttgccgctgcagctctgtaagtaggtacctagtattccagaggtgatttctcctcattgacagagagcaaatctggttcgtgatccctagtaccagagagggacacggttttcctatcgatgtgttagagtcaagtactcaagcttttgtggttccaatggagtctaagcgtgtgagtgatcaggatgctttgatcgacctggagagtggcaatggcactacagtaagcaactacaccaattgtggggatgctagtttcacagtggggcaagcaagaacagcgcctaatggtgcgtggaatggttgtgtgtgtgccaacgggtgtccgagggacgacaggaatcagcacatggattgctcccctcctgcttcggatgctgttgctagaagtggagatgacaggaagtctgagggggaggagaagcttatggacagctcaggaggggagaagacgaagaagaagcggtccaagaagccaccgcggccgccaaggccgctgacacctacgccgttggatgtttctgaccagaagctcctcaacgaactgagtgagcttgcggtgttgaaacgggcaaggattgagcggatgaaggctttgaagaagatgaagaatgccaagcaagggtcctcgggtggcaatttgtgccccctgatcattaccattatcttctgcatcgtcatactgtggcaaggtttcttctcgggacacgagtcggcggtgagtttccatggatcgcccgagtcctcagtcagggcacacagcagtctgatctccatcaggttctacaagaagaaccattccaatgtgagaccacccagcgagaccaccgcagcccctgataacgtagagacagtttcaaggctcctggaaccgtaaccaagcgagaagaaggctagctcggtgaccgaacgctgcgggccgcggccaccaccacaggtacctgaacggaaaagctcgccacattctgaagcctctcaccttgacgaccggggctgtgtaaatcttccgagaccgccactggcgcttcctcctcgagcccctgctgtaaaaatgaacggactcctagcgttttgtgcgcctgggtcgcacgctgactagtgaatctgttggcagttgtgcgccgcagcccgcaggccatggctctagtgacgagagcgacgcgagcaagctgtttgtatgtgtctgattacaataataaaaggtttcgcgctgtttactgtattggc

SEQ ID NO: 147157 - DNA, 1526 bp, Zea Mays
ctggatgcttccttccacccgacccatcccatcccatacagccccgggacgtacggtgatcggtgaccccaccccaccccacggccacgccacacctcctctccacctcctcgtcctcgatccccaagcagtcagtcttcctcttccctcccctcctcccgttaggtaggctggcgagccgccggccgccgtcccttcctccctggatttgattggtgctcgcggctgcggcccagcgagttccttgattcggcggggagcaccgccatcgccatgggagggcgccgctggctgtcgtgacctcaccttgccgctgcagctctgtacctagtattccagaggtgatttctcctcattgacagagagcaaatctggttcgtgatccctagtaccagagagggacacggttttcctatcgatgtgttagagtcaagtactcaagcttttgtggttccaatggagtctaagcgtgtgagtgatcaggatgctttgatcgacctggagagtggcaatggcactacagtaagcaactacaccaattgtggggatgctagtttcacagtggggcaagcaagaacagcgcctaatggtgcgtggaatggttgtgtgtgtgccaacgggtgtccgagggacgacaggaatcagcacatggattgctcccctcctgcttcggatgctgttgctagaagtggagatgacaggaagtctgagggggaggagaagcttatggacagctcaggaggggagaagacgaagaagaagcggtccaagaagccaccgcggccgccaaggccgctgacacctacgccgttggatgtttctgaccagaagctcctcaacgaactgagtgagcttgcggtgttgaaacgggcaaggattgagcggatgaaggctttgaagaagatgaagaatgccaagcaagggtcctcgggtggcaatttgtgccccctgatcattaccattatcttctgcatcgtcatactgtggcaaggtttcttctcgggacacgagtcggcggtgagtttccatggatcgcccgagtcctcagtcagggcacacagcagtctgatctccatcaggttctacaagaagaaccattccaatgtgagaccacccagcgagaccaccgcagcccctgataacgtagagacagtttcaaggctcctggaaccgtaaccaagcgagaagaaggctagctcggtgaccgaacgctgcgggccgcggccaccaccacaggtacctgaacggaaaagctcgccacattctgaagcctctcaccttgacgaccggggctgtgtaaatcttccgagaccgccactggcgcttcctcctcgagcccctgctgtaaaaatgaacggactcctagcgttttgtgcgcctgggtcgcacgctgactagtgaatctgttggcagttgtgcgccgcagcccgcaggccatggctctagtgacgagagcgacgcgagcaagctgtttgtatgtgtctgattacaataataaaaggtttcgcgctgtttactgtattggc

SEQ ID NO: 147158 - DNA, 1739 bp, Zea Mays
ctggatgcttccttccacccgacccatcccatcccatacagccccgggacgtacggtgatcggtgaccccaccccaccccacggccacgccacacctcctctccacctcctcgtcctcgatccccaagcagtcagtcttcctcttccctcccctcctcccgttaggtaggctggcgagccgccggccgccgtcccttcctccctggatttgattggtgctcgcggctgcggcccagcgagttccttgattcggcggggagcaccgccatcgccatgggagggcgccgctggctgtcgtgacctcaccttgccgctgcagctctgtaagtaggtacctagtattccagaggtgatttctcctcattgacagagagcaaatctggttcgtgatccctagtaccagagagggacacggttttcctatcgatgtgttagagtcaagtactcaagcttttgtggttccaatggagtctaagcgtgtgagtgatcaggatgctttgatcgacctggagagtggcaatggcactacagtaagcaactacaccaattgtggggatgctagtttcacagtggggcaagcaagaacagcgcctaatggtgcgtggaatggttgtgtgtgtgccaacgggtgtccgagggacgacaggaatcagcacatggattgctcccctcctgcttcggatgctgttgctagaagtggagatgacaggaagtctgagggggaggagaagcttatggacagctcaggaggggagaagacgaagaagaagcggtccaagaagccaccgcggccgccaaggccgctgacacctacgccgttggatgtttctgaccagaagctcctcaacgaactgagtgagcttgcggtgttgaaacgggcaaggattgagcggatgaaggctttgaagaagatgaagaatgccaagcaagggtcctcgggtggcaatttgtgccccctgatcattaccattatcttctgcatcgtcatactgtggcaaggtttcttctcgggacacgagtcggcggtgagtttccatggatcgcccgagtcctcagtcagggcacacagcagtctgatctccatcaggttctacaagaagaaccattccaatgtgagaccacccagcgagaccaccgcagcccctgagtaagcggcaacatttgcatagtcagaatctatgatacctggaactgccttttgcaaccttttttcccctctagcatcaagctatcagtaaactagagtttctgaaaacagtcacatactaccatgcctcacctgaagctgactccagtggttttctcaaccttttgcagtaacgtagagacagtttcaaggctcctggaaccgtaaccaagcgagaagaaggctagctcggtgaccgaacgctgcgggccgcggccaccaccacaggtacctgaacggaaaagctcgccacattctgaagcctctcaccttgacgaccggggctgtgtaaatcttccgagaccgccactggcgcttcctcctcgagcccctgctgtaaaaatgaacggactcctagcgttttgtgcgcctgggtcgcacgctgactagtgaatctgttggcagttgtgcgccgcagcccgcaggccatggctctagtgacgagagcgacgcgagcaagctgtttgtatgtgtctgattacaataataaaaggtttcgcgctgtttactgtattggcttctactgtttctactgtgtttttgcaactgtgta

SEQ ID NO: 147159 - DNA, 2129 bp, Zea Mays
cgcttcacctgagcgccatgtgttcgataaaatgctgcttcctcctccggcgccttcgccgcccccgcatccactgtttctccacggcgggggcgagcactacactcccgcggaagaattatgcgggggatcctctttgcggagcggggccgcctcccgcgccgggcaccggggacgcggcgagagcccacgaggcggccgtcaggcggctggcggcggcgggcgacgtggatggcgtgcagctggcgctgcaggagatgcggctgaggggagtcccgtgcaccgagggtgccctcgtcgccgccgtcggcgccttcgctcgcgcgggggcgcccgaccgcgcgctcaagacgttctaccgcgccgtgcacgaccttggctgcgcgcgcccccaccgagccgcggctctacaaccacctcatcgacgcgctgctgcggggagaacatggtgggtgccgtcgtgctggtgtacgacaacatgaggaaagacggtgtgcatcctaacgtgttcacctacaacctgcttgtcagggcgctgtgccagaacaaccgggtcggggccgcgcgcaaaatgctcgacgaaatggccaggaaggggtgtcccccggacgacgtgacgtatgccaccattgtctcagtgctgtgcaagcttgacaggctggacgaggccacagaggtgttggctgccatgccgcctgtggctgcctcctacaatgccatcgttctagctctctgcagagagttcaggatgcaggaggtgttctcagttgtcagcgacatggtggggaggggattgcagcctaatgtcatcacgtacacaactatagtcgatgcgttctgcaaggctggggagctgaggatggcgtgtgccattctggcaaggatggtgatcaccgggtgcactccaaatgttgtgacattcactgcattagtcagaggactattcgatgatggaagggtgcatgacgcactagacatgtggaggtggatggtggctgaaggatgggcaccgtcgacggtttcgtacaacattctgattcgtggactttgcagcgttggtgatctcaagggagcatcatcgatactcaacagcatggagcaacacggctgctttcctaatgtgaggacctactccactctaattgatggtttctccaaagccggggacctaggtggtgccatatcaatatggaatgacatgtcaagatctggttgcaagccaaacgttgttgtttacacaaacatggtggatgtgttttgcaagaagctgatgtttaatcaggcaaaaagtcttattgataagatgctattggaaaactgtcctcccaacacagtgacattcaacacgttgattagaagcctatgcgactgcagaagagttgggagggctcttggtgtgttccacgagatgagaaggcatggatgcgtgccaaatggtaggacctataacgagttgatccatggtctgtttagggagggaaactgtggagacgctcttcacatggtgaccgagatgcaaagtcatggtattgagttgagcttagtaacatacaacactgtagtaagtggtctatgtcaaacgagaatgagcagagaagctatggtttttgttgggaagatgatagttcaaggaattcaaccaaatgcattcactttcagtgcaataattcatgcttactgcaaggaaggggaagtcaggatggccgcttggatgttaggtgcgatgaatgtagtgaactgccaccgtaacatactagtgtacactattctaatggcagagctttgcaatcaagataagctggtagatgccatgacgtacctactaaagatgctatatgaaggtatatatccaaatacagtgacatggaacgttttggtccgtggagtttttaggaaccttggctgcattgaaccaagtgatttcatacaacatattaccatgaacttatcagaagggacctgaggttcaatgttgtgattatttggcatcccaatgaaggcaaagttgataagcagcagattctctcagatcgctgtttctgcattaagtaatttatctgtatggtatgatatattctgtaacgttaacattcttttgtcatcaatgatcagatgagttgaggttatcc

SEQ ID NO: 147160 - DNA, 1946 bp, Zea Mays
atgtgttcgataaaatgctgcttcctcctccggcgccttcgccgcccccgcatccactgtttctccacggcgggggcgagcactacactcccgcggaagaattatgcgggggatcctctttgcggagcggggccgcctcccgcgccgggcaccggggacgcggcgagagcccacgaggcggccgtcaggcggctggcggcggcgggcgacgtggatggcgtgcagctggcgctgcaggagatgcggctgaggggagtcccgtgcaccgagggtgccctcgtcgccgccgtcggcgccttcgctcgcgcgggggcgcccgaccgcgcgctcaagacgttctaccgcgccgtgcacgaccttggctgcgcgcgcccccaccgagccgcggctctacaaccacctcatcgacgcgctgctgcggggagaacatggtgggtgccgtcgtgctggtgtacgacaacatgaggaaagacggtgtgcatcctaacgtgttcacctacaacctgcttgtcagggcgctgtgccagaacaaccgggtcggggccgcgcgcaaaatgctcgacgaaatggccaggaaggggtgtcccccggacgacgtgacgtatgccaccattgtctcagtgctgtgcaagcttgacaggctggacgaggccacagaggtgttggctgccatgccgcctgtggctgcctcctacaatgccatcgttctagctctctgcagagagttcaggatgcaggaggtgttctcagttgtcagcgacatggtggggaggggattgcagcctaatgtcatcacgtacacaactatagtcgatgcgttctgcaaggctggggagctgaggatggcgtgtgccattctggcaaggatggtgatcaccgggtgcactccaaatgttgtgacattcactgcattagtcagaggactattcgatgatggaagggtgcatgacgcactagacatgtggaggtggatggtggctgaaggatgggcaccgtcgacggtttcgtacaacattctgattcgtggactttgcagcgttggtgatctcaagggagcatcatcgatactcaacagcatggagcaacacggctgctttcctaatgtgaggacctactccactctaattgatggtttctccaaagccggggacctaggtggtgccatatcaatatggaatgacatgtcaagatctggttgcaagccaaacgttgttgtttacacaaacatggtggatgtgttttgcaagaagctgatgtttaatcaggcaaaaagtcttattgataagatgctattggaaaactgtcctcccaacacagtgacattcaacacgttgattagaagcctatgcgactgcagaagagttgggagggctcttggtgtgttccacgagatgagaaggcatggatgcgtgccaaatggtaggacctataacgagttgatccatggtctgtttagggagggaaactgtggagacgctcttcacatggtgaccgagatgcaaagtcatggtattgagttgagcttagtaacatacaacactgtagtaagtggtctatgtcaaacgagaatgagcagagaagctatggtttttgttgggaagatgatagttcaaggaattcaaccaaatgcattcactttcagtgcaataattcatgcttactgcaaggaaggggaagtcaggatggccgcttggatgttaggtgcgatgaatgtagtgaactgccaccgtaacatactagtgtacactattctaatggcagagctttgcaatcaagataagctggtagatgccatgacgtacctactaaagatgctatatgaaggtatatatccaaatacagtgacatggaacgttttggtccgtggagtttttaggaaccttggctgcattgaaccaagtgatttcatacaacatattaccatgaacttatcagaagggacctga

SEQ ID NO: 147161 - DNA, 2230 bp, Zea Mays
gcccaaaactgaacccacaacccgaaaccagcaggcaacaaagcaaccagaggcagagcgttcttcttccccgacggcccgggccgacggctcgactccactagtcgctggaaccctctgcaacaaagccgcctccacctgaccacctcccttgagctcttccccttcctcgtgggttgtgcgagccctctaccggcgcgcagtacaggggctgattgggtgatcaaacccgcaagatttgggtttgtgatttaggagcaggaggcggtggcaatatggaatataaggcgagatctactggaacttcaggaacttcgtctaaaagtttccgtgatctgtacaatatgaagtactcgagctacttaaacgacgaaccaatgccggatgctacatcggaaaaggagcagggaaatgagtatttcaaacagaagaagttcactgatgctattgaatgctactccagaagtattgggctgtctcctacagcagtcacatttgcaaatagagctatggcatatcttaaactaagaagattcaaggaggcagaggacgattgcactgaagctctgaatctggatgatcgctatattaaagcatactcacgccgaattactgcacgaaaagaacttgggaagcttaaggaggcaatggatgatgctgaatttgctatcagtcttgatccaaacaattcagagctaaggaagcagtattctgagataaaagctttgcacatggagaaaatggctaaaaaggttccagtgccagctaaacgtgcagtttctggaattgataaaactgcagatgtcacttctcacccaccgactatctcccagaaggacactattatggaagttgatctgcctgttagagatgcaatgaagatcaaagagagtgcaagcgtcaagtctaacggaggacctggagtaatcatcaatggcaataacgtgcaggttttttttttatttctgtagcctttctgaccattataataaccacaatctgtggactgtggtatctgtgttggtactagttgtcatattatggcaagtaaaagcacctatatgtacaataggaggtactcaggatgtcgtttgggaagtttttcttgcaatatttatgagatacaatgtgtcttatttaatttgcttgaaaaaactgaatcctttggataagggaataacttaacatgtattattatcacacaccaatctggaaccaaaataagtttgaaattgcgtacttgttaaaacaggctttaactagcttttaatagatgcaattgtcatgttttctgtttaacattttaagacatcactgcaattgcaatgacacatatatgtctatttttcacaatttgttggaagtatttctgtttctgtgtcacatgtttcaacacttgatgcagcagctccaaggtcgagatgccaaccagaagactgggccagaagtttcagtccaagatcttgcagctcgtgctgcttcacggtatatggccggcactgtgaaaagcattaagacacccaaaacagcttatgactttgaggtttcttggagagctctttctgatgacactgcccagcaaatacagttactaaagtcgattccaccagcaagcctaccagagattttcaagaacgcactttctgcaccttttcttattgacatcgtgaagtgtgcagcctcaattttccgggatgcggaggcattagctgtcagtattttggataatttggctcgagttccacgcttcgacttgataatcatgtgcctttcatccatgcacaaatttgaactgaggaagatatgggatcaagtattccttgctgaaaaagcgctggctgatgatcagatggaagctctgaggcagctgcgaggcagatacattccgggaggatggcaggatagcatgctcacttcgagttaaatcaatcaatcaaatgacgacgatgtaaagcaggattgttacaaaaaccttttgctggcttcgcaactgatgtctctgcatccatctgttctagaatcaggagtgcctgtcgattgttaagcccactggtctggatgtagcgaacggttgaagcatccagtgtaggaacatgtgtcgactgcaaatggttgagatttgttctgttgtgcttgccgctactgtaacctcgctttgttgtgcgccggattcctgacgctggcacatcgtacgcttgtcggcgacaactttatggaacacacacatttt

SEQ ID NO: 147162 - DNA, 982 bp, Zea Mays
ctaagggttctggatcatgtttataagttcattgtttgactgacttgttctgtatcaattgtcatgttttctgtttaacattttaagacatcactgcaattgcaatgacacatatatgtctatttttcacaatttgttggaagtatttctgtttctgtgtcacatgtttcaacacttgatgcagcagctccaaggtcgagatgccaaccagaagactgggccagaagtttcagtccaagatcttgcagctcgtgctgcttcacggtatatggccggcactgtgaaaagcattaagacacccaaaacagcttatgactttgaggtttcttggagagctctttctgatgacactgcccagcaaatacagttactaaagtcgattccaccagcaagcctaccagagattttcaagaacgcactttctgcaccttttcttattgacatcgtgaagtgtgcagcctcaattttccgggatgcggaggcattagctgtcagtattttggataatttggctcgagttccacgcttcgacttgataatcatgtgcctttcatccatgcacaaatttgatggaagctctgaggcagctgcgaggcagatacattccgggaggatggcaggatagcatgctcacttcgagttaaatcaatcaatcaaatgacgacgatgtaaagcaggattgttacaaaaaccttttgctggcttcgcaactgatgtctctgcatccatctgttctagaatcaggagtgcctgtcgattgttaagcccactggtctggatgtagcgaacggttgaagcatccagtgtaggaacatgtgtcgactgcaaatggttgagatttgttctgttgtgcttgccgctactgtaacctcgctttgttgtgcgccggattcctgacgctggcacatcgtacgcttgtcggcgacaactttatggaacacacacattttgatgatttaaagaattctctataaaatgtctt

SEQ ID NO: 147163 - DNA, 1046 bp, Zea Mays
ctaagggttctggatcatgtttataagttcattgtttgactgacttgttctgtatcaattgtcatgttttctgtttaacattttaagacatcactgcaattgcaatgacacatatatgtctatttttcacaatttgttggaagtatttctgtttctgtgtcacatgtttcaacacttgatgcagcagctccaaggtcgagatgccaaccagaagactgggccagaagtttcagtccaagatcttgcagctcgtgctgcttcacggtatatggccggcactgtgaaaagcattaagacacccaaaacagcttatgactttgaggtttcttggagagctctttctgatgacactgcccagcaaatacagttactaaagtcgattccaccagcaagcctaccagagattttcaagaacgcactttctgcaccttttcttattgacatcgtgaagtgtgcagcctcaattttccgggatgcggaggcattagctgtcagtattttggataatttggctcgagttccacgcttcgacttgataatcatgtgcctttcatccatgcacaaatttgaactgaggaagatatgggatcaagtattccttgctgaaaaagcgctggctgatgatcagatggaagctctgaggcagctgcgaggcagatacattccgggaggatggcaggatagcatgctcacttcgagttaaatcaatcaatcaaatgacgacgatgtaaagcaggattgttacaaaaaccttttgctggcttcgcaactgatgtctctgcatccatctgttctagaatcaggagtgcctgtcgattgttaagcccactggtctggatgtagcgaacggttgaagcatccagtgtaggaacatgtgtcgactgcaaatggttgagatttgttctgttgtgcttgccgctactgtaacctcgctttgttgtgcgccggattcctgacgctggcacatcgtacgcttgtcggcgacaactttatggaacacacacattttgatgatttaaagaattctctataaaatgtcttctaat

SEQ ID NO: 147164 - DNA, 89 bp, Zea Mays
aaaaaaaaaaaggtagggcctgtgaccaataatgcattgttgagatgtctttccttgacctctgtcgagataagctttttctccatctt

SEQ ID NO: 147165 - DNA, 1680 bp, Zea Mays
attccttccctctttcccgatctcactggcaggcactgcctccatcatcctcccagagagagactgagagagagagagcgcagccgaggcagttcgcccgcatgtatcccgctgctgcagagatcacgcccagcttctgcgcctgcagctccagcagtagcagcacaaggggctgcagtggaaacggccgctgctagttcccgttctccccatgatctctgccctttcccctactttttcttgttcttgcttgccccttttccttctgcgctagctgccgcttcttcgccttcctggagcttcccgcatccacacatacctctaaagaaccagacaaataaacgacacagaaccgtcggagtcgtcttctactactgtctccattatatgggtttgttgtgcacaggtgcgcgtagataggtagaaccgtagaaggcagattatcgctcgaggcagcagcttggttgctggggcacgcgatcgagctccaggcaagaagattattgcaggaaggcgcggcaggcatggaggatctgtacagcatccacccggggatctcacgcgccgggggcgccgccacggcggccagcgaggtgtccggggtcgccggcggaccaggctcgccccctcccccgccgtcgcagccccctccgccgccgccggcggatctgacggagctggtcaaggcgcagatcgccgggcacccgcgctacccttccctcctctccgcctacatcgagtgccgcaaggtgggcgcgccgccggaggtggccacgctgctggaggagatcggccgggagaggtgcgccgccgcctctgccggcggggaggtcggcctagaccccgagctcgacgagttcatggaggcgtactgccgggtgctggagcggtataaggaggagctgtcgcggccattcgacgaggcagcgtccttcctcagcagcgtccggacgcagctcagctccctctgcggcgccgccgcctcgctctcagatgaaatggtagggtcgtcggaggaggacgaagcatgctcgggaggagacacggaggcgacggagccggggcagcaggagcacagctcccgcctggcggaccgtgagctgaaggagatgctgctgaagaagtacagcgggtgcctgagccggctgcggtccgagttcctgaagaagaggaagaaagggaagctgcccaaggacgcgcggtcggcgctcatggactggtggaacacgcactaccgctggccgtaccctacggaggaggacaaggtgaggctggcggcggcgactgggctggacccgaagcagatcaacaactggttcatcaaccagcggaagcggcactggaagccgtccgaggacatgcggttcgcgctcatggagggcgtcaccggcggcgggccctcgtccgggacaacgctctacttcgacacgggcaccatcgggccgtgaccaccacactaccagcttgggcaacgcaaagtgcatacgtttttctttgtgtatatgggcgacaacgtgtcggtaggtacactcagcatactggagctgctgtccagttcagttcagtgcatatggcctcgtaaaggactctgtaccatgatgatgtaatgctaactccaacccttctcacaaatttctatttttcttattttctattttatatttaaatatcttttgtccc

SEQ ID NO: 147166 - DNA, 1766 bp, Zea Mays
cttccctctttcccgatctcactggcaggcactgcctccatcatcctcccagagagagactgagagagagagagcgcagccgaggcagttcgcccgcatgtatcccgctgctgcagagatcacgcccagcttctgcgcctgcagctccagcagtagcagcacaaggggctgcagtggaaacggccgctgctagttcccgttctccccatgatctctgccctttcccctactttttcttgttcttgcttgccccttttccttctgcgctagctgccgcttcttcgccttcctggagcttcccgcatccacacatacctctaaagaaccagacaaataaacgacacagaaccgtcggagtcgtcttctactactgtctccattatatgggtttgttgtgcacaggtgcgcgtagataggtagaaccgtagaaggcagattatcgctcgaggcagcagcttggttgctggggcacgcgatcgagctccaggcaagaagattattgcaggaaggcgcggcaggcatggaggatctgtacagcatccacccggggatctcacgcgccgggggcgccgccacggcggccagcgaggtgtccggggtcgccggcggaccaggctcgccccctcccccgccgtcgcagccccctccgccgccgccggcggatctgacggagctggtcaaggcgcagatcgccgggcacccgcgctacccttccctcctctccgcctacatcgagtgccgcaaggtgggcgcgccgccggaggtggccacgctgctggaggagatcggccgggagaggtgcgccgccgcctctgccggcggggaggtcggcctagaccccgagctcgacgagttcatggaggcgtactgccgggtgctggagcggtataaggaggagctgtcgcggccattcgacgaggcagcgtccttcctcagcagcgtccggacgcagctcagctccctctgcggcgccgccgcctcgctctcagatgaaatggtagggtcgtcggaggaggacgaagcatgctcgggaggagacacggaggcgacggagccggggcagcaggagcacagctcccgcctggcggaccgtgagctgaaggagatgctgctgaagaagtacagcgggtgcctgagccggctgcggtccgagttcctgaagaagaggaagaaagggaagctgcccaaggacgcgcggtcggcgctcatggactggtggaacacgcactaccgctggccgtaccctacggtaaccatgcatgcatcctggcaaacacgcagcagcagcatcgctcgctggaatggcagatctgtgaccagcattagccggcggtgcaggaggaggacaaggtgaggctggcggcggcgactgggctggacccgaagcagatcaacaactggttcatcaaccagcggaagcggcactggaagccgtccgaggacatgcggttcgcgctcatggagggcgtcaccggcggcgggccctcgtccgggacaacgctctacttcgacacgggcaccatcgggccgtgaccaccacactaccagcttgggcaacgcaaagtgcatacgtttttctttgtgtatatgggcgacaacgtgtcggtaggtacactcagcatactggagctgctgtccagttcagttcagtgcatatggcctcgtaaaggactctgtaccatgatgatgtaatgctaactccaacccttctcacaaatttctatttttcttattttctattttatatttaaatatcttttgtccca

SEQ ID NO: 147167 - DNA, 2115 bp, Zea Mays
cccgcgcggtcgtgagttcgtgactgcggaggaagtagcgcaggcgaaaaggctgcagcagtggacggcggcgaaccctagcctagctccgcgaggtgagtggttcagttcgacggctggcgcccgcgtatggggctgcgcgattcccgctgacttcctttctggtggattttggcaagtgcgttggcggtttgattcgatggccgtggcgtcgcggctcgcggtcacgcgtgtgtcgccggcggacggcgcgcgccccgcggcggcggcggggaggaggagtgggctcgcggtggttcggctcccgccgaccgacagcagggggagaaggaggaggcgcggcggggccgtcgcggccagccccccgacggaggaggtcgtgcagatgacggagccgctcaccaaggaggacctcgtcgcctacctcgtctccgggtgcaagcccaaggagaactggagaattggcacggagcatgaaaagtttggttttgaagtcgacacattacgccctataaaatatgatcagattcgtgacatactgaacgggctcgctgagagatttgattgggagaagataatggaaggaaacattgttatcggcctcaagcagggaaagcaaagcatctcactagaacctggaggccaatttgaacttagtggcgctcctctcgaaacgttacatcaaacttgtgctgaggtcaactcacatctatatcaggtcaaagcagttggagaagaaatgggaataggatttcttgggcttggctttcagccaaaatgggcactgagtgatataccaataatgccaaagggaagatacaaaataatgaggaattacatgcctaaagttggtacccttggccttgatatgatgttccggacatgtactgtgcaggttaatcttgacttcagttcagaacaggatatgataaggaaatttcgtgctggcctcgcattgcagcctattgcaactgcaatatttgccaattctccctttaaagaaggaaaaccaaatggatttctcagcctaaggagccatatctggacagataccgataacaaccgtgcagggatgctcccttttgtctttgacaactcatttgggtttgagcaatatgtggattatgcattagatgtccccatgtattttgtgtaccgaaataataagtatattgactgcaccggaatgtcatttcgggattttatgcaaggaaagctccgacaagctcctggggagttgcctactcttaatgattgggagaaccatctaacaacaatttttcctgaggttaggttaaagagataccttgagatgagaggtgctgatggtggcccatggaggagattgtgtgcgctgcctgcattttgggttgggctgctgtacgatgaggaatcattacaaagcattttagacatgacttttgactggacacaggaggaaagagagatgctaagacataaggtaccgttgactggtctgaagacaccatttcgcgatggatatgttagagatttagccgaggaagttctaaaactggccaagaatggattggaaagaagaggatacaaggaggtcggtttccttagagaggttgacgaagtggtgaggacaggagtgacacctgccgagagacttctgcatctgtacgagacgaagtggcaacgcaacgtagaccatgttttcgagcacttgctatactgatgttgtagatgtaccctagtacaaaaatctcatctttgattcattcaacgccttgagtgggagggcacaggaacacagcttttggttaagttgctgaccgggggaacagctacccggtgctgcgtgcggtgcctacaaataacttcgctcgggacggatcactactctctagggagatggaacaaatcactgtttgtaccggccctttttgtttctgttttccttcagagatggagatgccgtattgaaaataagtccatcttctgtacgatgggaactgtctgttttccccccttctttcctttcagcattgttgggatgtttgtcccgtgttaacatgcaaaatcaattacgtgtacgataaataagctgatggtttgatccggaatctgcaattgcgcgtgccttttccc

SEQ ID NO: 147168 - DNA, 363 bp, Zea Mays
gtatcttttcagaatgaagaatttgtcaagctgttacatggtagcaatattccttgcacaaaccatgttgtgggatcaaattactgcttcatgaatgtctatgaggatagaatacctggaagggccatcatcatctctgttatagataatcttgtgaagggagcatctggtcaggctttgcaaaatcttaatctgatgatgggactgcctgagaatatggggctacaataccagcccctgttcccttgatcttttgtgtcattatctatgattacattatgtaggagtccggaaaccaaattgtcattactgtcaagaggtggcaaggagcctgacattagaattcagtcaagtcgaagttag

SEQ ID NO: 147169 - DNA, 122 bp, Zea Mays
attaggttctccgatgtctgaatatctgcttgtgcttccaaattctattttctttatgctcagtatcagtcgatgcaaaataaaagttcgattacctaattgaatgaaccaccactaaaaac

SEQ ID NO: 147170 - DNA, 306 bp, Zea Mays
atggaaaaaagggttgtttacttgtttctctcccaaatgattgtcacaatgacggaacagatctataagaagatttccccgctacctttttcgggtgatcgtatccgatttcctagaagctgtaggctttggaaagaactgaaccattcacgcggccatgctggtgggggaaagaagtcgccgatgcagcgacaactactgattgctggacggcatcgagcgcctccacgcccgcctccgcatcagttcgccgatgtgctacctttgcaatttcagtccccttgtttccaagaacattttgagcct

SEQ ID NO: 147171 - DNA, 444 bp, Zea Mays
gttatgcagcctcgggagattagaagcaattatccctgcacttgcacagggatgaagcctgaggaccgaaaagacctgcaccactgcaaacagaaaagccggaaagcaacccagacggatagagttctcagcgagcgcggcgcggaggagagggaggaggtgcgcaagatggtgttgcgaggtataccggggaaagaagccatggcccagtggggtcgcgtaggtgcgacacgagatggagaggatgccgcccgggacggagaccagccgatgctgatcttcttccccaaggactccagccccaacgctagcgggcccgggggacggcggttcactgaagatggagatgaggacatggtggcggcggtgctagggttatggggtttgtggaagacgaatgagagtgaagttggctcgccgctcgcatcgaacatggaagtgtag

SEQ ID NO: 147172 - DNA, 415 bp, Zea Mays
aatggctctctgtcagctcccaatcgggtcgcatatgagaacccaactcgttgctgcgaatatttgcgccgacgccgttgctcccaatcgccacgatttttctttttcccgcgccctcctcctgccttcgcacctctatcggtcgatttggtgcgcgtgttgcggcggagagccggcgacctctgctgcttgccgctacgctatcctccactgcgacatgaatcccagaaacagcgcgtctctaacggatggaacaaggtcgccgacgacaggaaatcactccgcggcggacggagatgtagaggtacgtgaatcgagttccgtgtaaactccagttcttggctgcatcttccttgtgtgcgaaccctagttcttttcagcatcttgatcttgattgcaaatcagaatgcatctt

SEQ ID NO: 147173 - DNA, 758 bp, Zea Mays
aaattacaatgtatcagtaaatcacacattagaaaactgcatttgttacttcatcaaacttgaaaacacactagacaacagggctccaacaaaagcaacacaaatataattaccacctaactttcattaggttcaggaatttcttgagttttgtgactcccagcagccagacaatatggagatatgttagaggatagtccaccagaagttgaagatcgtaagaggccaagtggaattttttttttaaaaaaaaagctaaagcattgcgaagaggtggaaaagattcttatttggaggcttcaaaacatttatgggaaagagaagaaggaggttgttgcagagaaagaaaagaaaaatgaggaaaaaggttcaatctttcatatgaactagagaaagagaggcttcaggttttgatcatattagggctgcaaatgaggcaaaaaaaaaatagaggtaaaggaaagcgagatacagatgaaaagaatgttagaggaagagaggattatgacaatggacatcagttcaatctttcatatgaactagagaaatatatatagggctgcaaatgttgggtgtggagtcgaactttcatgtttttttttccagactcgctctctgttgtgtgtgcatgtctgtgcgaggtggagtcagatgtgcgtgtgtttataaattacagtatgaatcagagcttgtgctgttgtctcgtatgctgaactgcaaatataatttccacttgttgttgccagcaaatagaaaga

SEQ ID NO: 147174 - DNA, 810 bp, Zea Mays
gagtcgcgaccccgggcaagtttccccacgggcggggcgacgaaatcaccgctctgctccgacgtccagctctactcgcgagcaggacatcaccgcgcgtccaccatctctggcttgctgtcctccgcgcgtcatctccatccctggcttgagaattgcattggagcaattgacggaacccatgtacctatcaccattgcagaagataaggctcctccttaccgaaataggaaagggtcactttcacaaaacgtgatgttggcatgtgaggtgaatgtggcgatgaagagatgggcttacagtgtgttaagtggaagcaacacatgaagcggacatggagaaggaagctggcatgacactaaaacgcataaagttgacttgtgacgttcatgttttagatgtcttattctactgccaaacttcctagtactccatttttatactatattgtctatctgtacgtgtgaatggagatgatgatattatgtgatgtgatgatggatggattagcttcgttgaatattagatgatattatgtgatgatgatattaaacgggcattgtagtattgatacatgcttcatatttctggatttttagtgatgttttattgtttatgagttttctaaatattccttatttttgtttgattttttctaaatttttgatgtatttttttgctcaagaggggtatttagcacctttctttccaaacaatgccaggaaaatatacctgggaggggagattctctccgggaaataaggtggcatataaaatcccctcctgggttagtttccaagggattttttt

SEQ ID NO: 147175 - DNA, 1309 bp, Zea Mays
gaccccgggcaagtttccccacgggcggggcgacgaaatcaccgctctgctccgacgtccagctctactcgcgagcaggacatcaccgcgcgtccaccatctctggcttgctgtcctccgcgcgtcatctccatccctggcttgagatatgggttcttgggaagagctagctaggcagtttttgttggaggaagaagaagacgatgaggagtttttctttattcttctccctgctatacttccattcctctctgaagagaaaaggtctatccatacctcctctctctctggtgcccaaaaggttaaggagattcttgaagggcatgagagttggtgcaagtccgagtttcgaatggagccagaaatatttagagccacatcagaattccttagaagagagggtttgttacgtgatacacgaggagttaacgtcgaagagcagcttgggatgtttatgtatatgatctcccacaatgccagtaaccaaatgcttcaaaaggctttccaacatagtggagagactatccatcgaaaaatatcagaagttttcgatatagttcccactctaactcagcgattcgtgaagcttcccaattctatccagacacatccaaaaattataactgattctaggttcatgccctttttttagaattgcattggagcaattgacggaacccatgtacctatcaccattgcagaagataaggctcctccttaccgaaataggaaagggtcactttcacaaaacgtgatgttggcatgtgaggtgaatgtggcgatgaagagatgggcttacagtgtgttaagtggaagcaacacatgaagcggacatggagaaggaagctggcatgacactaaaacgcataaagttgacttgtgacgttcatgttttagatgtcttattctactgccaaacttcctagtactccatttttatactatattgtctatctgtacgtgtgaatggagatgatgatattatgtgatgtgatgatggatggattagcttcgttgaatattagatgatattatgtgatgatgatattaaacgggcattgtagtattgatacatgcttcatatttctggatttttagtgatgttttattgtttatgagttttctaaatattccttatttttgtttgattttttctaaatttttgatgtatttttttgctcaagaggggtatttagcacctttctttccaaacaatgccaggaaaatatacctgggaggggagattctctccgggaaataaggtggcatataaaatcccctcctgggttagtttccaagggattttttt

SEQ ID NO: 147176 - DNA, 1260 bp, Zea Mays
gaccccgggcaagtttccccacgggcggggcgacgaaatcaccgctctgctccgacgtccagctctactcgcgagcaggacatcaccgcgcgtccaccatctctggcttgctgtcctccgcgcgtcatctccatccctggcttgagatatgggttcttgggaagagctagctaggcagtttttgttggaggaagaagaagacgatgaggagtttttctttattcttctccctgctatacttccattcctctctgaagagaaaaggtctatccatacctcctctctctctggtgcccaaaaggttaaggagattcttgaagggcatgagagttggtgcaagtccgagtttcgaatggagccagaaatatttagagccacatcagaattccttagaagagagggtttgttacgtgatacacgaggagttaacgtcgaagagcagcttgggatgtttatgtatatgatctcccacaatgccagtaaccaaatgcttcaaaaggctttccaacatagtggagagactatccatcgaaaaatatcagaagttttcgatatagttcccactctaactcagcgattcgtgaagcttcccaattctatccagacacatccaaaaattataactgattctaggttcatgccctttttttagaagataaggctcctccttaccgaaataggaaagggtcactttcacaaaacgtgatgttggcatgtgaggtgaatgtggcgatgaagagatgggcttacagtgtgttaagtggaagcaacacatgaagcggacatggagaaggaagctggcatgacactaaaacgcataaagttgacttgtgacgttcatgttttagatgtcttattctactgccaaacttcctagtactccatttttatactatattgtctatctgtacgtgtgaatggagatgatgatattatgtgatgtgatgatggatggattagcttcgttgaatattagatgatattatgtgatgatgatattaaacgggcattgtagtattgatacatgcttcatatttctggatttttagtgatgttttattgtttatgagttttctaaatattccttatttttgtttgattttttctaaatttttgatgtatttttttgctcaagaggggtatttagcacctttctttccaaacaatgccaggaaaatatacctgggaggggagattctctccgggaaataaggtggcatataaaatcccctcctgggttagtttccaagggattttttt

SEQ ID NO: 147177 - DNA, 505 bp, Zea Mays
acaactgtatcatccaattttctgactgatacgaaggtgaaaatggctagcgggggctgctggagaggatagagtccaggctgtgtgatcagagaaaaaaaatggatggctgattttgtgggatatatgatgggttcaatggtagggatgcagctgatttttcttgtggtaactctatatgataacatagtatattacttatacctgctggagaattgaataaagcaacaaaatggtttgaacaatttatcagaaagctctcttaatggtccttaaaagcgagttaaacactagccatgagaaattcacaaaatgaagacataaagattttctggaacatttcgagctggtgtactgaaatgcctttctactgctgttgagcaggctgagaatgactttttatacatggttaaacaggacatggatgatagaccagattcaatagggtcttgtgtactggttcttcttcttcttcatggaacagatctgtgcatcttagggtgtg

SEQ ID NO: 147178 - DNA, 238 bp, Zea Mays
tgcttcatgggcgctcccggtcgaccgatgtggagggcagggtcggagcgtgcagactctgctctcgctcaccgtgaaacagaccatggacgcggcgcaagccagcggtgataggtctaatttcgccatcaacgacgttgaggtgtctacggtacggattttgcccttttttccagcgttgcttaggcttcgaccacatattggagtgcaacatgttttccttttttgtgttcgccaa

SEQ ID NO: 147179 - DNA, 533 bp, Zea Mays
gtttggcagccggcattatcattgacgagaaaaatggtcccttttctgccactcatcgatcatgacatcaccaatgagataccgagtcaccttcaaagaaagcaataggttgcatttgcgtcgtttcgtgattcatcatctatttgaacatagacataaaaatcaagagctgaaagccggcgacggtggcatgccaagtagaggggaggaactgttgtgaagagcggcggtggtgagtggtgatgctgtgaactgagctatgcgtatcactcatgatgagaaaaggtgcgatctcaggatcttctagctggtaccatgcaagaactagaagaggagaatatctgttctctgtattcatatgtactgtacgaattacaaaatatataggcacgccagattatcagagataagcacaggtaaagtgatcctagaaaaatgggcatgcaggcccgaagactcggacgaacaggcataaaacgaggatctagccaactgactttgtacaacgtttagcaatattgacaactaaaaaa

SEQ ID NO: 147180 - DNA, 206 bp, Zea Mays
gatcggagcagcctcacggcgacgggtgctgctcgcctcgctactcccatcagattcccgacggctgctgctcgcctcgctgctaccccaccagatcccggcgcctccccctcgccctctcaattccgatccgtcgcttcgcgatcgacccatccgctctcacacgacgggcgcgcggcgtggatcagcagccgccgggtctgctc

SEQ ID NO: 147181 - DNA, 5242 bp, Zea Mays
gaccatgcgcggccctcgccgcgccgggcgccgacgtcggcctcctcagaaggctactaccgacagggcggcggcgcgtacgaccgctcctaccctgacgacccgccgcctgtctacacgccgtcgcgctcggaccgatactggccggaggacgacggcgggcaatacaagggtttcggtcggtatggcggcggtggccgcagggacggccgtgacatgaggggttcgtaccggaggtccccatacaggggtggctacggaagcgacttctcccgaaaccatccagagcagccccctcccccaccacccagaaggtctccgttgaggtcagtcgctgttccgatctgctatgactcaccgggcaatagagttgacaggggggatagggacaacctcccacgggtgacaccatggcggagaagggaaagcagatctgagccagcagacgctgttggacttctctctgttggccaaaccacccggctctctgcctcagggaaggaggcttcagctcagcctctgtccgtgtctggtcctcatgggaccgaggacgaggcaccaaggaagaaggcacgccttggatgggggcaaggtttggccaagtatgagaagcagaaggtccaagggcctgtggatcctgctgaagctgttgctgatggaagtccagctgatggcgaactgaagaccacctctcctgtgcctgtgcctgtgcaccctgtgcctgtgcctgtgccttatgttgcacctgcacctcctgctgcaccagtgcttgcgcctgcgccagcaccttctgctgctcctgcacttttgtctgcccctatgcaatgctcatctccagttaccgggccaccatattgttcctcagcacctgaagataaatcttgtgaaatgatgccaaatgcggtcactaactctactaaagatgtcttggaggctgatgacacaactttcaataatgaatttctgatcaagttagatcagctcggtgatgatcctgttatttcccttggaaacatgcttgttgaacttatccagcacgaggattcttgttctggggattcaaatggcccgaccagtacatataagctgctcctactgaaggaaagcatttccaaggagattgaaaagactgaactcgagattgattcattggaaggcgaacttaaatctgtgaatactgaggctgcaactactcttgaaggttctcccacaggggtgacacatacagaaaatctttcaccctctagtgggacatccaaggttcctggaagtgtggagatctgtgatacatctgatatgataaaagaaccaggggagctcattggttctcctaaggtacctgtggtgcagtatgatgatgtcaaaagtgctgatatgatggaaattgaaacagctccagttcataatgcaaaaacagttccttcagaagctggtgctatatctcctgtagtcgctgagggtaaggcctgtgcagctgctgatcttagctcattgaaagcttctgaagaagctgggtctcaaaatgatattgacaatggcaggctggaaacttcttcacgccaagctaatgctgattccatgaaaatagaaattagtgatgacctaccagtgaagaaatggacataccatgatcataagtctgatttgctcagttctgtcacatctgcaaatagtgctatagccaaagaaattaatgaagtgctatttaaatcattgcctgctgatacacctcgccttgatttgtttgcatcaagtcatcttctgagccaaaggaagagcgatttgattgtcaaagaaaggcttggagtatgtaaaaccaggctgaggttgaaagagcagatgcttacaatgaagttcaaggcatattgtcacttgtggaaagatgtccaactattttctgcaaataaacagcgttcaaagtctaataagcgcactgatcagagcaaccgaacatcacaaattggatctcagaggcaacgctcctctaaccgctcgcgattaaccatgcctgctggtaatttaagtacattctcaactccagaaatgtcagatgttgcaatgaggttgttttcagagttcaaaattaagcggtgcagaaattacttgaaaatgcctgcactgattattgatgagaaagagaaggagtggttgaagcttatgaacaagaatggtctagttgaggatcctgttttagttgagaaggaacgggtgatgataaatccgtggactcaagaagaaaagaaaatttttatggagttgcttgctaaatttggcaaggatttctccaaaatcgccagtttcattacacataaatctactgcagactgtgtggagttctactataagcatcataaatcagatagcttccgagaagtgaagaaactattggaccttcgtcaacagcaacccaccagcaattttcttggagcgaaatctggacataaatggaatcctgagtcaaatgctgcttctcttgatatgcttggggtagcatcagtagtagcagcccatggccttgaatatgcaaaacaagtggagaaaatttctgcgaaatccctcatccggactgcatatgggcccaatgtgacttccgtggctaataaatcttctgataaggagtgcattgaccatgtgcctttgcacgagagagaatctgtagcagctgatgtactagcaggcatatgtggcactctctctcctgatggaatgggctcatgcattactagttctgctgatcctggacagaagattagcatgaaaagagtggagcatgtcttgtcccaagaaaatgacaaaaccgttgaggaggaagacacactctctgatcaagagtgtgaagttgacccagttgattggaatgacgacgagaagtcaattttcattgaggctatgaataactacggaaaggattttgctcggatctcgtcatgtgtgaagagcaagtcatatgaacaatgcaaagtgttctttagtaaggctcggaaatcactcggtttggatttgatccatcaaggggcagccgatgttagtatgccagctagtgataccaatggagggaagagtgatactgatgaggcctgcgctgtggaaatggattcagctatctgtagcacacagtcatgttcaaagattgcgatggatgtttgtcctactgaaggagccattggagggcctaactctgttataatctctaagcaggcagaagcatatatatcaaatgggtgcaatgctgatgttaaaattgaggaagatgagaaggtagctgataaaaattgcagcattgttgatgctaagaggtccagtgatgctactcacgaagctggtcctattgacatcaattgcccaggaagcacagataagctgcaaggaactgatgatgtcgttgacctagtaaacatgcatagtaatagtggcatcagctcttcagctaagcatgcagtggccattcactcggaaatgagatccactttacattctgtagaggtccttcaaacagacaaaggtgaaggtactggtactgatttgtcctgggtggaagaatgttcacaccatgctctggataacacaccaatgaaaaatggaaattctggtgccccggctttcttggcttcagatagtggtatcaaggacaatgttcgcatctcaaacataactgctgcttccaccgttagtcctgcattcacttcaagttatcagcattctgtacctggagatatgcccctgccaaaaccaaagccacttgttaccccgcttaccccaaaggatttaatgcctgtgcagttcagttcagtgcttcctgaccccactgcaattcgtttcgagggcatagcctcaataactacgcccaacttcgaggacactggcaacagagtcagtggtgctctaggggctaaagagatgagcaagtacccagcttttagagacccatctggtaatcagcaaagcaccttgttttgtaatattgatggttatatgaatcatcgtctgacaactgaattaccatttttttctgaaagaactgcgagtggcactgtgaatacttcacaggcggatcggttgacccaaacaaaattgcagaatggcaggtccagcagcttgtgccttcaaaacaattccgatggcattcaatggcccagagaccacgaaggaggactggaaggctctttgaggccttgctctcgcaatacaagctccgagggtgatgagcaacaaaagcggcctggtgatgtcaagttgtttggacagattctcagccatcagtcaaccctgcagagttctggcttgtcttgcaatggtaacaagagcaagcctccctcaccaaagatcgacacatctgtgagatccatgaacaatccaatggaccgtgtggtttgttcttccaggcctggcaccactccacatctgggtctggaggaaagattggcaaggtgctatggtcatctggatggtagcacggcacagcccgagccactgctcgtgatggcaaagcgccagcggtccttggccggcgtacagttttactcggctaagaacggcacgcttggtgtgttaccagattaccaacaaccttcgacgcagccacagcaatcagatcccaagcgtgtggaaaggttgtctgatccgcagaagaggaacgtgctggaactcatctcgggtttccagcagcccggcagagtcgcccgtttcgggggtgctggcatcctcgtaagcggcaacgtctcggaccctgtggctgctgctctcaaggctcagtatggtcccggttctaagattatgggcagcgacgtggatccttggacggacataggaagcaggtagcgccgtagcagctctactgcttctgttgctccttgtaccatatatttagttttggtgtaacttgaatgaaatcatcagaatatgagatgtggggggtggggagtgaatggctttcctgcccatactatctgtaggcttttggccagtagcagtcgggtttcgctgtttactggcattaacatttttactctttcttctgcagctccatacccttttggtatagcttgacatgccagcagtggcacagtgccgtaggttccctagaggtgaactagatgtttgtcagcatggtttgattttgccagcctatgcagaaaacctcacttggtctttgtaatgtggtaatgccatgtatcagtatcctagtctgatggagttttggttgagacagttctcattgcccgctggttcatcttctgtttct

SEQ ID NO: 147182 - DNA, 1327 bp, Zea Mays
ctcaataactacgcccaacttcgaggacactggcaacagagtcagtggtgctctaggggctaaagagatgagcaagtacccagcttttagagacccatctgaactgcgagtggcactgtgaatacttcacaggcggatcggttgacccaaacaaaattgcagaatggcaggtccagcagcttgtgccttcaaaacaattccgatggcattcaatggcccagagaccacgaaggaggactggaaggctctttgaggccttgctctcgcaatacaagctccgagggtgatgagcaacaaaagcggcctggtgatgtcaagttgtttggacagattctcagccatcagtcaaccctgcagagttctggcttgtcttgcaatggtaacaagagcaagcctccctcaccaaagatcgacacatctgtgagatccatgaacaatccaatggaccgtgtggtttgttcttccaggcctggcaccactccacatctgggtctggaggaaagattggcaaggtgctatggtcatctggatggtagcacggcacagcccgagccactgctcgtgatggcaaagcgccagcggtccttggccggcgtacagttttactcggctaagaacggcacgcttggtgtgttaccagattaccaacaaccttcgacgcagccacagcaatcagatcccaagcgtgtggaaaggttgtctgatccgcagaagaggaacgtgctggaactcatctcgggtttccagcagcccggcagagtcgcccgtttcgggggtgctggcatcctcgtaagcggcaacgtctcggaccctgtggctgctgctctcaaggctcagtatggtcccggttctaagattatgggcagcgacgtggatccttggacggacataggaagcaggtagcgccgtagcagctctactgcttctgttgctccttgtaccatatatttagttttggtgtaacttgaatgaaatcatcagaatatgagatgtggggggtggggagtgaatggctttcctgcccatactatctgtaggcttttggccagtagcagtcgggtttcgctgtttactggcattaacatttttactctttcttctgcagctccatacccttttggtatagcttgacatgccagcagtggcacagtgccgtaggttccctagaggtgaactagatgtttgtcagcatggtttgattttgccagcctatgcagaaaacctcacttggtctttgtaatgtggtaatgccatgtatcagtatcctagtctgatggagttttggttgagacagttctcattgcccgctggttcatcttctgtttct

SEQ ID NO: 147183 - DNA, 665 bp, Zea Mays
atgggggccaccctcttcggcgggctcacggagtcccggttcgcgaagcgccggccgggcttcgccgaccgccggaagagggccagcttgcgcgccgaaggcccaccctaccgggtgaagtgcgagcctgacgagcccgtaccagctagccagccaaaccaagggagcgtgcgagtgcgagggaggaaggacaggaagcggatcaagcagcgggacgacttcatcacggctgagaaggagaagcgcagagcacagtattctgccgctgttaagagaaaggaggcagaacggacagaaagggagatggctgctgtggcaagagatcgggcatgggcagaaaggttggtagagctaaaacagcttgaggaagaaaagaacactgcaatggcataaaagggcatgctctggaaaatgtcaaggcatctaacttgtttttgcttctctattctttccccattttttccacatagtatagaatgtcacagttgtaatggaagactagttgtaccacttctttcaaccgtatatcaaatgctggacgtggtgttaatacgatttttcattagtccatgtatggagtttgtttattttgatgtatttagaataagtgatgtgatggtttttgtgtgctggagacctgagatgactgtcgtttgcaacatata

SEQ ID NO: 147184 - DNA, 1680 bp, Zea Mays
atggggacacagaaaaaagcggcagaatgggcagcacgtgatgcgatcagccatcatcaatccgccgccgcgccgcctacagctcctcccgagacgggaggcgaaggaagacgagaactagacgccactcctacagttttacgtttacccatcaccaccagtccagcaccgagcaccgaccagatcaaccaggcccgccccgacccgaagatgcagcggtggctcccggcgctcctccgccgcgccgcgcccggcggcggggcggcgcggctcttcgcctcgtcctccctcctcttcgacgacacgcaggagcagttcaaggagagcgtgcgcaagttcgcgcaggagaacatcgcgccgcgcgccgcggccatcgacgcctccaaccacttcccgcgggacgtggacctgtggaggctcatgggggacttcaacctccacggcctcaccgcgccggaggagtacggcggcatgggcctcggctacatgtaccactgcatctccatggaggagatcaccagggcctccggcgccgtcggcctctcctacggcgcgcactccaacctctgcatcaaccagcttgtccggcacggcagtcccgagcagaggctcaagtatctgcccaaggtgctgtgctctcctcggatttgctttgttctatcattatgtttcgccagggccatagttttcttaagaacgatgaagatgctcactgctagtatatgtctggcggttttatactcatgcatttttgccttctctatgaagctcatcagtggggagcatatcggggcactggcaatgagtgaacccaactctggctctgatgttgtcagtatgaagtgcaaagctgagaaagtggacggcggctatgtccttaatgggaataagatgtggtgcaccaatgggccgtctgctcagacgctggttgtttatgcaaaaacagatctagctgcgggatcaaaaggaataactgcattcataatcgagaaagggatgcccgggtacagaaccactccattatcttcattggacatgattgagcatgaacacatgcgtttctacagctttctggtcatgttactgatggtccttgttcacgactacaggttcagtactgctcagaaattggacaaacttggcatgagaggaagcgacacatgtgagcttgtttttgagaactgctttgtgccacgcgagaatgtcctcggtgaagaaggcaaaggtgtttatgtcatgatgtcagggcttgatctggaaaggcttgtattagctgcgggccctattggccttatgcaggcatgccttgatgttgtacttccatatgttcgacagagggagcaattcgggcgtccaattggtgaatttcagttcatacaggggaaaatggctgatatgtacacctcattgcagtcatcaagatcatttgtatactcggttgctagggactgcgataatggcaaagttgatcgcaaggattgtgcaggggtaattctctttgctgctgaaaatgcaacccaagtggcacttcaggcgatccagtgtcttggtggaaatgggtacataaatgagtacccaactggtcgtctcctgagagatgcaaaattgtttgagattggtgctggtactagcgagataagaagaatgataattggccgtgagctcttcaaagaggactga

SEQ ID NO: 147185 - DNA, 1705 bp, Zea Mays
atggggacacagaaaaaagcggcagaatgggcagcacgtgatgcgatcagccatcatcaatccgccgccgcgccgcctacagctcctcccgagacgggaggcgaaggaagacgagaactagacgccactcctacagttttacgtttacccatcaccaccagtccagcaccgagcaccgaccagatcaaccaggcccgccccgacccgaagatgcagcggtggctcccggcgctcctccgccgcgccgcgcccggcggcggggcggcgcggctcttcgcctcgtcctccctcctcttcgacgacacgcaggagcagttcaaggagagcgtgcgcaagttcgcgcaggagaacatcgcgccgcgcgccgcggccatcgacgcctccaaccacttcccgcgggacgtggacctgtggaggctcatgggggacttcaacctccacggcctcaccgcgccggaggagtacggcggcatgggcctcggctacatgtaccactgcatctccatggaggagatcaccagggcctccggcgccgtcggcctctcctacggcgcgcactccaacctctgcatcaaccagcttgtccggcacggcagtcccgagcagaggctcaagtatctgcccaagtggggagcatatcggggcactggcaatgagtgaacccaactctggctctgatgttgtcagtatgaagtgcaaagctgagaaagtggacggcggctatgtccttaatgggaataagatgtggtgcaccaatgggccgtctgctcagacgctggttgtttatgcaaaaacagatctagctgcgggatcaaaaggaataactgcattcataatcgagaaagggatgcccgggttcagtactgctcagaaattggacaaacttggcatgagaggaagcgacacatgtgagcttgtttttgagaactgctttgtgccacgcgagaatgtcctcggtgaagaaggcaaaggtgtttatgtcatgatgtcagggcttgatctggaaaggcttgtattagctgcgggccctattggccttatgcaggcatgccttgatgttgtacttccatatgttcgacagagggagcaattcgggcgtccaattggtgaatttcagttcatacaggggaaaatggctgatatgtacacctcattgcagtcatcaagatcatttgtatactcggttgctagggactgcgataatggcaaagttgatcgcaaggattgtgcaggggtaattctctttgctgctgaaaatgcaacccaagtggcacttcaggcgatccagtgtcttggtggaaatgggtacataaatgagtacccaactggtcgtctcctgagagatgcaaaattgtttgagattggtgctggtactagcgagataagaagaatgataattggccgtgagctcttcaaagaggactgaaacttctattttgcaagccagataccagtgcatattgttaactgggggaggtgagcgagatttagatatttagcaaattacccctgtggttcaatgcttttgtataactgcagacatacatcaaataaagttcacttccttgtacttgctgcttgcagtggctcatttttcctgccaataaaggttttttgttatgactctgacttatgcaatgttggtcagttgtattttactatattagtatagacaagacagtaacatagatgtttcgagaagtgc

SEQ ID NO: 147186 - DNA, 1791 bp, Zea Mays
atggggacacagaaaaaagcggcagaatgggcagcacgtgatgcgatcagccatcatcaatccgccgccgcgccgcctacagctcctcccgagacgggaggcgaaggaagacgagaactagacgccactcctacagttttacgtttacccatcaccaccagtccagcaccgagcaccgaccagatcaaccaggcccgccccgacccgaagatgcagcggtggctcccggcgctcctccgccgcgccgcgcccggcggcggggcggcgcggctcttcgcctcgtcctccctcctcttcgacgacacgcaggagcagttcaaggagagcgtgcgcaagttcgcgcaggagaacatcgcgccgcgcgccgcggccatcgacgcctccaaccacttcccgcgggacgtggacctgtggaggctcatgggggacttcaacctccacggcctcaccgcgccggaggagtacggcggcatgggcctcggctacatgtaccactgcatctccatggaggagatcaccagggcctccggcgccgtcggcctctcctacggcgcgcactccaacctctgcatcaaccagcttgtccggcacggcagtcccgagcagaggctcaagtatctgcccaagctcatcagtggggagcatatcggggcactggcaatgagtgaacccaactctggctctgatgttgtcagtatgaagtgcaaagctgagaaagtggacggcggctatgtccttaatgggaataagatgtggtgcaccaatgggccgtctgctcagacgctggttgtttatgcaaaaacagatctagctgcgggatcaaaaggaataactgcattcataatcgagaaagggatgcccgggttcagtactgctcagaaattggacaaacttggcatgagaggaagcgacacatgtgagcttgtttttgagaactgctttgtgccacgcgagaatgtcctcggtgaagaaggcaaaggtgtttatgtcatgatgtcagggcttgatctggaaaggcttgtattagctgcgggccctattggccttatgcaggcatgccttgatgttgtacttccatatgttcgacagagggagcaattcgggcgtccaattggtgaatttcagttcatacaggggaaaatggctgatatgtacacctcattgcagtcatcaagatcatttgtatactcggttgctagggactgcgataatggcaaagttgatcgcaaggattgtgcaggggtaattctctttgctgctgaaaatgcaacccaagtggcacttcaggcgatccagtgtcttggtggaaatgggtacataaatgagtacccaactggtcgtctcctgagagatgcaaaattgtttgagattggtgctggtactagcgagataagaagaatgataattggccgtgagctcttcaaagaggactgaaacttctattttgcaagccagataccagtgcatattgttaactgggggaggtgagcgagatttagatatttagcaaattacccctgtggttcaatgcttttgtataactgcagacatacatcaaataaagttcacttccttgtacttgctgcttgcagtggctcatttttcctgccaataaaggttttttgttatgactctgacttatgcaatgttggtcagttgtattttactatattagtatagacaagacagtaacatagatgtttcgagaagtgcggttgagaggtattgcttttataaggaatctttacatcaaaaatattttagtagcttctccacttttaaagctacatc

SEQ ID NO: 147187 - DNA, 1062 bp, Zea Mays
gccccactcaatggcctcggctacagctttttgacgattgtatgcatccttatcttgcttagcgctaccggttagtgagggatctccaactttcatttggagtatagggccagatttgtgtttatagccagcaggcatttctgcaaggaatcccagggccacaacagcatcactcatgtaaggccggactgaggcttcctcttgtaggcacattgctgccacacctaccgcctggctcaagtctttttctgggtactcacctctaagatgagggtctactagctcattgtacctcttcctgtctctcagcatgggcttgacctgttgatctaggatttgttcacttgctggcctggaggtgtccactgctcttcttcctgtgatcaactctagtatgaaaaccccaaaactgtacacgtcagtcttgacagttagttggcctgttcttatgtattccggagcgcagtacccatatgttcccatcacccgagtggagatgtgtgtctttccctcgactggaccaagctttgcaagcccaaaatctgagagcttagggttgtacttctcatcaaggaggatgttgggggacttgagatcccggtaaatgacaggtgggttcgccttctcatggaggtattcaagccctttagcagttccatgagctatcttcatcctgagataccaactcagcggcacttgttcaggagtgctcaggtgatctgcaagtgagccaagtgccatgtactcgtacaccagaagcctttgatctccatctgcgcagtagccgaccaaattgactaggtttggatggtgcaatagactgagcataaggacctcaactaggaactctctgttgccttgatacccattcaggtctagttgcttgacagcaacaagctgttcatggaaatcgaaaacaagtcagccactgactactgtagatgaattagcaagtgtatgtacctacaattttggaatgcctttctgtgtggtgtgtacctgtccattttcaagcttgcccttgtataccctgccaaagcccccttctccaagaaggcagtc

SEQ ID NO: 147188 - DNA, 93 bp, Zea Mays
gcaaaacttgcaattcaaggcatagtccattgtccaagttgtgggttggtgtaacttggagttctaggcggaagttcaacttaacagtctctg

SEQ ID NO: 147189 - DNA, 425 bp, Zea Mays
atgaatctgaataaatactatcgcaattcttttgctcccacggacagttcatcattcatggcccccctcccaaacctgaaaactaaaactgaggggaaagaaaaagggaacacaaaaaggagagagagagaaaaagaacccttagtaatcagccttcttgctttccttgccgttaccatcgcccaccacatttacagcgactccgatccaaccccctgcagttcttcccctgcctgcgaggttgcgacgcctcttgtgcgtcctctcggctgccctctatcgcgagctgggcacgctgtactgccacaccatgatctgggagcagtcggaggggatccccttcagcttagctcggtcttcaagtagcacttcttgcacgaacttgatcgagtcctgcaatcacatcagtaactaactgttggtag

SEQ ID NO: 147190 - DNA, 639 bp, Zea Mays
atggactgctccagcgacacggccgtctgcgccgtggccgtggccgcggccgcggcgccatcacctccttcgtcatcgccacggccgccggcgccggcgctgagcccgtgcgccgcgtgcaagatcctccgccgccgctgcgtggaccgctgcgtgctggcgccctacttcccgcccaccgagccgcacaagttcgccaccgcgcaccgggtgtttggcgccagcaacatcatcaagctcctacaggagctgccggaggcgcaccggggcgacgccgtgagcagcatggtgtacgaggcggcggcgcgcgtccgggaccccgtgtacggctgcgccggcgccatctggcagctgcagaggcaggtgaacgacctcaaggcgcagctggcgcgcgcccacgccgagctcgccggcgcccgcgcccagcacgcgcacctcctcgcgctcctctgcgtcgaggtcgccgcctcctcgccgccgtcctacgactgcgccgccggctactccgcctccccctcgcgtcaccagctagcggcggtcgtcgcggccaaccccgtgatggccgacgccgtcgacggcgccttgcatcagacgcaggccggccccgtcagctgggccgaggaggcgctctggacatga

SEQ ID NO: 147191 - DNA, 120 bp, Zea Mays
atggcgtctgttataccgaacagcaacaggaagaagggacgaagcaccgagaggaagcagctacaaggcgtgaggaagcagcaatccgaatgccctgtcaagaaatcaaaaggggattag

SEQ ID NO: 147192 - DNA, 1020 bp, Zea Mays
atggggcagcaagagggccacagcaacccccaccccgacgaggcggcgctcccgacgaccaccgccgcaccgtcgccgtcgccgtcgccgtcgccgtcgccgtcctcgtccaggctctacacggcgtggctggtggcgtcgtggtacgcgtccaacatcggcgtgctgctgctcaacaagtacctgctctccgtgtacggcttccgcttcccgctgctgctgaccgcgtgccacatgtccgcctgcgccgtcctctccacgctcgcccagcacgcctcgccccgcccccgcagcagctcctccccgcgctcccaccgccagctcgctcgcgtcgcgctcctcggcgccgtcttctgcgcgtccgtcgtcgccgggaacgtctcgctccgccacctccccgtctccttcaaccaggccgtcggcgccaccacgcctttcttcaccgcgctcctcgcctacgccgtcgccgcccgccgcgaggcctgcgccacctacgccgcgctcgtccccgtcgtcgccggcgtcgccatcgccaccgggggcgagccgagcttccacctcttcggattcgtcatgtgcgtggccgccacggtggggcgcgcgctcaagaccgtgctgcagggcatcctgctatcgtccgaggaggagaagatggactccatggacctcctccgctacatggcgccggtggccgtgctgctgctggtaccggcgacgctggccatggagcgggacgcgttcggcgtggtggcgggcctcgcgcgggaggaccccagcttcctctggctcctgctctgcaactcctgcctcgcctacttcgtcaacctcaccaacttcctcgtcacaaagcacaccagcccgctcactctccaggtcctcgggaacgccaaaggcgccgtcgccgtcgtcgtctccatcctcatcttcaggaaccccgtcacggtcgtgggcatgctgggctacggggtcacggtcgctggcgtcgtcttgtacggcgaggccaagaagaggagcaagtga

SEQ ID NO: 147193 - DNA, 1173 bp, Zea Mays
atggcgaacatgctggtctcggagatgcggcttcctctctacctcgcccacctactcgccgcgcgccgccttgacaccgccaaggacgtgctgtcgctgccagaggtggagctcatggccattctcgacgccggccttcccaccgcacgcgctgccatcgcccacgtcagcgaggccgcctgcccgccctgccagacggcgctctcacttctggaggagcgcgtgaggttaggaggcggcggccggctggccaccatgctctgcgggttggacgaggcattgggcggaggaatccccacggggaagctcactgaggtcgttgggccctcggggatcggcaaaacgcagttctgcctgaagcttgcgttgttagcagcattgccggaatattatggaggtttagacggtcgagttgtgtatattgacacggaattcaagttctctccaaggaggatgattgagattggtcagaaaagctttcctcaaatatttcgacaagaaggcttggcgcagaagatggcagggaggatcctagtaatgcgaccaacatctttagctgatttcaccaagagtttggaagagatgaaggtgactcttctccagcatgatgtgaagttactcattgttgatagtgtggctgctcttatgtcgatggaaaatgagaaggctacagcaggtttcaggcaacaccctttaagatggagcctttcttttcttaagtctatagcagagttctcaagaattccagttgtggttacaaaccaagtacgcagccagagtaatgatgatggttaccatttttcctttgaagtggacagaaaggatggtagtaactgtgctgaaaggtttgattctcatcttgttgctgcactagggattcagtgggctcatgctgtaactgtccgtctagtctttgaatcccattcaggccacaggttcattaaggtggcaaaatcacctatgtctccggcagtagcatttccattcgctgttgagtcatcaggtattacattactaagtgacgagagcattgatgtgacaggtcctgatatcacctcaattcgttgtcaaggtttcttcgccctatctgtacttgatgatgacacctgccgtttccgtctgcctcaacaaaacacgcggtacggcaacttttactcgcgagctctgagctaa

SEQ ID NO: 147194 - DNA, 2153 bp, Zea Mays
caccctccttcctcagctccgttgcgcaccgccaccgccggccggccagccgccggagcaccgaaagacccccgttctttcctgtaaaaaaaaacccgccgcctttagctagctaaccggtcgtcctcttcaccccctagctttgctagctctagctaggaacgaaagaaattaaaggataactgagattgctgattggtggtccgggtacggtgttcttgagtcgtgaagcgacagtacagtggctagggtcgtgccgcccctgcagtctccggggttgcgtgcaggatggtcgtcagggatcgggagtgaggaggcatcagctctcgcggtcgtggagcctaaatgtaccgcaacaacgactcggcactctcctgcttctacctcttcctcctctggttcttcttcttgaagtagacaccaccagttcgccaggtagttagcagcccagttgcgactggggatcggtggcgggctgccgcttgcgagttgtaagcttggaggggaggggagcaggagcaggagatgcagttggatctgaacgtggccgaggcgccgccgccggtggagatggaggcgagcgactcggggtcgtcggtgctgaacgcgtcggaagcggcgtcggcgggcggcgcgcccgcgccggcggaggagggatctagctcaacgccggccgtgctggagttcagcatcctcatccggagcgatagcgacgcggccggcgcggacgaggacgaggacgccacgccatcgcctcctcctcgccaccgccaccagcaccagcagcagctcgtgacccgcgagctgttcccggccggcgccggtccgccggccccgacgccgcggcattgggccgagctcggcttcttccgcgccgacctgcagcagcaacaggcgccgggccccaggatcgtgccgcacccacacgccgcgccgccgccggccaagaagagccgccgcggcccgcgctcccgcagctcgcagtaccgcggcgtcaccttctaccgccgcacaggccgctgggagtcccacatctgggattgcggcaagcaggtgtacctagtggtggtccggctgctggccgatatacgcaggtggattcgacaccgctcacgccgctgcaagggcgtacgaccgggcggcgatcaagttccgcggcgtcgacgccgacatcaacttcaacctcagcgactacgaggacgacatgaagcagatggggagcctgtccaaggaggagttcgtgcacgtcctgcgccgtcagagcaccggcttctcgagaggcagctccaggtacagaggcgtcaccctgcacaagtgcggccgctgggaggcgcgcatggggcagttcctcggcaagaagtacatataccttgggctattcgacagcgaagtagaggctgcaagagcctacgacaaggccgccatcaaatgcaatggcagagaggccgtgacgaacttcgagccgagcacgtatcacggggagctgccgactgaagttgctgatgtcgatctgaacctgagcatatctcagccgagcccccaaagagacaagaacagctgcctaggtctgcagctccaccacggaccattcgagggctccgaactgaagaaaaccaagatcgacgatgctccctctgagctaccgggccgccctcgtcagctgtctcctctcgtggctgagcatccgccggcctggcctgcgcagccgcctcaccccttcttcgtcttcacaaaccatgagatgagtgcatcaggagatctccacaggaggcctgcaggggctgttcccagctgggcatggcaggtggcagcagcagctcctcctcctgccgccctgccgtcgtccgctgcagcatcatcaggattctccaacaccgccacgacagctgccaccaccgccccatcggcctcctccctccggtactgcccgccgccgccgccgccgtcgagccatcaccatccccgctgagagaatcaagaagccgcactgtaaatctgccgggaagctagcattttccccccggcccctccccctctccgggcgttgcgactttttcagttttgcgccgccggccggggtggtggtttcttgtagccgatcgattggattcctcgtattactgctgcttacactcccaattaagtgaaaaaaa

SEQ ID NO: 147195 - DNA, 2122 bp, Zea Mays
caccctccttcctcagctccgttgcgcaccgccaccgccggccggccagccgccggagcaccgaaagacccccgttctttcctgtaaaaaaaaacccgccgcctttagctagctaaccggtcgtcctcttcaccccctagctttgctagctctagctaggaacgaaagaaattaaaggataactgagattgctgattggtggtccgggtacggtgttcttgagtcgtgaagcgacagtacagtggctagggtcgtgccgcccctgcagtctccggggttgcgtgcaggatggtcgtcagggatcgggagtgaggaggcatcagctctcgcggtcgtggagcctaaatgtaccgcaacaacgactcggcactctcctgcttctacctcttcctcctctggttcttcttcttgaagtagacaccaccagttcgccaggtagttagcagcccagttgcgactggggatcggtggcgggctgccgcttgcgagttgtaagcttggaggggaggggagcaggagcaggagatgcagttggatctgaacgtggccgaggcgccgccgccggtggagatggaggcgagcgactcggggtcgtcggtgctgaacgcgtcggaagcggcgtcggcgggcggcgcgcccgcgccggcggaggagggatctagctcaacgccggccgtgctggagttcagcatcctcatccggagcgatagcgacgcggccggcgcggacgaggacgaggacgccacgccatcgcctcctcctcgccaccgccaccagcaccagcagcagctcgtgacccgcgagctgttcccggccggcgccggtccgccggccccgacgccgcggcattgggccgagctcggcttcttccgcgccgacctgcagcagcaacaggcgccgggccccaggatcgtgccgcacccacacgccgcgccgccgccggccaagaagagccgccgcggcccgcgctcccgcagctcgcagtaccgcggcgtcaccttctaccgccgcacaggccgctgggagtcccacatctgggattgcggcaagcaggtgtacctaggtggattcgacaccgctcacgccgctgcaagggcgtacgaccgggcggcgatcaagttccgcggcgtcgacgccgacatcaacttcaacctcagcgactacgaggacgacatgaagcagatggggagcctgtccaaggaggagttcgtgcacgtcctgcgccgtcagagcaccggcttctcgagaggcagctccaggtacagaggcgtcaccctgcacaagtgcggccgctgggaggcgcgcatggggcagttcctcggcaagaagtacatataccttgggctattcgacagcgaagtagaggctgcaagagcctacgacaaggccgccatcaaatgcaatggcagagaggccgtgacgaacttcgagccgagcacgtatcacggggagctgccgactgaagttgctgatgtcgatctgaacctgagcatatctcagccgagcccccaaagagacaagaacagctgcctaggtctgcagctccaccacggaccattcgagggctccgaactgaagaaaaccaagatcgacgatgctccctctgagctaccgggccgccctcgtcagctgtctcctctcgtggctgagcatccgccggcctggcctgcgcagccgcctcaccccttcttcgtcttcacaaaccatgagatgagtgcatcaggagatctccacaggaggcctgcaggggctgttcccagctgggcatggcaggtggcagcagcagctcctcctcctgccgccctgccgtcgtccgctgcagcatcatcaggattctccaacaccgccacgacagctgccaccaccgccccatcggcctcctccctccggtactgcccgccgccgccgccgccgtcgagccatcaccatccccgctgagagaatcaagaagccgcactgtaaatctgccgggaagctagcattttccccccggcccctccccctctccgggcgttgcgactttttcagttttgcgccgccggccggggtggtggtttcttgtagccgatcgattggattcctcgtattactgctgcttacactcccaattaagtgaaaaaaa

SEQ ID NO: 147196 - DNA, 110 bp, Zea Mays
caacttctaggtgtctgctccagggctcggaacttaattagtaaacttatcattgacacaactcattttcttgttcaagatgtcccttactgtatcctatttccttgaga

SEQ ID NO: 147197 - DNA, 314 bp, Zea Mays
ctgactattgacttgatggatcagattatggattttcctgttgacccaatcatggcagctaaggcctataagtataaagcagaaatacttcttaaggaatacttgctagcagattcatatgttctatacacttctgtgctcgcggggcttctgatgtgcaagttggtactgttatttactcactccgagttcatctgttaaattttatgcctaatcttacagtgcatttacatgggaccatatttgtatctgtacatggaaacaaaatatatatatgtaacttgatagactagctcagtagtttgtttgggttt

SEQ ID NO: 147198 - DNA, 1087 bp, Zea Mays
atcgtgggaggcaagagatcacacgcacacagcacactcgcatcccaggcagaaccctcgccgcctccgccgccgatgacgtccgtgcgcagctgtgccgcgtcgttaaccccgtcgatccgcgggatgtcggggctggtccggcaggaggcactgcggcgcgagctggacgggtgccagctgctggcgggcatctggtgccacgggttcacggtggcgcagctgcggagcatccgcgcgtcgctgcccgacgcggcgcggctggtggtggcgaagaactcggacatggcggcggcggtggcgggcacccggtgggaggcgctgaggccgtgcgcgcggggcatgaacgcgtggctgttcgtgcgctccgacgagatcccgccggcgctcaagccctaccgcgacttccagaaggagtggaagctgcagctcaacgacttcaccggcgccgtctacgagggacggctctacgggcccgacgacttcgcgcagctcgagaacatgcccaccagggcgcagtcctaccagtacctcctcggatgcctgcagatgcccgccgtcaacgtcctcgccgtcctacgggcgcgtcaggaggcactgtccgcggaggccgacaagccgcccgccgagggggagggggaggcggccgcgccggctgagaagtgacccgtcgacaaggtctcttgccgctcgtctcactctgcctctgcctctgccttgttgtatggttttgcagctgcggcttggcttaaaggaaggtccttttttcagtcagtccctcttgtgcgcctcaaatttgttcagttcaggatacatgtagtaggaaaactgatatataatactaccatgaactccattctggaagttggactgatttttaattgtcatttctggttcagaaatcagactccaaaaaaggtttagccgcgggtgcatttcagttgaaaattaagtttggtattgcgatgtgtagttatttgaaatttaaatctggtcaatgttgtggtgtattggttttttttgaaaggaatttggcattgtgcacctgcaaattggaatgaagtgcgctggaaacagcaccagaaca

SEQ ID NO: 147199 - DNA, 3078 bp, Zea Mays
aactacaccacatgagatctcacaccatacagtctaggagagaaggaacatacgggagagatggatggggaagaagagatgcccgaggggaactcacggccgcccacggccaccagccgatgtaggctcgatctcaacgatgggagacgacgtctgggctccacggtggtaatggtgatggagtgctgctaaccggatggccgactcgccccggtggggctgactgagctccggtccgcctcgacccgcggccgtacgccccggagctccacccgtcgcgccgcgtcggagctcgtcgccggcgatggcttccgcggtgggcgcttcgaccgccacgcggttcctcccgcggctcccggacccgtggcggccgcgtcgtgcgcgcgcggcgctcccgccgctcacgtggcggcctcccgcggtcacggtggccgcggcgtcgccccgacctggggaagcggaaggtaggcggcgggagaggacgcggaggcggcgcgccagggggccggggcaagaggaaggcgtctcgctaagctctgaaaaggagacgctaaattctactccacgtgctcaaaccaacaaggatgcagagcccgaaccggtgtccagcacgactgggaaaggttctgccattagaagggtgacactggtggttctcgctgcagtgctttttggagttagcattgccttgagggacggggctgagaaggcatcggagtattttgctgggtatttattggaacagagtttgtcggtggacaatctctttgtttttgttctggtcttcaagtatttcaaagtgccaaaagaataccagaatcgaatactttcttatggtattgctggagctgtggtctttcgggctgtgatgatcatcttaggaacagctagcatccagaaatttgaggcggtgaacttgctgttggctgtgatcctgttattcacttcttacaagctatttgctgaagaagaacaagaatctgatctatccgataacttcattgtgaaaacatgccaaaagttcattccagtcactgaatattatgacgacgatcggtttttcacaaatcaagacggtttatggaaagctacaccattgctcttgactttggcagtgattgagctaagtgatattgcttttgctattgactcaataccagcagttttcggcgtcacaagggatccacttataatactatcatcaaatatttttgctatttctggtttgcggccactctatgtgctcatttctgaaagcatgagtgaattggagtatctacagcctgccattggtattgtgttgggcttcatagggacaaagatgatctttgacttctttggttatcatataccaacagaagcttcgcttgctgtagtaactacctgtcttagtggaggcgtcatattaagtcttaggaaagcatcaaaagttgagggggacaagtagactgatgcaacaacacatgcaggtaacgcttttgacccgagatgtgaaatgaatttatcctctacgcatgctgtgtaggaccatgtgtgtaacgttctgagaattagtcacagaaaagaagcttgtagaaaagggaagaggaggaagaaagggcattgtgtttagattaccttgctccgtattggtgttgttagggtggtggtctgcttgtatagtggtctactttgtatcgcatcgttgaatctgatctagtacatgctgctggtgtcccttgtaaacggaaggaatcattcattatcgacagcgccatttcgtcccatccaggcacgaacccacatcacacataagaacaatcggtaatcaacatctggaagaaagttgcctgtttacaaacaatataaccacaggccaccctaagataatcgcatgtaaaaaaaaagaactataagatggtgataatataatcccgctgaaagtataacatggcaacttcactataaaacagaacgaggtatgctgaaaaacccccatcttagcatttctagtttacattactgtcagcttcgaggggaagagaagcaacactaaaaatgaatcaaactctcctaatactagccaactgtagcgataagaacaacgcagatgagatacggtttctgcacaagttacctacgctgacccttcagcaaatctctagctgattgaaccatgatacgttctttattcatggtggggtggtagcgtccatgccggtgttcccagggagtgccgtgttgtcgtcagctgtgctgcccggtttcgcatctactgaatttgggccaccgtcatctggtcttgcatcaatgtaggcatctccacatggttcttcaaaaaattttgaagacggaacagcattgagatcagaatcaccttccaggccaccagaagccggattctgagtcggatgatttccctcatcgttggcagcttctcctgacaatgttgtcttctgttttttcacattgtttgatggaggggtgccagcgccatcgtcgtcgatatcatcattcgctgcacctggctctgcagcatcggagacatccctccttggcctcttccatttctttgtagacgacgtgccgtcgtcctcgaaatcctcctcctccctgcccctgtgcagataggtccacagctttttgtcgttgtcatacagaacgcaagggtcgcgctcgtaatgcagacggtcgagagctccactgacgacttgattaattgcggcctctttgttggcttcttcatggtttaggtactgtgaatctctgagcagtgtgcagacgtcggctctggttccagtccttgcaggcaacctagacgcggcatcccttacgagacacaggatggtgacgtgcggcggcctgtccggtaagagcatggggtggcccctcgctttcgctgttggctttccacctcctcttctcaagggtgcaactatagacttctccccgtcagcagcggtgtagcagaatgctctatcaggtattgagtacctcagaaattcctcacgctggaaatatgtcctcgcttcatctgagctcgggcttattgtgttcagactcttctgcgctttaagctccttgaacctttccttcaga

SEQ ID NO: 147200 - DNA, 2672 bp, Zea Mays
acggccaccagccgatgtaggctcgatctcaacgatgggagacgacgtctgggctccacggtggtaatggtgatggagtgctgctaaccggatgggtggacaacaaatgattttgtcgtgtctatttcagcgtgttgaagccgtctaaacttccattttatcgagtgtgtcgtgtttcataatgccaataatctctccgcagccgactcgccccggtggggctgactgagctccggtccgcctcgacccgcggccgtacgccccggagctccacccgtcgcgccgcgtcggagctcgtcgccggcgatggcttccgcggtgggcgcttcgaccgccacgcggttcctcccgcggctcccggacccgtggcggccgcgtcgtgcgcgcgcggcgctcccgccgctcacgtggcggcctcccgcggtcacggtggccgcggcgtcgccccgacctggggaagcggaaggtaggcggcgggagaggacgcggaggcggcgcgccagggggccggggcaagaggaaggcgtctcgctaagctctgaaaaggagacgctaaattctactccacgtgctcaaaccaacaaggatgcagagcccgaaccggtgtccagcacgactgggaaaggttctgccattagaagggtgacactggtggtcagtttcttctttatatctaccgttttgttgattcagcttagagttagttctacgcgtggacataatatattgatctggttcaggttctcgctgcagtgctttttggagttagcattgccttgagggacggggctgagaaggcatcggagtattttgctgggtatttattggaacagagtttgtcggtggacaatctctttgtttttgttctggtcttcaagtatttcaaagtgccaaaagaataccagaatcgaatactttcttatggtattgctggagctgtggtctttcgggctgtgatgatcatcttaggaacagctagcatccagaaatttgaggcggtgaacttgctgttggctgtgatcctgttattcacttcttacaagctatttgctgaagaagaacaagaatctgatctatccgataacttcattgtgaaaacatgccaaaagttcattccagtcactgaatattatgacgacgatcggtttttcacaaatcaagacggtttatggaaagctacaccattgctcttgactttggcagtgattgagctaagtgatattgcttttgctattgactcaataccagcagttttcggcgtcacaagggatccacttataatactatcatcaaatatttttgctatttctggtttgcggccactctatgtgctcatttctgaaagcatgagtgaattggagtatctacagcctgccattggtattgtgttgggcttcatagggacaaagatgatctttgacttctttggttatcatataccaacagaagcttcgcttgctgtagtaactacctgtcttagtggaggcgtcatattaagtcttaggaaagcatcaaaagttgagggggacaagtagactgatgcaacaacacatgcaggtaacgcttttgacccgagatgtgaaatgaatttatcctctacgcatgctgtgtaggaccatgtgtgtaacgttctgagaattagtcacagaaaagaagcttgtagaaaagggaagaggaggaagaaagggcattgtgtttagattaccttgctccgtattggtgttgttagggtggtggtctgcttgtatagtggtctactttgtatcgcatcgttgaatctgatctagtacatgctgctggtgtcccttgtaaacggaaggaatcattcattatcgacagcgccatttcgtcccatccaggcacgaacccacatcacacataagaacaatcggtaatcaacatctggaagaaagttgcctgtttacaaacaatataaccacaggccaccctaagataatcgcatgtaaaaaaaaagaactataagatggtgataatataatcccgctgaaagtataacatggcaacttcactataaaacagaacgaggtatgctgaaaaacccccatcttagcatttctagtttacattactgtcagcttcgaggggaagagaagcaacactaaaaatgaatcaaactctcctaatactagccaactgtagcgataagaacaacgcagatgagatacggtttctgcacaagttacctacgctgacccttcagcaaatctctagctgattgaaccatgatacgttctttattcatggtggggtggtagcgtccatgccggtgttcccagggagtgccgtgttgtcgtcagctgtgctgcccggtttcgcatctactgaatttgggccaccgtcatctggtcttgcatcaatgtaggcatctccacatggttcttcaaaaaattttgaagacggaacagcattgagatcagaatcaccttccaggccaccagaagccggattctgagtcggatgatttccctcatcgttggcagcttctcctgacaatgttgtcttctgttttttcacattgtttgatggaggggtgccagcgccatcgtcgtcgatatcatcattcgctgcacctggctctgcagcatcggagacatccctccttggcctcttccatttctttgtagacgacgtgccgtcgtcctcgaaatcct

SEQ ID NO: 147201 - DNA, 1670 bp, Zea Mays
gtgttgaagccgtctaaacttccattttatcgagtgtgtcgtgtttcataatgccaataatctctccgcagccgactcgccccggtggggctgactgagctccggtccgcctcgacccgcggccgtacgccccggagctccacccgtcgcgccgcgtcggagctcgtcgccggcgatggcttccgcggtgggcgcttcgaccgccacgcggttcctcccgcggctcccggacccgtggcggccgcgtcgtgcgcgcgcggcgctcccgccgctcacgtggcggcctcccgcggtcacggtggccgcggcgtcgccccgacctggggaagcggaaggtaggcggcgggagaggacgcggaggcggcgcgccagggggccggggcaagaggaaggcgtctcgctaagctctgaaaaggagacgctaaattctactccacgtgctcaaaccaacaaggatgcagagcccgaaccggtgtccagcacgactgggaaaggttctgccattagaagggtgacactggttctcgctgcagtgctttttggagttagcattgccttgagggacggggctgagaaggcatcggagtattttgctgggtatttattggaacagagtttgtcggtggacaatctctttgtttttgttctggtcttcaagtatttcaaagtgccaaaagaataccagaatcgaatactttcttatggtattgctggagctgtggtctttcgggctgtgatgatcatcttaggaacagctagcatccagaaatttgaggcggtgaacttgctgttggctgtgatcctgttattcacttcttacaagctatttgctgaagaagaacaagaatctgatctatccgataacttcattgtgaaaacatgccaaaagttcattccagtcactgaatattatgacgacgatcggtttttcacaaatcaagacggtttatggaaagctacaccattgctcttgactttggcagtgattgagctaagtgatattgcttttgctattgactcaataccagcagttttcggcgtcacaagggatccacttataatactatcatcaaatatttttgctatttctggtttgcggccactctatgtgctcatttctgaaagcatgagtgaattggagtatctacagcctgccattggtattgtgttgggcttcatagggacaaagatgatctttgacttctttggttatcatataccaacagaagcttcgcttgctgtagtaactacctgtcttagtggaggcgtcatattaagtcttaggaaagcatcaaaagttgagggggacaagtagactgatgcaacaacacatgcaggtaacgcttttgacccgagatgtgaaatgaatttatcctctacgcatgctgtgtaggaccatgtgtgtaacgttctgagaattagtcacagaaaagaagcttgtagaaaagggaagaggaggaagaaagggcattgtgtttagattaccttgctccgtattggtgttgttagggtggtggtctgcttgtatagtggtctactttgtatcgcatcgttgaatctgatctagtacatgctgctggtgtcccttgtaaacggaaggaatcattcattatcgacagcgccatttcgtcccatccaggcacgaacccacatcacacataagaacaatc

SEQ ID NO: 147202 - DNA, 831 bp, Zea Mays
gacatcatggcaagcatatgacatcaatgggtacacattctacactaaatcaaaagacatgaaaagtgttgcacaaaatagcggtgttcgtatcgatgcttttgacctacatggacagaagaccacatattttggattcatagaggaaatatgggaacttgattatggcccaagcatgaaaatacccttatttaagtgccaatgggtacaacatcccgtgggggtgatagtggataactacggactcacactggtagacttaaagaaagtaggatataaagatgacccgtgggttctcgccgaatgtgttgcacaagtgttctatgtactcaatccagcagatgagaagatgcatgtagttatttctggaaagcaaaaaattgttggagttgagaatgtgggagaccaagatgaggaatacaataagtatgaagagatgttcgtctttaacggtccagagagaatcaagcgtgtggaaaagaaaattgataagaacttaaagccatacatgcggaaaaatggtagttcatgaaaaattgtatgaatcaaattgtatttgttatcatgtatgatcgactatgaattgtggttgccaattaatttaaaatctctctagttatctatgtgtgctattataattcatttaaattgtatttgcatattattgttaaaaattaaatattaattcatttaaattgtatttgcatatttctgttaaaaattaaaattattttcatatttaaattgtattttcatatttttacaatcacaggcggttttgtcttagggtccgcttgtgaaaatgatagagcaccacaggcggtcctaaac

SEQ ID NO: 147203 - DNA, 1679 bp, Zea Mays
ggggagaggcccttttcacgcctgcatcatgatcaagtgcgcgatgaatggtgatgggcaacttttgatattatttttatatatcgatgggagaaaagggggagtacatgttgtggcacgcctagtcagctcagcgtcatcacttctttctttctgtggccctcctcggctcggccgctcggcacagagcagcagcacaacgccacagccaccgcaggccagccgagcgggacggacgggacacgtggcggcacgtgtctgttctcggccaccgtcgccgggataaattttccgaacccagttgacccgaccgccgatgaaccctggccagattcctcggcacgtgggcccacctcaccagcctcagctgccgcctgcctgacttgggccctgccccttcctgtacctgtcctcaaggtcgcccccgcgctgcccatccccctccccctcctccttcctcggcagctcgtggcgctccagtccacagaggagaggacacgacacgacgaggggccaggcagcaagctctgctcagtccgttccgcgggccggtcggtcggcgatggcgcggcacgcgggcacggcgctcctggacctggtggcggggcaggtggacccgggcgcgccggggttctggcgcgacttcctggtcggcatgctcaagccggcggcggccacggccgtggtggccatggccgtcgggctcagcttctcgcagcgcctggggctcgagggcgagatgctctacgccatcgcacgcgccttcctccagctctccgccatcggcttcgtcctccagttcatcttcgcccagaagaacgcgctctggatcctcctcgcctacctcttcatggtatgtatgtatgtatggatggtatggtacctaggggtatggtacctgctgctcagcctccaaatctctctcttgcaggtgacggtcgccgggtacacggcggggcagcgcgccaggcaggtgccgcgcgggaagcgcatcgcctgcgtctccatcctcgtcggcaccgccgtcaccatgctcctgctcgtcctcctcgacgtcttccccttcaccccgcgctacatcatccccgtcgccggcatgatggtcggcaacgccatgaccgtcaccggcgtcaccatgaagaagctccgggaggacgtcaagatccagaggaacctggtggagacggcgctggcgctgggcgcgacgccgcggcaggcgacgctgcagcaggtgaagcggtcgctggtcatcgcgctgtccccggtgatcgacagcgccaagacggtggggctcatcgcgctgccgggcgccatgacggggctcatcatgggcggcgcgtcgccgctggaggccatccagctgcagatcgtcgtcatgaacatgctcatgggcgcctccaccgtcagcagcatcctctccacctacctctgctggccggccttcttcaccaaggccttccagctcgacgacagggtctttgcagactaagatacatgctggattgtaatgtaaccgagtcccagttgtttgagccttttgaggtagaaacagagctaagagctgtggctttcggtgtcactgttgatgctgagttcttggggaggctctcgggcgggtatcgcgcgttggatccccatttgaccaaacagtttttagataatggaaaaaatcaaaaatc

SEQ ID NO: 147204 - DNA, 1205 bp, Zea Mays
cttcctgtacctgtcctcaaggtcgcccccgcgctgcccatccccctccccctcctccttcctcggcagctcgtggcgctccagtccacagaggagaggacacgacacgacgaggggccaggcagcaagctctgctcagtccgttccgcgggccggtcggtcggcgatggcgcggcacgcgggcacggcgctcctggacctggtggcggggcaggtggacccgggcgcgccggggttctggcgcgacttcctggtcggcatgctcaagccggcggcggccacggccgtggtggccatggccgtcgggctcagcttctcgcagcgcctggggctcgagggcgagatgctctacgccatcgcacgcgccttcctccagctctccgccatcggcttcgtcctccagttcatcttcgcccagaagaacgcgctctggatcctcctcgcctacctcttcatggtgacggtcgccgggtacacggcggggcagcgcgccaggcaggtgccgcgcgggaagcgcatcgcctgcgtctccatcctcgtcggcaccgccgtcaccatgctcctgctcgtcctcctcgacgtcttccccttcaccccgcgctacatcatccccgtcgccggcatgatggtcggcaacgccatgaccgtcaccggcgtcaccatgaagaagctccgggaggacgtcaagatccagaggaacctggtggagacggcgctggcgctgggcgcgacgccgcggcaggcgacgctgcagcaggtgaagcggtcgctggtcatcgcgctgtccccggtgatcgacagcgccaagacggtggggctcatcgcgctgccgggcgccatgacggggctcatcatgggcggcgcgtcgccgctggaggccatccagctgcagatcgtcgtcatgaacatgctcatgggcgcctccaccgtcagcagcatcctctccacctacctctgctggccggccttcttcaccaaggccttccagctcgacgacagggtctttgcagactaagatacatgctggattgtaatgtaaccgagtcccagttgtttgagccttttgaggtagaaacagagctaagagctgtggctttcggtgtcactgttgatgctgagttcttggggaggctctcgggcgggtatcgcgcgttggatccccatttgaccaaacagtttttagataatggaaaaaatcaaaaatc

SEQ ID NO: 147205 - DNA, 467 bp, Zea Mays
atcatcagtttctctctagtagaattgagatccctcctaccacatccgttccccttcccttccctcctctcgcgcgccggctccacgcagatccaggagatatgcctcgctatgatgaccgctatggaggcacgcgcttgtatgttggcagattggccactcgtactcgttcccgcgatttagaacatctgtttggcagatatggaagatggtaaacaatgattgttctgaactggtggaggtgcaaaccatctgatatataggagagcctagtaagctaaggggcccttgctacccttcttatagccattttagcaggtactgggttcagtggtactattgagtcttatcaagttacttgtggttgagcctctctccaaaacattgtctttggtagtttctgttacttaaataatgtagaaagtttcccccctcagaaattgtgtgtttgacttggatgatcttgt

SEQ ID NO: 147206 - DNA, 2049 bp, Zea Mays
atcatcagtttctctctagtagaattgagatccctcctaccacatccgttccccttcccttccctcctctcgcgcgccggctccacgcagatccaggagatatgcctcgctatgatgaccgctatggaggcacgcgcttgtatgttggcagattggccactcgtactcgttcccgcgatttagaacatctgtttggcagatatggaaggtaagaccagcactgtgctcagtcagagattgccaagagtatccagtaattgaaaatcttgcaatgctttacattgtctaaaaatatgatcagaccagtcaggatacttgatttctgagaaacacttgggctgtcattatgtatgatcttatagaatgtactagtgaggaggttctcctgctcttttaataggttgttgctatcaggtgtcaagtaaagtaatgagtttcttgttaaattcgccatcagatggtaaacaatgattgttctgaactggtggaggtgcaaaccatctgatatataggagagcctagtaagctaaggggcccttgctacccttcttatagccattttagcaggtactgggttcagtggtactattgagtcttatcaagttacttgtggttgagcctctctccaaaacattgtctttggtagtttctgttacttaaataatgtagaaagtttcccccctcagaaattgtgtgtttgacttggatgatcttgttgaaggtttttcggtttttaccggaggtctttggtggaagggtgcccttggtggacttggtgaccatttggtgaagggtgcccttggtgtaatgttattgactgttttagtggaagttccaagttggtgatgcatttgagtacttgacacatgacgtgacggcttactgtttgtggcaaccctttgcgcagaatacgagaagtggagttgaagcgtgactatgcatttattgagttcagtgatcatcgcgatgctgatgaggctcgataccagctagatggcagggatgttgatgggagtcgtattgttgttgagtttgctaaaggggtcccacgtggttcaggtggctcacgtgaatatatggggagaggccctccaccaggtacaggtcgttgtttcaactgtggagttgatggtcactgggcaagagactgtaaagctggtgactggaaaaacaaatgctaccgttgtggagaaaggggccatatagaaagaaattgccagaacagtcctaggagtctcaggcgagagagaagttactcacggtccccatctccccgccgtggacggggccgcagtcgaagctatagcaggagcaggagccggagtcggagctatagtcgatcaagatccctgtctagatctcctaggggaggtcgtcgtgaccgtgacgataggagatcaaggagtcctagctatagcaggagccccatgcgatctgcctcgccaccagtaaaggaaaaggagcgcagccccgcacctgatggaagcaggagcccaaggagtcgcagcccccaggatcaggtgatgagcccaccaccaaaggataatggcgaaggcaatggctcagaccgtggcggcagccccagagggagggagaacagcaggagctgcagccgcagccgcagtccatctggtagtaaccgcagccctgcggccaatggacgtagccggagtcctggaggtgagcggagcccgagtcctggaggtgagcggagcccgagtcctagaggtgagcggagcccgagtcctagggctgaccgtagcccaagccccaatggcaatggtaacaatgatgctgctgctgatgtcgatgctgatgctgctgcccgcagtggctcccccactggaagcaagtcaccctgagcgctggcggtcccagattgtggtggtgcttctcaatgcaatgggcaatcgtattgctattttttgctaccatatcgaagacacaatagctacatcattttcttctctgaaacaaggactttattttgcttgctttgagatatgactcttaccctctcatggataatatatatatgatatgatgcca

SEQ ID NO: 147207 - DNA, 4116 bp, Zea Mays
atcatcagtttctctctagtagaattgagatccctcctaccacatccgttccccttcccttccctcctctcgcgcgccggctccacgcagatccaggagatatgcctcgctatgatgaccgctatggaggcacgcgcttgtatgttggcagattggccactcgtactcgttcccgcgatttagaacatctgtttggcagatatggaagaatacgagaagtggagttgaagcgtgactatgcatttattgagttcagtgatcatcgcgatgctgatgaggctcgataccagctagatggcagggatgttgatgggagtcgtattgttgttgagtttgctaaaggggtcccacgtggttcaggtggctcacgtgaatatatggggagaggccctccaccaggtacaggtcgttgtttcaactgtggagttgatggtcactgggcaagagactgtaaagctggtgactggaaaaacaaatgctaccgttgtggagaaaggggccatatagaaagaaattgccagaacagtcctaggagtctcaggcgagagagaagttactcacggtccccatctccccgccgtggacggggccgcagtcgaagctatagcaggagcaggagccggagtcggagctatagtcgatcaagatccctgtctagatctcctaggggaggtcgtcgtgaccgtgacgataggagatcaaggagtcctagctatagcaggagccccatgcgatctgcctcgccaccagtaaaggaaaaggagcgcagccccgcacctgatggaagcaggagcccaaggagtcgcagcccccaggatcaggtgatgagcccaccaccaaaggataatggcgaaggcaatggctcagaccgtggcggcagccccagagggagggagaacagcaggagctgcagccgcagccgcagtccatctggtagtaaccgcagccctgcggccaatggacgtagccggagtcctggaggtgagcggagcccgagtcctggaggtgagcggagcccgagtcctagaggtgagcggagcccgagtcctagggctgaccgtagcccaagccccaatggcaatggtaacaatgatgctgctgctgatgtcgatgctgatgctgctgcccgcagtggctcccccactggaagcaagtcaccctgagcgctggcggtcccagattgtggtggtgcttctcaatgcaatgggcaatcgtattgctattttttgctaccatatcgaagacacaatagctacatcattttcttctctgaaacaaggactttattttgcttgctttgagatatgactcttaccctctcatggataatatatatatgatatgatgccactggtgcttgcttgcatctgaataagtgaatgctcgcatgttgaggtttgcctgatgagtgctgagggctgaggccgtgagtcaaaacaacccgatactgcatttagaaattgcggttgatgcgcgacttgtgctgccgctgttgctggttcttgctgccaaccgcacggtaacagagcgctggtgagaccgtgatcgtcctggaagacttcttgctgctcacatggactgggtggagtaacggtgaccggtacaacgacccttgtttgatcctctcttttttttcctttttacgatatgttcggtgacatggtttccgacaccttcaccatctttgtagcgtgtctttcagcggccaactccgactcgcgtgctccagctccaggcagctccactcctatgcttcttctacatatataagtaaacgcgccaagccacgccacgctctgccatcccaacccgaccacctgccgaccgaggtctccgcagcgacacgccaccaccagagcgcgccgagctcgtgcacccagcaaggagcaaaggaccaacaaccgactgacgcggatggccaccccgggccacgccgtcgcggtcgacatcgacgagccagcctcctgcggcaacggcgaggcggcggcggccacgccgctgccccagccgacggtgccgtacgtgctccgcttcaccgacctgtcctacagcataaggaagcgcggcagcgggctaggctgcctgccttcgcgctggcccagcaaccgcctggcgtccttggacgcgccggcgtcgtccgcgaccgccgccagcgccacccggaacaccaagacgctgctggacggcatctccggggaggcccgggagcgggagctgttcgcggtgatgggcgcgagcgggtcgggcaagtcgacgctgctggacgcgctggcggggcgcatcgcgcgggacagcctccgcggcggcggggccacgctgaacggggagccgctgcagggccggcggctgcgcgccatctccgcgtacgtgatgcaggacgacttgctgtacccgatgctgacggtgcgcgagacgctgctgttcgccgccgagttccgcctgccccgcgcgctgcccgcggaccgcaagcgcgcgcgcgtcgacgcgctcgtcgaccagctcggcctcgcccgcgccgccgacaccatcatcggcgacgaggcccaccgcggggtgtcgggcggcgagcgccgccgcgtgtccatcggcaccgacatcatccacgaccccatcctgctgttcctcgacgagcccacctcgggcctcgactccgccagcgccttcatggtcgtgcaggtgctccgccgcatcgcgcgcagcggcagcgtcgtcatcatgaccgtccaccagcccagcgcgcgcatcctcgccatcctcgacaggctgctcctgctctcgcgggggcgcaccgtgtacgccggcacgcccgcggggctcaagcccttcttcgccgacttcggcgcgcccatcccggacaacgagaacccggccgagttcgcgctcgacaccatccgcgagtacgagcgctgccccgacggcgccgccccgctcgccgacttcaacgtcaagtggcagaacggcagcagttccacttccacctttgacaacaacaacgacgacgacaacgatagcagcagcaagctcatgccgctggagctcgccatcgccgagagcgtgtcccgcgggaagctggtggccgggagcgcggtcaccgcgtcgtcggtgccaacgttcgccaacccgccgtggaccgaggtgtgggtgctcatcaagcgctccttcaccaacacgggccgcatgccggagctcttcgtcatgcgcctcggcaccatcatggtcaccggcttcatcctggccaccatcttctggcgcctcgacgacacgcccaagggcgtgcaggagcgcctgggcttcttcgccatggccatgtccaccatgttctacgtgtgcgccgacgcgctgccggtgttcgtgcaggagcgccacatctacctccgcgagaccgcgcacaacgcctaccgccgcatctcctacgtgctggccaacgccgtggtcgcgttcccgccgctggtgttcctgtcgctggcgttcgcggtcaccacgttctgggcggtggggctcgcgggcggcgccccctcgttcctcttcttcgtgctcatcatcctcgcctccttctgggcgggcagcggcttcgtcaccttcctctccgctgtggtgccgcacgtcatgctgggctacacggtggtcgtcgccatcctcgcctacttcctcctcttctcgggcttcttcatcaaccgcgacaggatcccggactactggatctggttccactacctgtcgctggtcaagtacccgtaccaggcggtgctgcagaacgagttcagggacgcctcgcgctgcttctcgcgcggcgtcgagatgttcgagggcacgcccatagggcacatgacggagcccgtcaagctcaaggtgctgcaggccatcagcaggacgctggggtccaacatgacggccacaacctgcgtcaccaccggcgccgacgtgctggcgcagcaggccgtcacggacattggcaaatggaaatgcctgctggttactgtggcctgggggttcttcttcagggcactcttctacgtcgtcttgctcgttggcagcaagaataagaggaagtaaaattagtatacacaatgtatacggcgtatacataacatatacatatgtgtcaatgtgtgacgg

SEQ ID NO: 147208 - DNA, 1592 bp, Zea Mays
agaattgagatccctcctaccacatccgttccccttcccttccctcctctcgcgcgccggctccacgcagatccaggtacctgtcctatcaccgttctctctctcgtctcttgccggcgagcggccgccgtatcgctcgctctccacggagggacgcgattgccgctacgtcccgtggggccgcgaatcggggcgttccttcgttcgttcctggctttgccgcgctgcgtggcggggatcgtctgcccgtcggtgtttgttttctagaagcgattctattgttcagatgaacctccgtgcacgccccgcatgcagtttgacgcggggacctgagatatgcctcgctatgatgaccgctatggaggcacgcgcttgtatgttggcagattggccactcgtactcgttcccgcgatttagaacatctgtttggcagatatggaagaatacgagaagtggagttgaagcgtgactatgcatttattgagttcagtgatcatcgcgatgctgatgaggctcgataccagctagatggcagggatgttgatgggagtcgtattgttgttgagtttgctaaaggggtcccacgtggttcaggtggctcacgtgaatatatggggagaggccctccaccaggtacaggtcgttgtttcaactgtggagttgatggtcactgggcaagagactgtaaagctggtgactggaaaaacaaatgctaccgttgtggagaaaggggccatatagaaagaaattgccagaacagtcctaggagtctcaggcgagagagaagttactcacggtccccatctccccgccgtggacggggccgcagtcgaagctatagcaggagcaggagccggagtcggagctatagtcgatcaagatccctgtctagatctcctaggggaggtcgtcgtgaccgtgacgataggagatcaaggagtcctagctatagcaggagccccatgcgatctgcctcgccaccagtaaaggaaaaggagcgcagccccgcacctgatggaagcaggagcccaaggagtcgcagcccccaggatcaggtgatgagcccaccaccaaaggataatggcgaaggcaatggctcagaccgtggcggcagccccagagggagggagaacagcaggagctgcagccgcagccgcagtccatctggtagtaaccgcagccctgcggccaatggacgtagccggagtcctggaggtgagcggagcccgagtcctggaggtgagcggagcccgagtcctagaggtgagcggagcccgagtcctagggctgaccgtagcccaagccccaatggcaatggtaacaatgatgctgctgctgatgtcgatgctgatgctgctgcccgcagtggctcccccactggaagcaagtcaccctgagcgctggcggtcccagattgtggtggtgcttctcaatgcaatgggcaatcgtattgctattttttgctaccatatcgaagacacaatagctacatcattttcttctctgaaacaaggactttattttgcttgctttgagatatgactcttaccctctcatggataatatatatatgatatgatgccactggtgc

SEQ ID NO: 147209 - DNA, 2700 bp, Zea Mays
tcatatatggctcaaatacgatttttgtaactgcattctatttccgatctgtcttgtacaagtttggctaccaaactcgataagaaacagccgcgaaggggaacggaaaacgcccactcgcccagcagcggccaactccgactcgcgtgctccagctccaggcagctccactcctatgcttcttctacatatataagtaaacgcgccaagccacgccacgctctgccatcccaacccgaccacctgccgaccgaggtctccgcagcgacacgccaccaccagagcgcgccgagctcgtgcacccagcaaggagcaaaggaccaacaaccgactgacgcggatggccaccccgggccacgccgtcgcggtcgacatcgacgagccagcctcctgcggcaacggcgaggcggcggcggccacgccgctgccccagccgacggtgccgtacgtgctccgcttcaccgacctgtcctacagcataaggaagcgcggcagcgggctaggctgcctgccttcgcgctggcccagcaaccgcctggcgtccttggacgcgccggcgtcgtccgcgaccgccgccagcgccacccggaacaccaagacgctgctggacggcatctccggggaggcccgggagcgggagctgttcgcggtgatgggcgcgagcgggtcgggcaagtcgacgctgctggacgcgctggcggggcgcatcgcgcgggacagcctccgcggcggcggggccacgctgaacggggagccgctgcagggccggcggctgcgcgccatctccgcgtacgtgatgcaggacgacttgctgtacccgatgctgacggtgcgcgagacgctgctgttcgccgccgagttccgcctgccccgcgcgctgcccgcggaccgcaagcgcgcgcgcgtcgacgcgctcgtcgaccagctcggcctcgcccgcgccgccgacaccatcatcggcgacgaggcccaccgcggggtgtcgggcggcgagcgccgccgcgtgtccatcggcaccgacatcatccacgaccccatcctgctgttcctcgacgagcccacctcgggcctcgactccgccagcgccttcatggtcgtgcaggtgctccgccgcatcgcgcgcagcggcagcgtcgtcatcatgaccgtccaccagcccagcgcgcgcatcctcgccatcctcgacaggctgctcctgctctcgcgggggcgcaccgtgtacgccggcacgcccgcggggctcaagcccttcttcgccgacttcggcgcgcccatcccggacaacgagaacccggccgagttcgcgctcgacaccatccgcgagtacgagcgctgccccgacggcgccgccccgctcgccgacttcaacgtcaagtggcagaacggcagcagttccacttccacctttgacaacaacaacgacgacgacaacgatagcagcagcaagctcatgccgctggagctcgccatcgccgagagcgtgtcccgcgggaagctggtggccgggagcgcggtcaccgcgtcgtcggtgccaacgttcgccaacccgccgtggaccgaggtgtgggtgctcatcaagcgctccttcaccaacacgggccgcatgccggagctcttcgtcatgcgcctcggcaccatcatggtcaccggcttcatcctggccaccatcttctggcgcctcgacgacacgcccaagggcgtgcaggagcgcctgggcttcttcgccatggccatgtccaccatgttctacgtgtgcgccgacgcgctgccggtgttcgtgcaggagcgccacatctacctccgcgagaccgcgcacaacgcctaccgccgcatctcctacgtgctggccaacgccgtggtcgcgttcccgccgctggtgttcctgtcgctggcgttcgcggtcaccacgttctgggcggtggggctcgcgggcggcgccccctcgttcctcttcttcgtgctcatcatcctcgcctccttctgggcgggcagcggcttcgtcaccttcctctccgctgtggtgccgcacgtcatgctgggctacacggtggtcgtcgccatcctcgcctacttcctcctcttctcgggcttcttcatcaaccgcgacaggatcccggactactggatctggttccactacctgtcgctggtcaagtacccgtaccaggcggtgctgcagaacgagttcagggacgcctcgcgctgcttctcgcgcggcgtcgagatgttcgagggcacgcccatagggcacatgacggagcccgtcaagctcaaggtgctgcaggccatcagcaggacgctggggtccaacatgacggccacaacctgcgtcaccaccggcgccgacgtgctggcgcagcaggccgtcacggacattggcaaatggaaatgcctgctggttactgtggcctgggggttcttcttcagggcactcttctacgtcgtcttgctcgttggcagcaagaataagaggaagtaaaattagtatacacaatgtatacggcgtatacataacatatacatatgtgtcaatgtgtgacggtgaaacaaatgtataggtcgacatgtgaaattattgttttgtttttaagaattgccgtattttttttcaaacatgcgtttacctagagtactgaattatatttgaattctttgcagttattcaacggcgtcatgctttcaatagatatacatatatgt

SEQ ID NO: 147210 - DNA, 312 bp, Zea Mays
atgaaggagtgcaacattcaggattttgacttggagaaagcccagcttgacctagggcatggctacaacagggctgagatgaagttcaatgtgaatcgtgttgataacatggtgattcaggcaatctttctattggatatgcttaacaaggacatcaattccttctccatgagagtcaggaatcagtttttaaagaaaatctttgtattctcatttttaactttatatgcagcccctcaaatcaactttggaacccaaatggtcaagcctttggatggaaagttcagcaaaggctacttccgaaattggtga

SEQ ID NO: 147211 - DNA, 129 bp, Zea Mays
aattatacttctctgatagatggatgtgttctttcttcataatttacaccaattgagaatgaaaattatagtgaagattttgatctcaagcaagcattaaaaaagaacaggagttaacatacctcatcc

SEQ ID NO: 147212 - DNA, 1568 bp, Zea Mays
atgtggcgcaagtaataagaggattgttgctagtttgctagttatacatccatgacattcctgaatcatttattatatctaagtagtttatatcgagacattggaggccaccaaatttaggaaagacataatcgagagcgtggtgcgcatctatccaagacaaaaatgatactcactactatagtaagaataggtagggatccaacagcaataatgatgacgacaactttgttagttaggatacctatccaccgtgtcactacaccttatctactattttaaagcaccagtgtaacacactaaaaattcaaatctacaaaatttcttgaactcgttctaaattcaaaataaattttaaaatttcgttttaaaatatttgtatgcgaattgatttcaacaaagaaaatatagtgctctatattctctctaaaattcttatcaaaatgtcatacaaatattttccaagtaattctctttaaatcctttccaaaaatactaactaaatattccagcgatagttctccaaatactacctgatgtttggtgtcctccaatcattcagatctgattttgcttgctctattgccttgaactcttcccctagctgatgtgacacttggttgttgtatttcttggacgaaaatgcctggtggaacctgtgctcggcttgatcccaacttagatagagtatctgcttccatgttacggtttctctctatgtggtggaacttcaacccttcaaatttgtatttaaccttcttgactacggcgcagtacttgctcattgactcagtggagcaatctcaatccttgttgatctggctaatgacgaccagagaatctccatacacagtggcggatgcaggacaaaaattcatggggggccaaaaagaccacatgagagctatggttttctagttcgtcaagcctgccgaccccaggggaagtcatatcgttgcaacgagggagatctatcttgtcgagtggattgacatcacgataaaaacaggacaggggacagaggcgtcaggaagggatggagtcgggtggcgtcgcatcgggaatgggtcaacaacggaaacggggcagcgagcagactggtttaggtggtgtcggaaatgttgggcgccttcggcttccgaaggtcctcaaaaacatgatttaacaatgcctctggagtataatgtgtggacagggatcttcgaacaagagcccacggtatgaagaagcacggaaataatacgaaagatggagcagagccgaagctgcgcagaagtgagcttcggcatgatggcagaaaagaggaaaccgacttaaagaggaaaagactatctagacccagataaattactatagagttgttgtcataggcaaagggcctggatgtaattttgcatgggctgcgacccgtgcctataaataggtgaacagtattcccgtactgttcacgctgacttggcatctgctttcgcgtcacgcttgtacccttgctttccttcgagccgaaggtatatttgtaatttgttattgttaatacagtaacgaaaataaaaataaattaataacaa

SEQ ID NO: 147213 - DNA, 3762 bp, Zea Mays
gcttctgcaacgactccctccctgcctcctcatcaacttgcagtgcagcagaagcccaagcagagggaggaggagagacaggcgccgaccaagccccgaccgagcgagcgccgcgcatgcggttcccacctccaccccaccaccaccactactcgtagtcgggggcccacccaactgcctccgggaccgggaccgggaccgggaccaggacgactccttgtcgtacgtgctttcctcccgctgccgccgccgcttcatccgccaggactccgcgcgggcattgttctccgacggcgatgggcgaggcagtgcccgaccccgacgacctggccgcgttcccggcgtgggcgcggtcggtggcggactgcgaggcgcggctcggggtgagcgtcacgcgcggcctctcgtccgccgaggccgccgcgcggctgcgcgcccacggacccaacgagctggccgaccacccggccccgtcgctgctgcgcctgctgctggaccagttcgaggacacgctggtgcgcgtcctgctcgccgccgccgccgtctccttcctcctcgcgctctcctccagcgccggcgcgctcacgctcgccgccttcgtcgagccgctcgtcatcttcctcatcctcgtcgtcaacgccgccgtcggggtctggcaggaggccaacgcggagcgggcgctggacgcgctgcgggagatccagtcccaccacgccgccgtcctgcgcgacgccgcatggctccccgcgctcccggcccgggacctcgtcccgggcgacgtcgtccagctccgcgtcggggacaaggtgcccgccgacatgcgcgtcgccagcctcctcacctccacgctccgcctcgagcagggctcgctcacgggggagacggcctccgtcaacaagacctcccgcgcgctcccgctcgaggacgccgacatccaggccaaggactgcatggtcttcgccggcaccaccgtcgtcaacggcgccgcgctctgcatcgtcgcgcgcaccgggatggacacggagatcggcgccatccacgcccagatccaccaggcctcgcaggaggacgacgacacgccgctcaagaagaagctcaacgagttcggggaggcgctcaccaagatcatcggcctcatctgcgccctcgtctggctcatcaacgtcaagtacttcctcaccttcgacctccagggaggatgggtgcccaggaacatcaccttctccttcgagaagtgcacctactactttgagatcgccgtcgcgctcgccgtcgccgccatacccgagggcctgcccgccgtcatcaccacctgcctcgcgctcgggaccaggaagatggctgccaagaatgcgctcgtcaggaagctgcctagcgtcgagaccctcggctgcaccaccgtcatctgctccgacaagaccggcacgctcaccaccaacaagatgtccgtcgccaagctcgtggccgtcggcgattcctcgcaggaggttaggaccttcaaggtggacggtacgacttacgatccccgggacgggaaaattcacgactggcctgctgggagcattgacgccaaccttgagacgatcgccaaggtcgcagctgtgtgcaatgatgccaatgtggcacattcttcgcatcagtatgttgccactggaatgccgacagaggcagctcttaaggttttggttgagaaaatgggtctgcctggaggaaagaatggtctgtccttggatccgtctgagatactaggctgctgcgcatggtggaacaatgttgccaaaaggattgctaccctcgagtttgatcgcacaaggaaatcaatgggcgtcattgtgaaaacaagttcaggaagcaatgccctgctcgtgaagggagctgttgaaactttgcttgagcgaagtagccacattcagctgaaggatggttccgtggtgccattagatgagaaagcaaagagaactatcctggcaagcctccatgagatgtcgaccaatgctctgcgctgcctcggttttgcatacaaggaggcgctagcagaatttgcaacatatgatggcgagaaccatcctgctcataagctcttgctggatccggccaattatgcagctattgagactgacctaatatttgcgggtcttgtaggcctaagggacccaccccgggaagaggtctatgatgctattgaagattgcagagctgctggcatccgagttatggtgataacaggggacaacaaagaaaccgctgaggcaatatgccgtgaaatcggcgtgttttcacctgacgaggatatcaccttcaagagccttacagggaaggagttcatggcgctggaggacaagaagacgctgctacgcaggaaaggtggcctcctgttctctagggcggaacctaggcacaaacaagagattgtgaggttgctgaaggaagatggggaagttgtcgccatgactggagatggagtcaatgatgcccctgctttgaagctggctgacatcggtgtagctatgggcattactggaactgaggttgccaaagaggcgtctgacatggtgttggctgacgacaattttagcaccatagtttctgcagtcggtgaaggaagatcgatctacaacaacatgaaagctttcataagatacatgatttcgtcaaacattggtgaagtcgcttctatattcctaacttccgccctgggcattcctgagggtttgattcccgtccaacttctatgggtcaatctcgtcaccgacgggccccccgcaactgctctaggtttcaatccgcctgacaaggacatcatgaagaagccacctaggaggagcgacgactcactgatcactccctggatcttgttccgctacctggtaaacggtctccctcgcgtgctacccgtcccttgactctgttgggtcgtcatcttttggagactttgtctgcaggtgattggcctttacgttgggatggcgaccgttggcatcttcgtcatatggtacacacatgggtctttcatgggcattgacctgaccggagacggccacactctggtcacctactcgcagctttcgaactggggccagtgctcttcctgggacaacttcacggcctcgcctttcaccgccggagccagaacgttcgcgttcgacgacgacccgtgcgactacttccacgcaggcaaggtgaaggcgacgacgctgtccctgtccgtgctggtggccatcgagatgttcaactcgctgaacgccctctccgaggacagcagcctgttggccatgccgccctgggtcaacccgtggctgctcgtcgccatgtcggtctcgttcggcctccacttcctcatcctctacgtgccgctgctcgccacggtgttcggcatcgtcccgctcagcctcaacgagtggctgctggtcctgctggtggctctcccggtggtgctcatcgacgaggctctcaagctcgcgggcaggtgtacgagcccttcttcgggccccaccaggcggtccaggaagaagaagcagaagggcgagtagcgagcgggcgctaacatttgactccgtgctcagttactaaaccattccattaatcatgtaaacaaaagatgaacctcagtcagtcaatcaatcaatacaggagataacccattttcactgtttctctttctactctctctccaccctaacgccaaaacaacagcagcacagtagcttctttgttctcagaacaagttgttaattagttggcaacatatgttatcctgtgaat

SEQ ID NO: 147214 - DNA, 3718 bp, Zea Mays
gcttctgcaacgactccctccctgcctcctcatcaacttgcagtgcagcagaagcccaagcagagggaggaggagagacaggcgccgaccaagccccgaccgagcgagcgccgcgcatgcggttcccacctccaccccaccaccaccactactcgtagtcgggggcccacccaactgcctccgggaccgggaccgggaccgggaccaggacgactccttgtcgtacgtgctttcctcccgctgccgccgccgcttcatccgccaggactccgcgcgggcattgttctccgacggcgatgggcgaggcagtgcccgaccccgacgacctggccgcgttcccggcgtgggcgcggtcggtggcggactgcgaggcgcggctcggggtgagcgtcacgcgcggcctctcgtccgccgaggccgccgcgcggctgcgcgcccacggacccaacgagctggccgaccacccggccccgtcgctgctgcgcctgctgctggaccagttcgaggacacgctggtgcgcgtcctgctcgccgccgccgccgtctccttcctcctcgcgctctcctccagcgccggcgcgctcacgctcgccgccttcgtcgagccgctcgtcatcttcctcatcctcgtcgtcaacgccgccgtcggggtctggcaggaggccaacgcggagcgggcgctggacgcgctgcgggagatccagtcccaccacgccgccgtcctgcgcgacgccgcatggctccccgcgctcccggcccgggacctcgtcccgggcgacgtcgtccagctccgcgtcggggacaaggtgcccgccgacatgcgcgtcgccagcctcctcacctccacgctccgcctcgagcagggctcgctcacgggggagacggcctccgtcaacaagacctcccgcgcgctcccgctcgaggacgccgacatccaggccaaggactgcatggtcttcgccggcaccaccgtcgtcaacggcgccgcgctctgcatcgtcgcgcgcaccgggatggacacggagatcggcgccatccacgcccagatccaccaggcctcgcaggaggacgacgacacgccgctcaagaagaagctcaacgagttcggggaggcgctcaccaagatcatcggcctcatctgcgccctcgtctggctcatcaacgtcaagtacttcctcaccttcgacctccagggaggatgggtgcccaggaacatcaccttctccttcgagaagtgcacctactactttgagatcgccgtcgcgctcgccgtcgccgccatacccgagggcctgcccgccgtcatcaccacctgcctcgcgctcgggaccaggaagatggctgccaagaatgcgctcgtcaggaagctgcctagcgtcgagaccctcggctgcaccaccgtcatctgctccgacaagaccggcacgctcaccaccaacaagatgtccgtcgccaagctcgtggccgtcggcgattcctcgcaggaggttaggaccttcaaggtggacggtacgacttacgatccccgggacgggaaaattcacgactggcctgctgggagcattgacgccaaccttgagacgatcgccaaggtcgcagctgtgtgcaatgatgccaatgtggcacattcttcgcatcagtatgttgccactggaatgccgacagaggcagctcttaaggttttggttgagaaaatgggtctgcctggaggaaagaatggtctgtccttggatccgtctgagatactaggctgctgcgcatggtggaacaatgttgccaaaaggattgctaccctcgagtttgatcgcacaaggaaatcaatgggcgtcattgtgaaaacaagttcaggaagcaatgccctgctcgtgaagggagctgttgaaactttgcttgagcgaagtagccacattcagctgaaggatggttccgtggtgccattagatgagaaagcaaagagaactatcctggcaagcctccatgagatgtcgaccaatgctctgcgctgcctcggttttgcatacaaggaggcgctagcagaatttgcaacatatgatggcgagaaccatcctgctcataagctcttgctggatccggccaattatgcagctattgagactgacctaatatttgcgggtcttgtaggcctaagggacccaccccgggaagaggtctatgatgctattgaagattgcagagctgctggcatccgagttatggtgataacaggggacaacaaagaaaccgctgaggcaatatgccgtgaaatcggcgtgttttcacctgacgaggatatcaccttcaagagccttacagggaaggagttcatggcgctggaggacaagaagacgctgctacgcaggaaaggtggcctcctgttctctagggcggaacctaggcacaaacaagagattgtgaggttgctgaaggaagatggggaagttgtcgccatgactggagatggagtcaatgatgcccctgctttgaagctggctgacatcggtgtagctatgggcattactggaactgaggttgccaaagaggcgtctgacatggtgttggctgacgacaattttagcaccatagtttctgcagtcggtgaaggaagatcgatctacaacaacatgaaagctttcataagatacatgatttcgtcaaacattggtgaagtcgcttctatattcctaacttccgccctgggcattcctgagggtttgattcccgtccaacttctatgggtcaatctcgtcaccgacgggccccccgcaactgctctaggtttcaatccgcctgacaaggacatcatgaagaagccacctaggaggagcgacgactcactgatcactccctggatcttgttccgctacctggtgattggcctttacgttgggatggcgaccgttggcatcttcgtcatatggtacacacatgggtctttcatgggcattgacctgaccggagacggccacactctggtcacctactcgcagctttcgaactggggccagtgctcttcctgggacaacttcacggcctcgcctttcaccgccggagccagaacgttcgcgttcgacgacgacccgtgcgactacttccacgcaggcaaggtgaaggcgacgacgctgtccctgtccgtgctggtggccatcgagatgttcaactcgctgaacgccctctccgaggacagcagcctgttggccatgccgccctgggtcaacccgtggctgctcgtcgccatgtcggtctcgttcggcctccacttcctcatcctctacgtgccgctgctcgccacggtgttcggcatcgtcccgctcagcctcaacgagtggctgctggtcctgctggtggctctcccggtggtgctcatcgacgaggctctcaagctcgcgggcaggtgtacgagcccttcttcgggccccaccaggcggtccaggaagaagaagcagaagggcgagtagcgagcgggcgctaacatttgactccgtgctcagttactaaaccattccattaatcatgtaaacaaaagatgaacctcagtcagtcaatcaatcaatacaggagataacccattttcactgtttctctttctactctctctccaccctaacgccaaaacaacagcagcacagtagcttctttgttctcagaacaagttgttaattagttggcaacatatgttatcctgtgaattatgtagcgttgagtcagatcttcagatgat

SEQ ID NO: 147215 - DNA, 1698 bp, Zea Mays
atgccggcggcgacagcggcgggaggtccggctgctctgctgcgtggatcgtacgttggagccttggagggctggtggagctcgggggcgaagccggcggcccgaggaacctcgggtgcttcggacgggcgcggaggaaccgggaacgggctgggtggagtggataaaaccggaagcaccggcggtgggaccgtgggaggaagaggaggttggggcttgggggtcgttacatcacattatccttatgtattcatccttacattaccaacaagtttatcattcgcaccgaggacatcattgctatactcgatcatttcctccaagggtggtggatggctaggtcctcgtggtagcaaatccccaacaacatcaggtgacatcgctacccttggtggcggatggctaggtcctcgtggtagcaaatccccaacaacatcaggtgacatcgccacccttggtggcggatggctaggtcctcgtggtagcaaatccccaacaacatcaggtgacatcgctacccttggtggcggatggctaggtcctcgtggtagcaaatccccaacaacatcaggtgacatcgccacccttggtggcggatggctaggtcctcgtggtagcaaatccccaacaacatcaggtgacatcgctacccttggtggcggatggctaggtcctcgtggtagcaaatccccaacaacatcaggtgacatcgccacccttggtggcggatggctaggtcctcgtggtagcaaatccccaacaacatcaggtgacatcgctacccttggtggcggatggctaggtcctcgtggtagcaaatccccaacaacatcaggtgacatcgccacccttggtggcggatggctaggtcctcgtggtagcaaatccccaacaacatcaggtgacatcgctacccttggtggcggatggctaggtcctcgtggtagcaaatccccaacaacatcaggtgacatcgccacccttggtggcggatggctaggtcctcgtggtagcaaatccccaacaacatcaggtgacatcgctacccttggtggcggatggctaggtcctcgtggtagcaaatccccaacaacatcaggtgacatcgccgccatggaaggaggcttcataggtccagcggatggcattctccatgatggtggcatcgccgccatgggtggaggatggctaggcccagacggaggggcattgactgaccaggacacaagcttctcaaataagcaagccaagttgctcaagacacagaagttcacgtccgagcttgaccatctggtggatacatcaaaggtcaagttggacgtgatgaaccctggattgccaagcgggtcactaagctacttgggttcgacaaatgtttctgatccatgcagagggtctttacttaatgagaaccccaactcatttaccattgtgataggaccaaaattcacgtccaaactttgcactacatctgctgcatgtttgctttggtgtcccgttccgatatgctgcatgcttagagtttcagacacgatgctcaagcaatgcactggcacacagagttgcaattgcaggcagctacgcttgcactacacatgcgcaaacaattccaacagaatatatagtactacccctatccaacacccgctgcaatacatggatgacattgtttcatcggttataaataccataagatga

SEQ ID NO: 147216 - DNA, 1098 bp, Zea Mays
atgccggcggcgacagcggcgggaggtccggctgctctgctgcgtgaatcgtatgttggagggctggtggagctcgggggcgtagccggcggcccgaggaacctcggggtgcttcgaacgggcacggaggaaccgggaacgggctgggtggggtggataaaaccggaagcgccggtggtgggaggaagaggaggttggggcttggggtcgttacatcacattttccttggtggcggatggctaggtcctcgtggtagcaaatccccaacaacatcaggtgacatcgccacccttggtggcggatggctaggtcctcgtggtagcaaatccccaacaacatcaggtgacatcgctacccttggtggcggatggctaggtcctcgtggtagcaaatccccaacaacatcaggtgacatcgccacccttggtggcggatggctaggtcctcgtggtagcaaatccccaacaacatcaggtgacatcgctacccttggtggcggatggctaggtcctcgtggtagcaaatccccaacaacatcaggtgacatcgccaccaagggtggtggatggctaggcccggagggtggtactcttcctcgtggtagcaaatccccaacaacatcaggtgacatcgccacccttggtggcggatggctaggtcctcgtggtagcaaatcgccaacaacatcaggtgacatcgccaccaagggtggtggatggctaggcccggagggtggtactcttcctcgtggtagcaaatccccaacaacatcaggtgacattgccgccatggaaggaggcttcgtaggtccagcggctggcattctccatgatggtggcatcgccgccatgggtggaggatggctaggcccggacggaggtactctcgtccgtggcaataaatctccgatcatgctaggtggcattgttgagtatggttgtgcatctactgtcgatgccaaaagtgtgatcaatagtgtcagtgccaccacaaccacaattggagatgtgatggctccgacaatactaatcttgctgctaaccatggctagcttgtggtttttcccttcttttgtttttgtggatgtttgtgcatag

SEQ ID NO: 147217 - DNA, 678 bp, Zea Mays
atgcacacccgctcgcgatccttgtttttcctctcctgttcagatccaaaaaaccctagcctcatcaccatcctggtgctcgccttcggcgtggtgttcccgcccaaggccacggccgacgacgtcgtgctacagcggttcgcgctggcgcccgccgacccggcgtctaactccatcatctccttcaacgtcaccgccacggtgtcgctctggaaccccaacatgtaccgggccatcgagtacggcgcgctcgccgtgaccttctccttcaatggcacccgcttcgacgactctgcgtccgtgccggggttcaagcacaaggcgcggaagacggcgacacagagcgtcagagtcggcggcgtgggcaagcccatcaagctgaccagacccggggtgggtgagtttcgggcggagaacgacacgggcagcttcggcgtggagatgcggcgggacatggtgctccagcacaagggccaatcccacccccaccttcaagcctcctcgcgtcgtcgcaaccgcagatctggccaacgtcccccgaccgatcgacccccctctccccctcagcgcggcgaggcacaggtgaggctcgtcctgttccgcggcttcttctgctttggtaattttcttcttccccaacgccatcatccccagcgagcggcctcacaacagcactaa

SEQ ID NO: 147218 - DNA, 965 bp, Zea Mays
atgacggttctggcgcgaactggcttgttctgtgtgcttgctgttgctgggatgcaaggcttggacttggagtgggcggcaggcgcttcggttccaggggcagcagcagcggcacgggtgaacgccgacgcgcagaggcagagcgcaccgccattattcgccgccggtaattttgcctggcgacggatctcgattcccgcagccaaaaccttggtggagaaaatgactgagctggttcgtgctggttcaggtggcagccggttcatcggggcgccgagcttgagcgacaccatcatagaatgggctggcggcggcggcggcggcagcggcagcgcaagtgaagcgccagcgatgggcgccgtgcaggaccaacagcagatcgagctcccgttgtcacccggtacgtacacaaacaccttccgaccaccaaaaccttcctccgcgaacccaacgcgagccggtgagagtggaacagcacggccgcttcagaaaataaaccgtgagctggtgccccctccttcggcagaagacgtgccatttgcgcaggtgtacaggttcgtcggcgacatgttcgacgcggacgcgccggtcccggtggaagcccacctgcagaagctgaaggagatggacgacatcacagccaagacagtcctgttggtgctgcggaacctcgagaacaacctgtcgacgccccagttcgagcctgtgagaaggctgctgtcgacgtatgatccgacaagagccctgtctggccagttgtagagcgcaaacaccttgagacaagctggcaagtgggagctgcatcctgcagctaacacgcacggatggacggacgtttttttctctccagttgtttgttcgacgaacgaggaaaggaggaggctgaaacgcagcagaatagatgggttacacagacaccgatgtgcctggtttttttggatgacagactatatatagcagagcag

SEQ ID NO: 147219 - DNA, 1415 bp, Zea Mays
atgcccctgcacagatgtgccgcgaaaagagtccccggtctcggagtttcggaggcgcaggaagatgtcgggcgccacatgctcgccgacgatggtggacgaggaggagctgacggtggtggaggtgactgtcgtggccgagtacgagagtcgcgtctcgaccttgtcgcgggcggtcttccactgggccatgtggcgggcccttctagggcatggagaacagccctctcggatcttcctcctcccacaggggcggaagctcctgcttcgtcgtctcctcctcctgggagccgactgcgccgatatcctcagttgaagcggagtgcctggatcctagaggacgcgtgcgcatcctgcaccgcctcgccggccacctctgggcggcgacgtggaccccagagccggcgacctctggctgcattgaactgtgttgaggagttcatcaacgccagcgtggaagaggcagaaacacagtgtgcattgcttagttttgcctccttgcgtgatggctgttttacatcagatttagattcattcttgtttggtgcaaggacagtttattggacatgttttcataggtgtttaactcaactttttgcaaaggacatcactctagatgagaaacaggaacttgatgaagtacttcaaagagaggtgctcattgaacagaaccaccgcgagaaatacacagaagatataaatgtgcagagcttaccctggcagggagcaatagagttctgtgattggaaaaataattttcgggttactttaggaatgaacacattaaaggagctggagttgtcaaggtgcaaaaagatctctgaggctggcacattggccgtggatggcacactctcgcaccctctcgctcttcaaaggagtggtcgtggatcagtttacgctcttcaccctcgacgatccaactccaacatcctccaaaggagatccagtgcaatcgatatcattgacctattgatcacattaccgcctataataaatacaataacgattgagaatgaacggattctgtatcatgtgtttcctctatacctcactatggctgttacttacatgtttgccttttggggcaatgggtgtaacttccctattggaaaaggatggtgcgtagctgcaaaagagaggacatcttgcttttgtgctcgcaagaaggatgcaaaggatctgtgatgatcagctgctgttttggattcttgtcatgtaacatctcctatttttaaagagcaaaactgaaaatgcagttccggtcttgttggtgaaccgctagagacttaatgattttatatggtgctgtcggttgtctgttgtcttatatcttactgtatatggtaatcatctttgtttttctagatcttcatgtaattgttgctattcaatcgttttttaaatggttgaaa

SEQ ID NO: 147220 - DNA, 582 bp, Zea Mays
aactcttctagtgcgcgcgcgaagttctctgctcgccacggcgtgtcaagtttccgcgtcgagtccccgcgttgaatcaagcctcatgttgtcgtatccctgttttagtttgtcgtgtcgcgccatcatcgctctgtcgcaagcttgctagccacaattatcttgaccgcgtcagcatgcgactgtggtcgtgttcatcgaattcgacaacgctttgttgtcgattcgactgttgtcgcttcgcgtgttgtcgagcccgtcgttttccacatcttatactcgcgtggtttcctgctcgccggtgcgccctctcggctcgctcagctttgccggttaacgtcgtcgcgtcgcgagtacagctctatatacgtcaccctcctgattgtcgtcgatccgtgtgtcattaagaaattccaagaatcgggtgaagacgaagctagcagcacgatattccccaagcgttcgacaaattgcttggatcggaaaatcgctaccgatctcgtggattcatgtcagctgtggaaatggtaagctgataaattattcagtatagttcgatcgttgaataaattaatgtgttag

SEQ ID NO: 147221 - DNA, 840 bp, Zea Mays
atgctaggtgacatcgccaccaagggtgggggatggctaggtcctgagggtggtactcttcctcgtggtagcaaatccccaacaacatcaggtgacatcgccacccttggtggcggatggctaggtccttgtggtagcaaatcccaaacaacatcacgtgacatcgccacccttggtggcggatggctaggtcctcgtggtagcaaatccccaacaacatcaggtgacatcgccacccttggtggcggatggctaggtcctcgtggtagcaaatccccaacaacatcaggtgacatcgctacccttggtggcggatggctaggtcctcgtggtagcaaatccccaacaacatcaggtgacatcgccacccttggtggcggatggctaggtcctcgtggtagcaaatccccaacaacatcaggtgacatcgccaccaaggttggtggatggctaggcccggagggtggtactcttcctcgtggtagcaaatccccaacaacatcaggtgacatcgccgccatggaaggaggcttcataggtccagcagatggcattctccatgatggttgcatcgccacgatgggtggaggatggctaggcccggacggaggtactctcgtccgtggcaataaatctccaatcatgctaggtggcattgttgagtatggttgtgcatctactgtcggtgccaaaagtgtgatcaatagtggggcgtccactgaccaggacacaagcttctcaaataagcaagccaagttgctcaagacgcagaagttcacgtccgagcttgaccatctgggtctttacttaatgagaaccccaactcatttaccattgtga

SEQ ID NO: 147222 - DNA, 1185 bp, Zea Mays
ctcaccggcccaccgcaagcgcagaagcacaaccacaacacctcgcctcgtcagatcgaccgggaagaagggagcagaagccaaccggctcgtccgcccgttgcctgtcgtcgctatggccgccgtggaggtgtgcgtgaaggccgccgcggggaaccccgacacgctcggcgattgcccgttctcgcagagggtgctgctcacgctggaggagaagaaggtcccgtacgaggtgaagctcgtcgacctcggcaacaagcccgaatggtttctgaacatcagcccagagggtaaggtgcctttgttcaacggtggagatggcaaatgcattgctgattctgatgtaatcacccaagtcattgaggagaagttcccgactccttctctggtcacccctccagaatatgcatcagtgggatcaaagattttcccagcctttgtcaagttcttgaagagcaaggatgctagtgatgggtcagagaaggcgcttctggatgagctgcaggcactggatgatcatctcaaagctcatggcccctacataaatggggagaacgtgtcagcgactgatcttagcctggggccaaagcttttccacctacagatcgcactggagcatttcaaaggctggaagatcccagaaaacctaaccaatgtccatgcctacaccaaggctcttttcagccgtgaatcttttgtcaagactaagccatccgaggagcacgtgattgcgggatgggcgcccaaggtgaatgcataagagccttgtgctttggtgctacctggtggactccatccatttatcttatcagtctttgtcagtggtgtggataggtgtcaagtctgtagcctagatgcatgattcagttggaattatgcagtgccgtgtctcgagtactcagttctggctgttgcggttgtgcatcttaccttctgttgctggttttgtttgaggccatgggcatctcttggtcctatgctgtgagagcgctgtaatgtgggtaccaaataatggagctgcttttatgcttgtggtgtggattctgttgtgccttgctttcatgattctgttttcctgtggtgaattggtgatagcctgagcagcaggttatcttctcctatatatcacatatttcggacctggtttttttcaagcacatgttaaatgaaaatgtttggtgcagt

SEQ ID NO: 147223 - DNA, 638 bp, Zea Mays
gccgcaacacatcattcaaaaagcactgacgggagaagcttgagctagctacgccaatggctatagggcacaagaacaccaccaaagtggcgctcctagttctgctgctgtcattgatgctctctttgacagcgtcagtggcgcgcaatctccaatggcgactgtccgtcgctacggctgtggaggtgtgcgtgaaggctgctgtcggggctcctgacaagcttggcgactgtcccttctcacaaagggtgctgctcactctggaggagaagaaggtcccttaccggatgaggctcattgacctcagtaacaagcctggatggtccgtctcgtttacttttcctgtttattttccagagcagtatcctgtagggtctgacgactaagttgacaaagtactactgggggtcgtgtcttattttctacactcaagttgttctgggcagagatttctctggtgtagttttcatagtttcattgatggactggtagtagagaccaggaaggcaggagcaatatgagacagaatattttgctttctgcttgttttgctttggaggttttagatatatttagtggattcgttggatgtggcagatttccttggtttaactgaactgtattcctggaactggcat

SEQ ID NO: 147224 - DNA, 1285 bp, Zea Mays
gccgcaacacatcattcaaaaagcactgacgggagaagcttgagctagctacgccaatggctatagggcacaagaacaccaccaaagtggcgctcctagttctgctgctgtcattgatgctctctttgacagcgtcagtggcgcgcaatctccaatggcgactgtccgtcgctacggctgtggaggtgtgcgtgaaggctgctgtcggggctcctgacaagcttggcgactgtcccttctcacaaagggtgctgctcactctggaggagaagaaggtcccttaccggatgaggctcattgacctcagtaacaagcctggatgacctttttcaggtttctgaagatcagcccagagggcaaggtgcccgtgtacaacagcggcgatggcaaatggattgctaattctgatgtgatcacccaagtcatcgaggagaagtacccagccccgtctctggcgacgcctccagaatacgcatcagtgggatcgaagattttcccatccttcgtcaagttcttgatgagcaaggatgccagcgacgacggttcggaagaggcacttgtgcgtgagctgcaggcgctggaggagcatctcaaagcccacgggcgtccctacatcagcggggagagagtaacagccgccgacctcagcctggcgccgaagctcttccacctggtggtggcgctggagcatttcaagggctggaaggtgccagaaagcatgtccagcgtccacgcctacacccaggctatgttcagccgcgaatctttcatcaagactaagcccaccaaggagcacttgatcgcgggatgggcggcgaaggtgcccaagccgcccaacctcgtcgtgccttgctggctcatctgatcagtcgcagtcggtggtgcgttgctggttcattatgattgggttgggatacaacaataatgcagcgtgccatgttccgatcacttcccagttgtggtggccatgtttctatatcacctaacgctgccggttaggttcgggaccgtgggcatctgcatcgatctttttcttttcttttcttttaagattacacaccataacatggccttgtgcatctgcactcgtgatgggcatatttgtgacgtggaaatatcttctttcttaagcgcgcgctagtgagaatgttgggcgcaaagtaggcgcgcattacatggtgtggtcgtttgtgcgcacgatgtgttccgattccgatctctcgtggtggtaatgcgatgcagatattattctgtctgtcagtttatatatttgctgtttttttct

SEQ ID NO: 147225 - DNA, 1274 bp, Zea Mays
gccgcaacacatcattcaaaaagcactgacgggagaagcttgagctagctacgccaatggctatagggcacaagaacaccaccaaagtggcgctcctagttctgctgctgtcattgatgctctctttgacagcgtcagtggcgcgcaatctccaatggcgactgtccgtcgctacggctgtggaggtgtgcgtgaaggctgctgtcggggctcctgacaagcttggcgactgtcccttctcacaaagggtgctgctcactctggaggagaagaaggtcccttaccggatgaggctcattgacctcagtaacaagcctggatggtttctgaagatcagcccagagggcaaggtgcccgtgtacaacagcggcgatggcaaatggattgctaattctgatgtgatcacccaagtcatcgaggagaagtacccagccccgtctctggcgacgcctccagaatacgcatcagtgggatcgaagattttcccatccttcgtcaagttcttgatgagcaaggatgccagcgacgacggttcggaagaggcacttgtgcgtgagctgcaggcgctggaggagcatctcaaagcccacgggcgtccctacatcagcggggagagagtaacagccgccgacctcagcctggcgccgaagctcttccacctggtggtggcgctggagcatttcaagggctggaaggtgccagaaagcatgtccagcgtccacgcctacacccaggctatgttcagccgcgaatctttcatcaagactaagcccaccaaggagcacttgatcgcgggatgggcggcgaaggtgcccaagccgcccaacctcgtcgtgccttgctggctcatctgatcagtcgcagtcggtggtgcgttgctggttcattatgattgggttgggatacaacaataatgcagcgtgccatgttccgatcacttcccagttgtggtggccatgtttctatatcacctaacgctgccggttaggttcgggaccgtgggcatctgcatcgatctttttcttttcttttcttttaagattacacaccataacatggccttgtgcatctgcactcgtgatgggcatatttgtgacgtggaaatatcttctttcttaagcgcgcgctagtgagaatgttgggcgcaaagtaggcgcgcattacatggtgtggtcgtttgtgcgcacgatgtgttccgattccgatctctcgtggtggtaatgcgatgcagatattattctgtctgtcagtttatatatttgctgtttttttct

SEQ ID NO: 147226 - DNA, 1385 bp, Zea Mays
acaaacacccacttcacctccgaccacttcacctccgatcccgccaccactacccaccctttcctttgacgtcccgatggcacctgtagatctaacccccaagcagcccaggaaggcctacggcggcgacggcggcgcctactacgagtggagccccgccgacctgcccatgctcggcgtcgcctccatcggcgcagccaagctctcgctcgccgccggcgggctcgcgctccccagctactccgactcagccaaggtcgcctacgtcctccaaggcacgggcacctgcggcatcgtcctcccagaggcgacgaaggagaaggtggtggccgtgaaggagggcgacgcgctggcgctgcccttcggcgtggtgacgtggtggcacaacggccccgccgcgccgaccccgctcacggtgctcttcctcggcgacacctccaagggccacaggccggggcaattcaccaacttccagctgacgggcgcgaccggcatcttcacgggcttctccaccgagttcgtgtcgcgcgcgtgggaccttccggaggcggacgcggcggcgctggtgtcgagccagccggcctcgggcatcgtccgggcgtcctcgtccccgctgccggcgccgtcgccgcgggaccgcgagggggtggcgctcaactgcctggaggcgccgctggacgtggacatcccgggcgggggccgcgtcgtggtgctcaacacggccaacctgccgctggtcaaggaggtcgggctgggcgccgacctggtccgcatcgacgcccactccatgtgctccccgggcttctcgtgcgactcggcgtaccaggtcacctacatcgtccgcggcagcggccgcgtccaggtggtcgggcccgacggggtgcgcgtcctggagacgcgcgtcgagggcggcttcctcttcatcgtgccccgcttccacgtcgtctccaagatcgccgacgcgtccggcatggagtggttctccatcatcaccacccccaacccgatcttcagccacctggccgggaagacgtcggtgtggaaggccatctcggcggaggtgctgcaggcgtcgttcaacaccacgccggagatggagaagctgttccggtccaagaggctcgactcggagatcttcttcgctcccccatccaactgagaaaataggccggaagccccacggtggagtcctctcgttaggtcgtcgtgcttagattaggttagctagcttgcctttaataaaaagagagtggtggtcgtcggcgtcggcttcggcggtctgcttcttcttcattcagtgcgtcggtcggtttagagtctgtcacgtgtcccgtcattgaactgcagtttttgttaataaagtattgttattattaggtattatt

SEQ ID NO: 147227 - DNA, 82 bp, Zea Mays
ctggttatatgcgcgtgtatctaatatgtataagcattgttgctactggtccttatcgagaagcgcataaggagacaacttc

SEQ ID NO: 147228 - DNA, 287 bp, Zea Mays
catgcatgggtttacagaaaaaaaaacaaaatcacatgaaaactggagcagaaattcgaaaagaacaaaccttaagaaaaagttgacccgttcttggattgaaaatgaaaatagcaccattaattggtttggtggtcaagttaccctcaaatgttttgtgaatagtgactcgatacacatttgtatcatccacgaaccatatgatttgattgctgaatatctctccatagttctgtgaagacaggtatggttcaattattcaaattggacatcagttgagtggtaat

SEQ ID NO: 147229 - DNA, 1012 bp, Zea Mays
agcttatctcctcccgtctaggcgacgacgacgacgaagcagcgggaggagcataagcgccgccgatcccgagcatacgagcgagttctccactcatcctccgcctcgtgccgcagatccctacgtacgccgcccgccagccatggcccgctcctcctcgcagtcgcagtcctccgttggcgctggcgccggcgccggcgcgcgcccggccaccgtggggccgcgcggcacggccgcggcggccgccgggatgcgccgccgccgcgccaccgcgtccggcgggggtggcggattctcggggggcggcgggagcaacatgctccgcttctacaccgacgaggcgccggggctccggctctcgcctaccatggtgctcgtcatgtccctctgcttcatcggcttcgtcaccgccctccacatcttcggcaagctctaccgctcccggacggccgcggcctccgcgtgatccgatccgatccgaccgctcttgctcccacacatcggatcagacagacagatcagacggtgaaggttttggtttttgggtgatgaatttgtgtatggcgagacgcgcagcttgttgtgttgcctagcttttggttggtccttactttcgatctgcagatggaaaccctagtactggtcaacttaatgcgccctttctgttattttcttcccttgctttgagaattattactggaataactatgactagtttcttctaattctgcttgctagctacaagtgcatcttcctagctttagatgtgctccattgttgtcgctccattaactactttctgcacttgctaggtattctgggtacttttaccgaactggggagtttgattattgcttcgcaccttacctgctagccataaaattctgcattatgttgtgtgctcctataatttgtcagtgtttgtttcgcccctccagcaagctcttgttctgaaactatagcattcgaagtttgtacaagtagctatgctcgacatgatgttattatgttc

SEQ ID NO: 147230 - DNA, 132 bp, Zea Mays
atggaagggtgcttgcttgccaccatggaagggcttcgtattgcagcaccaattgtgcaggcatcatctcatgctccagttccgttctatgatggccctacttttctagaagcaaacattggtcagcaatga

SEQ ID NO: 147231 - DNA, 171 bp, Zea Mays
atggggctgcatatggcgaggcgatgtctagtcagcacggaccagactatgactagaggacttcacctattgatcctcaggctgtgtatgcaagtggtggaaatgctcatggaaggtgcagactctacatatcttatattgtttcattggttgagtgcaatacatgtattc

SEQ ID NO: 147232 - DNA, 468 bp, Zea Mays
gcatccacgagaggagatcgaaggagactccaattccagtcgcccccatccgttcctcatctcaccagaagcgaagccggaggagggaggaaggagatcgcgagcagccggagccggaggccgagaggatgaagacgttcgacccgtggccggtcttcttccgccgggagtggaagcgcaactggccctttctcacggggttcgccatcaccggcttcatcatcaccaagatgacggccaacttcaccgaggaagacctcaagaactccaagttcgtccaggaacacaagaagcgctgaccaaccgggtgagcaccccccccccccccccccccccccccgatcctagatctcggcctcctggctgatgcttatatgcgatgccgatggcgccagggggatgcggcgcgatgtttcctcgatctattagggatcgatgatgccacgggatttatttttggggcgtttt

SEQ ID NO: 147233 - DNA, 759 bp, Zea Mays
atggatcacactactgaagctaggggaggtgagaataggacaggagcatgtcaacctctgtgttctgaaaaagatgtcccaaaatttgggggcctcattgacgagttcctaccaggctaccactgcagttggaggctgtcgtggctgctgacattgggtgtgctgttgctggcgaggggtgggtcggtgttgcccacggcatggagggtggtggcaagtggccgggtggtcttaccagtctactctttcgtgtcccctctctctgtgccacagagatccagatcctcttcgtttctgcagaagtgcaggactctggttggctccaagcttatacaacaggcactcgagcagtggcttgtgctctatgtcatgtgaagccgtcgttcccctctgcatggtagtctgacaacctgcaatgcagtgcttgagctgatctggattcataactctaatgtagactctgggactaccagccacgctgtagcgttgggcatgaccttaggtgacagggaggtgaataaagctttatttgaccatatctgacaccttattggtatctgctcgtagcacatgcttaaaccttgttaaaatcgaactttttagcgaagtttttttttctcgaacgcgcaggagaactgcacatcattatattgaaagagagaaaggtccgaagtggaccacagtacaatgccataacaggcaatgtagcaaacaactagcagtggtactagataaaaaagctactttggctgttaatat

SEQ ID NO: 147234 - DNA, 1634 bp, Zea Mays
aaagccgaagcgaactagcgaagaaaccacaaccgaaacccacaacaaaagcatcgccaaggtacgtagaacgtagccatggtgtcgtccggaactggaagcattgccaagaggtggcgcgagctccagggcgagaagtcgtggaagggcctcctggagccgctggacatggacctccgcaagtccatcatctcctacggcgagctcgtggcggccaccggcgacggcttcaacaacgagccgcactcgccgcacgttggcctctgcaagtacggccacgacgacctgctgaccaagtcgggagtggccgccgccagccactacaaggtgaccaagttcgtgtacgcgtgggaggattcgaagctcacttggatagggtacgtcgcggtggccacggacggcgagggcgtggcagctctagggaggcgcgacatcgtcgtggcgtggcgcgggtcgatgacaggcgcggaatggtggaaggacgtcgaggttctgccgacgtgtccctggccggcgctgggcctggaggaccactccgtcgggcacgggcacccgtgcgcccgcgtgcacagtggcttcctgtccttgtacacggagccacccaagccgcccaaagacaccaactccgacatggcgttctttgtcaacggcagcgccagagaccaggttctggcggaggtgaggaggctgatggagctccacagggacgaagacaccagcatcaccgtcgtcggccacagcctcggatcggcgctggccatcctgaacgccatcgacctcgtcggcaacggcgtgaactcctccggcctcctcggcgggcggcctccgtgcccggtgacggccatcgtgttcgcgtgcccacacgtcgggaacgacagtttcagagacgccttcacctcgttcaagtacctcaaggtcctccacgtcaagaaccagcaagattgggtgccgtttctcatgggctggctacatgacctgggcgtcacactgcacatcgacacggccctgtcgcactacctcaagaagcccaaccttgtcacggcccacagccttgagagctacatgcacgccgtcgccggcgaggtgggaagcgacggcaagttcaggctgctggtggaccgcgacgtggcgctggtgaacaagagcgccgacgcgctcaaggacgagtaccatgtgccggcgagctggtgggtgccgcacaacaagaacatggtcaagaacgatcaaggcaagtgggagctcaaggattttgagcaattctgacctgaactataaggcgttttaataataataataataataataataataataataataataataataataataataataataataataataataataatctctctattttaaattataaggcgttttgatttttcaaaatatatcgtttttattatacacatagacatactatatataataaaaactatgtatttagaaaaatcaaaatatcttgtaattaattagaaagaccgacgagagtatatatatgtttgtgttgtttcctcttcaataatgccacgcgaggcactacaaaacgatggagtgtatgccatattgtaccctgtttgcattttcgaatataaataaacagctagatatatattttatat

SEQ ID NO: 147235 - DNA, 297 bp, Zea Mays
atgcatttaccctatttttggtttcatcttattctttctttcacacgctttattgtaggtggttcggagttctgtgtatcacaagaggcatctaggttgacctcactcttcttagtgttcatgcccactgcgcaagacaacaccgcaacaccgatggagttggaagatttcatcaggctcgactagatctggatgagatagactgctcgtaaggagagagagagcgtgcttggcttgggaggagcatatttttgttcatcctttcatgagtcatgttacctgtcatgtcagattatg

SEQ ID NO: 147236 - DNA, 1094 bp, Zea Mays
cgccagcccaacacccaccggcaaaccctaacccactcttcctcccttagtccctctcgttcctggcggctggctctctcttccctgcggcggcgcatctgggcacggagccgttcctgtacgactatacgtgcatgcaggagccatgccggggaagcgctggggagtcgttcgacccgttcctgtacgtgcatgcgggagccatgctgggaaagcgctggggagccgttcggcccgttcctgtacgtgtatgcggcggcgcgtctactagcttcagggagcagctgcgcaaggagatcacggcggctcctgtccaaccgccttatcgggccagcggaaggacctgggagtagctacgcaaggagaccacgacgactcctgtccaactgcctcgtcgggccaggggaaggacctcctgtcgctactgctggccgggacggaggaggccaccgaccggcggctcaccacgagggagctggtggacggggcaagaccttcttcttcggcgggcacgagaccacgacgttggcgctgtcgtggatgctgctcatgctcgtcgcgcacccggactgacaggacgcgtttgcgggctcgggcgggcacgagccactaaatgggccgtgctattcgggccgggccggcacgatcgggcctacaccgtgtcgtgctcaggaagagatttgagtccatcggacgtcacgacacggttaagtggacgggcctaaccgtgccgggctcaaacgggtcgggccgagtcgggcttggactgggccgggccgggctgcccgtttggacatctatatgtactcccaaaagtagattatgtatgtatacaattaatataaccgtggggtgtggggaccagctgctgagtggcttatgtatgtaaagcttttaattccattggaagccgctaaacgagctaaaacgctttaatcaacttttagtccattttgtttagaactttagtcagtttgcttttgccccatggatctaaaaagacccatatatggtgggtgttggagtgaggtaaacaaggcaggcaggccacaaggtagcacggcatggccttgacgcctaacaaagaaaaaaaa

SEQ ID NO: 147237 - DNA, 1845 bp, Zea Mays
cttctcttttccctccctcgcccgcccccctcgcctcggcttcgctagctgattccggtcgccatcgccatcgcggcctccactatctccccgtcccagagtcccagcagacgctcccagcaccatccaccatccatccgcaggccggccgcaaggcaaagcacacacggcagcgcgagctgagacgacctgatcgacacacactcacagacagacagagagagagaggggtggcaaaccctagaaccagcatcaccatgatcttcccccctgccttcctccacgattcctcgagctggaacgataaccagcaccaccagcagcaccaggttgcggccggcggcgccggcgacgccagtcatgagcttctccagccgtcaatcatggggggagcgcttcccgatggaggcggtgacggtggcggcgggcaggttattggaggccccgcgaagcccatgcccatggcggagcgcgcgcgcctcgcgaggatcccgctgccggagccggggctcaagtgcccgcgctgcgactccgccaacaccaagttctgctacttcaacaactactccctctctcagccgcgccacttctgccgggcatgccgccgctactggacgcgaggcggcgcgctccgcaacgtgcccgtgggcggcggctaccgccgccacgccaagcgcgccaagcccaagcagcagccggccggtgccggtgccgggaccgggatcgccgccaccaccgccgcgctgcagcaggctcccgcgtcgtcagccgccgcctgcaccgcgacgaccacggcgacgaccaccccgctgcctggcggcggcagcggcggtgggctgtccatgctgccgccgcttttccgcctcgccgacttcgacgccatgagcctcggctcctccggcttctccgggatatcgtcgatgactgggaagcccagctccgtcgacgcctacgcgcactcggtcagcggccatgcacccgctccggggggcgggctgctggagcagtggagggtgcagcagatgcagagcttcccgttcttgcatgcgatggaccagggcctcctgggcccacctctggccatggcaatggcgccggcgccaggaagcgggatgttccagctaggtctagtggacaccaccaccagtgataatggccgtggcggcggcggagaagacggatggtcgtctaccagagatcagccgctccatgtgatgcaagccgcagcagccaccaagaagagggagagctacccggcaccagcaccaagaggcgtgtatgggtatggcgaccaccaccatcaccatctcgctgctgctgctgatggtggtggttacgcttcctattccaccaatgctgctgcaggtaataaccatctattgtaatggccggcagaccgatcgatccagagctcagttcaggtccgtcgtccagctatagctatgctgcggcgatcgtatcggttcgttcctgcaaccagatcgatagagatagagtgtacgtacgacgatcgatggtgtcgtgatgatcatatagaaaaaaaggcaagtagctagcatgcatttgcagtgtttaatttgttcaagaagaagtagagggagaggagagagagagtgaggagaggggcgtgttggtttggatacggacgtgagccgtacttatgttggatcatgcacaaacattagctgcttgcatggtcacttgttttatgtttcatcttctttttatctgatccctttattaggttttactgctgctagtgtcgatcatttggggtgaagcaatgtgtacagttgttcatcattttgttcatgaaaacacctatcatatgccaactatacatgc

SEQ ID NO: 147238 - DNA, 2543 bp, Zea Mays
gactggttggaaaccggaattactcggtagttaggttttgaaggcacgggacgaggcgtgcattagatcattactgcggtcgattcatcaccagcaacataatattaataaaaaaaaccccagagatatttcttgattttttttgagagagaagaaagacaggacagacagagagaggcggagaggagtgcgtgcgcgtcgataaaaagccgtaaagccgtcgccactctttccccattccacgctgcctcggccggcacctacctcccccacttcgccgccggcgggtggagtcgggccggagcagccgctagctcgcctctgttaccccaaaaaagacaaaaaaaaataaagagagagtaccaagcaagccgccggcagctcgggcagccatggggcacggcgtcagctgcgctcgcacgggcgacgagcacaactacttccgcgcggcgcaggtcggggacctcgacgccctggacgcgctcctcgccgccgacccctccctcgcccgccgcgccacgctctacgaccgcctctccgcgctgcacatcaccgccgcgaatggccacctcgaggtgatgtccatgatcttggatcacggggtgccgccggacgccgtgaaccggcacaagcagacgccgctgatgctcgcggcgatgcacggcaagatcgactgcgcgcggaagctcctggaggccggcgccaatatcctgatgttcgactccctgcacgggcggacctgcctgcaccacgcgtcctacttcggccacgtcgactgcctgcgggccatcctcgcggcggcgcggaccacgccggtggccgactcatggggtttcgcccggttcgtcaacgtcagggacgaccgcggcgccacgccgctgcacctcgccgccaggcagggccgctccgcctgcgtgcaggtgctgctggagaacggcgccattgtctccgccctcaccggctcctacgggttccccggcagcacgtcgctgcatctggccgctcgaagcgggaacctggactgcatccggaaactgctcgcctggggcgcggatcgtctccagagggactcagcagggaggattccttacgccgtggcgctgaagcgcaaccacgcggcgtgcgcggcgctgctgaacccgtcggcggcggagcccatggtgtggccttccccgctcaagttcatcagcgagctggacccggaggcgaaggctctcctggaagcggcactgatggacgccaatagggagagggaggagaagatcctcaagggcatcaccaagtattcgcagccatcgcctacttcgccttgcgagcacgatgccattgacgaagcgtccttggaggccagcgacggggagctgtgctgcatctgcttcgagcaggcgtgcagcatcgaggtgcaggactgcgggcaccagatgtgcgcggcgtgcacactggcgctgtgctgccacagcaagccgaacccggcgacgctgacgccgccgtcgccggcctgcccgttctgccgcggcagcatctcgaggctgctggtggcccgggcgagccccgacgccgatgacgacgacaaggccgccgccgcctcgtccccgcagctcgtccggcggcggtcgcacaacctcagatgggcggcggcgacggcgtggacaagcccgagcacgacctgtgatcggcatttgatgctgtgcgtggctgagcagacagcagagcacgaccattttaaaagctgaagcaggcattgccactggctttccaagatgagagacatcacatccaagcgtgattatctactggagtacttgtaatgcatcctcttcttctcccccatgtctggtctatttttgggcgtgctaggatggacctggccggcgcgatatggttgagctgagcttgagccaccgacatgtgtgtaaaactgtcggtcgagagaacacgcagagtggaaccggcgatgtgcactggacttgtgatctggactctgaaggaggcattgcatgttgtaggacagcacagcagcaacagtggtaccggtcggcaggcaggcaggcaggctccgtgagcggtgctccggccatggccgtccggcggtggcagccagccaatggtccgtgaccgtgatgcacgcaggagcggtgcatggagcaaggctcagagcagccgcagttattgtgtgccagtgtcgtacaagcgctgctcacaccacaggcagcagatgcatgccgtcactgaccagctgctttcctgcaagatcttctcgggagctatggtcggtcaggcatgctgcaaaaagcttgaccccttgccaggaaggaagcagagataacccatccctacctccctcgacgtcgacgagatggctatccgtttggacatgaccaagagtaatgctcccagtttcgagcccaacgccgccattactccgacatcatccaagccttacctcagctccaagcgtgtagcccggctacaggctcaaaccctccaccaaactggtgctcgcttcctgacctttttttaaggggtatatgaatgcactagag

SEQ ID NO: 147239 - DNA, 2487 bp, Zea Mays
aggggtggggagccaaccaccacctctccccctgctagtgctcagtcctcgccctctcgctttccgagggagcctttgcctttcccctccgcccgccagccattaatggcggcggcatctccatccactcccccctcgcccccctcccactgctgctacttctagaagcgctggtggcagggcaggcggtatcccggccgctggcgctggcgcgagagttggttggtggtggtcttcagcccccctcgctcttcaggtttagggtggagcgatccgtgcaggccaacgcggggtgcgtgacccagaaagggaaaccgccggctttttctcttctgccgccccgcttttccaatccctcctcaacctcatccgcccccgcccgcaccccgcaggcaccatcaccaaaaaggtccccgccttcttcttcttcttcttcttctcctctgcccctgcttgtcgtttgctcgtgctcccccaccccctttctgattcagcaagggttccttccgcggcgcggcgcgtcgccatgggcaactgctggggcgccaagatcagctccgacagcccgtcccgcggcgcctcatccccgtcagggacggcgtccaagttggcgagcaggaacggggcggcggcagccctgagcgggtgcagcagccacgcgtcgtccgcgtccatgctgccgacgccccgcagcgaggacgagatcctggagtcggccaacgtcagggccttcagcttcaacgagctgaggaccgccaccaggaacttcaggccggacagcgtgctgggcgagggcgggttcggatccgtcttcaagggctgggtcgacgagaagacgctcgccccggctaggcccggcacggggatggtcattgccgtcaagaagctcaaccaggatggataccagggccacaaggagtggctgactgaagtgaactaccttggaacgctgtcgcacccctaccttgtgaagctcgttggctactgcctcgaggacgaacagcgcctcctcgtctacgagttcatgccacgcgggagtctggagaaccatctgttcaggaggagctcctatttccagccgctgtcctggaacctacggatgaagattgcgctcggagcagctaaaggcctcgcgtatctccacagcgacgaggctaaagtcatctaccgtgacttcaagacatctaatgtccttctagatgcgaacttcaatgcaaagctctctgatttcgggctggcgaaggatggtccgaccggcgacaagagccatgtctccactagggtgatggggactcacgggtatgcagctccagaataccttgcgacaggtcatctgaccaccaagagcgacgtgtacagctttggggtggtgctcctagagatgctgtcagggcggcgggcgctggacaagaaccgcccgaacggggagcacaacctggtggagtgggctaggccatacctgagaagcaagcggcgcatatttcgcatcctggacccacggctgggcgggcagtactcccttgccagggcgcagaaggctgcggcgctcgccctgcaatgcctctcggtggagtccaggcacaggcccagcatggacgaggtggtcacagcgttagagcagctccaggacaccaaagaaggaggtaaccatcacctacagaagaggccaggcagccggagcttggataacaatggcggcaaagcggcagggaaggggaagcctgctcctcatgtaaaaccagtttgagtgattggattttatatgccagagtatctctctttttttttcccatccatttgtaggtgtaggtaatatagtagggttcttagagggatttgtaaagaggcaggcagagttctggatgttttctgtctattatgtagttttttttacatcttcaagtctctgtaaagtacgctatgtaaatacataatgacatccagttcggagtgcgatgaattttagtccaggccaacagctcaaccgctgttaaaacttagcaagctgctgagcatagaacggatgcaattgatcaagtgttaacaggcatcaagacgggttccagattcaggcaaattaatctgaaaacatacatacaataaagctgaaaacttcatatatacacacacacacacttgtataacacatcacatttgagcaagtctgtatacatgctgagtgtgggcatctttgatcaaatgattaaacatgtttggtgcagagtgtgagcctttcagtgaccctccctcctgtgagcctttcagtgaccctccctcctgatagcaatggcaccttcgtagcctcttcagtagttcttcatccaaactgtatcatggattcatctaaagagaaaacagaaaagaatacaatgcagcatggggttcatctgcagcgtctggacatctcagaaatgtatctgtattacaaagcacttggctggatcaaatctttcaaatgattcgtacacagtaagcccttctgatcaa

SEQ ID NO: 147240 - DNA, 90 bp, Zea Mays
ccagccgctgtcctggaacctacggatgaagcctgctcctcatgtaaaaccagtttgagtgattggattttatatgccagagtatctctc

SEQ ID NO: 147241 - DNA, 1552 bp, Zea Mays
atggatggctacgagtcagacggaaccaggagtagagttccatacaggctgtcgagatctcctcgtcacagcctactcccatgctatggtgatggagaaggatgtcgccgcaacactgatctcaccacggtcaggatggagaacgaccgttgtgctcagcgaagccaccactcctagagagacgagcagcgtatgtcgtcgtcgtccgacctcgagcagcaggtggccaccgccctccgccgtgtgacccccgtcgccgccgcgcctgctgtagaccgtggaggcgcgccggatctggcggcggcgattcagcgccgaatggcctcgcaacgcgccaggggtgccgacgcgttctacgcgaagttcgcgtcggcccggtcgctcgccgaccagaccttctcacgccgacgagtacagctgaagggactcaaggatcagctccgggacctccagtcgcagctcagggagtctcttacacttcagtcgtgcaaggaatggaaatacaggattgccacggagccgatgtcggaggccacagctacgaatgagcggctccgtagctgggttgcggatttcagggacaagaggaacaagggtgctgcaatcgtatttgagcaacttcaagctgtcgaatcacttgaggcaaacagtaatgaagatgcagagatggcggagaaggtaccaaaagctgttctctggtacaataagttccttggcttccgggtgatcggaggagaaagaggtgtgaagttcgtgttcgacaagattgacccacagcgtccggagaaggaatactcgtttcgcgtaagtccgagatcacaattcatcgatagtgatcctcatgtcaaggacattgatgaattggcgaaggatttggatttgaacgaacatctattcgagtttgtaagaatggccagagagaaattccagtctcccttcatgaacgagacacttcctgtaagcccagatgcctctgccgcaccactcccgtctcccatggtggtgtcagttaacagcagaagcggggaagctcacagtcaaacccaatctctaagcaagaacagtgcacggttacttcctgctaagagaggcgccacagccctgccaggagcttctcctggtgttttgcgtcgttccccacgtctcgagggaatgcggtgagctagttagtagccgtagcaggttccgacccctggatcttgaaccaagcgatcatcatcagctcatataaaccgtggtgattcagctgcccttgcttatgggtggtgcttttttctcccttctaatctaactggaacttatagaagtgtatggttggcaattggccgggtacagtgattaaccctaacctggcctgtaatatattgttatactctggtcattagatgatgagttcgtgagtcgtgtcctggtctgttgtatggtgtcaaatatatagcaggtgttgtttttgtgtgacacccggatttaagggtaaatccggacgtgaattaaatgtgtgctatgatcaagttttacacatatgatgatttatgatatagaaatcaatgtc

SEQ ID NO: 147242 - DNA, 1027 bp, Zea Mays
aagtagtggcgggagaattcaccggcgagggagctccaagcagcggcggggagaactcgccggcgaaggagctccaacctgtgcgcagccggcgggggagatcagagactgacgacgtcttccaagagcacgttaaacagcgtggacaaaaaccaaatgtctccctattcctatttcctagagactgacgagagaagtttacctctgtcttggttctatagcagcgaagccaccactcctagagagacgagcagcgtatgtcgtcgtcgtccgacctcgagcagcaggtggccaccgccctccgccgtgtgacccccgtcgccgccgcgcctgctgtagaccgtggaggcgcgccggatctggcggcggcgattcagcgccgaatggcctcgcaacgcgccaggggtgccgacgcgttctacgcgaagttcgcgtcggcccggtcgctcgccgaccagaccttctcacgccgacgagtacagctgaagggactcaaggatcagctccgggacctccagtcgcagctcagggagtctcttacacttcagtcgtgcaaggaatggaaatacaggattgccacggagccgatgtcggaggccacagctacgaatgagcggctccgtagctgggttgcggatttcagggacaagaggaacaagggtgctgcaatcgtatttgagcaacttcaagctgtcgaatcacttgaggcaaacagtaatgaagatgcagagatggcggagaaggtaccaaaagctgttctctggtacaataagttccttggcttccgggtgatcggaggagaaagaggtgtgaagttcgtgttcgacaagattgacccacagcgtccggagaaggaatactcgtttcgcgtaagtccgagatcacaatgtgagttgaagctccttcaagtgtctggccatcaggccatgtgcctctgttatataattcgttttgttccctccattttccacatgcatatttttcttaaagttattgctctttcacatcagtcatcgatagtgatcct

SEQ ID NO: 147243 - DNA, 1963 bp, Zea Mays
aagtagtggcgggagaattcaccggcgagggagctccaagcagcggcggggagaactcgccggcgaaggagctccaacctgtgcgcagccggcgggggagatcagagactgacgacgtcttccaagagcacgttaaacagcgtggacaaaaaccaaatgtctccctattcctatttcctagagactgacgagagaagtttacctctgtcttggttctatagcagcgaagccaccactcctagagagacgagcagcgtatgtcgtcgtcgtccgacctcgagcagcaggtggccaccgccctccgccgtgtgacccccgtcgccgccgcgcctgctgtagaccgtggaggcgcgccggatctggcggcggcgattcagcgccgaatggcctcgcaacgcgccaggggtgccgacgcgttctacgcgaagttcgcgtcggcccggtcgctcgccgaccagaccttctcacgccgacgagtacagctgaagggactcaaggatcagctccgggacctccagtcgcagctcagggagtctcttacacttcagtcgtgcaaggaatggaaatacaggattgccacggagccgatgtcggaggccacagctacgaatgagcggctccgtagctgggttgcggatttcagggacaagaggaacaagggtgctgcaatcgtatttgagcaacttcaagctgtcgaatcacttgaggcaaacagtaatgaagatgcagagatggcggagaaggtaccaaaagctgttctctggtacaataagttccttggcttccgggtgatcggaggagaaagaggtgtgaagttcgtgttcgacaagattgacccacagcgtccggagaaggaatactcgtttcgcgtaagtccgagatcacaattcatcgatagtgatcctcatgtcaaggacattgatgaattggcgaaggatttggatttgaacgaacatctattcgagtttgtaagaatggccagagagaaattccagtctcccttcatgaacggtaaccagcaatttttgtattctttttacgataatgtgaccaagtatcatacttaattacttattataaacatcttctgcaaatataaacaatccgaatcttctttccctaaaatactggcaaggggcaataggtttaagcagagcagacttgcaagtaaacatgtgactttgcctcaaatacatcctttatatgtagatgcaggacaataggacatacaatgtatacactgtcaagtttcagttgaagacatacaatctatacactgtcaagtttcagttaaagaggctctatggtcttgttattatgtagttttggctgcgtggaagttccaaagcatatttttaatgttgtcgcaaaatgcaaataatatggtgcatgctttccaatctagaaaccagttctcattttttccttccttccggatatggagcgggcccttttatgaccaaagatttgtgtatggaagatgagattgtgttcttcttgttctcctctggaagctgtcggctaactcttgtcactgcgttcctcagagacacttcctgtaagcccagatgcctctgccgcaccactcccgtctcccatggtggtgtcagttaacagcagaagcggggaagctcacagtcaaacccaatctctaagcaagaacagtgcacggttacttcctgctaagagaggcgccacagccctgccaggagcttctcctggtgttttgcgtcgttccccacgtctcgagggaatgcggtgagctagttagtagccgtagcaggttccgacccctggatcttgaaccaagcgatcatcatcagctcatataaaccgtggtgattcagctgcccttgcttatgggtggtgcttttttctcccttctaatctaactggaacttatagaagtgtatggttggcaattggccgggtacagtgattaaccctaacctggcctgtaata

SEQ ID NO: 147244 - DNA, 1613 bp, Zea Mays
aagtagtggcgggagaattcaccggcgagggagctccaagcagcggcggggagaactcgccggcgaaggagctccaacctgtgcgcagccggcgggggagatcagagactgacgacgtcttccaagagcacgttaaacagcgtggacaaaaaccaaatgtctccctattcctatttcctagagactgacgagagaagtttacctctgtcttggttctatagcagcgaagccaccactcctagagagacgagcagcgtatgtcgtcgtcgtccgacctcgagcagcaggtggccaccgccctccgccgtgtgacccccgtcgccgccgcgcctgctgtagaccgtggaggcgcgccggatctggcggcggcgattcagcgccgaatggcctcgcaacgcgccaggggtgccgacgcgttctacgcgaagttcgcgtcggcccggtcgctcgccgaccagaccttctcacgccgacgagtacagctgaagggactcaaggatcagctccgggacctccagtcgcagctcagggagtctcttacacttcagtcgtgcaaggaatggaaatacaggattgccacggagccgatgtcggaggccacagctacgaatgagcggctccgtagctgggttgcggatttcagggacaagaggaacaagggtgctgcaatcgtatttgagcaacttcaagctgtcgaatcacttgaggcaaacagtaatgaagatgcagagatggcggagaaggtaccaaaagctgttctctggtacaataagttccttggcttccgggtgatcggaggagaaagaggtgtgaagttcgtgttcgacaagattgacccacagcgtccggagaaggaatactcgtttcgcgtaagtccgagatcacaattcatcgatagtgatcctcatgtcaaggacattgatgaattggcgaaggatttggatttgaacgaacatctattcgagtttgtaagaatggccagagagaaattccagtctcccttcatgaacgagacacttcctgtaagcccagatgcctctgccgcaccactcccgtctcccatggtggtgtcagttaacagcagaagcggggaagctcacagtcaaacccaatctctaagcaagaacagtgcacggttacttcctgctaagagaggcgccacagccctgccaggagcttctcctggtgttttgcgtcgttccccacgtctcgagggaatgcggtgagctagttagtagccgtagcaggttccgacccctggatcttgaaccaagcgatcatcatcagctcatataaaccgtggtgattcagctgcccttgcttatgggtggtgcttttttctcccttctaatctaactggaacttatagaagtgtatggttggcaattggccgggtacagtgattaaccctaacctggcctgtaatatattgttatactctggtcattagatgatgagttcgtgagtcgtgtcctggtctgttgtatggtgtcaaatatatagcaggtgttgtttttgtgtgacacccggatttaagggtaaatccggacgtgaattaaatgtgtgctatgatcaagttttacacatatgatgatttatgatatagaaatcaa

SEQ ID NO: 147245 - DNA, 1893 bp, Zea Mays
atggacaaccttgagtactgtgagataaactcggacataactctcaactatataacccaaatattgatggaagaaagcgctgacgagaatattagcgcatacaaacatcacgatgcactccaggccatggagaagcccttctacgatattcttggaaaggcatatccatcctcatctaaacagactatggtcaacagtggtagtcaatcaggtctgcctgatgatattaacaacagtcatcacgacctggaacgcagtggtaactctgtcagtgatcttcttcgtgggcgcaagggggtgcgctcgataggcatagatggcggttctgaactttgcgatgtggctttgcagttcaacagaattgctgaggaagcaaagaagtttgttccaagtattgggaacttggtggttgatccagagagcaatgacctttccagttccaaagaggcaaatgggtcagcaattgggcaacatagcaatcaaacaaataaaataaggagctaccctcacgtggacttgaagttggtggaggggagaaacagtaagtattcagcaatctcaaccagtgaaataattcggaatgaactatttgacagagttctgctctctgatgagcagtatctttgcgatgttgctcaccttagagaaatggcaaaagaagcaaacataaatctgcagtatgttcagaacacaggatctgcccaaggaaaacagaagccacaaagtaagaagcaagaaaaggaagcggttgatctcaggggtcttctcatccagtgtgcacaagcgatatcatctaacaaccatccatttgccagtgagctgctgaaaaagatcaggcaccattcttcaccatatggagatggttctcagaggctggcagtttactttgcagatgctcttgaggcacgtgcagctgggactgggagtcaaataaaccagagattagtggtgaagcgaacaagcgtcacagacatgctgaaggcctaccgcctttccatcgcagcatgccctttcggcagggtagcatactacttcgccaataaaacaattgttgatgtgttggggagtcgaccaagggtgcatataattgattttggcatcatgtttggctttcagtggccatcgctaatccagcggcttgcaaagcgagaaggtggtccccctcaacttcgcatcacaggtattgacgtgcccgagacaggttttcgcccctgtaaacagattgaggagacaggaaagcggttggctgagtatgcaagaatgttcaatgtacctttccagtatcaaagtgttgcctcacggtgggaaagcatatacatagcagatctcaatattggcagggatgaggtgctcatagtcaactgcttgcacaagatgaaaaacctcggcgatgagacagaagacatagacagtgcaagggacagggtactgcgtatcatgaagaggatgaatccagatgttctcataaccggtgtcatgaatgggttgcacagctccccgttcttcctaccacgattcagagaggctttgttcttttactcatcacagtttgacatgctaaattcaactgttgtgcatcagaatcatgaggcaaggatcatgatagagagggatctccttggggcagatgtgtttaatgttgtagcatgtgaaggtgcagagaggattgagaggccagagagctacaaacaatggcaagcaagaatcctcaaggctgggttcaagaaacttcctgttgaccagaccattctaaagggttcagtagacagaaaggagctttatcatggtgactttgtcatcgacgaagacagtggctggttgctacagggatggaaaggaaggataatgcatgcgctgtcgtcatggaaacctaaagattcatagattaacaag

SEQ ID NO: 147246 - DNA, 336 bp, Zea Mays
atggaggaaagctgcgacaagcggagcgagaagcaggtggtggcggcggcgaagaagaagaagctggcgaagagcgggcatggcaggaggtggtcttcgtcgacggacctgcaggacatcgagacggcgaccaggacggccgcagtcgacggcggcatgaagcagcagcggcagcaggcagcgcgggagggccagggagaggcggtggagcagcgtcggcgctgtggcggcgccggcgcgcgtctgtcccggaagatcaaggagcaccgggcgcggttctacatcgtgcgccgctgcgtcgccatgctcgtctgctggcgcgacgccgacgactag

SEQ ID NO: 147247 - DNA, 1515 bp, Zea Mays
cagaaggccaccaagttgatgatcacaagctttgtccacggttcagacggcctgggaaaccaggatttccctccatcagctaccaagcctgtagatcaatcggctgctgccttcctggttgagcaaccaaatctataccctggacaagttaccattgtcgccctcagtccactaaccaaccttgctctgacagtcgagcttgaccctttgttctcgaagaatatatggcagattatttttcttggcggtgtgtattcaattaatggtaatgtgaactatgcagctgaggcaaatgtagatattgtgttcacccgcggtgctgatattttggctatggtactaattgtaacacatcaagtagttttaacccgtaattctgccatatttaagggtcacattatttctgctcaggatgtatgcttcatatactgagataatgcttcttttataacctacttctcattagtcaatggcaatctctactactctataagggtccagtgtgggcgtccacactggtaccgtgcccccgcccccaaaattctcgccccgcctcgctctccgtcgcgccattccagggaccctccatcgccgcccccgccatcatcgcgtcagcgcccgcgctccgtcgatggaaggcgccattccagggacccaccccaaccctgcgatcctcacccttccaaggatgccccgcacccatctcgtccaatccctcctcccgcctcacccgctcacaaggtcgacgacgacgaatctaaggacgccaacgccacccctctctgagctccctatggccactgcgggtgagtgcctctgggtagccggtcacccctctcttgcagcctccgagcttcggcgaacgcagaactggcagggcgcgacggccgacgcaatgtacgtgggtagccggcgtccaatgtcggccgccgctggcgagcgcccccggcgcggctgcccaaccaagctctgtccagatctgaccgtctagggcgaggtgaccccctcctggcggcgagcgagacagcccccactccaccccacctcgcaacagccaccgatcagtggagcgcactcaaaactgttggatttattttggaacttaggtgaaggaggaatgggtggagggacgagcaagatggcaacgttctattgaaacaaactgcctcgattattaggctatcattactaaacaaactacctttatcgtcaacctactaacttccatattcttcacattcagctttgcaaaatttacttgactggattttttagcttaacatataactcagggagacatgcgattttgggacgatcaaactgttggtaagtaaatacttgttggcctgttgctcttcttttagctatagctgaccataatttttcttggttgaggaaactgtagttagtgatagctcaatattttgtgtgtagaaacctgtataaagtattggacatgtatttcatagtttttgtaacttataaggctatgtaagtcacagattaactcttcaa

SEQ ID NO: 147248 - DNA, 873 bp, Zea Mays
gttgcatgtataatccaatcgccgagatcgacctctaccgtctcgagccataggacctcccctccctcttcaacatccgcagtcacaacgccaaggggtagttcttcgcccgtgcggtcgaggcggtcccagcaacaggaccaaccacgcacacgccgatggggtactggagatccggacggagtagcattcttgctggcccagggtcagcccacttcttgcgcaagtttgttgttgggaaccaatggaatccgactattcatttttcttgcggatggtcgtgtcggtggggtcaagaaaattctctggaatttggcactgataagatagaaatgcatgttggggctgtacaggccaacgatcgagctcttgtagtcgatgatcttattgccacccgtgtgcagctgtcaaacttatcggagatggacgatgaagcgttggatcaaggagatggaggttggatcaaggagatggaggaggtggccgccacggccaccacttccaggtcgattatgccctttagggccatccagaagggcaagccgttgtcggtgtccttggcatcgagaagaagtccacccctaagctctagaactccaggtgctcgccgtggccacaagcgtgtagtcccccgacgcagagaagaggaagggcatgtggcgtagttagagggatctgaaccctagcggtcgtccgcccgtccagatctgtgacccgcccttctcgacgcttcggtgacatgagtgcctggaaatctagggaggcgaaaaggtgacatgagtgcttgcaaaatgatcgcacaggaatacttgctaagttgtcatttcttttctctggtacaataaatctggtcattggatttaatttgtttgc

SEQ ID NO: 147249 - DNA, 1192 bp, Zea Mays
gttgcatgtataatccaatcgccgagatcgacctctaccgtctcgagccataggacctcccctccctcttcaacatccgcagtcacaacgccaaggggtagttcttcgcccgtgcggtcgaggcggtcccagcaacaggaccaaccacgcacacgccgatggggtactggagatccggacggagtagcattcttgctggccaacgatcgagctcttgtagtcgatgatcttattgccacccgtgtgcagctgtcaaacttatcggagatggacgatgaagcgttggatcaaggagatggaggttggatcaaggagatggaggaggtggccgccacggccaccacttccaggtcgattatgccctttagggccatccagaagggcaagccgttgtcggtgtccttggcatcgagaagaagtccacccctaagctctagaactccaggtgctcgccgtggccacaagcgtgtagtcccccgacgcagagaagaggaagggcatgtggcgtagttagagggatctgaaccctagcggtcgtccgcccgtccagatctgtgacccgcccttctcgacgcttcggtgacatgagtgcctggaaatctagggaggcgaaaaggtcagagttcagtcatgtcatgcttgatttgagttctgtgccagatcaaagcaagtagtagtacgtgagaagttaaccatgaacagacaccctttttctctttgtgtatcacagattttgaaacttgctgagagggaaaaacaaatttatggggaaaaaatgtgacactgaaagccatttgcttccagcagcttaagaattgttgcggtagatgcaactgaagagggtcttcaagtaagtaaatcaactactacaatggctcactaaaaatggtcgacaggacagtttcggaaccttattgttgttcttcaggtactactctagggaggatgctgaagatgctgtcaaatacattagtggaacaatgcttgacgatcgtccaatccgtgttgatttcgatcggggctttgaagaaggcagacagtggggccgtggacgaagtggtgtacaagctttacaaaccatgatatgtccgtgcgttgtagtagtaagaaagaactaatgttcacagttaaaaagtgtggaatgagaaccgacattaaaataggagaatatatataatgtgggtttcataca

SEQ ID NO: 147250 - DNA, 1356 bp, Zea Mays
gttgcatgtataatccaatcgccgagatcgacctctaccgtctcgagccataggacctcccctccctcttcaacatccgcagtcacaacgccaaggggtagttcttcgcccgtgcggtcgaggcggtcccagcaacaggaccaaccacgcacacgccgatggggtactggagatccggacggagtagcattcttgctggccaacgatcgagctcttgtagtcgatgatcttattgccacccgtgtgcagctgtcaaacttatcggagatggacgatgaagcgttggatcaaggagatggaggttggatcaaggagatggaggaggtggccgccacggccaccacttccaggtcgattatgccctttagggccatccagaagggcaagccgttgtcggtgtccttggcatcgagaagaagtccacccctaagctctagaactccaggtgctcgccgtggccacaagcgtgtagtcccccgacgcagagaagaggaagggcatgtggcgtagttagagggatctgaaccctagcggtcgtccgcccgtccagatctgtgacccgcccttctcgacgcttcggtgacatgagtgcctggaaatctagggaggcgaaaaggtcagagttcagtcatgtcatgcttgatttgagttctgtgccagatcaaagcaagtagtagtacgtgagaagttaaccatgaacagacaccctttttctctttgtgtatcacagattttgaaacttgctgagagggaaaaacaaatttatggggaaaaaatgtgacactgaaagccatttgcttccagcagcttaagaattgttgcggtagatgcaactgaagagggtcttcaagtaagtaaatcaactactacaatggctcactaaaaatggtcgacaggacagtttcggaaccttattgttgttcttcagagagaacatcgacaaaggaacttgaagctccgtaggcgaaaggatctctagaaacgactaactaaattctcctaggtactactctagggaggatgctgaagatgctgtcaaatacattagtggaacaatgcttgacgatcgtccaatccgtgttgatttcgatcggggctttgaagaaggcagacagtggggccgtggacgaagtggtgtacaagctttacaaaccatgatatgtccgtgcgttgtagtagtaagaaagaactaatgttcacagttaaaaagtgtggaatgagaaccgacattaaaataggagaatatatataatgtgggtttcatacatatgttctatgtttcacatctaccaccgaaggccaagtacattttgatatactagcctaaaatgttctgctgatctgatatactagcct

SEQ ID NO: 147251 - DNA, 1590 bp, Zea Mays
gttgcatgtataatccaatcgccgagatcgacctctaccgtctcgagccataggacctcccctccctcttcaacatccgcagtcacaacgccaaggggtagttcttcgcccgtgcggtcgaggcggtcccagcaacaggaccaaccacgcacacgccgatggggtactggagatccggacggagtagcattcttgctggccaacgatcgagctcttgtagtcgatgatcttattgccacccgtgtgcagctgtcaaacttatcggagatggacgatgaagcgttggatcaaggagatggaggttggatcaaggagatggaggaggtggccgccacggccaccacttccaggtcgattatgccctttagggccatccagaagggcaagccgttgtcggtgtccttggcatcgagaagaagtccacccctaagctctagaactccaggtgctcgccgtggccacaagcgtgtagtcccccgacgcagagaagaggaagggcatgtggcgtagttagagggatctgaaccctagcggtcgtccgcccgtccagatctgtgacccgcccttctcgacgcttcggtgacatgagtgcctggaaatctagggaggcgaaaagagttcagtcatgtcatgcttgatttgagttctgtgccagatcaaagcaagtagtagtacgtgagaagttaaccatgaacagacaccctttttctctttgtgtatcacagattttgaaacttgctgagagggaaaaacaaatttatggggaaaaaatgtgacactgaaagccatttgcttccagcagcttaagaattgttgcggtagatgcaactgaagagggtcttcaagtaagtaaatcaactactacaatggctcactaaaaatggtcgacaggacagtttcggaaccttattgttgttcttcagagagaacatcgacaaaggaacttgaagctccgtaggcgaaaggatctctagaaacgactaactaaattctcctaggtactactctagggaggatgctgaagatgctgtcaaatacattagtggaacaatgcttgacgatcgtccaatccgtgttgatttcgatcggggctttgaagaaggcagacagtggggccgtggacgaagtggtgtacaagctttacaaaccatgatatgtccgtgcgttgtagtagtaagaaagaactaatgttcacagttaaaaagtgtggaatgagaaccgacattaaaataggagaatatatataatgtgggtttcatacatatgttctatgtttcacatctaccaccgaaggccaagtacattttgatatactagcctaaaatgttctgctgatctgatatactagcctaaaatgttccgttgatctgattttttgctacaccctgctgccctctacatttggattgtctgtattttgattttttagttttatttttgttgcatgtataatccaatatgtgattgtatcttttgattcctggaaggatagagtttgcactagaagaggatgctcatgttgttggtgactgtgtaaaagtacctttctgtaattatcattgtctattgtttataaggattaatgttaaa

SEQ ID NO: 147252 - DNA, 1285 bp, Zea Mays
atggcgctcttagttgttagatcccataaagggaaagtgatgggatacacttctccatttttccttttggcttttactacccagttccaactaacaaggaaaatcgagggtcaactgatctttatattatcaggtggatgcaatcaaaaccaagatgcaagttgcaagtctggaacgaccgactaccattcaatgttgcaagtgatttctattgttaagaagctatgagcgaaaattttgtgtctcaagatttgaagcatgagaagcgttgcgggggagaagcttcagtgcaacattgttgttctatagggatcaacatcctcaagatcacttggaaaactttcacgaaaaacttgtaatgcaagcatatgttttattggaaaagttttccaagctgaatttctaaaagcctcctcactgctttagttatgctgaattggaatttgcaactaggggtttcttacaagtaaatttcttagctaaaggcatggtgcactgcacattgatctttcttcttctatcgtatgatgtgacttgtgattgctttgccaatgcgacctacatggagctggattgttattacagacaacagaactgtatttatcttgaataatgattgatggttaagtgcatgcgtcactgggttcgagatcgactacagccactgggtggacgagcagaaaaggcacatggcagagctgacgtcgacgctccaggggcagcagacgtcggagctggagctccgcctgctggtggagacgtggctcagcaactacgagcgcctgtttaggatcaaggcgacggcggccaacgcggacgtgttctacgtcatgtcgggcttgtggaagacccccgccaagaggttcttcctctggatcggtgggttccggccgtcggatgtcctcaaggatgtaagcaatctcatgcacctgttgttgctcgcaaggttcatccctcacaagtacaagatcaaagactcgaaagcttaggttgctttgagccgtggtggatctcccggtgtgatgacatggggctgggtctgggagctcttctcaaatctgggggttctcggtctgctcttctcaatttagtgttatctttttcttttagaacaatgccaaagatacatgacagactgctttgcttgtttttgacatgatgcaaaagcaatggagtctttacttttaaacctttgttatttttgttttgattcaattatgatactgctgaaatgtacggatatctattattttgatgcaatagtggtgttttgcgatgtttaaca

SEQ ID NO: 147253 - DNA, 220 bp, Zea Mays
agagtgttatgttgtaatgaacgcatattgcgaagcatcgcagttgagctttaggatctctgcagctgcaggtggcttctttcgtactcgaattagagttagctgtgaattacaatccttttgttatttttctctaacttgtacgaggaaagcaatccataggaatttttaaatatgcaaacaaaatccataggaatatttggtgcatggctgatttttt

SEQ ID NO: 147254 - DNA, 2016 bp, Zea Mays
atggccggctctggagagtcgccggcgatggtaggaggtggcgttcatcttgatccagagacagagggaggagttgatggtaactcactggtcacaccacctcctgctctactgggtcctgtaatcgacgagatgagcataggggaagaaggagaacaaagggtccgacctcctatgtccaatattagctccagggagatggatacgcctcaaatactgcattcacatgaaaaaaacattgatccaactatagtgccaacggtagggatgactttcaaggatggtgatgatgcatataaattctataaaaggtatgcatatgaagttggatttccactaaagaaatacagagagaagacattcagtaagtggataaattgttcacgtgaagctgcaaaaattgagctggtaaacttggagcataaccatgagttcataactgacgaagcagagaaacaacatttacgttgcaacaaaagtagggatgctgaattcataaattttgttgatgcaatgcatgatagccgagtgccgcagcattgcatagttgattttatatcagaaatgcatgatgggccagagaatgtaccgctagacaatgatggaaaaatagtgagtgttttttggtcacacgcaagtatgcagggggaatatgcagattatggggatgctgtgacatttgatacaacacacaagacaaatatatatgataaaccactgggcatgtttgttggagctaacagccatctgcagtgtacagtgtttggatttgttttaatgggagatgaaacagtgcagacttttgaatgggctttcaattcattcaaaacatgtatgggatgcgagggtccgagagttatgctaacagatcaagatcctgcaatgccaattgctctaagaactgtatttccaaaaacagttcacagattgtgtttatggcatgtccaaaacagatttatgccattcttaaatgagatatatgcaaggtttgctgataaggattttaaaacaacattccaatctattatacatcatccattaactcctcatgagtttgaatgtgcctgggaaatgatgctagacgagttcaatcttcatgaagatatgactctacgcaaactatatgaaataaggaaagaatggataccagcattttttaaaaatgacttctgtggggtaatggtatctacacaacgaagtgagagcatgaacagattagtgaagcaatcacatgtagatgcgaacacccctctgcatgagttcgctaaacaaatgatgaaaatgttgcacaacaggaaaatgaaagaatcaaaggaggcattgatgagcaagggaccaaggacaacagatacattgtataggttcgaaataacagcggacatagaagctggggagtatacatgcgagtgcaaacagtgggaacatacagatattggatgtaatgagtcatatgatgttagtgatgatgaggaaaacaaggatgagcataacaccataactggatgtgaacatgcgttaacagtaataacgtctggtaacatggtgggcaacctgagatttccacctgaggttggtgatacaagttcttcgtgccacgtagcacatgaacaaatggaacatatcggtgcatcttcagaagctaagaagaggttgaattttaatgtggatgttataaatctgagtatgccggatcgtgcaaggccaaaaggacggacaataaaaaatacagaagataggattatgaaactaggtgcgaaaggagaaaaaaagaagaataggagatgccaattgtgtggaatagcagatggacataacagcagaacatgtctgtccgtggaagagaacagggcaagactagcaaaactagctaatcgaaagagaggacgaccagccggatcaagactaaacaataaaacaactgctccacagtggaatgaaacatcgactgctaaaaaacatcgtattgatgaagaagtagaaattgaataagccgctgagcatatggaattaggtgaa

SEQ ID NO: 147255 - DNA, 574 bp, Zea Mays
tctatggcctctggtgcaaatgcagtggaatcatgcgacacaaggtcaatcgtgtgaggaattggtccccaaccgacattccacaagttaaacagagaaggggattctttgggttttggttcagaactcctgtgtagatgatattcccagttattatgggtttctgtccatattttgggaatattttaaactctattgatattctcttgtgtaacactaacgctgtgcgacacactctggttgctgcaagctgccgacgtactacgtgctctagcccatcaacgccatattctaggcatccccggcgtctggcgcggccacgacggcaaatggcatcgactgtcatgtgtggagcaacgaccgacgagtgttgtgtttccattgcgacgcgtgcaaggatcgatggtttagttcatagatgtttggggtttggtgactattcagtttaatatgtctgtagtcttttgatgtttatacctaccaaatgttgacacaattctatcacaaatagcacctattagggctttatggatattatattccaaaataatgccacaaatgttcatatctaaca

SEQ ID NO: 147256 - DNA, 531 bp, Zea Mays
accggctctataaatacccgtgagggtaggcagtggcatcgcatcgccagctgcactgcactgcacaacgcaacctcctcccctcaactacagggaaatcagccatgagtgcgtcgtcggcgaagccagccaccggcggcaagacgtcgtggccggaggtggtcgggctgagcgtcgaggaagccaagaaggtgattctggcggacaagccgaacgccgacatcgtggtgctgcccaccaccacgcaggcggtgacctccgactttgggttcgaccgtgtccgcgtcttcgtcgggaccgtcgcccagacgccccatgttggctaggctagagcctcagcctagaggtcgtcggcaccgccggccatgaccacctgctatatgtcactactagtaataaagtataaataacagggaggatgcatgctcatccttggaatctgtacgcttgttggactactacttggctacttgaaacgactacttggctatttctggattcacaagtaataacactgatatgttccaaatc

SEQ ID NO: 147257 - DNA, 759 bp, Zea Mays
tcagcgccagctacgcgcgctggaaaatgctgactattttggctgcaagcatgggataaccatggattttttttcctgcagtgttgctatctgttctttgtttcgtagtggctgtttatcctcgtgtgcctcgcgtgcgtatatacacacacgtcctgcctgcacgcaacgcagctctataaatacctcatcaccggtgcactcgcttaatatatatccaacaaccagcagtgcaacaagcaagatttacctgcccatcgatcatatcgtcaactggtccggcagttcgcgacaccatgagctccacggagtgcggcggcggcggcggcggcgccaagacgtcgtggcctgaggtggtcgggctgagcgtggaggacgccaagaaggtgatcctcaaggacaagccggacgccgacatcgtggtgctgcccgtcggctccgtggtgaccgcggattatcgccctaaccgtgtccgcatcttcgtcgacatcgtcgcccagacgccccacatcggctgataatatataagctagccgctatttcctttccttgccccagaacttgaaataaatatatatacgatgaaataacgcgggcatgccgaataatggatgtgtgaattctcactaattaagtaatgcataaataaacgtattcaaatgtcgccccttcttgcacagtgaatatattgtgttgacagcaaaaaaaaagtatgaggttaaattcggtacaattaattatgggcctatttggatcgtc

SEQ ID NO: 147258 - DNA, 2295 bp, Zea Mays
acgctgtcaatgcataacctgcgttggcattccgcctgctggacttcctcgtgctgtgtctctgtctgtcgctctcgctctcagacgactgggccgccgccgcttggtgctgaggctttcgttggtctcttcggcggcgacgagcacccaccaggtactcccgctccttctattcccttccatgcgaagctgagcaccgaaaccttaatcatttagcggcgcgatacgtgcggaacccgcgccgccgccgtatgagtttgctatggcctcgatctggccagatccgtggtgtggtgtagtgtgggtggagatccatttgcaggggcacggatccgcatcccatgagtccggatctgcactccttcgagctggtgagatggttcacgggcagcaacaccggtgcatctcgacgcacgcgggcggcgtggcggctgtgctgtggcgcactcctaacttcgaaattattgggtgtccctttactggatccgcccctgaatgtgatgttgaaaatcttagatgcataaatcaggaactgctgtctttgtgtgaactactgctttcagttaacctgcacattcaaatccagtgtttcttttcaatcacatagtgaactaaaacactctcatcactcagtgatatttgattttatccacatgccacttgcagcagttctgtagaaatggctgatggtgaggacatccagcctcttgtctgcgacaatggcaccggaatggtcaaggctggttttgctggggacgatgcaccaagggcggttttccctagcattgttggccgtcctcgccacactggtgtcatggtagggatgggacagaaggatgcatatgttggcgatgaggcacagtccaagagaggtattctcacgctcaagtacccgattgagcacggtattgtgagcaactgggatgacatggagaaaatctggcatcatactttctacaacgagcttcgtgttgcaccagaggagcaccctgtgttgctcactgaggctcctttgaacccaaaggccaacagggagaagatgacccaaattatgtttgagactttcaatgttcctgccatgtatgttgcaatccaagcagttctatcactctatgctagtgggcgtactactggtattgttctttgactctggtgatggtgtgagccacactgtgcccatttacgaaggatatgcccttcctcatgccattcttcgtttggatcttgctggtcgggacctcacagactccctcatgaaaatcctgactgagaggggttactccttcacaacctctgccgagcgagaaattgtaagggacatcaaggagaagctggcatatatagcccttgactatgagcaagagttggaaactgccaagaacagctcctcagttgaaaagagctatgagctacctgatggccaagtaatcaccattggtgcagagagattcagatgccctgaggtcctcttccagccatccatgattggtatggaggctgccggaatccatgagacaacatacaattcaatcatgaagtgcgacgtggatatcaggaaggacctctacggcaacattgtgctcagtggaggttcgactatgttcccgggaatcgctgatcgtatgagcaaggagatcacttcccttgcaccaagcagcatgaagatcaaggtcgttgcaccgcctgagaggaagtatagtgtctggataggagggtccatcctagcctcgctgagcactttccaacagatgtggatatctaaggaggagtacgatgagtctggcccggcaattgttcacaggaagtgcttctaggcttcgcaagttcctcatcgttgcctagtctcaagttatgtccccttcatttctcaagatacgtgtggcagatttgcatggtacggttcatttatcaaattatgcccaccccctctttgtatgttgtggctccatgtgcgagcacgctgtctgtcgtgacacctggttcgtcagatgttttgtcaaacttgcttggcttgattggttgtacttgtacctgtaagagctgatagttatatgaatggcttggactgtcctgctgtttatagccttaggactagtttggaaacacaatcccccttggggattaaaaggggctgaggaggaaattagttcatttccatctcaatccctttcaatcccgaatggggtttaaggtttccaaagtagcccttagtatgtattctgagcatccgtgcaaagtatgaatgaccctgtagatgggctgggttttctggtttatattctttataccgtgtcc

SEQ ID NO: 147259 - DNA, 1827 bp, Zea Mays
acgctgtcaatgcataacctgcgttggcattccgcctgctggacttcctcgtgctgtgtctctgtctgtcgctctcgctctcagacgactgggccgccgccgcttggtgctgaggctttcgttggtctcttcggcggcgacgagcacccaccagcagttctgtagaaatggctgatggtgaggacatccagcctcttgtctgcgacaatggcaccggaatggtcaaggctggttttgctggggacgatgcaccaagggcggttttccctagcattgttggccgtcctcgccacactggtgtcatggtagggatgggacagaaggatgcatatgttggcgatgaggcacagtccaagagaggtattctcacgctcaagtacccgattgagcacggtattgtgagcaactgggatgacatggagaaaatctggcatcatactttctacaacgagcttcgtgttgcaccagaggagcaccctgtgttgctcactgaggctcctttgaacccaaaggccaacagggagaagatgacccaaattatgtttgagactttcaatgttcctgccatgtatgttgcaatccaagcagttctatcactctatgctagtgggcgtactactggtattgttctttgactctggtgatggtgtgagccacactgtgcccatttacgaaggatatgcccttcctcatgccattcttcgtttggatcttgctggtcgggacctcacagactccctcatgaaaatcctgactgagaggggttactccttcacaacctctgccgagcgagaaattgtaagggacatcaaggagaagctggcatatatagcccttgactatgagcaagagttggaaactgccaagaacagctcctcagttgaaaagagctatgagctacctgatggccaagtaatcaccattggtgcagagagattcagatgccctgaggtcctcttccagccatccatgattggtatggaggctgccggaatccatgagacaacatacaattcaatcatgaagtgcgacgtggatatcaggaaggacctctacggcaacattgtgctcagtggaggttcgactatgttcccgggaatcgctgatcgtatgagcaaggagatcacttcccttgcaccaagcagcatgaagatcaaggtcgttgcaccgcctgagaggaagtatagtgtctggataggagggtccatcctagcctcgctgagcactttccaacagatgtggatatctaaggaggagtacgatgagtctggcccggcaattgttcacaggaagtgcttctaggcttcgcaagttcctcatcgttgcctagtctcaagttatgtccccttcatttctcaagatacgtgtggcagatttgcatggtacggttcatttatcaaattatgcccaccccctctttgtatgttgtggctccatgtgcgagcacgctgtctgtcgtgacacctggttcgtcagatgttttgtcaaacttgcttggcttgattggttgtacttgtacctgtaagagctgatagttatatgaatggcttggactgtcctgctgtttatagccttaggactagtttggaaacacaatcccccttggggattaaaaggggctgaggaggaaattagttcatttccatctcaatccctttcaatcccgaatggggtttaaggtttccaaagtagcccttagtatgtattctgagcatccgtgcaaagtatgaatgaccctgtagatgggctgggttttctggtttatattctttataccgtgtccaacagcttactcatatggttatccaaaacaccgatttacactgt

SEQ ID NO: 147260 - DNA, 1671 bp, Zea Mays
acgctgtcaatgcataacctgcgttggcattccgcctgctggacttcctcgtgctgtgtctctgtctgtcgctctcgctctcagacgactgggccgccgccgcttggtgctgaggctttcgttggtctcttcggcggcgacgagcacccaccagttctgtagaaatggctgatggtgaggacatccagcctcttgtctgcgacaatggcaccggaatggtcaaggctggttttgctggggacgatgcaccaagggcggttttccctagcattgttggccgtcctcgccacactggtgtcatggtagggatgggacagaaggatgcatatgttggcgatgaggcacagtccaagagaggtattctcacgctcaagtacccgattgagcacggtattgtgagcaactgggatgacatggagaaaatctggcatcatactttctacaacgagcttcgtgttgcaccagaggagcaccctgtgttgctcactgaggctcctttgaacccaaaggccaacagggagaagatgacccaaattatgtttgagactttcaatgttcctgccatgtatgttgcaatccaagcagttctatcactctatgctagtgggcgtactactggtattgttctttgactctggtgatggtgtgagccacactgtgcccatttacgaaggatatgcccttcctcatgccattcttcgtttggatcttgctggtcgggacctcacagactccctcatgaaaatcctgactgagaggggttactccttcacaacctctgccgagcgagaaattgtaagggacatcaaggagaagctggcatatatagcccttgactatgagcaagagttggaaactgccaagaacagctcctcagttgaaaagagctatgagctacctgatggccaagtaatcaccattggtgcagagagattcagatgccctgaggtcctcttccagccatccatgattggtatggaggctgccggaatccatgagacaacatacaattcaatcatgaagtgcgacgtggatatcaggaaggacctctacggcaacattgtgctcagtggaggttcgactatgttcccgggaatcgctgatcgtatgagcaaggagatcacttcccttgcaccaagcagcatgaagatcaaggtcgttgcaccgcctgagaggaagtatagtgtctggataggagggtccatcctagcctcgctgagcactttccaacagatgtggatatctaaggaggagtacgatgagtctggcccggcaattgttcacaggaagtgcttctaggcttcgcaagttcctcatcgttgcctagtctcaagttatgtccccttcatttctcaagatacgtgtggcagatttgcatggtacggttcatttatcaaattatgcccaccccctctttgtatgttgtggctccaatccatgtgcgagcacgctgtgtctgtcgtgacacctggttcgtgagatgggttgtcaaacttgattggtttgttgtgcgtggctggaagagctgatagttatatatttggcttggactgtgccgcttgtatgtatctgaattctgaaagcgttgtaatctgagcatccgtgcaaagtatgaatggcccttttatatgggctggattttccggtttctatacaatttggtgtttgtcg

SEQ ID NO: 147261 - DNA, 1455 bp, Zea Mays
gcttggtgctgaggctttcgttggtctcttcggcggcgacgagcacccaccaggtactcccgctccttctattcccttccatgcgaagctgagcaccgaaaccttaatcatttagcggcgcgatacgtgcggaacccgcgccgccgccgtatgagtttgctatggcctcgatctggccagatccgtggtgtggtgtagtgtgggtggagatccatttgcaggggcacggatccgcatcccatgagtccggatctgcactccttcgagctggtgagatggttcacgggcagcaacaccggtgcatctcgacttctgtagaaatggctgatggtgaggacatccagcctcttgtctgcgacaatggcaccggaatggtcaaggctggttttgctggggacgatgcaccaagggcggttttccctagcattgttggccgtcctcgccacactggtgtcatggtagggatgggacagaaggatgcatatgttggcgatgaggcacagtccaagagaggtattctcacgctcaagtacccgattgagcacggtattgtgagcaactgggatgacatggagaaaatctggcatcatactttctacaacgagcttcgtgttgcaccagaggagcaccctgtgttgctcactgaggctcctttgaacccaaaggccaacagggagaagatgacccaaattatgtttgagactttcaatgttcctgccatgtatgttgcaatccaagcagttctatcactctatgctagtgggcgtactactggtattgttctttgactctggtgatggtgtgagccacactgtgcccatttacgaaggatatgcccttcctcatgccattcttcgtttggatcttgctggtcgggacctcacagactccctcatgaaaatcctgactgagaggggttactccttcacaacctctgccgagcgagaaattgtaagggacatcaaggagaagctggcatatatagcccttgactatgagcaagagttggaaactgccaagaacagctcctcagttgaaaagagctatgagctacctgatggccaagtaatcaccattggtgcagagagattcagatgccctgaggtcctcttccagccatccatgattggtatggaggctgccggaatccatgagacaacatacaattcaatcatgaagtgcgacgtggatatcaggaaggacctctacggcaacattgtgctcagtggaggttcgactatgttcccgggaatcgctgatcgtatgagcaaggagatcacttcccttgcaccaagcagcatgaagatcaaggtcgttgcaccgcctgagaggaagtatagtgtctggataggagggtccatcctagcctcgctgagcactttccaacagatgtggatatctaaggaggagtacgatgagtctggcccggcaattgttcacaggaagtgcttctag

SEQ ID NO: 147262 - DNA, 1454 bp, Zea Mays
gcttggtgctgaggctttcgttggtctcttcggcggcgacgagcacccaccaggtactcccgctccttctattcccttccatgcgaagctgagcaccgaaaccttaatcatttagcggcgcgatacgtgcggaacccgcgccgccgccgtatgagtttgctatggcctcgatctggccagatccgtggtgtggtgtagtgtgggtggagatccatttgcaggggcacggatccgcatcccatgagtccggatctgcactccttcgagctggtgagatggttcacgggcagcaacaccggtgcatctcgacttctgtagaaatggctgatggtgaggacatccagcctcttgtctgcgacaatggcaccggaatggtcaaggctggttttgctggcgatgatgcaccaagggcggttttccctagcattgttggccgtcctcgccacactggtgtcatggtagggatgggacagaaggacgcatatgttggcgatgaggcacagtccaagagaggtattcttacgctcaagtacccgattgagcacggtattgtgagcaactgggatgacatggagaaaatctggcatcatactttctacaacgagcttcgtgttgccccagaggagcaccctgtgttgctcaccgaggctcctttgaacccaaaggccaacagggagaagatgacccaaattatgtttgagactttcaatgttcctgccatgtatgttgcaatccaagcggtgctctcactctatgctagtgggcgtactactggtattgtactcgactctggtgatggtgtgagccacactgtgcccatttacgaaggatatgcccttcctcatgccattcttcgtttggatcttgctggtcgggacctcacagactccctcatgaaaattctcactgagaggggttactccttcacaacctcagccgagcgagaaattgtaagggacatcaaggagaagctagcatatatagcccttgactatgagcaagagttggaaactgccaagaacagctcttcagttgaaaagagctatgagctacctgatggacaagtaatcaccattggtgcagagagattcaggtgccctgaggtcctcttccagccgtcgatgattggtatggaggctgctggaatccatgagacaacatacaattcaatcatgaagtgtgacgtggatatcaggaaggacctctatggtaacattgtgctcagtggtggttcgactatgttcccgggtatcgctgatcgtatgagcaaggagatcacttcccttgcaccaagcagcatgaagatcaaggtcgttgcaccgcctgagaggaagtacagtgtctggataggagggtcgatcctagcctcgctcagcactttccaacagatgtggatatcgaaggaggagtacgacgagtctggcccggcaattgttcaccggaagtgcttctag

SEQ ID NO: 147263 - DNA, 1672 bp, Zea Mays
gcataaatcaggaactgctgtctttgtgtgaactactgctttcagttaacctgcacattcaaatccagtgtttcttttcaatcacatagtgaactaaaacactctcatcactcagtgatatttgattttatccacatgccacttgcagcagttctgtagaaatggctgatggtgaggacatccagcctcttgtctgcgacaatggcaccggaatggtcaaggctggttttgctggggacgatgcaccaagggcggttttccctagcattgttggccgtcctcgccacactggtgtcatggtagggatgggacagaaggatgcatatgttggcgatgaggcacagtccaagagaggtattctcacgctcaagtacccgattgagcacggtattgtgagcaactgggatgacatggagaaaatctggcatcatactttctacaacgagcttcgtgttgcaccagaggagcaccctgtgttgctcactgaggctcctttgaacccaaaggccaacagggagaagatgacccaaattatgtttgagactttcaatgttcctgccatgtatgttgcaatccaagcagttctatcactctatgctagtgggcgtactactggtattgttctttgactctggtgatggtgtgagccacactgtgcccatttacgaaggatatgcccttcctcatgccattcttcgtttggatcttgctggtcgggacctcacagactccctcatgaaaatcctgactgagaggggttactccttcacaacctctgccgagcgagaaattgtaagggacatcaaggagaagctggcatatatagcccttgactatgagcaagagttggaaactgccaagaacagctcctcagttgaaaagagctatgagctacctgatggccaagtaatcaccattggtgcagagagattcagatgccctgaggtcctcttccagccatccatgattggtatggaggctgccggaatccatgagacaacatacaattcaatcatgaagtgcgacgtggatatcaggaaggacctctacggcaacattgtgctcagtggaggttcgactatgttcccgggaatcgctgatcgtatgagcaaggagatcacttcccttgcaccaagcagcatgaagatcaaggtcgttgcaccgcctgagaggaagtatagtgtctggataggagggtccatcctagcctcgctgagcactttccaacaggtatgttgtattgtttatattactttcagctgctgcattttatttctctgaactcgtattatgatgaaacgaaataacttctgagttctgttatgacgtgcccttgatttaccagatgtggatatctaaggaggagtacgatgagtctggcccggcaattgttcacaggaagtgcttctaggcttcgcaagttcctcatcgttgcctagtctcaagttatgtccccttcatttctcaagatacgtgtggcagatttgcatggtacggttcatttatcaaattatgcccaccccctctttgtatgttgtggctccatgtgcgagcacgctgtctgtcgtgacacctggttcgtcagatgttttgtcaaacttgcttggcttgattggttgtacttgtacctgtaagagctgatagttatatgaatggcttggactgtcctgct

SEQ ID NO: 147264 - DNA, 1188 bp, Zea Mays
attaagaagaagcactcgatcggtctaagtgatcggttgagagaggggaaggaaatggctgatggtgaggacatccagcctcttgtctgcgacaatggcactggaatggtcaaggctggttttgctggcgatgatgcaccaagggcggttttccctagcattgttggccgtcctcgccacactggtgtcatggtagggatgggacagaaggacgcatatgttggcgatgaggcacagtccaagagaggtattcttacgctcaagtacccgattgagcacggtattgtgagcaactgggatgacatggagaaaatctggcatcatactttctacaacgagcttcgtgttgccccagaggagcaccctgtgttgctcaccgaggctcctttgaacccaaaggccaacagggagaagatgacccaaattatgtttgagactttcaatgttcctgccatgtatgttgcaatccaagcggtgctctcactctatgctagtgggcgtactactggtattgtactcgactctggtgatggtgtgagccacactgtgcccatttacgaaggatatgcccttcctcatgccattcttcgtttggatcttgctggtcgggacctcacagactccctcatgaaaattctcactgagaggggttactccttcacaacctcagccgagcgagaaattgtaagggacatcaaggagaagctagcatatatagcccttgactatgagcaagagttggaaactgccaagaacagctcttcagttgaaaagagctatgagctacctgatggacaagtaatcaccattggtgcagagagattcaggtgccctgaggtcctcttccagccgtcgatgattggtatggaggctgctggaatccatgagacaacatacaattcaatcatgaagtgtgacgtggatatcaggaaggacctctatggtaacattgtgctcagtggtggttcgactatgttcccgggtatcgctgatcgtatgagcaaggagatcacttcccttgcaccaagcagcatgaagatcaaggtcgttgcaccgcctgagaggaagtacagtgtctggataggagggtcgatcctagcctcgctcagcactttccaacagatgtggatatcgaaggaggagtacgacgagtctggcccggcaattgttcaccggaagtgcttctag

SEQ ID NO: 147265 - DNA, 1896 bp, Zea Mays
tgctggccacaagcaagtccagacgagtgcactattttttccttaaaaaaatactccattcgttttaaattataattcgtttaacttttcagtccaaatttgatcggctcattttatttaaaaaattcataattattcggaatgagtattttagactagccgtcgatgcatataccacctgcattcccctttcgtccactgcattttatccttcctggtgctctgtccacctctctcgctctgggccgccgccgccgccctaagccacgtgctgaggctttcgttggtctcttcgccggcgacgagcacccagcagttctgtagaaatggctgatggtgaggacatccagcctcttgtctgcgacaatggcactggaatggtcaaggctggttttgctggcgatgatgcaccaagggcggttttccctagcattgttggccgtcctcgccacactggtgtcatggtagggatgggacagaaggacgcatatgttggcgatgaggcacagtccaagagaggtattcttacgctcaagtacccgattgagcacggtattgtgagcaactgggatgacatggagaaaatctggcatcatactttctacaacgagcttcgtgttgccccagaggagcaccctgtgttgctcaccgaggctcctttgaacccaaaggccaacagggagaagatgacccaaattatgtttgagactttcaatgttcctgccatgtatgttgcaatccaagcggtgctctcactctatgctagtgggcgtactactggtattgtactcgactctggtgatggtgtgagccacactgtgcccatttacgaaggatatgcccttcctcatgccattcttcgtttggatcttgctggtcgggacctcacagactccctcatgaaaattctcactgagaggggttactccttcacaacctcagccgagcgagaaattgtaagggacatcaaggagaagctagcatatatagcccttgactatgagcaagagttggaaactgccaagaacagctcttcagttgaaaagagctatgagctacctgatggacaagtaatcaccattggtgcagagagattcaggtgccctgaggtcctcttccagccgtcgatgattggtatggaggctgctggaatccatgagacaacatacaattcaatcatgaagtgtgacgtggatatcaggaaggacctctatggtaacattgtgctcagtggtggttcgactatgttcccgggtatcgctgatcgtatgagcaaggagatcacttcccttgcaccaagcagcatgaagatcaaggtcgttgcaccgcctgagaggaagtacagtgtctggataggagggtcgatcctagcctcgctcagcactttccaacagatgtggatatcgaaggaggagtacgacgagtctggcccggcaattgttcaccggaagtgcttctagggtttcacaagttcctcgtcgttacctagtctcaaattatgtcccctccatttctcgagatatgtgtggcagatttgcatgatacgtttgtttgtttccatcggacctgaagtcttcttggggataggctcccccctttgtatgttgtggctccaatccatgtgcgagcacgctgtgtctgtcgtgacacctggttcgtgagatgggttgtcaaacttgattggtttgttgtgcgtggctggaagagctgatagttatatatttggcttggactgtgccgcttgtatgtatctgaattctgaaagcgttgtaatctgagcatccgtgcaaagtatgaatggcccttttatatgggctggattttccggtttctatacaatttggtgtttgtcgactgccaagacttaaaatataaacatgatcgtattgcagatat

SEQ ID NO: 147266 - DNA, 646 bp, Zea Mays
ccacctgcattcccctttcgtccactgcattttatccttcctggtgctctgtccacctctctcgctctgggccgccgccgccgccctaagccacgtgctgaggctttcgttggtctcttcgccggcgacgagcacccagttctgtagaaatggctgatggtgaggacatccagcctcttgtctgcgacaatggcactggaatggtcaaggctggttttgctggcgatgatgcaccaagggcggttttccctagcattgttggccgtcctcgccacactggtgtcatggtagggatgggacagaaggacgcatatgttggcgatgaggcacagtccaagagaggtattcttacgctcaagtacccgattgagcacggtattgtgagcaactgggatgacatggagaaaatctggcatcatactttctacaacgagcttcgtgttgccccagaggagcaccctgtgttgctcaccgaggctcctttgaacccaaaggccaacagggagaagatgacccaaattatgtttgagactttcaatgttcctgccatgtatgttgcaatccaagcggtgctctcactctatgctagtgggcgtactactggtatgacctgatccttcctttagtttggcgttgattcagtttc

SEQ ID NO: 147267 - DNA, 411 bp, Zea Mays
ggttatctccacccatgcgtccctgctctcctctagttgagctcaatcccaagtgctcgcttaagctgtgtggccaggttccctttcctggtcgccgtcggtggaagccctgccatcgatctcgcatgatattggttttcttcgaccacgtcattgccttgcagaatttggacaccttgtcgacactcgaccacgtgttcgctcgttaccacgccatcttcagcatcatggttctgtaagacttcgcgcactcgtcgacacccggctgtcgatctccaccacgcatcgctgcatcggacttaccctatatgatattcgacgacaagcccgaaccagaatttatcaacattctcacaagtatagtcacgtttgatgctggtacgtttattgactacgtgatgcggagaacca

SEQ ID NO: 147268 - DNA, 344 bp, Zea Mays
tttgagttcatgtgagttattttagaaacttgagctcacaaacttcctcttatttggtctatgtatggtagaattatgtcactctataatctctgttcgttcagtctatcgttgtgaactctcttctaatcgcttccttcattggccgtgttgtagcaaaacatattggatggagtaaacaataacatcagttagtcaaataaaaaaatattatgtggagagcagagacaatcaataaaaaatcttaaaatctttgtggtggatagtttacgtaggtattgttgtgagccatcgcaatacacggaaagcgactagtaaacaataaatggaatcagcaattagat

SEQ ID NO: 147269 - DNA, 456 bp, Zea Mays
atggcggggagctttcgcgagggcgcggggccgggggacacccacgctcccccgcccccgcccaccccacccttcttgcagttcctcgcgctcgacgcgctcgcctcctggggctccgaccccaagcagccgcactggcgccaccccgagctccgccgggcgctcgcctccaacgaccagaccgacgagctcaggcggatccgcgccagcgtccaggactccgcggtcaaggccaaggagaaggtcaggtcgctgcacgaggccatccagaagctcgacaagtacaagaacattgtcacacgcaagcgccagcgcgccaccgaggcgtcgtcctcgcccgacaagctcggggctgccggtgcctgctcctcgtccacaggcgcgctcaggatgggggcgcagaacaactctgctgtcttgagcaagcgcgtgcgctcctctctcgctgatgcccgg

SEQ ID NO: 147270 - DNA, 2453 bp, Zea Mays
caggtggaaggacgtggtagtgttcctacaaggcaaggccctttggttagtaatgagaaaaattcacctgtggagaaggaaaagaacagtacaagaatatctgctatcgtctcaggactttctgatgaaaaattgcggggtttatctactggcagtgaagggtgggaaaaaaagatgaagcgtagacgctctgttggaacaatgctcagcagaggcagtgatgctgatcgagatgtcaaatccatgggtcagcatagaccagccaatgaagcacgcccacgatctagtgatggccttggatatagacatggagtttctgctggagcactagcaggtaacaagttggatggcacttctcagcagaacaacattgtatcctgcattctgcccaagtcagatgtcgattatgtggctcagccaaatgaaagaagagaacgccatgctggagttgaaaaggaaaggactacagtaaaaggaaacaaggtaaatacttctgatgatatgcaaaacggaagcttaagtcccctgcccaaggctaaagcatgcagggcaccaagaaccagttcacttgctataaactcatgttctaatttccaacgttcaactggaggaaatgatgaatgggaagaagcaccgtacccaaataaagtgtcacctttggcgggcatgacgaatcgcaaacgttccacacattcaaatgcttcctcacctcctattgcctgggtagggcaacgcccacagaagatgtcacggacaagaagagcaaatgttgtttctccagtgtcaaattttgatgaagtgttatctgaaggatcaccacttgacactgccactagatcagcacctatagagtctggcagtgtcttgctgacaaagaacacatcaacaaccaaaatggatagcatcccatctcctgctgggttgtcagaaagtgagggatcggctgtggctgaaagcaagtccaaggagaaaaccatgcatagtggtgaagtggggaacgagggtgcaaatacagcccataatgcaatgggattaatatttttgtcaaataaaaataggattcctttgaaagaagagctcgaagatggtggtgttcgtcgtcaagggaggagtggaaggggtgctatgcatgtcaaggggtgttctctaatgccaaaagaaaaactggtcactgcagaaacaagaaagccaataaaaggtggaagacctggatctgaaaagaacgagagtaagttggggcggccaccaatgaaaaaaggctctgaccgcaaagcttcatcctggcattcacaggctctaaatagtgatcttacagacataacaggtgaaccagaagatgaccaagaggagcttttagctgctgttaatgctgctcgcagtgctattgttagtgcctattctggccctttttggaagaaagtggaacccatgctaacttttatgagctcagaaaatttttctttcttaaaaaatcagatcaaccttgttgaagagcttgagatgagcatgtcctgcatgtatgacagtgaacatgatattatagcatcagttgatcacagaataatgtcaaagatggaggagcattcatctcagggacttgctctgtctaatttccccccctcatcccagcaaagtaaaactaatggagttggagcaaaaggattaatcggctgtttttctcatggtgacaaaatccatactggaccacaaaagctggaagctgataaatggtttaatgaaatggctccaatggcacacagactcctttcggctttaattatggaagatgacttgcctgataccaatggggtgcaaagcgatatacttgttgaatttccaaatagccacaacccttacactgtcaacggatacatggaaaatgaacttcaagctagtaccataacatctaattttgggctgagtgtggatttcgtgcactcaaacagtacttctgtggtacatcagagcatgtgcaatggttttacaagcaatttcaacaattcaaacagtgaaaattctgttcatagtgaggatttatcagatggactcaattttacagtatacacagaaagtggccctttgcatgacttgataccaccgattccacagcaatgtcaaaatccagggaaaaatttccctttatctccatatgagtatcaatatgggcagatgtctgtggaagataagattttaattgagctgcaaagtattggcatttgtccagagacagtgccaaagctagatgacggagaagatgacaacattaataaaatgatttcggagttgaggaaaaggctgcacgatcaggttacgtgaacaacccctcgtcccctcgtaacatgtcttgagttttgattaaacttggatggaaatgcactgttttcagtgtgttaactgttaatgtgttcaccaggtcaatgtaaaacagtcataatctttaggggcaattgtga

SEQ ID NO: 147271 - DNA, 3432 bp, Zea Mays
caggtggaaggacgtggtagtgttcctacaaggcaaggccctttggttagtaatgagaaaaattcacctgtggagaaggaaaagaacagtacaagaatatctgctatcgtctcaggactttctgatgaaaaattgcggggtttatctactggcagtgaagggtgggaaaaaaagatgaagcgtagacgctctgttggaacaatgctcagcagaggcagtgatgctgatcgagatgtcaaatccatgggtcagcatagaccagccaatgaagcacgcccacgatctagtgatggccttggatatagacatggagtttctgctggagcactagcaggtaacaagttggatggcacttctcagcagaacaacattgtatcctgcattctgcccaagtcagatgtcgattatgtggctcagccaaatgaaagaagagaacgccatgctggagttgaaaaggaaaggactacagtaaaaggaaacaaggtaaatacttctgatgatatgcaaaacggaagcttaagtcccctgcccaaggctaaagcatgcagggcaccaagaaccagttcacttgctataaactcatgttctaatttccaacgttcaactggaggaaatgatgaatgggaagaagcaccgtacccaaataaagtgtcacctttggcgggcatgacgaatcgcaaacgttccacacattcaaatgcttcctcacctcctattgcctgggtagggcaacgcccacagaagatgtcacggacaagaagagcaaatgttgtttctccagtgtcaaattttgatgaagtgttatctgaaggatcaccacttgacactgccactagatcagcacctatagagtctggcagtgtcttgctgacaaagaacacatcaacaaccaaaatggatagcatcccatctcctgctgggttgtcagaaagtgagggatcggctgtggctgaaagcaagtccaaggagaaaaccatgcatagtggtgaagtggggaacgagggtgcaaatacagcccataatgcaatgggattaatatttttgtcaaataaaaataggattcctttgaaagaagagctcgaagatggtggtgttcgtcgtcaagggaggagtggaaggggtgctatgcatgtcaaggggtgttctctaatgccaaaagaaaaactggtcactgcagaaacaagaaagccaataaaaggtggaagacctggatctgaaaagaacgagagtaagttggggcggccaccaatgaaaaaaggctctgaccgcaaagcttcatcctggcattcacaggctctaaatagtgatcttacagacataacaggtgaaccagaagatgaccaagaggagcttttagctgctgttaatgctgctcgcagtgctattgttagtgcctattctggccctttttggaagaaagtggaacccatgctaacttttatgagctcagaaaatttttctttcttaaaaaatcagatcaaccttgttgaagagcttgagatgagcatgtcctgcatgtatgacagtgaacatgatattatagcatcagttgatcacagaataatgtcaaagatggaggagcattcatctcagggacttgctctgtctaatttccccccctcatcccagcaaagtaaaactaatggagttggagcaaaaggattaatcggctgtttttctcatggtgacaaaatccatactggaccacaaaagctggaagctgataaatggtttaatgaaatggctccaatggcacacagactcctttcggctttaattatggaagatgacttgcctgataccaatggggtgcaaagcgatatacttgttgaatttccaaatagccacaacccttacactgtcaacggatacatggaaaatgaacttcaagctagtaccataacatctaattttgggctgagtgtggatttcgtgcactcaaacagtacttctgtggtacatcagagcatgtgcaatggttttacaagcaatttcaacaattcaaacagtgaaaattctgttcatagtgaggatttatcagatggactcaattttacagtatacacagaaagtggccctttgcatgacttgataccaccgattccacagcaatgtcaaaatccagggaaaaatttccctttatctccatatgagtatcaatatgggcagatgtctgtggaagataagattttaattgagctgcaaagtattggcatttgtccagagacagtgccaaagctagatgacggagaagatgacaacattaataaaatgatttcggagttgaggaaaaggctgcacgatcaggtgaaccaaaagaaatgtagattacataagctagataaatcaattcaagacacaaagaatattgaggagaggagcttggagcaacatgctatgaacaaactggttgaaagggcatacagaaaactcaagggtgggcgcattggctctagtcacaaggccggtgtcagtaaatctgccaataaagctgcgaaacagcttgccttggcttttgccaagcgtactcttgttcgatgccacaaatttgacgaaacagggaaaagctgcttcagtgagccttctctttggagtgtgctgtctgcacccttgccaagcagtgacgcgagattcacggagggtgtagagaggctgaagcatcagaagctcgacagaactccattttgatcaaggtggtgcgaaatggaaaaagggcgacagggaacgggatcacagcagggatgcgtctgcaaagggctctggactgaaatcagggcgccattcctcaggcggcagcggcaggagcggcggcggcgagcgcaagaacaagacgaagccaaagcaaaagctggctcagctatcgacttccggaaacgtgctgggtagagtggttgagccattctcatctccagcggcgcaagcgcaagagccccctgaacctgcaagcgagaagaagactcagcatccctctaggaacgtggccccgcggctgaccgtggatgctggactgccagcattgcctggattagatgacatattggacgtccctggagggctggatgggcagggcaacgacatcagctcgtggttcacggatggccttgacgactcgttgcaagacattgatctttcaggcgccctggagatcccggacgatgacctcacccagctgggttttatatgagaaggaagcacttgttgcttgctctgtgcatatatgttctttttttgggtgcttacctaatgtatggtagtagatataattaaccggtttaatctccctgccacaaccctgtaatcgaacctgcatggcatggaatggttagttgcagatgagttattcgattctcgtagcagcaagaacatgttgagatttgctaatggtatcatgtggttctgcctcctggattgtcctgtcggaatcctacagtt

SEQ ID NO: 147272 - DNA, 1153 bp, Zea Mays
agcgagagtagcggccgtggatgattctgccttttcttctccttccctcacctgctctctctctctctctctctctctctctccctttctttcccgcggcgacggtgacgacgaccgcgcgagcgccgccgactccctactgcatcaggtgcctcggccttcgtcgtgctctccgccggcaacgagtatagacgggcgcgcatggccaccttcgagctgtaccggaggtccaccatcggcatgtgcctcaccgagacgctcgacgagatggtctccaacggcaccctcagcccggagctcgctatccaggtcctcgtccagttcgacaagtccatgacggatgctctggagaaccaagtgaagagcaaggttactgtcaaggtatggtatgataatttattttattcctctcctttcacgcgctagtgattcatctaaactaattttcacccaatgttcacaattcgacatgttcctttggttccaatgggaataaatttgggccataagctacaaacgaatataacacgataacaaaaaagctcatagcaaagtgccgtctgatcaagtccagaccaggctggttcatggatccacgcttgctattgtagcagcatatgactaaccttgaacctgtgtactatagccctcagctggatttctgtggcagtttaaaatcatttgtatgctccatgattgttttgcggttattaccttgtgcgcttacgtagttaatagatagtttgttttgatttaccattgacattttaagtctcagattatgtgcttgcctgaggagatggttgcaatattatttgtccattcaatgtttcctatgcctttctttgccctttgtggcatcaagtttttgccctcggaaaattaatatgcgcataaaggcaattgtgtgttgatggcatggattaagctggataagtgtgtatgaacaaaatcttatgtttggaattgtaagcgtttgtctattaatactatttgccttcagacaaacttattaattggtcatgactgctagatcggttgtattgctgtagcatggaagttaaaagcagcaagaaacattcatgttgaaaatatgttggaatctcaaccaagcccactatactatgagattttacactatcaatatgtatga

SEQ ID NO: 147273 - DNA, 1008 bp, Zea Mays
agcgagagtagcggccgtggatgattctgccttttcttctccttccctcacctgctctctctctctctctctctctctctctccctttctttcccgcggcgacggtgacgacgaccgcgcgagcgccgccgactccctactgcatcaggtgcctcggccttcgtcgtgctctccgccggcaacgagtatagacgggcgcgcatggccaccttcgagctgtaccggaggtccaccatcggcatgtgcctcaccgagacgctcgacgagatggtctccaacggcaccctcagcccggagctcgctatccaggtcctcgtccagttcgacaaggtggagatgcctcgtgcccccctttttttccttgtctcggactgtggggaaatctggtcattgattgttttgcccctctgtgttgttcgtctagtccatgacggatgctctggagaaccaagtgaagagcaaggttactgtcaagggtcacctgcacacctacaggttctgtgacaatgtgtggaccttcatcttgacagacgcaagcttcaagaacgaggaggccacggagcaggtgggcaaggtgaagattgtggcatgtgattccaaattgctcggacaataggcctgtgtaccctcgaggtcaaggaaggaagcttttaagtgcggcgaggcggggtctgtctgcgcgtcagctgtacacgcctaggctaccgcgaggcggggtctgtctgcgtcagctgtacacgcctaggctaccgcccgaacggcatttcatttgccttcttcgtactgtatgtgtatcttcttttttccccttgtatacaatctgctgcagctataccggccaagagtatggcatggtatggcggcaggcagccgcaaacttgtttttacctacttggtgtagcgcctgtgtaacagttttcgatcgatcttgcttgttgtgttgtcgatgctaataccgcagtgtaattgacgaaatgactaaaatgaagagtagtgtagtagatgtcc

SEQ ID NO: 147274 - DNA, 894 bp, Zea Mays
agcgagagtagcggccgtggatgattctgccttttcttctccttccctcacctgctctctctctctctctctctctctctctccctttctttcccgcggcgacggtgacgacgaccgcgcgagcgccgccgactccctactgcatcaggtgcctcggccttcgtcgtgctctccgccggcaacgagtatagacgggcgcgcatggccaccttcgagctgtaccggaggtccaccatcggcatgtgcctcaccgagacgctcgacgagatggtctccaacggcaccctcagcccggagctcgctatccaggtcctcgtccagttcgacaagtccatgacggatgctctggagaaccaagtgaagagcaaggttactgtcaaggttctgtgacaatgtgtggaccttcatcttgacagacgcaagcttcaagaacgaggaggccacggagcaggtgggcaaggtgaagattgtggcatgtgattccaaattgctcggacaataggcctgtgtaccctcgaggtcaaggaaggaagcttttaagtgcggcgaggcggggtctgtctgcgcgtcagctgtacacgcctaggctaccgcgaggcggggtctgtctgcgtcagctgtacacgcctaggctaccgcccgaacggcatttcatttgccttcttcgtactgtatgtgtatcttcttttttccccttgtatacaatctgctgcagctataccggccaagagtatggcatggtatggcggcaggcagccgcaaacttgtttttacctacttggtgtagcgcctgtgtaacagttttcgatcgatcttgcttgttgtgttgtcgatgctaataccgcagtgtaattgacgaaatgactaaaatgaagagtagtgtagtagatgtcc

SEQ ID NO: 147275 - DNA, 1022 bp, Zea Mays
agcgagagtagcggccgtggatgattctgccttttcttctccttccctcacctgctctctctctctctctctctctctctctccctttctttcccgcggcgacggtgacgacgaccgcgcgagcgccgccgactccctactgcatcaggtgcctcggccttcgtcgtgctctccgccggcaacgagtatagacgggcgcgcatggccaccttcgagctgtaccggaggtccaccatcggcatgtgcctcaccgagacgctcgacgagatggtctccaacggcaccctcagcccggagctcgctatccaggtcctcgtccagttcgacaagtccatgacggatgctctggagaaccaagtgaagagcaaggttactgtcaaggtatgggtcacctgcacacctacaggttctgtgacaatgtgtggaccttcatcttgacagacgcaagcttcaagaacgaggaggccacggagcaggtgggcaaggtgaagattgtggcatgtgattccaaattgctcggacaataggcctgtgtaccctcgaggtcaaggaaggaagcttttaagtgcggcgaggcggggtctgtctgcgcgtcagctgtacacgcctaggctaccgcgaggcggggtctgtctgcgtcagctgtacacgcctaggctaccgcccgaacggcatttcatttgccttcttcgtactgtatgtgtatcttcttttttccccttgtatacaatctgctgcagctataccggccaagagtatggcatggtatggcggcaggcagccgcaaacttgtttttacctacttggtgtagcgcctgtgtaacagttttcgatcgatcttgcttgttgtgttgtcgatgctaataccgcagtgtaattgacgaaatgactaaaatgaagagtagtgtagtagatgtccaactatagcatttcaccagtccaatctgcctgtctgatggtactcagtgtttgatttctgggcaaggccacgcgaatgcacagacatgcatgagaaagaaaaa

SEQ ID NO: 147276 - DNA, 1359 bp, Zea Mays
atggtgaggaagaaaagaactggccctggagagagttctggggagtcttctggagcgcctggtcatggctcctcacagcgtcctcaggcaacacaacagggtacccgtggtggagggcaacaccagggccgtggtggatatctgggccctggagtgccgccttcacagcacccaggtggtggcccacctgagtatcatcaaccgcttgactaccagggacgtggtggatatcagggccgtggtggaccaccttcacagcatcctggtggtgggacaccccctgggtctcaaccgcgtggctaccaggggcacggtggataccagggccgtggcgggccaccttcacagtatcctggtggtgggacaccccctgggtctcaaccacgtgactaccacggacgtggtggtccgcgtcccagagggggaatgccacagtcataccgtggcgggcatgtgggaggtagtgttgtaccaagtgttccttcaggtccatctaggccagttcccgagctgcaccaagccccagatgtccaacatcaagcccctgtggtggcaacaccatcttcgccaggagctggctcgtcctcgcagcctgggaaggctgaggtgagcgctggacaagtccagcaacagttccagcagcttgcgattcgtaaccaaagcttagccagccaagctggtcagatggcaccagcgtcaagcaaatctgttaggttcccattgcgccctggcaagggtacgcatgggtccaggtgcattgtgaaggcaaatcatttctttgctgagctgcctaataaagaccttcaccaatacgatgtatcaataacacctgaggttacttcacgcggcgtcaatcgtgctgtcatggcagagctagtaaaactttacagacactcccatttggatgggcgtctgcctgcatatgatggaaggaagagtctttatacagctggagcgttgccatttgcttcgaagacattcgaaattactctgcaagatgaggaagacagtcttggtggaggccaaaggcgccagagggtatttcgggtgaccatcaaatttgctgctcgcgctgatctccaccatctggctatgtttcttgctgggaggcagccagatgcccctcaagaggctcttcaagtacttgacatcgtgctacgtgaaatgcctactgccaagtattgtcctgttggtagatcattttattctcccaagttagggagacctcagcaacttggtgaagatatgtcctctactgcattttttgaggccctccctgtaattgattttgtttctcagcttcttaatagagatatctcagttagaccattgtctgattctgatcgcgtgaaggtttga

SEQ ID NO: 147277 - DNA, 3635 bp, Zea Mays
agtattcagcacaccactttaccttgtttgcaagtgggcaatcagcaaagaccaaattatctgcctatggaggtctgtaagatagttgaggggcagcgctactcaaaacgacttaatgataaacagatcactgctctactgaaggtgacttgccaacgtccccaagcacgtgagaaggacatcttggagactgtgtatcacaatgcctactccaaggatccttatgcccaggaatttggtataacgattgatgagcgtcttgcatcggttgaagctcgtgttctgcctcccccaaggctgaaataccatgatagtggcagagaaagggatgtattgccaaaaattggccagtggaacatgatgaataagaaaatggtcaatggtggtagagttagcagctgggcatgcattaacttctcacggaatgtgcaagatggtgctgccgggagtttctgtcatgaattggctttgatgtgccaagtatcaggaatggattttgtacttgaacctgtgctgtcaccttgctatgcaaggcctgaacttgttgaaagagcactaaagggacgctatcaagatgcgatgaacatactcgggcctcagggccgagaactcgacttgctgattgttatactgcctgacaataatggttctctttacggggatgtcaaaaggatctgtgagactaatcttggattggtctcccaatgctgtctgactaaacatgttttcaaggtgaacaagcagcagtatcttgcaaatgttgccctgaaaataaatgtgaaggttgggggaaggaatactgtgcttgttgatgctttggcaaggagaatcccccttgtcagtgacatagcgactattatctttggtgctgatgtgacccatccccatcctggggaagattctagtccttccattgcagctgtggttgcttctcaagactggcctgaggttacaaagtatgcaggattggtgagtgctcaagcccatcgtcaagaattgatacaggatcttttcaaggtatggcaagatcccgaaagggggactgtctctggtggcatgatcagggagcttctcatatctttctggagggcaactggacagaaaccaaagaggatcatattctacagggatggcgtcagtgagggacaattctaccaagttctgttgtatgaacttgatgccattagaaaggcctgtgcgtcattggagtctgactaccagcctccagttacttttgtcgtggtccagaagcgtcatcacaccaggttgtttgctaataatcacaatgataatcgtgctgtcgataaaagcgggaacatactgcctggcaccgtggtggactcgaagatctgccatccaactgagtttgatttctacctgtgcagccatgctggcattcagggaacaagccgccctgcccattaccatgttctgtgggatgagaacaactttacggctgatgggttgcaaactctcaccaacaacttgtgttacacgtatgctaggtgcacacgctcagtatcgattgttcctcctgcatactatgctcacctggcagccttccgagctcggttctacatggagccagatacgagtgacagtggatctatggcaagccgtggccctccaccaggggggcgcaacaccaaggctgctggtgttgggaatgttgctgtgaggccattacctgccctcaaggaaaacgtgaagcgggtcatgttctactgctaagactgatgctgttaaggcagagctaccttttattattacagtatatcgtgaagactagagtattttttccatgtacttgatgatgctgagctaccttttattatgtcgtacgatatatatgcgtggtactggttacagtaactttagttgtgtgttccatcgtcatgctggtctctagctggtgggcaggtggtgttacgtgaaaaacattctctaaaattcatcaaatttggacatagacttgaacatatcaagaaaaagagtggatgtatttcacttaccccatcctcacttcttgggctcgtgatgaaaagagcttgattaataaattccgaaggaaatgatattttgaacggaaagaccttggcatcgtcagcggcggggtcaccgtaccgttggtattatattatactgatttactgaatacgtaattaattaggtgactgaaaatatgacgatgaggtgacgcatgttcgtctcatctgttgactgcgaatagccgccggctgtcggcggcgtgcagcttcctgccttcttcgtcttcctcacttcatctttcttttggctgcagcatcatcatcgtcgactctataaattaatgtaatgactgtccatctctcctcccattgcttaccttccttgctccattctatacgtacatagtagtactgaatcatcagatcacaccgaccatggccatggagacgcagacgcccgagaccatcgtccctccgaccaccatccctcctcttctgaccccctacaagatgggcgcatttgagctggaacacagggtggtgctggcgccgctgacgcggcagcgctcctacggcaacgtcccgcagccgcacggcgccgtctactacgcgcagcgcgccacccggggcggcctcctcatcactgaggccacgggcgtctccgacacggcgcagggctacaccgacacgccgggagtgtggacgcccgaccaggtggcggcgtggcggcccatcgtagacgccgtccacgccaagggcgccgtcttcttctgccagctctggcacgtcggccgcgtctccaccaccgcgctccagccgggcggggccgcgcccatctccagcaccgaccgggccgtcgcgccgcagctcagcttcgacggccacctcgagaagttctccccgccgcgccgcctggaggcgcgcgagatccccgccatcgtcgacgacttccgccgcgcggcgcgcaacgcgctcctcgcgggcttcgacggcgtcgaggtccacggcgccaacggctacctcatcgagcagttcctcaaggacagcgccaacgaccgggacgacgagtacggcggctccctcgagaaccgctgccgcttcgcgctcgaggtcgtgcgcgccgtcgccggcgaggtcgggccgggccgcgtcggcgtccgcctctcccccttcactgactacatggactgccacgactccgacccggaggccctggcggggtacctcgtccgcagcctcagcgacgtcggtgtgctctactgccacatgatcgagccacggatggccatcgttgacggccgacgccagatcccgcaccgcctgcgcccgttcagggaggcattccggggcaccttcatcgccgccggagggtacgacagggcggagggggacaaggtggtggaggaaggctacacggacctcgtcgcctacggcaggctgttcctggccaacccggatctgccccggaggttccgcctccccgacgcgccgctcaacaagtacgaccgcaccaccttctacacctccgaccccgtcattggatacacagactacccctttctcgccgacgccgacgccgacaaataaatgatccatctaccgtcgccgacacgccggcctcccctcccctcccggcctccccagtcc

SEQ ID NO: 147278 - DNA, 128 bp, Zea Mays
gggcatttcaaccaccaaaatcatttaggaaaatgtttgaccctatttccctttcacaacccttagtattgtacaggtaccaaaactgttcaacttctgaaacttggaggtttagattttcatggaag

SEQ ID NO: 147279 - DNA, 466 bp, Zea Mays
gggatcagatcggaatcggatgggcagcgtgggcgtggaggcggatgacgacggcagcatcgtcaaggagttcctgcagcggtgcgagccctccggcgacgccgcctacggcgagctcagggctctgctggcgcgcctccacgacccggccaccaggcgcgacgcgcgcctcttcctcgccgcgctccaccgccaccagcagcgcagctcgtcggccgccggcggactaacgcacgagcaattctttcgacgcttcggcttccgcatgcaggagctgctgctccaggataccgccaccgacataaccgcctccagcttcatcgccaccaagcccgccgcagccgcagtatatatttatacagaattcgagtgtgtctctccacttggcacatcacattctcactcactcagctcctttgactgcatgcgggggcggtgcttcgcttttgcagtcgtagtagtgtag

SEQ ID NO: 147280 - DNA, 93 bp, Zea Mays
atggattacagctgcagcaatccaaacagctgcaacagtgtcggcttgtagccagccgaacacgcccttagttcttcataaaaataaggtaaa

SEQ ID NO: 147281 - DNA, 3750 bp, Zea Mays
cacctcactgaccctctccttcctcccaccttcggcccatccatctgtccgtcttcgccacccgtggtctccagaccaatccgaggcacgggacatatggcggcgctggcgggcgaggacaaggacgttgacgccttcctcgcggactgcacggcgtcgggagacgccgcgtatggcgccgccaaggccgtgctcgagcgcctccacgcccccgccacgcgccccgccgcacgacgcctccttggcgccgtccgccgacgcttcgccgcctcccgcgccgcgggggaggactgcttccgcaccttccactttcgcatccacgacgtcgtcctcgacccacacgtacaaggtttccaacaaatgaagaagttgacaatgatggagataccaagcatcttcattcctgaagattggtcattcactttctatgagggcctcaaccgtcatccagactccattttcagggataagacagtagctgagctgggatgtggcaacggttggatatctattgctcttgcagagaagtggtgcccttcaaaggtctatggcctggatataaacccaagagctgtgaagattgcatggataaacctgtacttgaacgcattagatgacgacggtctcccgatctatgacggggaggggaaaacattgctcgatagagttgaattctatgaatctgatctcctttcttactgtagagacaacaagatagagctcgatcgtattgttggatgcataccacagattctcaacccaaatccagaggcgatgtcaaagattgtaacagagaattcaagtgaggagttcttgtacgccttgagtaactactgtgctcttcagggttttgtcgaggaccaatttggccttgggttgattgctcgtgcggtggaagaagggatatctgtcataaagccttcaggtattatggtattcaacatgggaggtcgaccaggacagggtgtctgtgaacgtctatttcgacggcgtgggtttcgcattactaagctctggcaaaccaaaattatgcaggctgctgacacagatatttcagctttggttgaaattgagaaaaacagcagacatcgattcgagttcttcatggatcttgttggggatcagcctatctgtgctcgcacagcctgggcatacatgaaatctggtggtcacatttcacatgctttgtctgtgtatagctgtcaacttcgccagcccaaccaggtgaagaaaatatttgagtttcttaaagatggattccatgaagtcagcagttcccttgatttatcctttgacgatgattctgtagctgaggaaaaaattcccttcctagcttaccttgctagttttctgaaagagaacaagtcaaatccctgtgagccaccagctggatgtctaaactttaggaaacttgttgctggatttatgaagagctaccatcacattcctctaactcctgataatgtcgttgtgttcccttctcgctctgtggcaatagagaatgctcttcaattgttctcaccggcgcttgcaattgttgatgaacatttaaccagacacttgcccaagcaatggttaacatctttagcaattgagggaagagcagattgtaatcacgccgatggtacagttactgtaattgaggcaccacgccaatcagatttactgattgagttgatcaggaagctgcagcctcaggtggttgttactggcatggctcaatttgaggctatcaccagtgctgcttttgagaacctactaaacgtaacaaaagatgttggctcccggctgttcctggatatttctgagcatctggagttgtctagcctgccaagctctaatggtgtattgaaatatcttgctggaaagacattaccgtcacatgcagctatactgtgtggtttagtaaagaatcaggtgtactctgatctggaggttgcttttgccatttccgaagatgcagctgtatataaagcattatcacaaactattgagctattggaaggccacacttctctgatcagccagcactattatggttgccttttccacgagcttctggcatttcagattgctgaccgtcatccacagcaagagagacaacctgcggaagtgatacctcagcagatgataggattttctgacccagctgtgtctaccctaaaggctactgaatttttcgttcctggttcagctgaatccagcattattcatatggatttagatcgcagcttcctgccagtaccttcagcagtgaatgcgtctgtttttgaaagttttgtcaggcagaacatcactgattctgaaaccgatgtccgttccagcatccaacagctggtgaaagacagctatggtttatccgcagctggttgtgcagaaattatctacggaaacacctccgtagcactcttcaacaagctcgtcctttgttgcatgcaagaacagggcaccttgcttttccccttgggcaccaatggccactacgtctccgcagcaaagtttgtgaacgctagcaccgtgactataccgacaaatcccagttcagggttcaggatcgagcccaaggttctagctgacactcttaagaatgtatctcggccgtgggtgtatgtttgcggccccacgatcaaccctactggctttctgtacagtgacagtgacatccgagagctgctctccgtatgcgctgaatatggagccagggtagtgatagatacatccttctctggcctggagtacgagaccgatggatggaggcagtggaatctggcaggatgcctttcctctttgaagcgttcagagccatcgttctctgtggtcctgctcggagagctgtcctttgcgctgactgcaggtgggcatgactttgggtttgtgatattgggtgactcgtcgttggctgagacgttccatagtttttctagcttgagtcgaccgcacaccacattgaagtacactttcaagaagctgctggggcttaagaaccagaaggaccagcatttctcggatctgatagtggagcagaaggaggagctgaagaatcgcgccaaccagttgatacagacactggagagctgtggctgggaagctgccatcggttgcggtggcatctcgatgctggcgaagcccaccgcgtacatggggaaggccttcaaagctgctggcttcgacggcgagctggacgcgagcaacatccgggaagccatcctgagggccactgggctgtgcataaacagcagctcctggacggggatccctggctactgccggttcagctttgctctggagaggggggaattcgagcgtgcgatgggatgcatagctcggttcaaggagctggttctgggaggcgctcagatgaatggtgcctgatggagcaatccatgttatacgtaaccttggtgctgtgtagtagcgatgatattgttccaggtgatggagatatcaaggaataacaagagcctacctgctgtgaagtcaatgtactactaggatggatagggcgcttcgatgcgccctttctgtcttcgaattgctgtgctgtgcacggagaataaacatatactattatatatatacatacaatttgctaagatatactcctatttgttgtcgttccatgcataaccgtaacccattaattccaaagaaacctggggggtcatgatcttgtgaaccgttgggatcatgattagagggaaatttttgtttttagaatggattgcgcagcttgatttaactggaaatact

SEQ ID NO: 147282 - DNA, 1389 bp, Zea Mays
aagccgtggtgggcctgacacaaattaagtgggccggtccgggcgacatgcaacaagtgaagaagaggaagaaaggagacgagaaagaaaggaaaccctaggccgctacgcccttggccccttctctctcttcgtcgcgccgccgtagcacgactccgactcggccatggcgacacccccagctctcctattcccttcgccctcttcggcatcttctccgccgtcatccgcgcaggtagaggcggtggtcctcttcaacgtctgcgacagctacgtgcggcgaccggaccaggcagaccgtgtcatcggcaccctccttggatccctcctccccgatggcaccgtccacgtccgcaactcctacgtggtcccccacagcgagtcggccgaccaggtcgccatcgacatcgactaccaccataacatgtacgcctcgcaccagaaggtgaaccccaaggaagtcatcgtcggatggtgagcaacccaccccatcgcctcacgattccacaccctcgttttatttattttttctggctccatcggtatatcaacacatatgtgaatgccagtgctcctaatgattatataattgggcaccgtttatatgcaacaactgaatcccccaatgcatagtgtgtttttttgggctgaattactttgagtggatgcacccatttttcttatcaaatgcacattatgcactgtacatctcgttgttaggatactgctttgacattacaaggcagatagcagccgaggacagaataactctagagtaattagttccatctttgtgattaacaaccatcgatgtgctcagagctatattcagtgtcagttgctttgatatcatcgaaagcacattcagacactagaaaaatcggcttggaaagcctgtgaattggtttgccaagtatccttactgaacttttcaaacctgtatgttacctatctacttgtgtaggttctcgactggatttggtgtttctgggggaagtacgcttatccatgagttctattcaagggaagtacaaagccccatccatcttacagtcgacaccggcttcactaggggggaagcttccatcaaagcctacgtctcatccaacctgtccctcggtgataggcaactcgctgcgcaatttcaggaaatccctctggatcttaggatgatcggggcagaaaaggctggatgtatgtgtcactttcctgtatgctaattcattcatcgtgtattatatattgatgattgttttggattaccggactgaattttgaagagcagaaacactttaagaaatatgtaaatggcatagaagaatgaacttgccgcattgaatgagaacccatcaatcctgctagctgtaggcttgcagtatttgcagtgtt

SEQ ID NO: 147283 - DNA, 1547 bp, Zea Mays
aagccgtggtgggcctgacacaaattaagtgggccggtccgggcgacatgcaacaagtgaagaagaggaagaaaggagacgagaaagaaaggaaaccctaggccgctacgcccttggccccttctctctcttcgtcgcgccgccgtagcacgactccgactcggccatggcgacacccccagctctcctattcccttcgccctcttcggcatcttctccgccgtcatccgcgcaggtagaggcggtggtcctcttcaacgtctgcgacagctacgtgcggcgaccggaccaggcagaccgtgtcatcggcaccctccttggatccctcctccccgatggcaccgtccacgtccgcaactcctacgtggtcccccacagcgagtcggccgaccaggtcgccatcgacatcgactaccaccataacatgtacgcctcgcaccagaaggtgaaccccaaggaagtcatcgtcggatggttctcgactggatttggtgtttctgggggaagtacgcttatccatgagttctattcaagggaagtacaaagccccatccatcttacagtcgacaccggcttcactaggggggaagcttccatcaaagcctacgtctcatccaacctgtccctcggtgataggcaactcgctgcgcaatttcaggaaatccctctggatcttaggatgatcggggcagaaaaggctggatttgagatcctgaaatctacgatggtagagaagctccccaatgatctggaaggaatggagtcctcaatggagaagctttacattcttattgatgagatctacaaatacgtcgatgatgttgtggaaggacgcgtggcacctgataacagaatcggaaggttggtctctgaatctgttgcttcaatgccgaaattgtccccagctgctttcgataagcttttcaatgacaagattcaggataaccttgcgctggtatacctgtcaagcatcacaaggacacaaatcagcatcgccgagaagttgaacactgctgctcaggcgctgtgactttggttgtggcagatctatctggttgaaacgtggatgtttggcctacgtgaccaattggtgacagggatgcattttttgttatttgttattaaaaaatgggagagctggcaggaaagaaaagggttagtcaatgatgggatcccggtagagtggtggatgtttctgtttggatagcattatgtgctccaggctgaatatttgtaatgctccttggttgtgtagcgacacagttaacgacatggcaggcaaccgaggtcgtctgggtacatcgcaaataggctggtgccgaggtgacctcgacaggagtcgcagcaggctggcactaatgatgcgaataaagcaatacctcccaacacgttaaaacggggtccaaaattcaccatgattatgaagaagctgtacagctgatggaaacgtaggctcattgcaaatcaataaaatgtactccgtctcaaattaaaattttatttgtatttctagtggatttatttatacaataattaatgtatgttct

SEQ ID NO: 147284 - DNA, 894 bp, Zea Mays
gatttatttggacgcgggtgagtaacctccatatgacattgaaggaaggacgcgtggcacctgataacagaatcggaaggttggtctctgaatctgttgcttcaatgccgaaattgtccccagctgctttcgataagcttttcaatgacaagattcaggataaccttgcgctggtatacctgtcaagcatcacaaggacacaaatcagcatcgccgagaagttgaacactgctgctcaggcgctgtgactttggttgtggcagatctatctggttgaaacgtggatgtttggcctacgtgaccaattggtgacagggatgcattttttgttatttgttattaaaaaatgggagagctggcaggaaagaaaagggttagtcaatgatgggatcccggtagagtggtggatgtttctgtttggatagcattatgtgctccaggctgaatatttgtaatgctccttggttgtgtagcgacacagttaacgacatggcaggcaaccgaggtcgtctgggtacatcgcaaataggctggtgccgaggtgacctcgacaggagtcgcagcaggctggcactaatgatgcgaataaagcaatacctcccaacacgttaaaacggggtccaaaattcaccatgattatgaagaagctgtacagctgatggaaacgtaggctcattgcaaatcaataaaatgtactccgtctcaaattaaaattttatttgtatttctagtggatttatttatacaataattaatgtatgttctatatatatatgcttgatacagtaggagtgggtactctagttgcggggtaccgatagtaaacacttgatgaagagcaattacgaaacgcttcacttatcgcatcgtgtttcatgtggttccaagtgaaga

SEQ ID NO: 147285 - DNA, 1134 bp, Zea Mays
gagataggcaataactataagtagttggatagggcatgaaacttggaaccgtcggcgaacattgagccatagtaatagatcgccttctccgccgccgccgccgtaagtagttcgatcgacgtcgcggcggttcacgttccgttcccacgtaacgtagccatggtgctcggcagtgtcttcatcgtcctcggctccggcgtcgctggatcccttctcaccggtgacaccaaacttccgaaactgggggatgtattctctggagccgccaagtttgtgaagaaacatgaaggcggtgccgcaaagtctgggtctggcagcagcgataatcagaatacttctcagcagttgctatctcagatcaactatatcagggaagagctacacaccctacaggcctcaacaccaactacagtagtgacatcggctgtgaaatctggttctggaccatatgctataacagcagttgttgttgctggggctatcggctacgcttatataaagtggaagggatggaatctctctgatatgatgtttgtgacaaggcgtggtttatctgaagcttgctctgctgttggcagccatttggataaagtttcagactctgttgtcgtgacaaggaaacatctggctgggaggattgcccgtgtggatattagtttagatgaaacccagcagattatcgagggcacaagggatgaggtcggaatcatacatggagatctaagtgctttccaggaggacttgcaatcagtaaatcttgtagttcgaactctggaatccaagatgggacgtcttgaatgctctcagatctcgtcgccatccgttcctgcagtcatggattcctcctattcagagcgaattgtagagaaggctactagctgtttgccaagactagctctggaggcgccaaactcacctgtagtgcctagaccagaagagacatccctgctgcaggtggccgaacagcctaaagctctgaaggagcaggagaaggagaacgaggaaggtcctgctagaattggcaacgcagtgccaccagatagctcgaaaaacgatcaaaactatctagatagggtgaaggttatctgcattggcagcgaattaagatttgcattgccatcttacttgtcttaa

SEQ ID NO: 147286 - DNA, 1359 bp, Zea Mays
gtacctgagagggcggcggtggcgtcggccatgagagaagcggaagcttgggtttcagaccgggggtggggggagtggaggcggcgcggtggtggtgagagtgaatttctcagagcgggcgaagtcaggtagagtcgggaaggcagaagaagagtggactcaggccgggccgggccgggccgggcctctttatcggagccctgtgcccctgccgtggtcaacctgtgcctcctctattctttcccttttcctcgtatccatcctccggcgtccgcccttctctcgcgcgcgccgaccgccgccgccaggtgccaggaagtcgtgggaagtcttcttcggcgacgagcacccgccaggccatatctctgcaatgggtgactacacaatccagattagcaccaagctcattgaccagcttgctcgtgatgacgagaaggtaaaacggaaagccaggaagcccaagcctaagaagaagcccaccgtccagccacatgaagagcccctggaattcccgagagaaccaaagacgacaagccttgctactgctcctgggtggcctctgcagcctccccctatgtttctgccagtgacccctgctcccccgccacccccggccacaatgccggaggtggaagccattcgttccgtcctgaaagaaagtgaggcgcttctcaagaagctggagaaccaggaaactggggcacgccaagagctcagcaagagagcaaaggagctgcacgacaaggagttcaagctaccataccagaaacccatgccctgcacccaggagagggcaggctgccttgagtgttacaagaccaatacaaaggacccgctcaagtgtgctgaagcagtcaagagatttgaggcatgtgctctcatggccatcaaaagtactgccgcaaaagctgattagtatgtagtccgtgaagctttgtgagttggggcgagctgatacgcggactctgttttttatcttttgaggcaattcaaataaccaaggattttcatgggacccactgtagatttctaatgccactgcactgggctacctgaggcagcgcaccttgagcttagcgatattgcatatgtttgttaaaattggtatatcaagttgctggtgcaaaggttttttctgaaatatatattgatcttgtgttggattggtatccactagccacgctgcagatttttgctgtgttctatggtgtcattattgtgctattgtcgtactcttgtgtgcatgatgcctctgtttacctattttccgtgccagcactgctattttgtatttcattcagtccatgggctgtagaattctgttccaagtggatcaatattattatcttctcttgtgct

SEQ ID NO: 147287 - DNA, 114 bp, Zea Mays
gcatatgcaatgcaacagaatatttttgttccatgaacaaggagcacatttattccagcagagaagcaacagtatgccctcagatttgggaccttacttcaattcgaaatattc

SEQ ID NO: 147288 - DNA, 1186 bp, Zea Mays
ccatggcgctgagctactcaagctcaagcagtgcatgaacatcttcccgaggctggctccacagctcgaccgaaaactcactggccgcgacatgtctggatgatcgactctgcagatcggcgctgacctgccatcgctaagactgctttggagtacggggcctgaatctgctgccaccagaccggagagctgcgggatttgctcgcattgccccgactcccgggtcatggccagcaggtcgagccctagaacggggtcgccgaacacgaggcggatgcggccgtagatggcgcacacggcgtgcgcgagcaggagcacggccctgtcgtaggtccagttccagagcgacgcgtccctgagccggcgcacgtcatggcgacaccaccgcgcgcgctgctcgagcgcgtggcgggcctagtcggtgggcggcctccgcgccgacggcttgagctcggcgagcgcgtcaagctcggcgtagagcgtggcggtgacgcggtcgagcctgcgcacgagcggcacggcgtcggagcgggatgcgacggcggcgagcgtgcccgcgtcggcgcgttcggccaggaggtcggcgtagacgtggccgaagcccacgagcgccggggccgcgcaccggtggccgaggcgcgaggccaccgccaccacgcggttcagcgcgtccagcttctcgacgagcgagccagcctcggggacgccttcgacctggcgcgcacccatgccaacaaccacaacgcgccgaggatctccgtcatcgacatctcccccttcctcgacagcagcaaccagcagcagcagcgggacgagtgcgtggaggtcgtgcgcgccgccgccgccgactggggcatcatgcacatcgccggccacgacatccccgccgagctcaaggaccgcctgcgcgccgcaggaaccgccttcttcgccctccccgtccaggacaaggaggcctacaccaacgaccctgcctccgcccgcctgcagggctacggcagccgtcttgccgccaacgcctgcgggcagcgcgagtgggaggactacctcttccaccttgtgcaccctgacgggctcgccgaccgcgctctggcccacgtaccctcccgactacgtcgccgccacccgcgactttggtcgcgcccgcccgattgcgacgttggttagcgcgggattgttggtcgca

SEQ ID NO: 147289 - DNA, 1064 bp, Zea Mays
acccctctctctctctcttctcctccctctcttccttttctcttttctttttctcattgcgacgcctgcctgggcgaccgtcgccgctctacaccaggtgcccaggtcttcgccggcgccgagcagccaccagccgctgtgcaacaaatcacgtctgtcgagggcatggatccctacatgacaaggctcggcgccggagccactcaccagctttccagggctgaagcaatgcctgaccgaaggtctaggttttggcagacagatgtgcagcttgcgcctcggatagacatcatctgccctctgcctcgccgcccttctcgcctaccggttctcaatagccccaagctcaatggggcactcccactgtatagagcagaccccacttttgatatcgttgacctcatccttagcaagaatgaccctgatgtggatactgattcaagcagccaggcgggctttttctgtggctcgcctcctgcacgcactgacaaccctgttatcaatgacccacagtttggaaagaaaacaccatccttttctcctttatttggtggaagctcttccgggaaaatgacagctggaagagtcgaagtaggttctccgtcgtcttgcggggcgagcagcccgaaagtaaggatcgaaggttttgcttgcgggaacaaagagccccctcactgttttgcctgatgatccggatcattgaccctacctaaccctgttttgctacccccgcaacatgtacatttcccctgctagtttctttggttaaaaaacctggtagtttctttgagtcggagtcgagtaagagcgcttgttgttgccccttgtgatgaccgtgggtggcttttggtgcaagggagcagagcacagctctcggatgtaaatagggtggcgtatgtagtgctagatgtttgtatgtgtctgctaaaatgtagtagtaaggttgggtgggtccatgtgtcggcgtctgtaaatagcgtcatgcatttggatgtaaattgaaatgcgtcttcaattattgtcacctgtctctctgctggtgctgggtccaaattgcaaccggt

SEQ ID NO: 147290 - DNA, 646 bp, Zea Mays
atctatccctccctacaaatcgaaacaaagaaagaaaaaatcgagaggacgccagggccgattctctgcgtgacttggggcgtcgtcgccgagttttctccggccgagggcggcgcgaccggacaaccagcgtgagcgcgaccggcgacatgactcgcggcaaccagcgtgaccgcgaccgtgagcgcgcggcggcgcggaagcccaacgccaagaactcccaggacgggctcaccccggagcagcgccgcgagagggacaagaaagctctggaggagaaggcggccaagaaggcgcagcaggcagcggccggcggcaccggtacctccacggacaacaacaagaacaaggcaggtggcaagaagtaggaggcagtggcgcgccgccacctctgtacgattaatcgatgccttgagcttgtaacttgttcgcatccttgtaggtgcgatgcttgttgggtcataaactctgatgatatcgagatttggtgatcagaataatgcgtggttttctggctttctgttctgtcccattccttgaatggctgaatcatctagagttaggatgtggaggaacttttgcttgctgtcaacacatgtatgctgtcagttaacttttttttagattaaatagtgaatcatgccaa

SEQ ID NO: 147291 - DNA, 1950 bp, Zea Mays
ttgcgatggcaagtggagtgagtgattgcgaatgtgaccgacgacgggctcatcttcttctcttttacactagagcatgatgcatgggcaggagctgtcctatgactcctatccctcctccttcctagccatggacgacatgcaccgccaactccaagcaccaccagcctgccaaagccacagcagcagcagcagcatcttctttttctttttcttagcagcggtcatcatctactgcgtcgtgatcatcagacgattgatcaaattccaagggaggaggagggtgaagaatgatcatgcagcagcagcagcagcaccaccaccaccaccaccaccgagaaggggtagccgctggtggtggtccgtcgtggagacgctggccttcctgtccgccaacagcagcggcaggggcttctaccacttcgtggaggctcgccaccgcaggtacggtcccggcccctgcttccgcacctcgctcttgggcgccacccacgtgttcgtctcgtcggccgacgccgccaggtcgctcctgggcgccgagccagccggcttctcgaagcgctacgtgcgcaccgtggcggagctcctcggcgagcacagcctgctgtgcgcctcccacgccacccaccgcgccctgcggcgcgccgtggcgcccctcttcaacgcgcaggccacggcgtccctggccgccaccttcgacggcctcacgcggaggctcatgaagcgcgactggagcagcagcactggggccgtggtggtgctcgacgccgcgctggacctaacattcgaggccatctgcgacatgctcatcgggaggacgctgcggcccgatgcgaggaggcggctgcagagcgacgtgctggccgtgacgcgggccatgctggcgttcccgctcagggctgccggggaccaggttccacgcgggcctccgggccaggaaaaggatcatggacgtgctcaggcaagagataggatcaagacagagacagatcatggacatggaggaggaggaggaggagcagcagcacggcgacgactttctgcagagccttcttcttctcaggagtaggaggaggaggcggagccagcagcaacaacaccttttaccatcgtcgtcagctcatcataacgacgacgacgacctcttcctcactgacgaccagattctcgataacatcttgacgctcatcattgccgggcaggtgacgacagcgagcgcaattacatggatggtcaagtacctggctgacaacaaagtcttccaagaaaccttgaggtcagttcagctggagctgaagcagcagcagcagcaggaggaggcagatcatgatctcctccaacatctcaacagcatggagcttgcatacatgacggttaaagaatcattgaggatggcgagcatagtttcctggtttccaagggtagcactcgaggactgccaggtcgcagggttccacatccacaaggggtggattgtgaacattgatgcgagggccctacactacgatgcgacgctctaccacaaccccaccatgtttgatccttcaagattcaaaggcgggcatagcatgcacacgaagcagccgtacagcttcctggtgtttggagcaggcgggagaacctgcctggggatgaacctcgccaaaatcatgatgctcatttttctgcaccaccttgttacaacatggagatgggagatggccgacgacgaccccagccttgagaagtgggcaatgtttcccaggctcagaaacggatgccccattcacctcgcacgcatatgatgattaagcatgcactagctaccagaggaaactagtatatatcttctgtaaccctaaaccacaatgcaaccacaaagcaccgatgtgatgtgtactttattttcaccaccttatgtatgtaattgtctcgcatgttatatcaagagaagtactctattcctctctc

SEQ ID NO: 147292 - DNA, 1820 bp, Zea Mays
atggacgacatgcaccgccaactccaagcaccaccagcctgccaaagccacagcagcagcagcagcatcttctttttctttttcttagcagcggtcatcatctactgcgtcgtgatcatcagacgattgatcaaattccaagggaggaggagggtgaagaatgatcatgcagcagcagcagcagcaccaccaccaccaccaccaccgagaaggggtagccgctggtggtggtccgtcgtggagacgctggccttcctgtccgccaacagcagcggcaggggcttctaccacttcgtggaggctcgccaccgcaggtacggtcccggcccctgcttccgcacctcgctcttgggcgccacccacgtgttcgtctcgtcggccgacgccgccaggtcgctcctgggcgccgagccagccggcttctcgaagcgctacgtgcgcaccgtggcggagctcctcggcgagcacagcctgctgtgcgcctcccacgccacccaccgcgccctgcggcgcgccgtggcgcccctcttcaacgcgcaggccacggcgtccctggccgccaccttcgacggcctcacgcggaggctcatgaagcgcgactggagcagcagcactggggccgtggtggtgctcgacgccgcgctggacctaacattcgaggccatctgcgacatgctcatcgggaggacgctgcggcccgatgcgaggaggcggctgcagagcgacgtgctggccgtgacgcgggccatgctggcgttcccgctcagggctgccggggaccaggttccacgcgggcctccgggccaggaaaaggatcatggacgtgctcaggcaagagataggatcaagacagagacagatcatggacatggaggaggaggaggaggagcagcagcacggcgacgactttctgcagagccttcttcttctcaggagtaggaggaggaggcggagccagcagcaacaacaccttttaccatcgtcgtcagctcatcataacgacgacgacgacctcttcctcactgacgaccagattctcgataacatcttgacgctcatcattgccgggcaggtgacgacagcgagcgcaattacatggatggtcaagtacctggctgacaacaaagtcttccaagaaaccttgaggtcagttcagctggagctgaagcagcagcagcagcaggaggaggcagatcatgatctcctccaacatctcaacagcatggagcttgcatacatgacggttaaagaatcattgaggatggcgagcatagtttcctggtttccaagggtagcactcgaggactgccaggtcgcagggttccacatccacaaggggtggattgtgaacattgatgcgagggccctacactacgatgcgacgctctaccacaaccccaccatgtttgatccttcaagattcaaaggcgggcatagcatgcacacgaagcagccgtacagcttcctggtgtttggagcaggcgggagaacctgcctggggatgaacctcgccaaaatcatgatgctcatttttctgcaccaccttgttacaacatggagatgggagatggccgacgacgaccccagccttgagaagtgggcaatgtttcccaggctcagaaacggatgccccattcacctcgcacgcatatgatgattaagcatgcactagctaccagaggaaactagtatatatcttctgtaaccctaaaccacaatgcaaccacaaagcaccgatgtgatgtgtactttattttcaccaccttatgtatgtaattgtctcgcatgttatatcaagagaagtactctattcctctctc

SEQ ID NO: 147293 - DNA, 1307 bp, Zea Mays
cccgtggccgccccagctgccgcgtgccgcccgtttccatggctatggaggggagcggcggcagccagagccagctgatccatccggccgtggacgaggcagccctggccgtcaccaagagagagcgcaagagaagcaggtacctctcccctccctataccgacacaggcgtcctccaagaaaagaaggccgccggcagccagaagcagcgagaggaggggcaaccccatgtctccggcgcggaggtgctccccactctccgagcctcagcgctcgggcagggtaaggggatggaagcggcagccctccgtttcatggccatggatagcaggaacaggaacagcattttcgtcgacgaccatcccgattcccatgctgccgcgggcggtgcctcccaagacgatggtgtcagcaagcctccatcagctgctggtgttggccgcaagatgatgctcaaccttaatgcaggcccagacgacggatcgtccttggccaagaagaggaagagaaagacgatgaagaccgttgggcagcacagctatgtcgggaatcctgtggcacttgtgctggacttggcagagggaactccgctgccctccagggaggacctcctctccactttcagcaggtttggctttgtgatcgactccgagaccagcatcacccaagacaagaacaagcacaccgcgcgcgtggtgttcgccaccagggctcaagcagagagcgccttgagctgtgccgcgactcttggcggcgcatttgcagcaccgagcgtccaggatctccctcccatcacgcctcttccaaagctccctctcacagatattaggaacaatcttgggaagatgatcttgtccttgtcgtctaaagccaagtcacctcaagaagcgaatgcaaagccggccgtggacagtctcagtcttgtgggagaaatgcaacatcttcttgccaaggttgacaaggtgctgcaagcgcagcgtgcatctgctacagatcatcatgcaatccaccactgaccagtctgtatggttaggatgcatctaggtcgttcagctactgacccatgttccttgtagctgctgatcgtcagtcttttgtaaatggatcctgaaatccaccagttcagcggctggtttctctccccatgcatttgtgtaaatggtagacctacatgcatcgctgctctatctagtggtactccgcactagcatcctttatcatcctctgtcagggtaatgttcctttgctggtggtatcccacctttgacctgagacaacaacaataattggaatcctgtcataagttt

SEQ ID NO: 147294 - DNA, 1588 bp, Zea Mays
ccgaggcccaggttattcattccctttcctcccgtctcccactcgagcgagccaccgccgccaacgttcccgccttctatcccttaaccctagccgccgccgccgccgccgccgcttaaaccctcgctgcggaaactacagcaacccccgccggcgatggtgaaggagaataagcggaagcagcctcctgccgacgcggcgccgcctccgggcgacgagggtgaggggaggagcgggcggaagggcaagaaggccaggaaggagaaggcggaggcgatactgccgtcgcagatcaagaacaaggacaagcgccgcgaggtgcacgccaagcttaagcgagagaagaaggcccagaagcgcgcgctcgcccgcgagcgcggccaggccgcccgccgcgccgaagagctcggcgagcagccgccggagaggcaggtgccccgcacgatcgagaacaccagggagcccgatgagactgtgtgccggcccgacgaccaggagctgtttgcaggaaatgatgcggatgaattcagtgcagttctaaagcagcacataaccccgaaaatattgattacgacatgccgcttcaattcagggaggggacctgcatttattgatgagttaatgcaagtgataccgaattctcagtatgtgaaaagaggaacatatgaactcaagaaaattgtggaatatgcaaataacagggatttcacgtcacttgttgttgtccacacaaatcgaagggaacctgatgctctacttatcatcgggttacctgatggccctactgcacatttcaaactctccaaacttgttcttcggaaggacatcaagaaccacggcaatcctacgagccataaaccagagctagtactgaacaatttcactacacgccttggtcatcgtgttggaaggatgatccagtctctcttccctcaagatcccaatttccgcgggcgccgtgttgtgaccttccacaaccagcgagactacatatttttccgccatcacaggtacatcttcgagacaaaagaaaagaaggttgcttcgaaggaaaagacatctggaagcaaaagcggatctgagaagcagcaagtgatttgtcggcttcaggaatgtgggcctcgcttcaccctcaagctgctcaccttgcagcatgggaccttcgacacgaggagcggggagtacgagtgggttcacaagccggatatggatacgagcaggcggagattcttcttgtgatgccccaactccatcctgcggaacttcttttcttaaaaaaaaactttgacccctgttttgctgaagcagttttgtggaaccatcagtgagcagcaagtgatacggacttttatttttattttttattgttctggtttcggcgccagtgcgttgaacaccaaaaccaaaagtgccggatgctccgatcctaaggcctgaacagtctatgcctccgtgatcagattaactcagatgattatccttatcttgtatgtggttatatatctaattgtggttatccatttaattatgtgggatttgttaactatcgtctacctccctcctatatatatatatatatatatatata

SEQ ID NO: 147295 - DNA, 1142 bp, Zea Mays
atgccatgttcttgttttagttttccatgctctacatattgtatcaaattgttgcatgaatgaggtttccatgctctctagattgatgtaaagatgaaagttaccttacctggagtacatgatgcctctggatttttctagctacttatcagtagcacattgtataccgagatgtgtttgtgatgttattttagtagtgtgataagtgttgtctgttatgctcttaaatggaggcatttgaccatccaatttagcttttctatgtgaagtcaatgaagcagaacctcttttttttgtgtgtgcacgtaatgtacctgggccttgtaaagtacggagcgtttgggattatgtcggtttacattttgttttgctctttacattacagaaccacggcaatcctacgagccataaaccagagctagtactgaacaatttcactacacgccttggtcatcgtgttggaaggatgatccagtctctcttccctcaagatcccaatttccgcgggcgccgtgttgtgaccttccacaaccagcgagactacatatttttccgccatcacaggtacatcttcgagacaaaagaaaagaaggttgcttcgaaggaaaagacatctggaagcaaaagcggatctgagaagcagcaagtgatttgtcggcttcaggaatgtgggcctcgcttcaccctcaagctgctcaccttgcagcatgggaccttcgacacgaggagcggggagtacgagtgggttcacaagccggatatggatacgagcaggcggagattcttcttgtgatgccccaactccatcctgcggaacttcttttcttaaaaaaaaactttgacccctgttttgctgaagcagttttgtggaaccatcagtgagcagcaagtgatacggacttttatttttattttttattgttctggtttcggcgccagtgcgttgaacaccaaaaccaaaagtgccggatgctccgatcctaaggcctgaacagtctatgcctccgtgatcagattaactcagatgattatccttatcttgtatgtggttatatatctaattgtggttatccatttaattatgtgggatttgttaactatcgtctacctccctcctatatatatatatatatatatatata

SEQ ID NO: 147296 - DNA, 1060 bp, Zea Mays
gccatgttcttgttttagttttccatgctctacatattgtatcaaattgttgcatgaatgaggtttccatgctctctagattgatgtaaagatgaaagttaccttacctggagtacatgatgcctctggatttttctagctacttatcagtagcacattgtataccgagatgtgtttgtgatgttattttagtagtgtgataagtgttgtctgttatgctcttaaatggaggcatttgaccatccaatttagcttttctatgtgaagtcaatgaagcagaacctcttttttttgtgtgtgcacaaccacggcaatcctacgagccataaaccagagctagtactgaacaatttcactacacgccttggtcatcgtgttggaaggatgatccagtctctcttccctcaagatcccaatttccgcgggcgccgtgttgtgaccttccacaaccagcgagactacatatttttccgccatcacaggtacatcttcgagacaaaagaaaagaaggttgcttcgaaggaaaagacatctggaagcaaaagcggatctgagaagcagcaagtgatttgtcggcttcaggaatgtgggcctcgcttcaccctcaagctgctcaccttgcagcatgggaccttcgacacgaggagcggggagtacgagtgggttcacaagccggatatggatacgagcaggcggagattcttcttgtgatgccccaactccatcctgcggaacttcttttcttaaaaaaaaactttgacccctgttttgctgaagcagttttgtggaaccatcagtgagcagcaagtgatacggacttttatttttattttttattgttctggtttcggcgccagtgcgttgaacaccaaaaccaaaagtgccggatgctccgatcctaaggcctgaacagtctatgcctccgtgatcagattaactcagatgattatccttatcttgtatgtggttatatatctaattgtggttatccatttaattatgtgggatttgttaactatcgtctacctccctcctatatatatatatatatatatatata

SEQ ID NO: 147297 - DNA, 1695 bp, Zea Mays
gtttcttcgcccaacagatattttccagtgccgctctgaacagtgtgatgtggccgcgcgagccgcgaggagccagctagccatggtcgtcccagtcccgccgccgcctctcctcgcttcccacgtggccgtccgggccgcggcctccgccatatcccacggccgccgggtcctccttaacggcgaccacccgccgcaggtcgcggccctcgggcgcggcgactgggtcaagctcatctgcggcgccagctttgaggatgcagctgatgtcaggaatctctcccttgtctacactcttgctggagtggattgcattgattgtgcagcagatgcatctgtggtgggagcagtgaatgaaggtattgaagtagcagcatcaattgtaccaacagttcaaaggccttggctgatgattagtgttaatgatgattgcagagatcttcatttccgtaaagctgagtttgatcctgatgattgcccactggattgctcaaagccatgtgagaaagtttgcccagctgatgcaatatcactaaagcattccatggttgatggagagcgcacactatctgatcccttacgtggtaaatatgagggtggtgtaattactgagcggtgctatggatgtggtcggtgcttgccagtttgcccgtatgacagaataagagctgtgtcctatgttcgagaccctactatgactgctgaattattgaaaagagatgatgttgatgcaatagagatacataccactggaaaaggaactgatatgttcaataccctctgggacaacttgagtgggtccatcaataatgtgaagctggttgcagttagtcttcctgatataggtgaatcaactgttgacctcatgaacacaatatacacaataatggagccccattttaaagggtataatctttggcagttagatggccgacctatgagtggtgacattggccgaggtgcaacaagggagacagtttcttttgccgctcatgtggcttcaatgtcagaaagacctcctgggttctatcagttggctggtggcaccaactcatacactgttgattacttaaagaaagctggtcttttccaatcatcaaattggaattcagggaccgcaacctctgaaatggccagttctcaccaagctttaataggagggattgcttatggtggctatgctcgcaagatcgttggacgggttttgcgcaaaataccagaacagtttggccgtgtgcacatcgaggatcatcctgatcatctactggaggctctacaagaagccatgtcattagtaggacctgtgaagggttatatacccagtcattccaagcctttcatgaaacaagtagatagacaataggaagtaggaaaagcgcaggatatacccttcaacccagttttgggcgaagataaggcgcatcgtactttagctgtgacagtgaggagttcaatgtggtcattgggccaggaatctagtggttgctgtcggtcgctcgttctagatggattatgggctatggaacctggagtgccgtggtgctgcaaacatctcatgtttcattctgaaatctttttagatgtataatacgtagtagttgaattttctgtaaaaaaacatgttgcttggtgtttgcctttccaattggctgataagcctggccatatcgttatgcagacacggtcatctgcagc

SEQ ID NO: 147298 - DNA, 884 bp, Zea Mays
atgacgaaaaacgtctgcacagaaaaagagatggggcaaggtcaaggaagcaaatatgcagggatcattgtcactgccacatgcacctccgtggcaagtgtcctttggctttggcatcaatcaaatagacaagaggccacctctaccaccgccatccgcagtccatacagtgacccccacgaggtcaagaacctgtacgaggagaggaaagaacctggaagagaggagcttgaggagatggcgagcgccgagggcgagaggtgggtgggactggcgacggacttctcgcaggggagccgagaggcgctgcagtgggcggcgaccaacctgctccgcgccggcgaccacctgctgctgctgcacgtcatcaaggagcccgactacgagcagagcgaggccatcctctgggaatccaccggctcccgtacgcaccctttctccaatctccaccaccgcctcctcctaccctttgctatgcttggttcttgcaattgaaattcctagggtgctagtgctactgctactcctaggtggctaggtcctagctaggagctagccgttcctcaactttgtggctaacctgttttccctcccacaaacactagcgctagcatttgcggccattaaagatccgcaaaccctaggatacttggcacttgctgctccatgatccatgccgtgcataggtgtatgacatgtacaaggcgattgattggaacgactgatcttgcccatcaatctgcgcgcactggttatgattcctggctacttgccttaaggcatgtacaacctgagagtcagtataagtacaaaagacagttaaaagactgtacgatataaccttaaactctggatcataaatacaattaaaagacaacatacat

SEQ ID NO: 147299 - DNA, 2125 bp, Zea Mays
ggagtccaaactccaaaccaaaccggcgcttctcccacgtcttctcgagttcccacgcgcccgcctgctataaatcgcatccctcaatccccactctttatcccctcctcagccatcgcctccctctcccctcaacccagcgcccccctcccgccgccgctagggtttctcctccctccccgcccacccctaaatcatttccgaagcttccagtgcgccgcagccatgagcgacggcaaggactccctcgacctctccgccctcggcgctgccatccccaactcggccgagctcagcgcggaggacaaggctaaccttgtggcgtcgatcaagaacacgctcgagggattggcgtcgcggcataccgacgtgctcgagagcctcgagcccaaggtcaggaagcgcgtcgagaagctcagggagatccagggcgaacacgacgaacttgaggcaaaatttttcgaggagagagctgctctagaagctaagtatcagaagttgtatgaaccactttactcaaagcgttacgaaattgtcaatggtgtggtcgaggttgagggtatcacagtagaaagtgcagctgaaacccctgcggagcaaaagactggagatgagacctctgctgatcaaaaagaagaaaaaggtgtaccagctttctggcttaatgcaatgaagaatcatgaaattctagctgaggagatccaggagagggacgaggaagctctcaagtacctcaagaacatcacgtggtataggatcagcgagccgaagggctttaagcttgaatttcaatttggtacaaatccgttcttcaagaattcagtgcttacaaaaacatatcacatgattgatgaggatgaaccaattttggagaaagccattggtactgaaattgaatggtaccctgggaagtgcttgacacaaaaggtgctaaaaaagaagccacggaagggttcaaagaacactaaacctatcacaaaaactgaagattgtgagagcttcttcaacttcttcagtccacctcaagtccctgatgatgatgaggaaattgatgaggatatagctgaacagttgcagaacgaaatggaacaagattatgatattggatctaccatcagagacaagattatcccacatgctgtctcgtggttcactggagaggctgctcaagatgaggagtttgaagttatggatggtgaggatgacgatgatgaagacaatgatgatgaagacgaagatgacgaggatgatgatgatgatgatgattacgattcaaagaagaccaagggaactgccggaggggaagggcagcagggcgaacgacctgcagagtgcaagcagcagtgaggtgctgcacaatgaatgttggcaggcattgtttgtggagcaattagtttggttctgcttgatgctcaaggtcattgagttggtttgtggaaccttcgagggggcgcttgttggttttatggaattggttggggaatttttctgggacatggcgttatatcattatatgtgggtagtttcttcactttctgtattgggtttcagatattatatgtgttcttatgcttggagtgaagatggttgccactctggtatgtcttattgtgcataccactggcatagtgtgctgtctgtactttcatcaagcgtgccgtgccgctgagaaattttgctctaggggaaaggctagccttttgcctgaaaatgttttgcgaattgcatcttgcatacgggtcttgaattttgtctgttgttttacaatcaggagatatgctgcccagtgagcgcgctaggcctcatgggggtaactgcgtgaagattttatttttgtaccgctctagcgttccagactccatttcagaagttccggaattcatcttggtctttagaaataaagaaagcagatttgtgaactttaacgccagccaccgttactactgctcccagccgacgttccaggggccactcaggaaggaacagacggctcctggtctacagggttgtctccacttctctattgaggcgtctgggtcctacagggttgtctccacttctctattgaggcgtctgggtcctgtaccggcatctactcctttttcctgtacatgtataaatatca

SEQ ID NO: 147300 - DNA, 1005 bp, Zea Mays
ctcccacagtcccccccccccccccccccccctcctcatcacccacccctagcaataccacactcctactgcaagacccgcccgcccaccgcttcctcgcatctcgggcgcgtgcctgcctgctctcgcggacgtggtggtggttctccggcgccgtggtgggcgggggacgagcgggtgggggaccggcgggtatttttggttgctgtggtttcgtgatggcggcggcggcgatctgcgtggaggacgaggcggcgtgcgccgccgcggaatgcgcggggatcgggaatctggatctcgctgccgccggcgccggggctggcggcaagaggagcgtctatctcatggactgcgcgccggtctggggctgcgcgtccacgcgcggccgcagcaccgagatggaggacgcctgcgccgcggccccgcgcttcgcggacgtgccggtgcgcctgctcgccagccgccgggacctcgaccgtctgggcctcgacgctgacacgctccgcctgccggcgcacctgttcggcgtcttcgacggccacggcggcgccgaggtggccagctactgccgggagaggctccaggtgctcctgaggcaggaactgaggctgctcagcaaggatttgggggagacaagcgaggccgacatgaaggagcactgggacgagctgttcaccaggtgtttccagaggctggatgacgaagtgtcggggcaggcgagcaggctcgtcggtggcgtccaggagacacggccggtggccgccgagaacgtcggctccactgcggttgtcgccgtcgtgtgctcctcccatgtggtggtcgccaactgcggggattcgcgtgttgttctctgccgtggaaaggagcccttagagctgtcgattgatcataaggtgagcttttttgtagctaagctggagctatgatgcttatggtgttcatccgatttggttgtttcagcctgacaggaaggatgaacgagcgaggattgaggccctgggggga

SEQ ID NO: 147301 - DNA, 1622 bp, Zea Mays
ctcccacagtcccccccccccccccccccccctcctcatcacccacccctagcaataccacactcctactgcaagacccgcccgcccaccgcttcctcgcatctcgggcgcgtgcctgcctgctctcgcggacgtggtggtggttctccggcgccgtggtgggcgggggacgagcgggtgggggaccggcgggtatttttggttgctgtggtttcgtgatggcggcggcggcgatctgcgtggaggacgaggcggcgtgcgccgccgcggaatgcgcggggatcgggaatctggatctcgctgccgccggcgccggggctggcggcaagaggagcgtctatctcatggactgcgcgccggtctggggctgcgcgtccacgcgcggccgcagcaccgagatggaggacgcctgcgccgcggccccgcgcttcgcggacgtgccggtgcgcctgctcgccagccgccgggacctcgaccgtctgggcctcgacgctgacacgctccgcctgccggcgcacctgttcggcgtcttcgacggccacggcggcgccgaggtggccagctactgccgggagaggctccaggtgctcctgaggcaggaactgaggctgctcagcaaggatttgggggagacaagcgaggccgacatgaaggagcactgggacgagctgttcaccaggtgtttccagaggctggatgacgaagtgtcggggcaggcgagcaggctcgtcggtggcgtccaggagacacggccggtggccgccgagaacgtcggctccactgcggttgtcgccgtcgtgtgctcctcccatgtggtggtcgccaactgcggggattcgcgtgttgttctctgccgtggaaaggagcccttagagctgtcgattgatcataagcctgacaggaaggatgaacgagcgaggattgaggccctggggggaaaggtcatccaatggaatggctaccgggtctccggtatacttgctatgtcaagatcgattggtatgtatattgcttctggaactaaatcttggcagaatgaccttttcccctttttaagtgggatgtagattatagttgtagcatcatgaaaaatgcttattctgttaaccgtaggctgcatgatgtaaagtatgttagttaggtgaagcagactagcaggccctttctgcaagttttaatatcaaatttaagcaaccaagttggtgcacacattagtttttttgtggttttatatgacctaggcaattttatcccagaaataattttgttaaaagactctgtactgttctcatgttctgtagcatggtgattttttgctagatgtcatgtttccttttaggaagatgagatgagatattttgatgtgccctcgtttacaattaccatgttatagttgctttacatttaaaaaaaaaggaacttactccatcagccatttggttaaacagcttgtttctgtctgagataggaagcatgagacttaaaaaatctactgaaatcatgttccagggtttgattgcaactgcctggatattggctctaatcctattagtgaagctttaaaatgagcttaagtatatttctgtgacatagaactcaggatgcagatgtgattaggaaat

SEQ ID NO: 147302 - DNA, 450 bp, Zea Mays
atggcatggttcctgcaagtggcacttgcagcttggaccatgcctaaccatcaatgggaccggtatctgaagccgttcgtgattccaaaaccagaggtcacggtcgttcccagggcgaaagatgacgactgtctcatcctcgcaagcgatgggctgtgggatgtggtgacgaacgaagaggcatgcaaagctgcgcgccggcaaatccaagtgtggcacaagaacaacggtgccgctggcgcatcgtggtcgttgtgcgacgagggtgatggatccaccaccgaccccgctgcccaagccgcagcggattatctcgtgagggtcgcgctgaagaagggtaccgaggacaacgtcaccgtcatcgtggttgacctgaaacctcgaaagaaaagctcaggagcaactcgtagcatcgggcgttctgggtccatcacagtagagctgagctga

SEQ ID NO: 147303 - DNA, 1278 bp, Zea Mays
atggagagcagcggcatgatgctggtgaagagcgagatcgagagctgctacccggggccgtcggcggcggcacccagcgtggtgatcgggggagcgccggacggcgtcgaggggggccatcgtcatcaggtggtgaggaggaggaggagggagccgcctctcctcgcgcccatcggcggcggcggcggcattggcaagccgctgccgagcatcaccgtcaagaggagctccaggttccgtggggtcagcaggcatcgatggacgggtcggtttgaggcgcatctgtgggacaagaactcgtggaatccgacgcagcggaagaaaggcaaacaggtgtatctgggagcttatgacgaggaggaggctgctgcgagggcctacgacctcgctgctctcaagtactgggggcctaccacctacacgaacttcccggtcatggactacgagaaggagctgaaggtgatggagaacctcaccaaggaagagtaccttgcatcgctgaggaggaagagcagtggcttttcaagaggagtgtctaagtacagaggggttgccagacatcatcagaacgggagatgggaagcgagaatcgggcgcgtcttcggcaacaagtacctctacctaggaacttacagcacgcaagaagaagccgcccgcgcatacgacatcgcggcgatagagtacaagggcgtgaacgcggtgaccaacttcgacctgaggtcctacatcacgtggctgaagcccagcgctccgccggccgccttcaaccgggaggcgctcgtggcgcaggcagcgccggccgagcagctgcagctccaccaccacccggcagagacggcccagatgctcccgcgaggcaacccgttcctgctggaccacatgaccagtagcggcggcggccaggaggcctccatgtccacggtgtctcccggcggcatgaggaggcgaggctcctccaccgcgctcagcctcctgctcaagtcgtccatgttccggcagctggtcgagaagaactccgacgccgaggagggcgccggggacggggaggcggctgctgctgctggtagtggtcatccagggccaggagacgcctacgagtaccacaactttttccagggagaggcgcctccggacatgtgcgacctcttctcgtcaggcggcggcggcggcggcggccacgcgcgggttgctgggttccatagagacatcgccgcgtgctatgacggcgaggggctggatggctggagtgggtttggcaacatgccttctctgcaatag

SEQ ID NO: 147304 - DNA, 234 bp, Zea Mays
atggccgccgctgggcccgggctctactccgacatcgggaagaaggcaagaggtctcctgtacaaggactaccacactgaccggaagttcacgctcaccacttacgccgccaacggagctttcaaggcgcgtgtcaccatggacatgaagcaccgcgtcgtccgcgccatgatcgcgggtagcatgggagacggtgatggcgcacccgtgcatgtccaggataagaccgagtcg

SEQ ID NO: 147305 - DNA, 633 bp, Zea Mays
agatccagcggcctcaccatcaccacccgacacgaggacacgcgacgactgactaggcgaggggagcagtcggcgggcgatggtcggcggcggcgcacatggcggcaccacctacaaaggctacaccatcccgcacaacaagcgctggcacaccgtcgccggcaagggcctctgcgctgtgatgtgaactgggtattggcggcggcggctatgggcaccggcggcggcggctatgggcactggcggcggctatggaccggcggaggcggctatggactgggcactgttctgggtcttctacagggctaagcaggatggtgctacgctcttgggtttgcgtcatccttgggatgggcatgatgaccactctcatggtcatggacatgggaatgagagatcgtgacattaagttgcctactctcggcggacggtgatttgatgctttgcatgtcacaacaactaaagattgagttaataaattctatcacccttcatggtactcatgttgtatgcaactggtttagcacaaactggtttcgttacgattgtgcttatgtatttgatttgaagcatcggttatgtggaaaagaatctggtttatgttgatagttcagtacattgctttgcttcgaa

SEQ ID NO: 147306 - DNA, 1879 bp, Zea Mays
agatccagcggcctcaccatcaccacccgacacgaggacacgcgacgactgactaggcgaggggagcagtcggcgggcgatggtcggcggcggcgcacatggcggcaccacctacaaaggctacaccatcccgcacaacaagcgctggcacaccgtcgccggcaagggcctctgcgctgtgatgtgaactgggtattggcggcggcggctatgggcaccggcggcggcggctatgggcactggcggcggctatggaccggcggaggcggctatggactgggcactgtcagcactcagcactgtcaacaaacaaattaattcattgtcagcactcagcagaactgggcactgggagctgtgggcggaggtaagagggaggagggggccggcgaccggcggcgtacctggcggctatggagtctctggacgacggtagcgccgtagcgggcagcacagaggacgtcggctgggcagctgaggacggctcgacggctgtggaggcttagaatttagggtttgaggaatgaggacggctaaagacccaggaaggcccattaacatctagaacgttcagaaaacgtccaaaacgccgtagaacgtccgtaaaacgtccagaacggacgctctaaccctttttcgtaaaacgtgcggacgttctaatccttaatcgcgttttaccgtttaagcgacgcttcaataacaatggctggacctcagtcagctgcaaccgtgcataccagaaccatctgcgacgtcacaaaggctgaatccggcttctcatgcttgcttgactagcttgaggctctttggtatctgataggaactttctgacgtctttctatgtcttccctgttctgcttacaacatgtttgggaactaccttcaactcttgtttcatcttcacatcaaatgagtttgattcaaggcatttttgtttcttttgcaaacctagccagatgaacaaaacatattcccaggttctggactatgcccaccatatgaaatttgatctctgagtttgtgagctgttaactttgaaaaggagtttgcagatgacgtttatcttgaccacctttgcatctccattgacccgatcatgagaaaccaaatagaaaaacttctgatttttttaacatggaaagttagaaactacctcaccaaacattgttttcacaatgcacgatctgcagaaatgcatgttgcttgaagtctttaattgatcttcccactttctgtgagcagtgagctgcaggtcatttggacagtcactaactcagtaactcttgttaaacttctaacctggtcatgtgagaatagatgcactaacctgatcagaaaaaaatgtttagctaacttggttttcaagctgcagatcaagattcttaatgtcgtatttcttctgaaattctaagtgtacacaaggacaatcgactttttttttcagatatgttactttagatttcagagtttgtacctgcaagttgtgattgtggcatgttttcagaagcataaccaattgtgctacttgcaggttctgggtcttctacagggctaagcaggatggtgctacgctcttgggtttgcgtcatccttgggatgggcatgatgaccactctcatggtcatggacatgggaatgagagatcgtgacattaagttgcctactctcggcggacggtgatttgatgctttgcatgtcacaacaactaaagattgagttaataaattctatcacccttcatggtactcatgttgtatgcaactggtttagcacaaactggtttcgttacgattgtgcttatgtatttgatttgaagcatcggttatgtggaaaagaatctggtttatgttgatagttcagtacattgctttgcttcgaa

SEQ ID NO: 147307 - DNA, 534 bp, Zea Mays
agatccagcggcctcaccatcaccacccgacacgaggacacgcgacgactgactaggcgaggggagcagtcggcgggcgatggtcggcggcggcgcacatggcggcaccacctacaaaggctacaccatcccgcacaacaagcgctggcacaccgtcgccggcaagggcctctgcgctgtgatgtggttctgggtcttctacagggctaagcaggatggtgctacgctcttgggtttgcgtcatccttgggatgggcatgatgaccactctcatggtcatggacatgggaatgagagatcgtgacattaagttgcctactctcggcggacggtgatttgatgctttgcatgtcacaacaactaaagattgagttaataaattctatcacccttcatggtactcatgttgtatgcaactggtttagcacaaactggtttcgttacgattgtgcttatgtatttgatttgaagcatcggttatgtggaaaagaatctggtttatgttgatagttcagtacattgctttgcttcgaa

SEQ ID NO: 147308 - DNA, 1576 bp, Zea Mays
agatccagcggcctcaccatcaccacccgacacgaggacacgcgacgactgactaggcgaggggagcagtcggcgggcgatggtcggcggcggcgcacatggcggcaccacctacaaaggctacaccatcccgcacaacaagcgctggcacaccgtcgccggcaagggcctctgcgctgtgatgtggttctgggtcttctacagggctaagcaggatggtgctacgctcttgggtttgcgtcatccttgggatgggcatgatgaccactctcatggtcatggacatgggaatgaggtaggagaccatctgatcccttctatttacttagcattacagaatgcattcttttagcttgttttgttaatgaattgctgtttgactcctgtcaatttgcaatcttattttcattttcatttgatgtttttttattcccccgtggcagtttttttatgtgttatacttttgaaaaattactaacataagaagaaattatgcctggtgacctaaatatttgtttctgcaaatatcactttgtggattatggtgagaaaaatacatgtttcgaatgtatgagtgttgcatgatcatttcaatgtattataatatggtgctttaattggtaagtctaacacctcacgaaatagttgatcagcttagtctgttctttattgtgtaaacatgctttcccttttgtttgcattgggttgggggagtgtgactggtaattcccagatattatcaagtgtttttatttgccatgtttgcttaatacttatatcgtgcacgtttaaggatttatactttctagcactaaactgtgtatgatgttctgactggaaattaataaaaactgcagaaaacaaagaatcatttgcttacactgatccaccgtgctattccagtcttatttaaaagaaataaagaaactagagatgtcaatggggacccgatacccgccaacccgtggggaattcccttattagggtacgggtatgagacgaaaattgtccccatgggtatggatatgggacaaaatctccactcattgggtaaacgggtatgagtttgggaagcaataatccgaacccgattacccatgggtatttcatacgtgtacacctgtcgtgtttgtatgaatgagttgagccgagtcggccaccaagcccagcacgacagcgcaccaggccctaggtcctagcccaacaaggcaactagcatagcagactagtaaaaaacaaaaccctaaaataaccagtcatatgctacgccctaccaagatgacggtgacgaccatggattctcatgcgccaacgaactcagatggtgaccaaggaagagatcgtgacattaagttgcctactctcggcggacggtgatttgatgctttgcatgtcacaacaactaaagattgagttaataaattctatcacccttcatggtactcatgttgtatgcaactggtttagcacaaactggtttcgttacgattgtgcttatgtatttgatttgaagcatcggttatgtggaaaagaatctggtttatgttgatagttcagtacattgctttgcttcgaa

SEQ ID NO: 147309 - DNA, 2430 bp, Zea Mays
attgattttttttttccgcgcagccgatttcttttcgtctctctcgctctcgccttctcggcgcagcgcagtactacgagctagcagcaccaggcaggaacctcttcccacacttccgcgctcctccctctctctctcgagaatggttgtgtaggcgggcgcaggagggagggaggcgagagggggagctagggtttttcgccgccgccttctgttatcctcaggctctgaaccccctccggtccggtgcgcggcagattagactccgatggggaagtctccggcgaagtggatcaagtccgtgctcttcgggaagaagtcgtcgtccaggtccggctccaccaaggccaaagatttatcgaaaggtgcgagtaacaaaggagctgctgctgcggggaaggagcccgtgttctctgagagctccccagtgatctcggagcctgtgcttgttagcgcccacaacaatgagaccgtgcgggaggtggcgaagggtgagaattccagcgtgcaagaagtgccagtgaccgatgtcagtcaagacttggagaagcagggcagtgtggggtctgatacgtccaatgatgctgagagggtgaaggaagagcgagcggccgtgaaggcacaagctgccttccgtggttatctggcacgccgagcattccgtgccctgaaagggatcataagactacaggcattgattcggggtcatcttgtaaggaggcaagctgtttcaactcttcgtgcaacatggttgattgtgaagtttcaagccctggtccgtgggaggaatcttagactttctgaagcttccattcaagcaaccatggaactttcccaacagaaccttgcgggtgctaaacctggttcctggaaggagaagttgtcgtcaaatgcatttgctcgcaagcttctatcttcatcaattgtggttgaggctcttcacttccagtatgatgagatggaccctaattcagccttcaattggttagagaggtggacgataagtcatgtctggaagcccgcttcccaaccaaggagagttagtgctgatgctaagccacatacaaggaaggccagctatgcaatggaaacagagtcagtgaaattaaagcgtaatgcacggaggagctctgcagggccatttgaaccttctcaaacaaacactgccattgaaattgagaagacaagacggaatccaaggaaattaagtagcactcctgctgagtcagttcctgatggccagttaacagaacttgagaaggttaaacgtagccttaggaaggttactaattccgtggctgaaacctcgaaggcatctagtccaaaaactgagattcctaaccatcaagaggtccaatgtgagagaccactaagaagagcaaaacaagttccaattcatcttgagaatcaagagcctgataatgttaatctgtcggacaatgcaaagatggatattctggtacctgatatccagcctgatgtggaagttgcttcagatccagtcaccatcactaatgaagaaaatgttgatgaaccaccatctgttgttgctccagtggccgaaattatgcctctgcaagacatcaacaacgatgaaaatgctttggtgaatgatgtggaagagagatccaaagaagaacatccttctactgagagcctgaaaggcagcaagaggaggtcttcattctcagctaagcctgaatatccagaaaatggctccaaaaattctccagctctgccaagctacatggctgctacacaatcagcaaaggcgaaactgcggggaaatagctcaccaaaacttagctctgattcagcagagaaaaacggcttcactcgtcgtcactcccttccatcctctaacaacggtaagatggtttcacattctccacgtacacaaaggccagctaatgctggtggcaaggatggagcgaaaggtgacaaggctatgctgtcatcaagagatgcaagcgagagaccactgaaagctgagtggagacgttgaggcggcgaatcaaatccaaatccttcatttgattagcgcgaccgtttgggtggatggatcgcccttgcagtttgctcggatttgttttgtttgtgatgtaaaaaaatgatgtccttatcgtcggcgagatgaatgaaccggctttgttgtgatgaatccgctgggagtcaacttatttattatagggttttccgtcatgccttttgtgatgtatagctgaagtattttcccggtttgttttggtttccagaccccccagacttcctcccttctccttgttgagagctgctgatgttagagagaatgagaacatgcatggattgaattgaacaatcttacccatttggtgaaatgtgggctgcgttttgactgatggttgtttgccattcatggttattgtccttgaagccgcagtatacttgtcc

SEQ ID NO: 147310 - DNA, 1179 bp, Zea Mays
atgggagcccagcccgcgcatagcctcgtgcccccctccgcctccggtcgctggagcccagccagagggaatggtgaacggcgacggcgtggcagcaacggggaagctcgtggagctcccagcggcgccaagaaggggctccccaggaagggcaaggcttcttctgggaggacattaaacaccacacaaattcctcttgttgcgagccatccagatgtgtatgagccatgtgatgattcctttgcccttgttgatgcactactctcagataaagcacaactcttgacactacaaccaaggttatgtatggaggtagggtctggtagtggttatgtcatcacctcgcttgtaatcatgctcaggcagttaggctctggagcccagtacctagcaattgacatcaaccaacatgctaccgagacaactcaagtgacccttgaagctcatggggtgcatgcatatgtgattgttactgacatcatgtggtgttgataaacgccttgctggtatggttgatgtggcaattgttaaccctccttatgtgccaactcctatggaagaagtcagatgtgtagaggcattgctgcgtcttgggcaggcggtttgaatggccgccaagtgatagacaggatccttcctgctgtgcgtgagatgctatcagaaagaaggtggctgcacatggtggcccttgaagataatgatccttcagacatatgtcatctgatgagcgagatggggtatgcatcccgcgttatcttgaagaggtgtactgaggaggagagcatttatgttctcaagttctggcgagatccacacgctgttacaagtgcgtcgccgaaatcttcaggctctgagtcatggttttctcagttgcatttcaaatccctttggcacaagggctcgtagcagttcatgtcctcaccagtttggcgtcttcatcagctccaaaacatagcaagagatcttctgtaaatctgagatgacagtatgtttagatgtgtttggataaaatggttattgttggtttctgaccatctcaggcacagtgaaagaatcaagaatcagcctagcttgattggtttaccgcagctcgtgacacgggtaagtgctgttgttgagttcaattcttttgttctttctatttcgttgttttactgggagaatttgcttaccctggta

SEQ ID NO: 147311 - DNA, 7145 bp, Zea Mays
atgggggagcgagacgcgctcccgccgctgccgctcgccctcggtccgccgcatctaatcccgccggcgcccacccgcgacccgcgcgccatcgccttcctccctgacctcgtgggcttccactgggtcgcctacgctgccggctccttccttgtcgtatcccacctcccctccccttgccgggacgacaacaacaacgacagttgctccccgttcttccgccaggtcatcgacctccgcgcccccgtgtccgcagttgcttggtgccgccgcgggagcggagaggtcgccgccgctacagacaattctatacacatattccagcctgcgcccgcctcttctccaggttcgtttggatggctcctgagatggtctatcaccgagacgttcgccatcgttgctgtatcctggaccggctgcggcaatggcattgtggcagttggcgcaggtgtttccatgtgggcaagattggagtcctcctggcagctcgcttggaggtctacaccgcaggtgccgcaagcccttgtctccactacctgttccatgcaaggtcctgtcgcgacagtggcagctcttgctccagccgagggcagtgtgcctgttcttgtgtttctgaacgatgccaggagggggctggagcaagctgagcttgtgcatcctcagcctgtttgtatgatccagtggagatcctgttcgttatacccccatgatctgtctgagatcaggagagagatcctcatgacttgctgctttgatgggactgtccggctatggagtaaggatgaggtgtctaggtcgaagaagcagcgtggtttgctaatatcattcagtgtcattgcagtaatagaggtgaacaacactctgaatggagtcctcggagttgatattattgtgagatggtccatggaatctggcagcgttgtgtcaagggacgaacaaggtagattcaagttgttttcaggtgatttgagggagagccaggttggtaaatgtgagtggcttgtaagtcttggccccgggccttgcattagcttttgggctatccattgtttggatgatgtatttccgccaaggtacccacggattactttatggaaacagagcaaacttcagggctggggggattcctatgttaaatcaggtcctctaaaatctatggaacagtcaatttttgttgaggctgtcatctcaagaaggctatgctctggtccacctgcaacatgttttttgcttcatttgctggtggatgattcgtttgcttggtcaaccgtatccaccaaactgttagctgattctgggaaccatgctttaagtgattctgctaaaaatatcttgtgttgtttgactaaacctgtcaaacaagatggacataagggtagcatcagacaagtgtctgtccatccatatagctgcgaaatagagttagctgtctccatggattcaaacagaatgatatttttctggtctctgtcaactttctcaactctcataccgacaatgcatgcacctatgtatcctctatggaagctgttgtgcaaatttgatttgcgtaacatttctgaagatttcgagtactcatgtttgtgttgggcaccttctgttactcgtgataatagatttcttgttcttggatgggaaagtggagtcgattgtttcgtagttagaattcagaaagaagaggttctttcatgccagaagattttcacaatccccttccttgcagaaagcaatacagaagggccacctgacagcattcatacgataccattagcttctaaatgcagcagctctctttccaccacaaaccaaggggcacatgcatgcttcagcaatgaaatgttttcagcagtggtttatgaaggttcttcagtctttccttctggcctggagggagaatataccacgtgcatttctgtaatgccgctgaataatactgtactgcctatacaacaacatgacccttacagaactgttccaggctatcatattgctactggttgctctgatggcactgtaaaactttggaagatgacttgtgcagaggactctttgcagactaagaaagaaagacacatctgggagctagtaggcatgtttggtgctcatcaaggaccaattgacatagtttcattgtcaggctgtggtagagttattactgttggcagaaatttgaagaaaaatagcacctccattcatatctgggaagcaacaaaaatcaggggagacgggaattttctgctaggagatacactaatgttgcaagaccatattgttggtttagatggactatccttaggtgatggacgatttctacttgcagtttatctagctaatgagttacgtatatattctcataagcacccgtccttccagaatgtactacacactaagaattcaaaagaagagcatctttggagctgtattgtattatcccattctcatcatgatattgttggctttctttggggaccaaaggcaactgttgtgcttgttcatgagaaccatctttcactcttcagttcatggctagtaactggagataatgagtacatgacccagatacattcttgtcctgtagttcatgagatgttgccatgtactaacaattttaacgaagctacttttggtaaactcaagttaccagaaaatttcaacagtggaaacattgatagcaataatgtcctgctaacagaccaacatagccactattctcatggtttatggagcttgctgcacatagctcatagattgagtggaccgttggcatcatatcacccaagagcacttatccagtatctttattcaggtgaatggaaacgtgcggatgctgctctgcaccatcttgttcggtccatgaaagtgagtgaaacttcaaagggcgtgtcaaattacagtacatgccatagtattccagaacttcctttgtctgaatactttgcggcaacagtgtccaacaacatttctaccaaggggtttatgtggggtgagaatagaagtaacacaacttttaatttgttgtcaccttcaacttcatttctttacgaggatggcaatttaggtattaatactacaactagtgcatctgaaaaaccagacattgttgagctccttgacaagagtttcagcaaatatggtataagtgactcagagaaaaatcagatacttgcaatttctgatcttatggctggaatcactgatcagagccattcctctccctacaaaaatcttgacgaagcaggaagaaggttctgggttgctgtgcagttcgaacaattccatgctcttagaagatctgcagattcatccagtaatgaagggtgccgtgttgattctgcttccatagcctgggccttccaatctgattgtcaggatgatctacttaattctgtgcttcctgcagagccaacctggccagagatgcgaaagcttggtataggattatggtatacaaatgtgtcccaactaaggacaaggatggagaagttggcaaggttgcaatatcttaaaagcaaggatcccaaggattgtgctttgctctacatagcattgaacagaataaaagtgttggttggtcttttcaagattagtagagatgaaaaggataaacgtctatatgagtttctgtccagaaacttccaggaagaaaggcacaaggctgctgctctaaaaaatgcttatgtactaatgggaaggcaccaatgggagcttgctatagcttttttcctccttggtgatgatacttcatcagcagtgaatgtttgtgcaaagaaccttcaagatgaacagcttgccattgtaatttgtcggcttattgaaggatctggagggcctctggagcgtaatctcatttctaatgtgctacttccagatgcagttgagagaggagataactggctgtcaagcctgcttgagtggatgttaggaaattattgccagtccgtcaatagaatatttggttgccatccaaagttgcttattgatcaaaatgtgcttgcagacccagaattgggtcattattgtgcaattctctcagcaaaaagtagtttcagaaactctgttggtgaagctgtatctgcaaagttatctaagctttcatttgcagtggctgcatgtgccttgaataagtgcggactacctcttgaagcactagaatgcttgtctactaactcgagcatagatggcaaggatagcataatcgcacatggtgatggagaccacaagattttttatggaatactgagccctgtctctgcttctaagaattggctgtcttcatctgtcattagtggcattgagtccaaccttaaactaactatggcttcaaaatatctatctagccttctgagaaagcactcactctgttcacaattgaacgcaccattatctgaagaaaaggtccttaatgagtacaacaatcatcaaattgaaaaactgacgtgtgatattacaacagtaatctcaatatttgataaaaggttctccctcaaatttgctgatatagctgagaagcgtctaagggaattctttgagaaagagggacttgaacatgaagctggtgttagtggttcagaattcaggggtcttatcacttctgttgctgcaaagtttgttatggattccattcattttgtgtcatcttcattagtaccactgcatgcatcgttcttgaggaagaatttaccgatgaattcaagttcaagtttgctcttctggttagagtccaagttgcctcagcaactcccagtcagtgatagctatgatcacctctcgaggatttcacagctttcaaacagtgagaatatggaggcattgtttaatattttgtgggaaatatctgttaatcctgtggatgtttgtaatgcctttgtgagtgaaggagttaattgtttttccttaagcaacacgaatgtcactagatcttggaaggacataagatgtcctgtggttgagtgtgataaaattattactgaaagaagtggagaggaacatgaacacagacttggctccaagagattgggacagggattcgctgaaaaagcctcttataatggtgaagtgttgtatgaaactaaaaggagggagttgatcatacaaaaagagtttcagagcccaagggaaattctaaggagaagcggggagcttcttgaggcggtatgtcttaactctgtcaatgagaaacaagctgctattgctactaatcgaaagggccttgttttcttcaattggagtgacaagcagcataacaagagtttttcagagtacgtctggtcaggatctgattggccattagatggctgggctggctgtcagtctacacctactccaacttctatctctcctggtgttgatcttggtcggaaaaaagggtcacaacttggttcagttggagcaactacaggtttgagttctttagcaaagccaggaagagatctaactggtggtggagcatttggaattccaggctatgctggtattggggcctctgggtttgggtggggcgaacctgaagaatttgaggatttcattgatcctccagcaacacttgagaacatacattcaagagcattatcccgccatccctcattaccattgtttcttgttggttcaagcaatacacatgtgtatctgtgggagtttggtaaagctagtgctatggctacatatggtgttctacctgctgctaatattccaccgccttatgcactggcctccatatcatctgttcaatttgactgttatggacagcggtttgccactgctgcattagatggtaccatttgtacatggcaagttgaggtgggtggaagaagcaatgtctatcctacagagtcatctatatgctttgacagccacgcctcggatgttgcctatgtgtctgcaagtagatcagttattgcttctgctggatatagttcaaatggttcaaatgttgttatatgggacacactgtctccaccagctacatctcaaacatctatcatgtgtcatgaaggaggagctcggtctatttctgtgtttgatagtgatagaggctatgggtctatctcaccgcttgttgtaactggtgggaaaaatggagatatagctttgcatgattgccgcttcctttctactggaaagtccaagcatcatagagttaccactgagcatggtgtcgaggcatcttccatgcatgacatcaaatctagtacttttggtggtactgacagtgggatggtctggcatataccaaaggctcatctaggtagtgtcacaaaggtaacgaccatcccaaataccagcttgttcttaaccggaagcaaagatggagatgtgaaactttgggatgctaaaaactcccagctagtctttcactggacaaagatgcatgaacggcacaccttttttcaaccaacctccaggggctttggcggtgttgttagagctgctgtaacagatctccaggtgttgcctaatggtttcgtttcatgtggaggtgatggttctgtgaagcttgttcagataaaagatgatctcgctgcagcatatcagcgttaaaacaagcaaagagggaagaagacatgctagaaaatgcgatggatgcagttggtcacttgatatcattctattttgctttgctcattatacttttgagatgctttactcctttcaggggtggtatagcaaggaggaagctatgatttaagagcactagagcagacatctaggcaatttgacatcagcatttatacgtcgagtttttatacgagcctggtttgtggctagtcaaactgccctcagtggtttttttgaggcctgaattttcgcactttggacagggcaatgcggaccataattttttgtacatctgtacagtcaaatatcttgttttgttggccaggatgttgatggagggtgtaaagttgtaagctagaagtatggagataccaagctacaatacctttttgttacttaatacaaaagtgctgggtttagggttaatgtacaatggcagagcaaatggaccaaacaaatattgtatttggtacgggagtatgtatgcggtttgtcaaggggaccgcagtagttcatcattcaaaacaatattttgcattattttgtactgtagatttcactgtttctatagtgaagtttgaatatgagaa

SEQ ID NO: 147312 - DNA, 1311 bp, Zea Mays
attccgtttatcagggaggccggccgagaccgggacctcgggctcggagggtcacgcgttcgggcgacgctcctctcctgcgctccagcagccactcccgtctcccccgcctctgcatttaccgtgtcgcggacgcagatgcccacgtctccgcggtccgtgctccactcaccgcgcccgcctgcgaccgcgagctctatatccgtccaacacagccagagtgcgcacgatcccactgccactgcccactgctgtgctaccaacagtagctagcaaaaccatggatgcggacgctccggcgacggcgacgccatccaggaagccggcgtcccactccctcccgccgccgcccgcactgttcgccgcccgcgcgcgctcccgggttgccgacctgggtgccggcgcagcgttcccagcccccccacctgacacgccgccgcgccgctcgcccatcaccgtgccgttcctctgggaggaggcgcccgggaagcccaaggcgctgcccgccgccgcgacaccggctgcagccaacgccggctcctttaccgaagtcgccggtcggcgtcaggacagaggccacgcggacctgcctcgccccctgccgctgaagctgcccccgcggctacagcaggcggcgtcgtcgttcgccgcggcggacaccccgctgtcccccaagaccgtgctccagggcggcaggaggcggccgaggtgggcccggagaggcgcctctgccttccggaggacgccgagcgccggcgggggactcttctctcgaaactggagcaagcccacggcggcggcaagcaacaagaacggagacggtgaccatgagcgggacgcggcgggcccagacgccccgtggtgctccccggcgtcctcgtcctcttcctcatccgcctccacctgcttcggcgtcgacggccacggccacggaggtcgcgcgaggcccgccgacggacgggaggtctgctcggaggaggacgacggctccccgaggggctcggtgaggatcacgaggtttaggcggaaccggagcctccccagcatgaccacgtctaacctctgggcaagcatccgtaggagcgtcaagcaaatcaccccatggagctagaacttcggcgactggtaccggcactactagaaataatcgcgagcgccgaactgcaacctgcggtgctcaatggacgccgtgaagagtacaggctcaactcaacaagcctgtaggtaggcgctcaatgtaacattgtgacttggcccgaaagagaacatattcggtgtataccagactttgatacatatatggtacatata

SEQ ID NO: 147313 - DNA, 729 bp, Zea Mays
atggatgcggacgctccggcgacggcgacgccatccaggaagccggcgtcccactccctcccgccgccgcccgcactgttcgccgcccgcgcgcgctcccgggttgccgacctgggtgccggcgcagcgttcccagcccccccacctgacacgccgccgcgccgctcgcccatcaccgtgccgttcctctgggaggaggcgcccgggaagcccaaggcgctgcccgccgccgcgacaccggctgcagccaacgccggctcctttaccgaagtcgccggtcggcgtcaggacagaggccacgcggacctgcctcgccccctgccgctgaagctgcccccgcggctacagcaggcggcgtcgtcgttcgccgcggcggacaccccgctgtcccccaagaccgtgctccagggcggcaggaggcggccgaggtgggcccggagaggcgcctctgccttccggaggacgccgagcgccggcgggggactcttctctcgaaactggagcaagcccacggcggcggcaagcaacaagaacggagacggtgaccatgagcgggacgcggcgggcccagacgccccgtggtgctccccggcgtcctcgtcctcttcctcatccgcctccacctgcttcggcgtcgacggccacggccacggaggtcgcgcgaggcccgccgacggacgggaggtctgctcggaggaggacgacggctccccgaggggctcggattaa

SEQ ID NO: 147314 - DNA, 3894 bp, Zea Mays
cttccctgaggcttccctccgctcaaatccacaatcagcaaccactacgggagcgagacgagacgcaccaccaaccgaagcggcgataacacctccccccttggccctcggcacacgcgtcggcaccttgcacacttgcacttggttggagctcctctaccttttccatcgctctgctctgctccgcgtctccgtccgccccggcaaaagcaaaacacagccatggaggggtacgaccgcgagttctggcagttcagcgaccagctgcgcctgcagacgaccgccttctccggcctctccctcggcgactccatctggtctccggccaccggcgccggcgggcggcgcaacaacaacaccgacctactcgcggcctccgcgtcggcagccgacgccggcaagcacaacggcgtgggcctcagcctgaatgatggagggcccggactcattggctccgggaagctcgccttcggcggcagcaaggccggccgctacaacaacctcccatccgagaaggccgcgcccgtctacaaccacagcggcgccacgatcaacggcggctacgccaggagcgacaacgccggcctggcggcgttcaacaagatggggagctacttccacaacagtaacggcaacggcggcggcggcggggaggtgaagagctacttcaacaagtccgccggacgggcggcgagcaacaacagccacgggcacgccggcggcggcaagaagggcggcggcgggaagcacggcaagaacgagggcaacggcggcgcggtggcggccacggacaagcggttcaagacgctgccggcgtcggaggcgctgccgcggggcgaggccatcggcggctacatcttcgtctgcaacaacgacaccatggacgagaacctcaggagggagctgttcgggctgccgtcgaggtacagggactcggtgcgggccatccgcccggggctgcccctcttcctctacaactactccacccaccagctgcacggcatcttcaaggccgccagcttcggcgggaccaacatcgacccgacggcgtgggaggacaagaagtgccccggcgagtcgcgcttccctgcacaggtgcgagtggcaacgcggaagatctacgatccactggaggaggacgccttccgccccatccttcaccactacgacgggcccaagtttcggctcgagctctccgtcgccgagaccctcgccctcctcgacatcttcgctgacaaggatgacgcctgagccttccttgccgccccctcgccgccagtgccaatccattaatgcacagacaataaaatggctggagggacagaccaaactatccacctttgtttgatatgataaagggctatgtatgaggcacgcgtcccattatttttgtttttattataagactagacctcgttccgtaagatacatgtatcaatattatataaaaacaaaccatcagttcttgtgctgcactacagatgttgtgttggattggaattcgtccctcgcgacaatacctcggttataatactgcgtctgaatgctccagattcgacagcatcagctacctgccacttccacaccatgacttgagcttcgaccgattctggttctagaataaaactcaatcaactcgctggtagctgaactgcacgacacgacaaagcatgctgcacaaacggttggcaccagataaatcaaagtcagctgcggcccataaccttccattcacctaaaacatatttgtacaaaactgcggaacgaagctccagaggagcaatattaacaaacagaaccacaacggagaaaaagggtgggggtgggggtggggggaatctcatctctcctcaactcaaatacatccgacaatctatctccggtcaagaaaacattcataccacatcaaattttcttcccaaaggttttctttgctttccttctccagcttcaaccaaacatattgtgcggagcagggtgagccatgagcgagctgtggtgatggaccatataccacctcccattacagagctcgtacacgttcgtcacatggaacaccaaagggtcaacatcaacattcgccttcatgttcacccatgccatctcaccgagcacacggacacggacatcccttatctggaacccaatgccctgccctccatcttggccccagttgaatagcaggccccagctctccatcactgagttgtatctgataaggaacagaaatgggtgggcgcattcacaccagtaaggcctgttagataacgctgcttcttcaacagttcgattcgaaaatcaatactgatgaggggaataatataaaaaggattcttacagtttaaatacaaaacgtttgtcccaaatagaacaccaacatactgaaggcgttctatactagaaaggaaactagattcacattgtgaaaatttcataagaatcagattaccatctgtcacctgacacaccaagcctagtcaatggaattagttgtatggttatctggttaatgacaaatggtcaagtacaacctactacaagacagcaaccaatggatcccgatcctgccaaagcatacaaactttacttctcatagaagacacggacatttcaatgagcaccatctttatttatgttcacaggtacaaaggtttcaaaggtgtactttataagatgaaaagcacaagtgtgcacactgtttgaaaaggcaacccccctaggccacctaataaacgaggtgctagataccccttcagttcccatgtagcatctagtcatttttcagacatttgtgtgcgtgcataactagaaactacaacttctgtccaaaaaaaaaattccaaccaatcttcagcatagttgcaagatctcaatagttggaaaaaactatgatgtgcgtgtttctgaaaaagctatgatgtgcgtgtttctgaaaaaactatcagcactcagcagagcttgaagtttgtaaaagaaacaaaattaatcactacagcaatgcattgatatgtgtctatatgctaaataattcaagtgttgactcaaaatgtctctgctccaccagtgcaatgcaacgatacatatccgaatctgaatcttagtaacaggtatcaaattgtatcaaacaaaattacttccctttgacctaaggctatggccaacagatcgtgcatatggctgtgcaaaacactattttgcactgtagactgtactgtttacagaatagagttggaaatatgagatgagaatgagtaagctgctagagatagcctaacatatgcaacgagttaaaattaatttgctaaaaaccctataacatactccatccatttcgcgatgtgtccatggccaccattgggcataaagcaaggaaacatattgttggagggaaggccgtcgctcggccacgtgtcagtgagttccaacacatatctatgcaaacgaagcaacagatcaaccacaactaggtgcacacccccttggagtacacaagtcaacaagtgtgtacatgcattggttactcccttcccaataaacacatcacatttaaagtcaacaacataggaatcatcaaatcaacagacttgtaaataaaccataggacacattgcaaagcagaaggattagaagccagggaaaaaatagaactttgaatcgatggcagtgaagtcaagatttcaagacatacccagggcagaactccccagtcgcatgaatacacttgacatagtctgcattaagccaaaaacgactcattgctggcaaggacccttccctgatgatattgtagaactccgcgttaagattaatgatggcttttgtagctgcatagtatgccttccatccattaggaggatttatagtaccctgttccaccgtaaaatcctgcaagag

SEQ ID NO: 147315 - DNA, 1029 bp, Zea Mays
atggaggggtacgaccgcgagttctggcagttcagcgaccagctgcgcctgcagacgaccgccttctccggcctctccctcggcgactccatctggtctccggccaccggcgccggcgggcggcgcaacaacaacaccgacctactcgcggcctccgcgtcggcagccgacgccggcaagcacaacggcgtgggcctcagcctgaatgatggagggcccggactcattggctccgggaagctcgccttcggcggcagcaaggccggccgctacaacaacctcccatccgagaaggccgcgcccgtctacaaccacagcggcgccacgatcaacggcggctacgccaggagcgacaacgccggcctggcggcgttcaacaagatggggagctacttccacaacagtaacggcaacggcggcggcggcggggaggtgaagagctacttcaacaagtccgccggacgggcggcgagcaacaacagccacgggcacgccggcggcggcaagaagggcggcggcgggaagcacggcaagaacgagggcaacggcggcgcggtggcggccacggacaagcggttcaagacgctgccggcgtcggaggcgctgccgcggggcgaggccatcggcggctacatcttcgtctgcaacaacgacaccatggacgagaacctcaggagggagctgttcgggctgccgtcgaggtacagggactcggtgcgggccatccgcccggggctgcccctcttcctctacaactactccacccaccagctgcacggcatcttcaaggccgccagcttcggcgggaccaacatcgacccgacggcgtgggaggacaagaagtgccccggcgagtcgcgcttccctgcacaggtgcgagtggcaacgcggaagatctacgatccactggaggaggacgccttccgccccatccttcaccactacgacgggcccaagtttcggctcgagctctccgtcgccgagaccctcgccctcctcgacatcttcgctgacaaggatgacgcctga

SEQ ID NO: 147316 - DNA, 776 bp, Zea Mays
cttctcttccaccagccacctattttttttcccacacaccttcttcctccctgcttcacggcagcaagcatggacgtggctctctccccacggccggacctctgctcctcttcctggcgagcagcagccccttcctccctcgctcggccgtcctcctccttctctccggccaacagcagccagcggctcccatctcccagcaacctccatggccgcgggcgcccctgctccaaccatggcgcccagatttttctagctctctcccatggcgtcctccccttctccccctcggctccagcttcctcgacgccccctgctccttgtccctcgcgcaacagcagccagcgcccccttttcctcctccctagttcccacggctgccagcaggtacacctcccatggcgctggccactctcccatggccgagcccctgcgacctccatggacgccccctcttttcttcttcgcgcatcagcagggagcccctgctcgggcagcagccatggcgccatgattttctgcgcagcgatgccggtccaaaaacagcagccccggaccccctccgcatcacgtgctcgctcgatctgcgcagtcccgacccgcaccgtcgcgatggtgtttgagacagccacatgccgcgtcgtcgatctgcgccgtgcttgtgagtcggctaaaaaaatccttgctggatgttgccgcggcgtctcgcgtgatgcatgattcggtgaagcacctaaaccatggacgcatgcgcgactcgaatccgagatgacagg

SEQ ID NO: 147317 - DNA, 1713 bp, Zea Mays
aagtaaacctcgtttccacacgtcttgcacccccgccatgccgaccgtaaacgtgaaatggcagaaggaggtctttccaggcatagagattgacactagccagcctccgattgttttgaagagtcagctatacacactaactggtgtgccacctgaacgccaaaaaattatggtgaagggtggattattgaaggatgatgcagattggtctactttgggagtgaaagatggccaaaagttaatgatgataggcacagctgatgagattgttaaagctccagagaaaggtccgctgtttgttgaggatctaccagaagaagagcaagtggttgcactgggtcacagtgctggtctttacaatcttgggaatacatgctatatgaattccacattgcaatgtttgcattcagttccagagctgaagtcagcgctgctaagctattcagatactgtaaaaggtaatggcattgaccaagcttctcataatttgactcttgctactcgtaacacctttggtgatcttgatcaaagcgttcgccctgttacacctttacaattcttacagacactgcgtaaaaaatacccgcaatttgcgcagcaacataataatgtctacatgcaacaggatgcagaagaatgctggacacagttggtgtatacactttctcaaactcttacctcagattcaagtgaatctgcagttcttccaatgaagcaactatttgggatagatctcgtgagcagggttcactgtgcagaaagtggtgaggagagcatggagacagaattagtttattcccttaagtgtcatatatctcaagatgtgaaccatcttcatgagggaattaagcatggcttgaagacagaacttgagaaagcttcacctacactgggtcgaactgcagtttatactagagaatcaagaataaatgagctgcctaggtacttgactgtgcagttcgttcgtttcttttggaaaagggaatcaaaccaaaaggcgaagattttacgaaaagttgattacccactggaactggatgtttacgaattttgctctgatgaactgaaaaagaaactcaaagctcctcggcagatgctgagagatgcagaaaatgcaaagcttggattgtacatgggaaagctagcagctcaaaagaaaatgaggagtcatcaagtagcgctggggaatcgtctagtatggacattgacaaagctgagtcttctctaccaaagaaacaattaactggcgtctatgatttggttgctgtcttgacacacaagggaagaagtgcagactctggccactatgttggctgggttaagcaagatgatggaaaatggatcgagtttgatgatgacaatccgaacattcgcaaggatgaagacattttgaaactttctggtggaggtgattggcacatggcttatatctgcttgtacaaagcccgcatggcagaatcaaagagttaggtcgaattggttctacatttctgtattgcgaatgcaacactagtttttgtgcccatgagcgagcgtggtaattatttttccagttcgtaaagtggttactggtgaatttgcttcaattatgttcgccattattcacccggatatgtatctttaggatttctagtacattttgtgttgtcaaaatataggacaaaaaattcaggggaaagcttttgccttcagtggatctgatttatttggttt

SEQ ID NO: 147318 - DNA, 181 bp, Zea Mays
cttcaatgcgcgcggctcagtgggccttattgctcggtggggggttgggatgaaagggtcgatcagcctcaaccagggcttctcagacggcctccgatgctacaatgcgcgtggcttggaggttgaagacggtggcggaagtcgaatcgtctgtccgtctcctggtccatcacctggtcgc

SEQ ID NO: 147319 - DNA, 282 bp, Zea Mays
atggctgaggggaggggcgagctcagcgacggcgtggagaaagggctagagcagaggatgggcgagctcgactggggcactcggggaagcggtgccaaggccgacgctaggaagggcgatgcagcggcgctggccaccggcgaggacgcggccgggtggaggtccgagcaggggatggatgccgtggcaagagctggaggcgagggcttggggatccgagttgagaggatggtgtgctctgctgctgggcggagagggcggctggaagatgagcccaggtga

SEQ ID NO: 147320 - DNA, 1141 bp, Zea Mays
gttcacgtgtaggataggcatcggcgcgcgccattcgtgtggttactacacacaggaataataggacgcggccccggccgcctccgatctcagctctccgttacacgcaaacgcaagctcccaagcagctaccaaccagccgggagagggagcgcacgcactgcgagaatggccacggccggcggaggggccgggcatctgaagctgctgggcgcgtggccgagccccttcgtgaaccgtgtacgcatggcgctgcacctcaaggggctggagtacgagaacgtggaggaggacctcaccaacaagagcgacctgctcctcgcctccaaccccgtccacaagctcgttcccgtcctcctccacggcgacaagcccatctccgagtcactcgtcatcgtggagtacctcgacgacgccttccccggcgctggccaggccgtcctccccgccgacccctatgaacgcgccgtcgctcgcttctgggccaaatacgtcgacggcaagttgcacggcatgatggtgaaggcgctcatgggggcaacggaggaggagagggcgacggcgacggtggacgcgctggccgctatggacacgctggagggcgcgttcgccgagtgctccggcgggaaaaagttcttcgccggcgacgcgcccgggtacctggacgtcgcgctgggaggcttcatcggctggctgcgcgcctgggacaaggtggggggcgtcaagctgctggacgccggccgggtcccgcgcctggccacgtgggcggagcgcttcgccgcgctcgacgtagccaaggaggtcatcccggaccccgaccacatcgccgagtttgccaaggtgctgcaggcacgctccgcggcagctgccaccagcaactgagctcgcaagtgaatgctgctgctctgccttcctgataaaatcatatcatggtacccggtttgttcgtttaatctggcgcggaaaaaacatggtttgttgtcgtaccaaactaagagtatgcatgcatgcttgttcttaattatatgtacattcgttcaagaaaaaacagattgttcatgtaacggttaggacttgctgtatatccatatgttgttgtttggttcctgcacaacttaattaagatgcgcagtttagcatt

SEQ ID NO: 147321 - DNA, 201 bp, Zea Mays
gagttccagcacagcggcgccacggtgcccccggccgccgccggggacaggcgcacgtccagcatggtgacgccggtgcagggccgggcgtcgctgcacgccaggcgcagcggctggaacgtgtaggtgccgaccacgcggcggtacgccacgccggcgatggccaccgcgccggtgcggttggcgcaccgcgcgccgccc

SEQ ID NO: 147322 - DNA, 626 bp, Zea Mays
attattccgctcgtttctcaggagtcaggacctcgccccggccccaatcccttctccttcgtgcagctgcgcgccagatcgacttcaccgtcgcaactcgtgctgacggtccggccagcatcgcctcctgctcgcgacctcgcccagctccctccaccctccggtgagacgcagatctcctgctcgtggcctcgcccagctccctccaccctccggtgagacacagatcttggtgcgacggggcactacggaggcagggtagtgcggttgtgcgtgtgttggtggcctggttctagcaaccgaggttcatctagttgttgaccaactgctggagcgcccagcccaggacaggcactccactccactccactcgtggtaggaactggaactgaagcagctgctgtaggatgtagtactagcagtgtaccagcagtggagcacacatatagcttgatctggactgacacttctttctatctgatactctgtgatctccgtcgggtcgggtcagtcgttcttgtgtaaaggcagtggaacagagcatgcagattgaacttatgcttgaatctgcagaactttgatcggttaaataaatttcctttgtcagatttactgtgacatacaca

SEQ ID NO: 147323 - DNA, 1386 bp, Zea Mays
ggcatccaggctcagcgtctagggaccagccccagccctagcccctagccctggcggccggcgtggcggcacacagtgcccggcgccttcgtccacttcccggcccggcgtgacgttggcccgggcgcctcgcccattcgatttcgtcttccggtgcagcacaggcgagaagcgcactcagctcgacgacccgacccgtcgatcgccgctcccttccatcaaggcaagtagtcaggaaggaagaaaatccattggtggcgcagtcctaggatcagcacaaagatgcctcctggtcgtgagaaggttggagtcaaaaggccacatggacctcagctatcagaaccaccattgcatccatacgaacaactgcgtctaagacaatgtatgaggaataattcaaggctacaacaattaggaatccctgctttatcaagcatgcttgcaagcacaaattctatttctcagaggaataggccaagtcatagaaatagtgaggactctgagtctgattatgatatttcacaagatgagactggtgatgacaatgttaaggtgggctcaaaggaatgtaacataagaactactgataattcgcttggtgcaatcaagctctgctctaagagagtttttgcgcagcaagaaactactagaattacaaggtcaaagaaaaatattgctcaacctgatgcaactcttacaccaaggcacaacattgattaccacacacaggctaatggccatgcccatttggatgagaacactaacatgaccaatgaaggtcatgttgctccttttgatgggaagaaccctacaggcaatgaagataatgtggatgtcctagctgataacaacaggacgattggaggtcaagttgatgacactaatcagatgtcgaacagagatttagaattaggtcagaatgatcggtgggaaaggggaatcaatatgggacatggtcttcatagaattaaccgaggtttgcgtggaaagttgcaagttgttattcctgaagggaagataaggcctatggcaccacttgttgctgctaagtttgcaactgaatgcaacatttctgtgaggaaccatgtgccagtgttcaaacattggaaggattacaagaaccattcaggcctattcaatctatttacaggaaaacttagtgcaaagtttgacattaacacaagtgatgcaccagttcaaaaggcttgttcccagatgatgaagagtgcggttcgacaacaacgataccggctcaagaaaaagtactttgatccttttccgctacatctagtggcaaaaaaatctccaatcagatctatgactgatgaagagtggaatgaacttgtggagtattggaagagtccaaaaaagtggttgtggtcttag

SEQ ID NO: 147324 - DNA, 620 bp, Zea Mays
ggatttttgtcagtctcctccccacctagtctcttgtatccaatacaacctttgccttcattgccgcagttccgtttcacatcccatcctctccatttccaccccctcccatggcctgatttccgagcccccccgccattcgccccgcccccgaatccgccgtctcatcgaacgcccggtgccgtggggagaagcgaggctccggttctttgtttcttggcggccgaaatataagggaatatgattgacgatgaggaaagccaagggattaagaaggtgcatttcagggattcgttctcccagcaccctatagttacctacaagaggcgtcggcagcagaagccacagacgcagcagcaattacggcaaccaccgccatccctacagcagcatccggagccacagctacaggtgaagctggagccaaagactgaagatgtgccggaacagcaggtataatcatttcgacttcacaaggaaacctacaatacctttgtgttgaaatggaaagaatttttatctcgaatctgtcgcagttgaaatttataaatgctactgcttgtaacctatgtgctcaccaggtccccacattcatcttgtatcaaataacatagaaatta

SEQ ID NO: 147325 - DNA, 3372 bp, Zea Mays
cagtttccgatattgagagcaagggatattggctgggagcatgctgtggatcttgatggaaataaaagacggtggcaatgcaagttctgttctctatgtcgaagtggtggtgtaactactttgaaggctcatctcattgatgacagctgcccaaacgttccaaaggaaatttcaaagaaagtatcaaacttcattgaagagaaaagagcaacacgccttcttttgaataattatgtctttaatgttgatgaggacttcaacacaatacttcaagaagggactgtagaatatgtaaatgaacaacaaccttcaagaaaggctacatatgtgcaaacattatctaagtgtgctattaatgagatagcagcgggaagcaagcaatgtggtgcagaatgtagtggccagccagttgagcattgtgatcagcctgaagagcagtgcacaatggattatggcaggatggatcgattgactagcaataagaaccagattttggacaagaatactgagaattcaaaaaatacaaagatgttgaaaccatgccggaaaagtgagtttaacacaaggaagcacataattattgttgataaaattgggaggcattggaagtgtagatactgtggcatggatgtgtatggtaaaaagtttcagctccattatcatctagctggtgcatttcgtcaggctaagtgtccaaatgttcctagagaagtttttgcaaaagcaagacagcatgttctgacaaagaaaatgctaaaaaagagtaaagctgagcaacagattccttctagtccacatattcttgcccaatctggtgaagaacggcagaacaatgatccattttgtgggaatcagtctcaactgtcaataaacaatgaacctagggaggtacacaattaccctgcagtgctaagggacagtgcatgggaacattctctgatatatgagaaagaaaacggacactggaagtgcaagtggtgcagtattgagggtgatcatggtttaactagattgatgtggcatcttgttggatggcagaatcgacctcagtgcccaaatataccaaaggatgttgctgaaaagatgaaggatcaaatgatgtcaaagaaggagcagaaagcgagatcaggtttgtttgacggcaatggctgttgtgaggtgttgtgctcttctaatagttcacaacttgatcagaaccatctcactgcaagaatacatgacagatgttcttcccaggcttttgaccatgctaacagtgaattaaaaggatgcaacatgttatccaatactattctttcacaacagagttccaatcctcaggtgcatcatgaggatcctcaggtgtgtcatgagcaagagaggaaggaggttgccacctcttcagaacctggctgtgagcaaggtcagaggatgcagtggcagtcgcaaaataagttaagtactaaaatttttattatgcagccaatgatggaaggacctcatgacaatggattatgtggtgacacaaaccagttggaggaacaaaaaagtggctttggaattagtgactgctggaggtatgttttggatggacaaatgcacttgcctgatgtacaggagggtgctggaattgggacatgcatccgtgatgctcttctctatggttgtgctgaatttggcacagtacctgacaaaatggaaatggattgtgataaaacagtggatgcgaacactgctaagtgccagaatattcttaaggatgttttaagatcggagaactttgctttgttgtgcagtgtactctgcagaactgtacatcaagatggggaaagaactagatattttgattttggtgtgattgattcaaggatgaaaaatggaaattatgggcctgaacctgaattattcgtccatgatctgaaactgttatgggaagatcttaaagtggctggtcaagatattgttcacctagcaaataatctatcaagcctcacagaggactcctatgaaaagctggttggaagagagagaggatcagatgatgatgagctcaatgaagctgtggtggccaggtctgaaccgaaaaacctagttcaaccaaatgcatcggtacccttgacctcacaaggctttaaccaattattggatcaacccgggccttctgatccttctgttgtatacaaggacagtatctgcaaccgatgtgggaaagtagcaggagctggtagcgttctcaaatgttacaggtgcatgctaccttgccacatttcatgcattgaggctactggttcacccatttcaactggaaggtggtgttgtaaaaactgcagcgctggcactaaggaaccagttgaaggagacatggtcttagcccatggcaatccaaattgcttgcatgaaagttgtgtcgtctgcgacagacttgcggcctgcaggtctccaaaatgtgataactcaagagcattggttatttccagcgtggacccagagattgatacatgttactcatgcaagatatgtggaggcaccgaagaggatgagaagaggttcttgatatgcggcaacgtcctctgccgatacatgtactaccacattgggtgcctcaagtccatgcagatctctaccagtgtagagaggggcagcccgtgctggtactgcccgtcttgcctttgccgagtttgtctgtgtgacaaagacgacgacctgaccattctgtgcgatggttgcgacgaggcttaccatatctactgcataacacctcgccatacttcaatacccaaggggcagtggtattgctcatcgtgcagcgtggagagggcagaagaggggatgagacagtacgagaggaggacgctgaagctccaccggaaggaggatgctggactacaaagttggaattttgatggtgtggacctgctgctatctgccgcggagcagctcaggatagatgagcagctggagactcgtacagattagcgtgttgcacctacactctggtccttttgccgtgctaaagtgagtttgttgtttgaagagcagaggcctgcctcaggatcagagctcgggcaagggcagttaacaaaatttgctgcagtcctctcacgaactgatgaaaatacaaggatcttcaaacagcattcgccttttgagatgcgtgctatatgataacatgctgtaggatatttgtttcgtttatctgtctttttgctttgttgcacttgcacctgcttgagaagatacttaactcgatacaccttactggtatccaaactgcaagggatgttcttaaattcaaggaaaatctccaatttgagagagcaagccgtctttgaaaactgcctcaggtttttgttgaggctgttattatgctttgtggcctgaattattttagac

SEQ ID NO: 147326 - DNA, 695 bp, Zea Mays
cgaaagccaattctcagaagctacggaaaaactgggactgactgacggaaccggccaagctcccccgccgcgcagatagaaaacagccagggcgcggcgacgtacgacgtcgtccatgtcggtgggcagcaagtcgaagtcgctgccggcgcggcgcggcaacgagggacgtgagaacggagacggcgccgtggcgagggagaagggcgacttggccgcgggcggcagcgtcggtagcaggagcaggaagcagaaggcggcggcgcggcggtacgaccgctcctcctcggggctggagttcagcatcgggcgtgggcctttgaagaacgtggatgccgggaggctcaagggccagatcaagaggtgggcgaaggccgtcgtggccttcgcgcgccagatcagcttcggctcgccgaggtccgtgcccacgccacgcagcggccacggccaggacacgccgcgatcggccccgttgctggcgtccagttcctccagccgcctcggtgccggtggcgccaaggaaggagcctccgacgtcagtgcttgatgtataagaatttcttcgcctacgacctgtacaggactacgagtacgaatttacaatagcattagattctaattattgtttcttttttttcatttttcttcgcaaacaaaagagtctgtttcgttctcgcctagatgcagagtacaaa

SEQ ID NO: 147327 - DNA, 1936 bp, Zea Mays
aaccaaacagcgagcgcaaggaagaaaggtcgaagcgtcgtctctctcggcacggagcctagtgcccggcctcgtgagatccgaaattcagaagcgaggatggcgacgaccgcgactaggcggtggtggaggcggcacgacggcggcgacgatgacccagacgacctcgtccccatggacacccaagagcaagaagagctggtccggtctctggaggctaagcaggcgcagcaaggccgccgttggaggcgcgtcttcgcggggttcctcctaggttacgtggccttccttgtctactccagtttccatcatgcttggtctccctgggagctggttggtttcttactcctgacaactattcttctgtttatgacgtttatggtcatgttttatgcccaattgttgattacacctgccattaattgaggccccaagttcattcaggcaccacacagtgagttccttttacattggatttggaccataatatcatgttattttgtcttgtatacttacgctttcttgaaagcttcctgataactaaaatgcttgcaatattggaaatagttagtcactgatgtatgcttggcactaggaagaatcattattataggaagaatcaagtttttcttattggtgtagttaatcgatttgccttaaactgtgcttctcaaattaacagcggtaccatgcttacttcatggaagatttgcctgcaccaatggtcataattgcaggtttggtatctccttcaactatttagtttgagtttgcaaagttgtaaacaaatcatgtgttgatgcttctaactgaattattttggatctggttgttgtttaactacggtgcttacttagtacttacaattttattggccacctaaaacaattgttagcttctcaatattatcagaagatgtctttataaaccacatattcattgtactgtacaatattgatgctcatatagggatctacttagcatatttgtgtgtgcatgcaccatgttattcacaatgctgtatccttatcttagttctttcaagacttccctgatcatttgcatgaaagggccgtttactctcagcaaatgttcatgattacgattttatcagtatcctaattgctgttagttgatagctgtaacttaggagtctgaaagaggctgggaaaaaatgatactggtgacttaccagcacctggttgttaataacttattccacttggattccatattttgtcctaggattccgaaataaaatggagaacatggtgctcatagcctgattggcacaaaaggcatatgtattagccaactcaaaatagttctcccaacactttgatctaaaaatacataaatgttaaattgcagattggatagctgctctagcatgcctatttgctgtgaaaggattactacagaattcaggcccatcaaagaagtggatgtggtattcttgctatgttggcattttggtagccatcttttggacatactacatcttgaggttgccaagaattcgatgggatgttgcatggctcccactcggtcctttgatggctggtgcattgagcctgtatgtggaccatgtgctgctggagtcaatgcaagatatcagcacattgagaagttacatgtataacttcaaggccttgtagttttgagcataatttcccttgcacctatatgcagctatatgtggaacaggttcaggtcatttctccttttttttagtggcagagttgcggtggtaccttgttaaatggtgtgttagcatgaatttttaacctcagagaatacttgtgcatcacttccgctctgtggcgggtgtatgtacaagctgtggtgccaataggcaccgcggctgtttgaaacacccccctgcttcagtgcttctactgatgtccatatttgttgtagaaattgatgatttttg

SEQ ID NO: 147328 - DNA, 1490 bp, Zea Mays
aaccaaacagcgagcgcaaggaagaaaggtcgaagcgtcgtctctctcggcacggagcctagtgcccggcctcgtgagatccgaaattcagaagcgaggatggcgacgaccgcgactaggcggtggtggaggcggcacgacggcggcgacgatgacccagacgacctcgtccccatggacacccaagagcaagaagagctggtccggtctctggaggctaagcaggcgcagcaaggccgccgttggaggcgcgtcttcgcggggttcctcctaggttacgtggccttccttgtctactccagtttccatcatgcttggtctccctgggagctggttggtttcttactcctgacaactattcttctgtttatgacgtttatggtcatgttttatgcccaattgttgattacacctgccattaattgaggccccaagttcattcaggcaccacacagtgagttccttttacattggatttggaccataatatcatgttattttgtcttgtatacttacgctttcttgaaagcttcctgataactaaaatgcttgcaatattggaaatagttagtcactgatgtatgcttggcactaggaagaatcattattataggaagaatcaagtttttcttattggtgtagttaatcgatttgccttaaactgtgcttctcaaattaacagcggtaccatgcttacttcatggaagatttgcctgcaccaatggtcataattgcagattggatagctgctctagcatgcctatttgctgtgaaaggattactacagaattcaggcccatcaaagaagtggatgtggtattcttgctatgttggcattttggtagccatcttttggacatactacatcttgaggtatatcgtcttagtcaacttatctttttttcccttcccatgtcactcaaatgctttgctaaaatattagcatttcaaaaccatttgtatcatgtcagcactattctagctgttgtagctacactaacacacagcagccagttctagatatggtattccttctgactgttggtgttgtaggttgccaagaattcgatgggatgttgcatggctcccactcggtcctttgatggctggtgcattgagcctgtatgtggaccatgtgctgctggagtcaatgcaagatatcagcacattgagaagttacatgtataacttcaaggccttgtagttttgagcataatttcccttgcacctatatgcagctatatgtggaacaggttcaggtcatttctccttttttttagtggcagagttgcggtggtaccttgttaaatggtgtgttagcatgaatttttaacctcagagaatacttgtgcatcacttccgctctgtggcgggtgtatgtacaagctgtggtgccaataggcaccgcggctgtttgaaacacccccctgcttcagtgcttctactgatgtccatatttgttgtagaaattgatgatttttgagaggctt

SEQ ID NO: 147329 - DNA, 1258 bp, Zea Mays
aaccaaacagcgagcgcaaggaagaaaggtcgaagcgtcgtctctctcggcacggagcctagtgcccggcctcgtgagatccgaaattcagaagcgaggatggcgacgaccgcgactaggcggtggtggaggcggcacgacggcggcgacgatgacccagacgacctcgtccccatggacacccaagagcaagaagagctggtccggtctctggaggctaagcaggcgcagcaaggccgccgttggaggcgcgtcttcgcggggttcctcctaggttacgtggccttccttgtctactccagtttccatcatgcttggtctccctgggagctgcggtaccatgcttacttcatggaagatttgcctgcaccaatggtcataattgcagattggatagctgctctagcatgcctatttgctgtgaaaggattactacagaattcaggcccatcaaagaagtggatgtggtattcttgctatgttggcattttggtagccatcttttggacatactacatcttgaggttgccaagaattcgatgggatgttgcatggctcccactcggtcctttgatggctggtgcattgagcctgtatgtggaccatgtgctgctggagtcaatgcaagatatcagcacattgagaagttacatgtataacttcaaggccttgtagttttgagcataatttcccttgcacctatatgcagctatatgtggaacaggttcaggtcatttctccttttttttagtggcagagttgcggtggtaccttgttaaatggtgtgttagcatgaatttttaacctcagagaatacttgtgcatcacttccgctctgtggcgggtgtatgtacaagctgtggtgccaataggcaccgcggctgtttgaaacacccccctgcttcagtgcttctactgatgtccatatttgttgtagaaattgatgatttttgagaggcttaggttgtgtttggttgcgggattgctggggtcgacatacttcttctagtagtagtacaacaggttctagtagtagtataacagggagtggagtactgccatgcttgcgatgatatgtgtgttagattatgtgttgtctgcaggattacagtaagttttcagtacatttccatacagctaaagcagagacaatgtgatttgattttagaggattttacatatggcattcaacctggtttaggtcactgtacctagacagcaacatttcttttctttatctttaaagccggtacaaaac

SEQ ID NO: 147330 - DNA, 1900 bp, Zea Mays
ctccctccgctgcatctcactttctctcccggctgtttcgtcttccttggctttcctcctctctacgcgctttcatttcatccatgtcggcttcctcgtttgctcggcttcagcacaaacgcttcatctggtattgacatccacctcggctctgtttgtttggtgagatacagtttcttttctcccccgtcgtctgctccttctcggtgggtatctggttctagattggaaatatccaacgccctctcgctttttaaatccttcaatcttccatatgcctgcttggcactgctagattcgtttaggttttccctacaacatgtgaatatgtcactgcctttttttggataaaatggtttggaagatctgcaaacttcatttttctttttttaggattccacccttctactgaaaggttcgtgttctcttgtttgtgctctccaattttgttttttttctttttcctaggcttcaggttcgtttcttttccgaaaatgatcctttttggttgagctaagttttcctttttatatcctcgtctgtttcgttttaggtggacatctgatttcattcaggtgaactgtttgcatcgaagcggagatttcattttccttttttgtcgatacattgaggttcgaaaagggcactattttacttagctaattgattgagtgcctctgttcttcaaactttttttcaatgtttagggtttgtctggttttagcttttcgagctattccttggtttctgtgctccattctaagacctgtatattgctcgtaactttgactatttgcaaataacagtgttgctattcctgagaagtaatagcagtgttgcttctgattttctacctttccctgagttcttcgtctttattttttttcactttaaccaaatgtagtttttatttcctgctcgttccgaacatttccttgtctctcatttttatatatgtctcctaagatcggttcatgcatccaacccacatcaaaatcaacagacatggtatctattgataaacagaggcaattactattgcagcttgggatcaaacatggtttacaaatttgttgtattactatgggcgtgtaaaaagggtcaattctatgttctaaacttatttccaaacattcaggcagaatttgatctgggcacaaggtacaatatgtcctaccttagagattttactacaaagtttatgtttattcctgttctttcgttgaaacatgttgaagaggacctcagatcgttagagacttcgctaacgagagcttgccggattgtttaattctctttaggggtacccatacgcacgcgcttgcgccaatcgtgccttattcaatggagaatagtgttgcagatgcaatgtacaacaaaattattgtttttggtgagtatgtttttcaaaaaataattatgaacatcatctctacatacttcctgagaacgtgttccgattacaaatatgaacatcatttcatagctttttaccattttcctttttccctagcacattaatgaagagcttagtactgaaactacttgaactgcatactaaaattatttacctgtagttttcgaccaagttgtggataccacaccctggaagagttggtggtagattcttcatcaagtatggaatgtctgcgatgcctagctaggtgcttgatggcaacaggtgcatatcaaaactattaattattttcatgtgttcctgcttcaagaacacatgcaatagtaataggtttccattagtttaaatgtcacatgcaaagaagcaaacaccacccagactttcttcttagtttgccattatcacatctgtactcatcatgcacatgaaacttttggttatgtacaactcaaaggtagaaggaagaccttaaggtatgttgtc

SEQ ID NO: 147331 - DNA, 1742 bp, Zea Mays
ctccctccgctgcatctcactttctctcccggctgtttcgtcttccttggctttcctcctctctacgcgctttcatttcatccatgtcggcttcctcgtttgctcggcttcagcacaaacgcttcatctggtattgacatccacctcggctctgtttgtttggtgagatacagtttcttttctcccccgtcgtctgctccttctcggtgggtatctggttctagattggaaatatccaacgccctctcgctttttaaatccttcaatcttccatatgcctgcttggcactgctagattcgtttaggttttccctacaacatgtgaatatgtcactgcctttttttggataaaatggtttggaagatctgcaaacttcatttttctttttttaggattccacccttctactgaaaggttcgtgttctcttgtttgtgctctccaattttgttttttttctttttcctaggcttcaggttcgtttcttttccgaaaatgatcctttttggttgagctaagttttcctttttatatcctcgtctgtttcgttttaggtggacatctgatttcattcaggtgaactgtttgcatcgaagcggagatttcattttccttttttgtcgatacattgaggttcgaaaagggcactattttacttagctaattgattgagtgcctctgttcttcaaactttttttcaatgtttagggtttgtctggttttagcttttcgagctattccttggtttctgtgctccattctaagacctgtatattgctcgtaactttgactatttgcaaataacagtgttgctattcctgagaagtaatagcagtgttgcttctgattttctacctttccctgagttcttcgtctttattttttttcactttaaccaaatgtagtttttatttcctgctcgttccgaacatttccttgtctctcatttttatatatgtctcctaagatcggttcatgcatccaacccacatcaaaatcaacagacatggtatctattgataaacagaggcaattactattgcagcttgggatcaaacatggtttacaaatttgttgtattactatgggcgtgtaaaaagggtcaattctatgttctaaacttatttccaaacattcaggcagaatttgatctgggcacaaggtacaatatgtcctaccttagagattttactacaaagtttatgtttattcctgttctttcgttgaaacatgttgaagaggacctcagatcgttagagacttcgctaacgagagcttgccggattgtttaattctctttaggggtacccatacgcacgcgcttgcgccaatcgtgccttattcaatggagaatagtgttgcagatgcaatgtacaacaaaattattgtttttgttttcgaccaagttgtggataccacaccctggaagagttggtggtagattcttcatcaagtatggaatgtctgcgatgcctagctaggtgcttgatggcaacaggtgcatatcaaaactattaattattttcatgtgttcctgcttcaagaacacatgcaatagtaataggtttccattagtttaaatgtcacatgcaaagaagcaaacaccacccagactttcttcttagtttgccattatcacatctgtactcatcatgcacatgaaacttttggttatgtacaactcaaaggtagaaggaagaccttaaggtatgttgtcatagtaattgtgaaatggatttggca

SEQ ID NO: 147332 - DNA, 421 bp, Zea Mays
gtagatcttaacgtgcctgctaagacgccggcacacaatgatgataaagaaaatgtacccaatggtaatacaaatttgcaagtcaaggaaacacacaatgatgaagacgatggaactgcatctgatgggtttgaactgatagatgtgaaggaaaactttgtcatcgacaaacaaaaataaacattcatatagtactagaataaacattcatatctcgacaaacaaaaataaacatttatgcggtaaacaaaaaaccaatttagcgtaagtagatcacctgtgatttctttgtcatcgacggccagaaaatccgtcaaaggttgaaacacaacaacctagtcgacggtgacggagttgggcacctagaatacggtgcagagattaacgacgcacaaatacggcgcacgatgcataagaaaat

SEQ ID NO: 147333 - DNA, 546 bp, Zea Mays
atgtatacatttttcacgattcagttacagatgcattcagtgaaccagcttccagtgcctcttgtaccgctcatcggcaagggagtgcaagaggatgaggttatggtgagttttgtagcgactaacggtgagcccacgactacggccacgtcgaagctggtatggtggaacctcttggagcagatgacgatgacgtcgacatcctgcacctctgcgacgctgtcgactaggacgcgggcccctccattgcgcgcgctctacaagtctggatccatcatcgtgctcggcaagactgacttccttaggccagacatgttgtgcccttccagtgctatagaacagaagggcacagctgagcataaaacacgactaaagatactaagtgatccggagaagcgtgcaatttatgatcaatatggtgaggagggcttaaaggggatgcctccacctggttccagagctggtcctccacaactgctggcccaactacagtcaatgatgatgagtcataagagactttttttacttcagtacattctttggtag

SEQ ID NO: 147334 - DNA, 1962 bp, Zea Mays
aagcgtcacctcccgccgggccccacttcgtgggcccaacgcgaacactacggcccacgataaaaggagacgttggatgctttcctcctcccggaccccaaccaaaaccccttcttgatcttgacttcttcccaaccgactcccagttccactctcgcttccttccctccctccctcccacgcaaatggtggccgctcgcctccgcctctcgctgctactctccgtctgcctctcctccgcgtgggcgcgcccacgcctcgagccggccatccgcctgccgtcgcagcgcgccgcggcggccgacgaaacggacgacggcgacgtcgggacccgctgggctgtgctcatcgccggctccagcggctactacaactaccgccaccaggcggacatctgccatgcataccagatcatgaagaagggcggactcaaggatgagaacatcattgtctttatgtacgatgacatcgcgcatagcccggagaatccgaggcctggtgtcatcatcaaccatccccagggtggcgacgtctatgctggggtgccaaaggattacactggtcgagatgtcaacgtcgacaatttcttcgctgttctgcttggcaacaaaactgcactcaggggtgggagcggcaaggttgtggacagtggccccaatgatcatatctttgttttctacagtgaccatgggggtcctggtgtccttggaatgcctacgtatccatatctctatggtgatgacctcgtagatgtcctgaagaagaagcatgctgccgggacctacaaaagcctggtcttttaccttgaagcatgcgaatctgggagcatctttgagggcctcctgccgaatgacatcaatgtgtatgcgaccaccgcgtcaaatgcagacgagagcagctgggggacgtactgccctggcgagttcccgagccctccaccggagtatgacacttgtttgggagacctgtacagtgttgcttggatggaagacagtgatttccacaatctgcgaactgaatccctcaagcagcagtacaagttggtcaaggataggacagcggttcatgacacgttcagctatggttcccatgtgatgcaatatggcgcattggagctgaatgttcagcgtttgttttcgtacattggcacagaccctgctaacgatggcaacacttttatagaagataactcactgccatcgttctcaaaagccgttaatcagcgcgacgctgaccttgtctacttctggcagaagtaccgcaaattggctgatagctcgcatgcgaaaaatgaggctcggaaggaactgcttgaagtgatggcccacaggtctcatgttgacagcagcgttgagctcattggaagccttctctttggctccgaggacggtccaagggttctgaaagccgtccgtgcacctggtgaacctctggttgatgattggagctgcctcaagtccatagttcgcacttttgaggcgcgatgcgggtccttggcgcagtatgggatgaagcacatgcgatccttcgcgaacatgtgcaacgctggcatccttcctgaagcagtgtcgaaggtggccgctcaggcctgcagcagcattccgtccaacccctggagctctatccacaagggttttagcgcttaagaaccataggtgaggcgaactccatgacgctgcagctctcagggaggtcttagttcttgaacgaccataggtgaagcagacttatgtataccctgccacattgcgtacctatggccagtttccggtgtacatatatagtcggaaatttattcggcaattgtattggtcgttggtgtatatattccctatagtttgttagcagatgtgtttgtttgtaatcccgtaataaatgaagaatgcatgatgttcatgcggaactttacctgattcttgttgggcaatggatgaatggactatccatagtgggattcttgcc

SEQ ID NO: 147335 - DNA, 633 bp, Zea Mays
gtacccgccgttccgcatatttccccaccaccgcagaggacctgcgctcgccgctatcattcgtttctggacacccttctagccccgccgccaccacaccaccaccaccaatggcaggaatcggatcaaaggccctcgccgtggtcgccgtcctggcggccgtcgtcctctcggtggcctccgcggccgaggcgcccgcgcccagccccgtttccgccgccgccggcgcgtcggcgccgttcgccgcggccctcgtcgcctcctccgccgccttcctcttcgccgccgtccgccactgagccgatggggcccttccaccgccgcctaggtctatttattggagtggtattcagtagtactggtactagggagatttctttgttggtgtcgtgtcgtcgtcgcattttggtcggatctggtgtccttggtgggtggggagggtttgtaccgcgtcgtggtgtcggttgtgtgatctgattctgatccccttgtagatactctgctatctcgccgtgatcgtgagtgatgattccgtctggttgctactgatacactattgttccttatcggttccatttgagatatgcgttgttcttaatctggtctttctctgcgcttgatttatctttgctc

SEQ ID NO: 147336 - DNA, 213 bp, Zea Mays
atgcacagaaaaggaataaaattacatcatcccctctttgctatttgctataatgggtctgagtattgtgtttccattgacaacctttgttgttgcaacaagaaagtcgtagcccattccttcctgtgcactaaggaagcgaagggcagcaatctcagcaaatgtgacaccaccaatgaatacaaccaaaaccagagagcgatgaccaaccct

SEQ ID NO: 147337 - DNA, 517 bp, Zea Mays
ggatgactatagacgactaggagtcgactaggctcgactaatcgagcaaatcgacaaccaatcgggattagtcaccttatcggtggttaggcaactagattcgactagtcgactttgaaaccttggtcaagtgcctttggtcgtgtgctgcctgtcttggaaagtcggagctgctcgtcccttgtgttgagatctgcaacgatgactcatgacgggctgtgtgtgaggctgttgttgtctgggttgtttgtgggggcattctgcaggtttctctactgtgcaccctgtgtagattttgggtccggtttttctttaaaactgggtcaattcctttcttcttgattgagaggcatagctccttccattgcatttaaaaaagaaacaatacaactccctctgtttcaaaatgtaaaatgctttagttttgccttaaacttctctaactctaacatctgcaacaccatattagtagtgcatttatatcctactgtagatgttaatatattttttacattaa

SEQ ID NO: 147338 - DNA, 203 bp, Zea Mays
agttttgttagctatcacatttaattttatttaaattattttgggcttgatctaaaatggacaaatatatatacataaatctctactatgcatatagatacgaaaagaagagaaatagaaaaaggagaaaacaaataaaaaaaggaacgatcgttcctaaaccagcgctctcatctcccatcccacgtccgatctgcatgtag

SEQ ID NO: 147339 - DNA, 1555 bp, Zea Mays
cattgccatccctaaaccagacagacagtttcggcctcagcccaactggtgccgtgacgtctcctctcctctcttcgtctcatccccagcccacccacaacaatgccctcctcccttcccacctgacctgcgccgcgccgcgccgcgctgcgcagccatccttgttctgtcccgggtacgccgccacacacatcagttcaagcgcttctctccctccctcctcttcgtggatcggaatcgacgcctggaagtggatgacgatggcgggttcttgcgccgcggtgcccgttgccggtctcccctcgttgaggacgccgatgccaactcacctcagacttggcggctttatgccctgttcctcggccgcgcggagtcgcggcgccgccgtgctgggatgcgctcttggggccaggaagcagacgccgggagttctgaaccagggctgtttttattgtgcttgtatagttgctctgcagatacatgcgaagagatgggcatgaaggtgatgtgagcaatcaaggaagggatggtgctgttatgtttgggccagatgatgatggtgtaaagattcctactcaggtagagactcttgtaaagggcactgcagcggttgctgaaccagaatacaagcagatcccagatgtagattacctacaggagctgctggctattcagcagcaaggacctcgtgcaataggtttctttggaacccgcaacatgggatttatgcaccaacagcttattgagatcctgagctatgctatggtcataacaaaaaatcatatattcacatctggggcttctggaacaaatgcagctgttattaggggcgctttaagagctgaaaagccagagttgcttactgtaattttacctcaaagtctaaagaagcagcctcctgaaagccaagaactgttgtctaaagtacaaaacttactcgagaaaccacagtatgatcatttgccactaattgaggctagcaggttatgcaatatggacatcatctctaaggtccaacaggtaatctgcttcgcgttccacgacagcaaactgctgatggaaacatgccaggaggccatgaaccttcggaagatcgtgacactcttctacttggattagctccggtagggatctagtctcctttttttttgggtccgtggcgtaggctaacgttggggggataaaaagcaagctgaacagtttagttagtttcggaatatattggataggtggtgcggtgaccttctattggaggagaaagtcattttgtttctcccattgttttgattcttgtcacaaagaaaccaataatcttgtcgatatgcctaattcgtcattgaagggaataagattattagctggagtatatttgttgttgacctcaaggattatagttagttcgtgctccagtttttccatctattttatgtcagtttcctgcttttttatttgagatgagatgtttatcttgattgatgtcttatttttcatttttcaagtgcattattaatatggttatatctttcaaaaagcgagttgggtaaaattaaatttc

SEQ ID NO: 147340 - DNA, 1530 bp, Zea Mays
cattgccatccctaaaccagacagacagtttcggcctcagcccaactggtgccgtgacgtctcctctcctctcttcgtctcatccccagcccacccacaacaatgccctcctcccttcccacctgacctgcgccgcgccgcgccgcgctgcgcagccatccttgttctgtcccgggtacgccgccacacacatcagttcaagcgcttctctccctccctcctcttcgtggatcggaatcgacgcctggaagtggatgacgatggcgggttcttgcgccgcggtgcccgttgccggtctcccctcgttgaggacgccgatgccaactcacctcagacttggcggctttatgccctgttcctcggccgcgcggagtcgcggcgccgccgtgctgggatgcgctcttggggccaggaagcagacgccgggagttctgaaccagttgctctgcagatacatgcgaagagatgggcatgaaggtgatgtgagcaatcaaggaagggatggtgctgttatgtttgggccagatgatgatggtgtaaagattcctactcaggtagagactcttgtaaagggcactgcagcggttgctgaaccagaatacaagcagatcccagatgtagattacctacaggagctgctggctattcagcagcaaggacctcgtgcaataggtttctttggaacccgcaacatgggatttatgcaccaacagcttattgagatcctgagctatgctatggtcataacaaaaaatcatatattcacatctggggcttctggaacaaatgcagctgttattaggggcgctttaagagctgaaaagccagagttgcttactgtaattttacctcaaagtctaaagaagcagcctcctgaaagccaagaactgttgtctaaagtacaaaacttactcgagaaaccacagtatgatcatttgccactaattgaggctagcaggttatgcaatatggacatcatctctaaggtccaacaggtaatctgcttcgcgttccacgacagcaaactgctgatggaaacatgccaggaggccatgaaccttcggaagatcgtgacactcttctacttggattagctccggtagggatctagtctcctttttttttgggtccgtggcgtaggctaacgttggggggataaaaagcaagctgaacagtttagttagtttcggaatatattggataggtggtgcggtgaccttctattggaggagaaagtcattttgtttctcccattgttttgattcttgtcacaaagaaaccaataatcttgtcgatatgcctaattcgtcattgaagggaataagattattagctggagtatatttgttgttgacctcaaggattatagttagttcgtgctccagtttttccatctattttatgtcagtttcctgcttttttatttgagatgagatgtttatcttgattgatgtcttatttttcatttttcaagtgcattattaatatggttatatctttcaaaaagcgagttgggtaaaattaaatttc

SEQ ID NO: 147341 - DNA, 792 bp, Zea Mays
aaaacactaaaacacagataagcccacatgactcccaccgacaatattcaccaagagctcattcaaatgagttactagcaacatgggtaaatgtcaaagtcattcatgttgacaacaaaatatctttgaatttatgcaattcaggggtgtgcaattttaatgcagacttaggtcttgttcggttatttctacgctatatggattgactgggattgaaaaaaatattagagattttgacttgatatagatttaagcccacccaattccttccaatccacatggattgagataaaaacgaacaatcccttaaggctatgttcggttccctgggatataatccctaagatgaaattttccacccagggaatgagtgatccccatgctgtcacttaatcccgttggggtacaatctctgtcagggaataatccctatgccaaaatcctgttcggttaagccatggctgaaaatgctaaaagcaatactagaacggcggtacgattcacaaaatatctctagatggcgtagaggaggttcgaggggcacacaattgagcagccaatgccaatgccaattatgaagcaactgttcaaatgagtagctgcagataattcatagatccatataaacaaaagcaagtcgcacatctgtggatgatttaattacaaaattcaaaggcaaaattagtttacaagaaccacattattacagtacaacccttgttcataatacctaatgttcattggtttcttcggatgcagctctctgtcataaacaccaaatataagagcaag

SEQ ID NO: 147342 - DNA, 1123 bp, Zea Mays
ctccaacgaagccttctgggtctgaacgtccacgtccaattgtgtcctactccttcggtccgtccccatttcttcctttcctaggcctcgactcctcccgacgtgatcgctccagagaaaatttcgcgggtttagacaaacagcgattgggatcgagatcggggcaacatgagcaaggtgttcgagggctacgagcgccagtactgcgaggcgtccgcctccctcacccgcaaatgcaccgccgccgccgccctacagggagagaagctgaagcagaaggcggcggagatccaatccggcatcgatggcgctgaggcactgataaggaagatggatcttgaagcaagaaacctgcaaccaagcattagagctgatctcctagtaaagatcagggagtacaagtcagatcttaataaccttaagggagcgctgaagagggttactagtattaatgcacaacagggggcgagggaggagttgttggagtcaggaatggcagatacattgggggtttctgctgatcaaaggtcaagattgctcagggcaaccgagagacagaaccaaacaactgataggctcagagatagccatagaactatgctggagactgaagaacttggtgtctctatcctgcatgacctgagtcaacagcgccagtctctcttgcatgctcatgatgtattggacgaggtggataacaacgtcggcaagagcaggaggaccattggaggcatgatgaggagaatggatagaaacaagtggatcatcggtctcatcatagcagttcttgtcttggctatcctcgtgattctgtatttcaagttcgtgcactagtggattgcgttgcgtacgttgcatggacggtacgtagttttctactgcgaccagaacgaagaggaaggcagctgtgaatttgcttctatctacattttgcgatttcctgtatttattttcagttttctatttctttttaaatcatatttctgggggtgtgctcgtacggtaccggatgtgttgtgtgaggaaacaagttcaggccatgacgcagagttttgtatatctgattggtttctatttaaaagaaaaactgaacggataatcaataactaagcatatttgggaa

SEQ ID NO: 147343 - DNA, 1214 bp, Zea Mays
gaagccttctgggtctgaacgtccacgtccaattgtgtcctactccttcggtccgtccccatttcttcctttcctaggcctcgactcctcccgacgtgatcgctccagagaaaatttcgcgggtttagacaaacagcgattgggatcgagatcggggcaacatgagcaaggtgttcgagggctacgagcgccagtactgcgaggcgtccgcctccctcacccgcaaatgcaccgccgccgccgccctacagggaggtaatcctccacccctcccaaatctcttcgttttctagaagcaacctcaatctcggtaggctctccctccgaatcgtctcttggtaaaatatttggtcgcgcagagaagctgaagcagaaggcggcggagatccaatccggcatcgatggcgctgaggcactgataaggaagatggatcttgaagcaagaaacctgcaaccaagcattagagctgatctcctagtaaagatcagggagtacaagtcagatcttaataaccttaagggagcgctgaagagggttactagtattaatgcacaacagggggcgagggaggagttgttggagtcaggaatggcagatacattgggggtttctgctgatcaaaggtcaagattgctcagggcaaccgagagacagaaccaaacaactgataggctcagagatagccatagaactatgctggagactgaagaacttggtgtctctatcctgcatgacctgagtcaacagcgccagtctctcttgcatgctcatgatgtattggacgaggtggataacaacgtcggcaagagcaggaggaccattggaggcatgatgaggagaatggatagaaacaagtggatcatcggtctcatcatagcagttcttgtcttggctatcctcgtgattctgtatttcaagttcgtgcactagtggattgcgttgcgtacgttgcatggacggtacgtagttttctactgcgaccagaacgaagaggaaggcagctgtgaatttgcttctatctacattttgcgatttcctgtatttattttcagttttctatttctttttaaatcatatttctgggggtgtgctcgtacggtaccggatgtgttgtgtgaggaaacaagttcaggccatgacgcagagttttgtatatctgattggtttctatttaaaagaaaaactgaacggataatcaataactaagcatatt

SEQ ID NO: 147344 - DNA, 1129 bp, Zea Mays
gaagccttctgggtctgaacgtccacgtccaattgtgtcctactccttcggtccgtccccatttcttcctttcctaggcctcgactcctcccgacgtgatcgctccagagaaaatttcgcgggtttagacaaacagcgattgggatcgagatcggggcaacatgagcaaggtgttcgagggctacgagcgccagtactgcgaggcgtccgcctccctcacccgcaaatgcaccgccgccgccgccctacagggagaagctgaagcagaaggcggcggagatccaatccggcatcgatggcgctgaggcactgataaggaagatggatcttgaagcaagaaacctgcaaccaagcattagagctgatctcctagtaaagatcagggagtacaagtcagatcttaataaccttaagggagcgctgaagagggttactagtattaatgcacaacagggggcgagggaggagttgttggagtcaggaatggcagatacattgggggtttctgctgatcaaaggtcaagattgctcagggcaaccgagagacagaaccaaacaactgataggctcagagatagccatagaactatgctggagactgaagaacttggtgtctctatcctgcatgacctgagtcaacagcgccagtctctcttgcatgctcatgatgtattggacgaggtggataacaacgtcggcaagagcaggaggaccattggaggcatgatgaggagaatggatagaaacaagtggatcatcggtctcatcatagcagttcttgtcttggctatcctcgtgattctgtatttcaagttcgtgcactagtggattgcgttgcgtacgttgcatggacggtacgtagttttctactgcgaccagaacgaagaggaaggcagctgtgaatttgcttctatctacattttgcgatttcctgtatttattttcagttttctatttctttttaaatcatatttctgggggtgtgctcgtacggtaccggatgtgttgtgtgaggaaacaagttcaggccatgacgcagagttttgtatatctgattggtttctatttaaaagaaaaactgaacggataatcaataactaagcatatttgggaattttgctgcagcttt

SEQ ID NO: 147345 - DNA, 246 bp, Zea Mays
atggtggccaatggtgatgcacctgctagagggagcgcggcggcagccgcaagcctgcgtaggcgtaggaccacaagcggtgctgctgctggtggaggcggtgccagctcaatgctccaattctacactgatgaggctgccggccgcaaaatgtcaccaaacactgttctgatcatgagtattgggttcgtagccgtcgttgctgtgctccatgtattcgggaagctgtaccgcacctccaactag

SEQ ID NO: 147346 - DNA, 3904 bp, Zea Mays
ccttcctcatccagacactccccttgccgccgcctcctctgcccctctcgcgccgccatggccacctcgctctccaccccgtcgcagctccgcacctcacactgccacgcccgccgctacggccgcctcctcggcctccacccgcgcgtctcctgcgcgcgctgcccggctccccgccgcgccgccgccctctccgtgcgcgccaacgccgcctcgactgatggcgacgctgccgtcacggtgcgccgcttcccggccgcgccgaccaaggctgggcggctcgcgggcgtcaagaagatcatgatcctcggcgcggggcccatcgtcatcggtcaggcgtgcgagttcgactactccggcacgcaggcgtgcaaagcgcttgccgaggagggctacgaggtggtgctcgtcaactccaacccggcaaccatcatgaccgacccgggactcgcccaccgcacctacatcgggcccatgacgccgccgctcgtcgagcgcatcatcgacgccgagcgccccgacgcgctgctccccaccatgggcggccagaccgcgctcaacctcgcggtctcgctcgcggactcgggcgcgctcgaccgcctcggggtgcgcctcatcggggcatccctccccgccatccgcgccgccgaggacaggcagctcttcaagcaggccatggaccgcatcggcctcaaaacgccgccctccggcatcggcaccacgcttgaggagtgcctcgccatcgccgaggacatcggggagctaccgctcattgtgcgcccggccttcactctcgggggcacgggcggtggcatcgcttacaacaaggccgagtttgaggacatctgcagggccggcctcgccgcgtcgcacactcagcaggtgctcgtcgagaagtcgctcctgggctggaaggagtacgagctggaggtcatgcgcgacatggctgacaatgtcgtcatcatctgctccatcgagaacatcgatcccatgggagtgcacacgggggactccattaccgtggctcctgcgcagacactcactgacaaggagtaccagaggctcagggactactcggtggccatcattagggagattggtgtggagtgtggtggttccaatgtgcaatttgcagtcaatcctgctgatggggaggtgatggtcatcgagatgaatcccagggtgtccaggtcgtctgcacttgcctcaaaggcgacagggttccccatagccaagatggctgcgaagctctcagtaggctacactctagatcagattcccaatgatattaccaagaagactccagctagcttcgagccttccattgattatgtggttacaaagataccacgttttgcttttgagaaattccctggctctgagccaatattaaccacacagatgaagtctgttggtgaggcgatggcattggggcgtaccttccaggaatccttccagaaagctgtccgctcactggagactggttttgcgggatggggttgtggccctatcaaggaacttgattgggactgggaaaagataaaatatagcttgcgggtacctaatccagatcgtatccatgctatctatgcagctttcaagaaaggcatgagggtcgaagatatccatgaaattagcttcattgacaaatggtttcttacagagctcaaggggctagtggatgtagagcagttccttttatcaaagagcctagatcagttgtcaaaggatgacttttaccaagtgaagaagagggggtttagcgacaagcagattgcatttgcaacttcttcatcagaaagtgatgtgagatcaaggcgtttgacattaggcgtcactccgacatataaacgtgttgatacttgcgctgctgaatttgaagccaacaccccctacatgtactcttcctatgagtacgaatgtgaatcatctccaaccaataggaagaaggtgctgatattgggtggtgggccaaatcgcataggccagggcattgagtttgattactgttgttgccatgcatcatttgcacttcgagaggctggatacgagactattatgatgaactccaatcctgagacagtctcaactgactatgataccagtgatcgtttgtactttgagccactgacagttgaggatgtatcaaatgtccttgatttagagcgcccagatggtataatcgtgcaatttggagggcaaactcctctaaagcttgcgctacctattcaacagtacatagaggagaacaaaatggtgtctgcttcaggcactgggaatgttaagatatggggaacatcaccagattccattgatgcttctgaggacagaaaaagatttaatgcaattctcgaggagcttcaaattgaacagccaaagggagggattgcaagaagtgagtctgatgccttggcaatcgcctcagaagtaggttaccctgttgtggtccgtccatcatatgttcttggtggacgggcaatggagattgtgtacaacgacgaaaaactgatcaagtacctcgcaaccgcggtgcaagtagatccagaaaggcctgttttagtggacaaatatctaattgatgcagttgagattgatgttgatgcattggctgacacagctgggaatgttgtgattggtggaattatggagcatattgagcaggctggtatacattccggtgattcagcatgttctcttcctactagaacagtctcagcccaatgcctggaagttatccgttcatggaccacaaagctcgctaagcgtctgaatgtttgtggactaatgaactgtcagtatgctatatctacttctggtgatgtgttcctacttgaggcgaaccctcgtgcttcacgcacagtcccttttgtatccaaggcgattggccatccgctagctaaatatgcatcattgatcatgtctggtgtgaccttgccggagctcgggttcactaaagaagtgattcctaagcatgtgtctgttaaggaggctgttcttccattcgagaaattccaagggtgcgacattcttcttggaccagagatgcgcagcactggagaggtgatgggcatcgactatgagttctccggtgcctttgcaaaagcacagattgccgctgggcagaagctccccttaagtggcactgtgttccttagcctgaacgatttgacgaaacgacatcttgctgagattgggagtggattccgggagcttggcttcagcatcattgccacatctggaacagccaaagttctccagctcgagggcgttccagtggagccggtgctaaaaatacatgaggggcgaccgaatgccagggatatgctgaagaatggtcagatacagatcatggtgataacaagctctggtgatgctcttgactccaaagacggtctccagcttcgtaggcttgccctcgcctacaaggtgccaattatcacaaccgtcgacggcgcacgtgcctccatagatgccatcaagagcttgaaggacaagtcgattgagatcctcgccttgcaagattacttccagactgccgatgcttcggcagatttacaagcagcggcacagaccaccccttagtgctgtcttccttttccatgtactgtgatcctagctcgagccaaaacaacatcccatatgaattattttgtttacggttgcacctgcagcatgcatggcgcaaggacaggcatccagatcgtatcggtgacaagcatagctagacagaattggtattgggcgaatgtagttgtactctgtaatgttagttagggtgatgagcatccacaataaggcttcccaactgcgattttgatgactatcatattctttgtggagatttacattgtatcattgtcgcatacgaaactgtgcgacatacatgtaccgtatgcatgttatc

SEQ ID NO: 147347 - DNA, 2738 bp, Zea Mays
acgacagccaatcatgccgagctgcaaacctaggaagcgctgggccaaccaccatcgagcctgaccacagcatgcgaccatcgcatctgatgtgtatgccgccaggtgtgtaacctctgtgtgttgtgtcaccctctgaattagtacaaacaaattccttacaaatcaaacagaaaacatcaaaattgcatcgctttctaaccaattcaatccttttcaaaatctataatggaatcttagcgatcgaaccactgttaattcatatgatctaaatgaatcgttaatattattggaccggcctcggacttctatattgattcccttgtccttgcccatcccacaccgctttctacgattcgacatggagaaggtccactacacagtgtctgaaagcacggcgtataaacagtgagcttgtattgtggttgttgcttgctgccactctcgcgtcgtccttgtttgtactatacagctgctctcaacctttcgttccgtggcccctctcgtttattcgcccctgccacgaccaggaccgcgtcgcgcgctcgcgcccttcacgccctgcgctgtgcttgcctcgtcgcggccacgtccacctacctatacctctctgtccgacgacctcatcccctttcccaagatccgagccgcggcgtctccaagtacctcgctcgcaggagcaggttgcaaggagccagccactcctgcgagtttctggcgatggtggccgttgcggcgggaaggcgggccggcggcgttggtggccgccggcgctcgggctgcggcccggggcaggcacagcagaagctactagcgatcgccgtcgccgcgcgcttcgctgaggccgtggcgccgccgtctgcggaggcctcccgtgccggctccggcggctgttgcgtagagctcctcgagtgcctcctcggggctctgagcgtcaacgcggccccgccgcccgcgcagcacaggcgggccgtgcactcgatccgccgccgccgcccccgtggcggggggtccgccgacgaccgccacgccgacgctccctcgggccgcatcgcgggaaacggcgcatccgcatccgcagccgcgtcgctctacaccatgcagggcaggaagggtgtcaatcaggacgccatggtggtctgggagaattttggttcaaaggatgataccattttttgtggagtttttgatggccatggaccaaacggccatttggttgccaagagggtcagagatcttctccctgtaaagttgagtgcaaatttagggaagggtgaattcaaagagatttctactagcgatgtcaagagtgggactactaaaggagttgcaaccgaacacagggttgaagatactgatgcttcccctggaaatgaagagaatggcgagtacccagaatttttcacagcactgagggcttcattcttgcaggcgttttatgtgatggacagggatctgaaggcacatagaaatattgattgtgaattcagtggtacaacagcagtcacagtaatcaagcagggacaaaatcttataattggcaacttgggagattctagagctgtcttgggcacaagaggtgaacataatcagctagttgctcttcagctgacagtggacctcaaacctagtatcccgagtgaagcagaacgaattaggcaacaaagtggcagagtattttctcttccagatgaaccagacgttgttcgtgtgtggcttccaactttcaacttgccagggttggccatggcaagatcatttggagacttctgtctgaagaaatatggaataatttctatgcctgatgttttctaccatcgcatcacggataaggatgaatttgttgtgctggcgactgacggggtgtgggatgtgctttccaatgctgaagctgttagcatcatcagcaatgctccttcacaggcctcagcagctcgatttctggttgaatcggctcacagggcatggaggacacggtaccccacatcaaaaactgatgattgtgctgttgtttgcctctttctgaaaacagaagcagcaagtacatcctccagtgctgtaaccaaagatttggtgaagaacagagaaatgagcagcggtaagcattcattggctgttaaaacaagcacccaaggttcctgaaaatcttgttactgcaaaagatgagtggtcttttgttgatggttcctctgggtgtgtcgcgctgccaactttaccagagcccacttcagttgtgaaggatagctcaaaagattgagcttgcctgccaattgagatggcataatttttgctggaaatttgttcgccttcgtttgcaagcttgtgtgcatcagatttgttgtgacgtgaagaccagtgccagtttcattggcgagttgaggaagttattgcatagtggaatggataagtgtgcagattttgttctttttgtacagtattcaatcagtttagtgggatcagttggtagtaatgataactataataatactgtgcctattattgatggatgggggtgatcagatccatgcataggatgaagtttctcccttcttttgtaatataaataattgtgtcggttccagcagctctaataaattttcttttaggtgttgctttgttttatgtcataggttttctagttttgctttgtccaattaagtttagtattatatttccattgatgctatgacaaaccattccagttagatattggatgactaagtaagttttcctctgta

SEQ ID NO: 147348 - DNA, 1624 bp, Zea Mays
ctggtgcattggagatcatttgaagaagagaggagcgtggtctttgaccggattatccagaagattactgctgcgcttgaggcgcgagacaacaacgatgcactagcatactggctgtccaattcatgcgcgctcctggttcttcttcaaaggacactgaaaatcaacggggtagctgccttggctcgtcagaggcgaagaacgtcgtcacctctcaaggtgccacaggtaaaccaattctgaaacctgagaattctgaaacctgagagctctgaaacctgatctcgcagcaggaaaaccaagatccagctcccgacggacagttgatctgtggactagcccaagtctaccaggttgaggccaagtacccagctatcgcgttcaagcagcagctcaccgcactgctggagaaggtctatgggatgatccggcacaacctgaagaaggaactgtcgccgcttctgggcctctgcattcaggtacgtagtagtgtctgccaggatgcggttctcaaacaagtgtatttgccaaaaataaaaaaataaaaaaaagtcatgacccaacaagggtttcaatcttctcctgcaggcgccacgcacattcgtcgtcagtcccagaggatcgtgttcccaaggaacagatctggcgcaacaagcctccatggcgcattggcagagcatcatcaagatcttgacaaattctctcgatgttctgaaatcaaattacgtgcctccgttcctgatctgcaagatgttcacgcaagtcttctcgtttatcaatgtgcagctttttaacaggtactgtacctgctttatgaacatcacatactacagaagcagcgttatgaactcatgtagccttcgattgtagccttctgctgcggcgtgagtgctgctcgttcagtaacggagagtacgtgaaggctgggctggatgagctagagcattggtgcttttggctgactgaagagtacgcaggatctgcatgggacgagctgaagcatatcaggcaggcagttaccctcttgatacttgacgacaagcatagccggagtctcgcggagatcacagacgacttctgcccagtgctgagcatgcagcaactgtaccggatcagcacgatgtactgcgacgacaagtttgggaccctgggcattccatcagaagtcgtctccagcatgcggaccaagatgatcgagggctcgtcgagcagcccgtcggcgcacgacgacatcaactcgttcctgctagacgatgacttcagcataccgttctccgtggatgacttcacgaagctgatagtgcacgtcgacgtagcggacatggatttgccaccgctcattcaggagagcagcggcggcggctccaaaatgggacattgaggagtgacaatatgcacgccttttttgtgtgtgttgcggtgatgtgcatagtgcgtgacatattgctctgagaccagggttttgtttttttcttcgtcgactggtcttccatttttctcccatatgactactacctgagtgagtagtgcctgtttgggtttgcgcgtgtgtatgattgtacagaactgagctgtggcatataaggtaaggaaagaaagcctgtgtgattcaattttttttatc

SEQ ID NO: 147349 - DNA, 366 bp, Zea Mays
acccagctatcgcgttcaagcagcagctcaccgcactgctggagaaggtctatgggatgatccggcacaacctgaagaaggaactgtcgccgcttctgggcctctgcattcaggcgccacgcacattcgtcgtcagtcccagaggatcgtgttcccaaggaacagatctggcgcaacaagcctccatggcgcattggcagagcatcatcaagatcttgacaaattctctcgatgttctgaaatcaaattacgtgcctccgttcctgatctgcaagatgttcacgcaagtcttctcgtttatcaatgtgcagctttttaacagccttctgctgcggcgtgagtgctgctcgttcagtaacggagagt

SEQ ID NO: 147350 - DNA, 735 bp, Zea Mays
gcgcctcattctctcacctcgttaggctaatacggaaacggccgagggcatcgtggcgcacaaccttgccacgacgccgtgccggcatgcatctgggcaccagcctgaccacggccacacctctaaagcaatggagagcgtgaaatcatatattcactggtgtcgaaaccgcggcggcgtcgacccctggcttgcagcggctcgacgatgaactcctcgccgtgaagaactcccccgcgctactggactccttgcaggggctcgagcgatgatacagccaataatgacgacgacggctccctgcagaccctcttctcttcactctcggggcgcctgacgatgcctgggtctcgcgtggctatggcgacttggggaaaaaaattcggttacacaactagaacattatctgtttatacgctgctagggaatcctaacaaactccccatgatctacggaagtggttacatgtatacatatccaaatgggtcagcctgataatgggcccgtgacccggcacgagcacaggtccaacccgactagaagcgtgcccggaccgggccagcccgatagccgtgtcgggcttggaccggccgtttggcccgcgatacaggcacgggcccgccctagttaaagggtaggcacggtaacggtccgtttgagagactgattttgtaatggtcagtctgttttagctataatactgatgattctgttattatatgagagcattctgaa

SEQ ID NO: 147351 - DNA, 912 bp, Zea Mays
acgagtaggattaaaaaaactcccaaacaggacctgttgaactgtccttgcttctaaacggagtgagtagcgatagtgacgcagtcgtcttgccgccgccgtcccaaacgtccgcgcggtcgtcctcgatcttcccgtaccatcccgacgcgatggccgccggcgcgaagcccgataccgccgcgcccccgcaagcgccttcggcggcgaagggggtcttcatgcgccgcatcttccccttcctcctcgcgacgaacgtcttcatcggagtttatgtatttgccaagacctacaaaagagaccaggaaaagaaaaatgctcagactactgccgctgcagcattgtcatccccagcaagtacatctgccaaggctccagatcctgctcctgcacctgcgcccgaatcggttctcccacctctatccgaagatgagcagtggaatctgtacaaatggattctggaagaggagcggaagatcaaaccacgcaacgccactgagaagaagaagatcgacgaggagaaagctcttctcaaggagataattcgggacaaatctctccctcgtttgtgatggttacatcggctgtccttctgatcttgattttttttcttctctctccacctgcagtccattgaggacaacatctgaaactatgtgccctgttagttagcaaaaccgttagcatttctttgcactatcacatctcttcatttgacaataagaaggtcgagttgttttgctctgatgagaacttattgtgttcggggatgcttgggagatgttttggaagaagcttattgccttgtgaaacgttctaattgacctgctgataatgggcccagctagctatgctctgctattcttatgtaagatgtgaattgagctattcaactgctagtgtttttacata

SEQ ID NO: 147352 - DNA, 1688 bp, Zea Mays
gctacccatataccttcctctcatgcagcagcgaacaacacaaattaagtagtggagtgtcagaacttgggaggcacaaattaagtacaaagcagtctaattaatgacgggcccgatggagattccggtgatcgatctcggcggcctcaacggcggcggcgaggagaggtcgcggaccttggcggagctccacgacgcctgcaaggactggggcttcttctgggtaagcagagcaccaacgaatgcttgcaattaatatttgacaacttctttccatatgcatgcgcgcgggcgtacgtacgtcattatgatgcgccggcgccgctcgcatccgcatcgcaggtggagaaccacggcgtggacgcgccgctgatggacgaggtcaagcgcttcgtctacggccactacgaggagcacctggaggccaagttctacgcctccgccctcgccatggacctcgaggccgccaccagaggtgacactgatgagaagccctccgacgaggtggactgggagtccacctacttcatccagcaccaccccaagaccaacgtcgccgacttcccagagatcacgccgccgacacggtccgtatatatactgctgtgctgccttcgtcgattcgacctcaattagttgttgccgcacacccacacaccatgcatgcttcgtacgcgctatcattcttcatcttcatgtaacacgcagagagacgctggacgcgtacgtcgcgcagatggtgtccctcgcggagcgtctggccgagtgcatgagcctcaacctgggcctccccggggcccacgtcgccgccaccttcgcgccgccgttcgtgggcaccaagttcgccatgtacccgtcctgcccgcgcccggagctggtgtggggcctgcgcgcgcacaccgacgccggcggcatcatcctgctcctccaggacgacgtcgtgggcggcctcgagttcctcagggccggcgcccactgggtccccgtcggccccaccaaggggggcaggctcttcgtcaacatcggggaccagatcgaggtcctcagcgccggcgcctaccggagcgtcctgcaccgcgtcgcggccggggaccagggccgccgcctgtccgtggccacgttctacaaccctggcaccgacgccgtggtcgcgccggcgccccgcagggatcaggacgccggcgccgcggcgtaccccggtccctacaggttcggggactacctcgactactaccagggcaccaagttcggcgacaaggacgccaggttccaggccgtcaagaagctgctcggctaagcgaacagctgcaagtaggcagaggcagcttagctcgtggactatgcatagtttcaagcttgctgcttgcttcttgttcgatccattgtctgcatgcgtactgttgcgtgtttaaatttagcaaatcttatacgtagtcgttactggtactacgtattctgtggttgacaatacattgttgcggtttaagggcgcatccgtttggtggacttgcacatgccattcgacaaaaaagttggctttccttgtcaattaatagtcaactagtacaatgacacgcaaatattcggtaagcacacatgtccacatgttgaaaaaacatctgcaagcttccgttcagtttacgtgaaaatcaaaggggttaccggatcaagaaaaaaaaatataaaac

SEQ ID NO: 147353 - DNA, 1569 bp, Zea Mays
gctacccatataccttcctctcatgcagcagcgaacaacacaaattaagtagtggagtgtcagaacttgggaggcacaaattaagtacaaagcagtctaattaatgacgggcccgatggagattccggtgatcgatctcggcggcctcaacggcggcggcgaggagaggtcgcggaccttggcggagctccacgacgcctgcaaggactggggcttcttctgggtggagaaccacggcgtggacgcgccgctgatggacgaggtcaagcgcttcgtctacggccactacgaggagcacctggaggccaagttctacgcctccgccctcgccatggacctcgaggccgccaccagaggtgacactgatgagaagccctccgacgaggtggactgggagtccacctacttcatccagcaccaccccaagaccaacgtcgccgacttcccagagatcacgccgccgacacggtccgtatatatactgctgtgctgccttcgtcgattcgacctcaattagttgttgccgcacacccacacaccatgcatgcttcgtacgcgctatcattcttcatcttcatgtaacacgcagagagacgctggacgcgtacgtcgcgcagatggtgtccctcgcggagcgtctggccgagtgcatgagcctcaacctgggcctccccggggcccacgtcgccgccaccttcgcgccgccgttcgtgggcaccaagttcgccatgtacccgtcctgcccgcgcccggagctggtgtggggcctgcgcgcgcacaccgacgccggcggcatcatcctgctcctccaggacgacgtcgtgggcggcctcgagttcctcagggccggcgcccactgggtccccgtcggccccaccaaggggggcaggctcttcgtcaacatcggggaccagatcgaggtcctcagcgccggcgcctaccggagcgtcctgcaccgcgtcgcggccggggaccagggccgccgcctgtccgtggccacgttctacaaccctggcaccgacgccgtggtcgcgccggcgccccgcagggatcaggacgccggcgccgcggcgtaccccggtccctacaggttcggggactacctcgactactaccagggcaccaagttcggcgacaaggacgccaggttccaggccgtcaagaagctgctcggctaagcgaacagctgcaagtaggcagaggcagcttagctcgtggactatgcatagtttcaagcttgctgcttgcttcttgttcgatccattgtctgcatgcgtactgttgcgtgtttaaatttagcaaatcttatacgtagtcgttactggtactacgtattctgtggttgacaatacattgttgcggtttaagggcgcatccgtttggtggacttgcacatgccattcgacaaaaaagttggctttccttgtcaattaatagtcaactagtacaatgacacgcaaatattcggtaagcacacatgtccacatgttgaaaaaacatctgcaagcttccgttcagtttacgtgaaaatcaaaggggttaccggatcaagaaaaaaaaatataaaac

SEQ ID NO: 147354 - DNA, 1567 bp, Zea Mays
gctacccatataccttcctctcatgcagcagcgaacaacacaaattaagtagtggagtgtcagaacttgggaggcacaaattaagtacaaagcagtctaattaatgacgggcccgatggagattccggtgatcgatctcggcggcctcaacggcggcggcgaggagaggtcgcggaccttggcggagctccacgacgcctgcaaggactggggcttcttctgggtaagcagagcaccaacgaatgcttgcaattaatatttgacaacttctttccatatgcatgcgcgcgggcgtacgtacgtcattatgatgcgccggcgccgctcgcatccgcatcgcaggtggagaaccacggcgtggacgcgccgctgatggacgaggtcaagcgcttcgtctacggccactacgaggagcacctggaggccaagttctacgcctccgccctcgccatggacctcgaggccgccaccagaggtgacactgatgagaagccctccgacgaggtggactgggagtccacctacttcatccagcaccaccccaagaccaacgtcgccgacttcccagagatcacgccgccgacacgagagacgctggacgcgtacgtcgcgcagatggtgtccctcgcggagcgtctggccgagtgcatgagcctcaacctgggcctccccggggcccacgtcgccgccaccttcgcgccgccgttcgtgggcaccaagttcgccatgtacccgtcctgcccgcgcccggagctggtgtggggcctgcgcgcgcacaccgacgccggcggcatcatcctgctcctccaggacgacgtcgtgggcggcctcgagttcctcagggccggcgcccactgggtccccgtcggccccaccaaggggggcaggctcttcgtcaacatcggggaccagatcgaggtcctcagcgccggcgcctaccggagcgtcctgcaccgcgtcgcggccggggaccagggccgccgcctgtccgtggccacgttctacaaccctggcaccgacgccgtggtcgcgccggcgccccgcagggatcaggacgccggcgccgcggcgtaccccggtccctacaggttcggggactacctcgactactaccagggcaccaagttcggcgacaaggacgccaggttccaggccgtcaagaagctgctcggctaagcgaacagctgcaagtaggcagaggcagcttagctcgtggactatgcatagtttcaagcttgctgcttgcttcttgttcgatccattgtctgcatgcgtactgttgcgtgtttaaatttagcaaatcttatacgtagtcgttactggtactacgtattctgtggttgacaatacattgttgcggtttaagggcgcatccgtttggtggacttgcacatgccattcgacaaaaaagttggctttccttgtcaattaatagtcaactagtacaatgacacgcaaatattcggtaagcacacatgtccacatgttgaaaaaacatctgcaagcttccgttcagtttacgtgaaaatcaaaggggttaccggatcaagaaaaaaaaatataaaac

SEQ ID NO: 147355 - DNA, 1448 bp, Zea Mays
gctacccatataccttcctctcatgcagcagcgaacaacacaaattaagtagtggagtgtcagaacttgggaggcacaaattaagtacaaagcagtctaattaatgacgggcccgatggagattccggtgatcgatctcggcggcctcaacggcggcggcgaggagaggtcgcggaccttggcggagctccacgacgcctgcaaggactggggcttcttctgggtggagaaccacggcgtggacgcgccgctgatggacgaggtcaagcgcttcgtctacggccactacgaggagcacctggaggccaagttctacgcctccgccctcgccatggacctcgaggccgccaccagaggtgacactgatgagaagccctccgacgaggtggactgggagtccacctacttcatccagcaccaccccaagaccaacgtcgccgacttcccagagatcacgccgccgacacgagagacgctggacgcgtacgtcgcgcagatggtgtccctcgcggagcgtctggccgagtgcatgagcctcaacctgggcctccccggggcccacgtcgccgccaccttcgcgccgccgttcgtgggcaccaagttcgccatgtacccgtcctgcccgcgcccggagctggtgtggggcctgcgcgcgcacaccgacgccggcggcatcatcctgctcctccaggacgacgtcgtgggcggcctcgagttcctcagggccggcgcccactgggtccccgtcggccccaccaaggggggcaggctcttcgtcaacatcggggaccagatcgaggtcctcagcgccggcgcctaccggagcgtcctgcaccgcgtcgcggccggggaccagggccgccgcctgtccgtggccacgttctacaaccctggcaccgacgccgtggtcgcgccggcgccccgcagggatcaggacgccggcgccgcggcgtaccccggtccctacaggttcggggactacctcgactactaccagggcaccaagttcggcgacaaggacgccaggttccaggccgtcaagaagctgctcggctaagcgaacagctgcaagtaggcagaggcagcttagctcgtggactatgcatagtttcaagcttgctgcttgcttcttgttcgatccattgtctgcatgcgtactgttgcgtgtttaaatttagcaaatcttatacgtagtcgttactggtactacgtattctgtggttgacaatacattgttgcggtttaagggcgcatccgtttggtggacttgcacatgccattcgacaaaaaagttggctttccttgtcaattaatagtcaactagtacaatgacacgcaaatattcggtaagcacacatgtccacatgttgaaaaaacatctgcaagcttccgttcagtttacgtgaaaatcaaaggggttaccggatcaagaaaaaaaaatataaaac

SEQ ID NO: 147356 - DNA, 115 bp, Zea Mays
ggaatgtgcctaacatgtcttagatgcaccatccttttttcaagcctttttctcaacatcaagagaggctaacaaattttcaacagaagttccaattactttttctaaatatttt

SEQ ID NO: 147357 - DNA, 1542 bp, Zea Mays
atggcacaaaccgatcaacatatattctttctattacccaacaaagatggaaccaatattactttgcatttgggaatacaagagagaagatatctgatgcaatctaactctatctaaaagagaaggtagaaagataaaaactatagctaaacatactttgaatcaatacacttttctaacaattagttgcacatgtcaatgactttcatagagatctagttttaccgctgctacatcatatgccaactaacaatggaaggtcaaattctttctgaatgtaacttactgattccaacaggcgcatttagaacaaattatccaaatgcattaaggaatgctccttgaatgggtggggaaaaagttgtgtagtaaaatcagagaaatgaaaataggaaaaataaacagatcctatataactcacaactaacagtttgactgttattcgatttcatggaacattttgaggggcaaacaaccttcactttcacctaaatttgcaaataaaacattatattgtcaccccatggagttccatcaacaaagcaaaatataactaactgatttatgacatgagtcaatagcaatatatagaaaaaataccacaaaaggaatgtccacaagcaagccgctcaatgaaccatggtagtaaaatctaattggatcacctacatctattttcaaaatttgagcaccatcctgcacaaaagagaataatagcctactgcatgtttgtgcatataattcagtatcaatgttcaaactaatcatattacagaagaagaggctacatttgcttacatgaggagatataatttgatagagaatgttgttttccatgatcgaggatggcacccagaatgcagctatgacatgtactgtattttcagtcattgaaatagttggacgcaagatcaaattgatatcgttacctgcttcactgtttttaggtgctaacaacaagcatgctagtattaactgcacttgtcgagctgacacacaaacagatctgagttattttgttagatcgatcttgcgcgctcttgaaccatcctgttcagcttgcctaggtaactcaccagcgaacgaagaaatcgatctgagcctggacggatctacaccccacgcttacccaccatctcccattccttcgcagctcatccaggaaccaaagtgcctctaccagcattggccctgaggacaatggagatggcaaggtggccgaggaggttgtcgtagcctctatctcggtcgcgcactcgaccccctcgcctgacgcgcgctctacagcagcggcgtggacgagtctggcacgggcccaacacgagcaacgacggggacacaggcctggtggagaggtgggatgaggaggcaaggtgcggcgggagggaggcatcactgacggtggtcctgctggcaaggttaggagagggaggcagggtgcagcgggaggtggcagatccgaaacgcgggcacgaggggagggaggcaggggttggcgtgggcgagggtgtggcgagggcacaactagggtgcgggagcgcg

SEQ ID NO: 147358 - DNA, 4741 bp, Zea Mays
gtgccaatccaaaaccgccacgtgccatatccggtgatacgcctccccggcctctcgtgtctcgtcgtctccctctccctccacaacggcatagctgcagcagccaagtcctctccgctctcttcgccgccaccgccgacaaataaccgccgcaattcgaagcaagagagccgcaccaggagaagatatagtgagagtgagagcccgaggagggggtggcgcgatggggctctcgggcgcgacgatctcggcgccgctcggctgctgcgtgctgcggtgcggggcagttggcggaggtaaggccctgaaggcggacgcggagaggtggcggcgggcgggatggagccgacgcgttggcggaccgaaggtgaggtgcgtggcgaccgagaagcacgacgagacggcggcggtcggggcggcagtgggcgtggatttcgcggacgaggaggactaccgcaagggcggcggcggcgagctgctttacgtgcaaatgcagtcaaccaagcccatggaaagccagtccaagatcgcttccaagctatcgcccatatctgatgaaaatacagtgcttgatttggttatcattggttgtggtccagctggtctttctctagcttcagagtcagctaagaaaggtctcactgtaggtctcattgggcctgaccttccattcacaaataactatggtgtgtgggaggatgaatttaaagatctcggtctagagagctgtatcgagcacgtctggaaggatactattgtctacctagacaataacaagccgatactgattggccgttcttatggcagggtgcaccgtgacttgctccatgaggaactgctgaaaagatgctatgaagctggcgtgacatacctgaactccaaagtggacaagatcatagaatctccagatggacacagagtagtctgttgtgacaagggtcgcgagataatttgcaggcttgccattgttgcttcgggggcagcatctggtaggcttctagagtatgaggttgggggtccccgtgtttgcgtgcagactgcatacggagtagaagttgaggtggaaaataacccatatgatcctagcttaatggttttcatggactacagagattgtttcaaagaggaattctcacacactgaacaagaaaatcccactttcctgtatgctatgcccatgtcacccacacgagttttctttgaggaaacatgcttagcttctaaagatgctatgtcttttgatctacttaagaagaggctgatgtatcggttgaacgcgatgggaattcgtatcctgaaagtttatgaggaggaatggtcctacattcctgttggagggtccttaccaaacacagatcagaaaaaccttgcattcggtgctgcagcaagtatggtgcatcctgcaacagggtactcagtggtcagatctttgtctgaggctccaagatatgcttctgtgatatcggacatcttaggaaatcgagttcctgcagaatatatgctcggaaattcacaaaattacagtccatcaatgcttgcatggagaacactgtggcctcaagagaggaaacgccaacgatccttcttccttttcggattagcgttgataatccaactgaataatgaaggcatacaaacattcttcgaagcctttttcagggtgccgagatggatgtggcgaggatttcttggctcgaccctttcatccgtcgatctcatactattctcattctacatgtttgcgatagctccaaatcaattgcgaatgaaccttgtcaggcatctcctctctgacccaactggctcatccatgatcaagacctacctgaccttataaaaccatttgcaccaggctgcaagaactcttagaaactgtacagttttgtagttgtacataagttagagaggatctggggggttacttggcggcggatctaggggttagcagcaatgctataatacactgtaaatcttttatggttgctatggtgattggatagagaagcacaccgtgttgtgcacgatggaagaataataagagagatcaggtgatggtcatggttcctgcattggccaattttaggttgcatttgctgtttcaaggcttcttacatgtccaatcaattacacccttattttaggttgctcaatgccaattttcttgtggaacaatatttgcaaaagcaaaaaagggaaaaacataattggatgtgcaagaatagtatgaggctgtccttgctcctgcgccatggcatttagctgcaagatgttggggaaggagaagacctgtaggagactaaggttggaggcaagggagagaaaggaaggagggcaggaggagaggcggaacaacccgtctccctccatctctctaccttcttctcctgcgcccctatccatcgctcgcaccacccactgaccggccggcggcatccttattaccataacatcacgggacggtggcgcgatgcaaggaggcccactgagcccggatgagtactgggtgatatcgccgccggcgctgctgcaccagccggcgtccaccatcgtcgtggccatcgaccgggaccggaacagccaactggccgtgaagtgggtggtggaccacctcctctccggcgcctctcatatcgtcctgctccacgtggccgtccattaccacacgacccatgggttcgccatggttgagaccacgcagggtgcgctggaggctgaaatgaaggagatctttgtcccctacagaggattcttcaaccggaatggggtggaagtatccgaggtagtattggaagaggcagacgtgtccaaagccattctaggttacatcactgcaaacaagatccagagcattgcgctcggcggagccaacagaaatgcgttcaccaagaaattcaagaacgcggacgtgccgtcgaccctgatgaagtgcgctccagactactgcaacatctacgtcgtggccaagggcaagtccgtcaatgtcaggctcgccaagtgcggcgtcccgccgatgcacactggcgccgacatcgcttcggacaccgactccctccgggaatcggtgctctacatgcgacgcggctccagggggcacctgccgcgggtgacgcctgacgcctggcgctccattgacgggcgcacaccgccggagctatccacgcggccactgttccgcgagcgcttgctctcgtcatcggccaccaccaagaactttgtcgtcctgccaggaaaggacaacttcgagacgtcctcccgctcggcgagacacgactcgttaggcggcgacctcgacttcggcccgagcacgcgcttctcctacatagacttgggcgagaacctcgatatgtccaccactctccccgctctggaacccatgtcaccggccaccggcgcgcagcgggataccgaggccgagatgcggcggctccggttggagctcaagcagaccatggacatgtacaacgcggcgtgcaaggaggccatcaacgccaagcagcgggccaaggagatgcatatgatgaagctggaggaagcgcgtcggctggaggaggccaggaacgccgaggaggctgctctggcagtggccgagatggagaaggccaagtgccgcgcggccatggaggccgccgaggcggcgcagaggctggctgacctggaggcgcagcggcgccgcaacgccgaggtgcgcgcgcgccgggaggccgacgagaaggtgcgcgctctggatgccatttccaaccacgacttccggtaccgcaagtaccacatcgacgagatcgagatggccacggagcgcttctccgacgagctcaaaatcggcgagggcggctacggccccgtctaccgcgcctccctcgaccacacccccgtcgccatcaaggtgctccggcccgacgcgcaccaggggaggaagcagttcctgcaggaggtggaggtgctcagctgcatccgccaccccaacatggtgctcctcctcggcgcatgcccggagtacggctgtctcgtgtacgagtacatggaccacggcagcctcgaggaccggctgttccgtcggggcggcacgccgccgctcgcgtgggcccagcggttccggatcgcggcggagatcgcgacggcgctgctgttcctgcaccaaacgaagccggagccgctggtgcaccgggacctgaagccggccaacatcctgctggaccgcaactacgtgagcaagatcagcgacgtcgggctggcacgcctggtgccgccgtcggtggcggacaacgtgacgcagtaccggctgacggcgacggcgggcaccttctgctacatcgacccggagtaccagcagacgggcaagctgggcgtcaagtcggacatctactccctcggcgtgctcctgctgcaggtggtcaccgcgcggccacccatggggctcacgcatcacgtcgagaaggccatcgacgcgggcacctttgagcagatgctcgacatcaccgtcaaggactggcccgtcgaggaggcgctcggctacgccaagctcgcgctcaagtgcacggagatgcggcggagggaccggccggacctcgccacagtcatactgccggagctcaaccggttaaggaacctcggccacgcgtacgaggcacgcatgagcgccgccagggccaacggtggaagtggagagagtggtgcccagatcagcggggactcgacaacggtgggtggttcatgggaaacggcggacagctagcgggcggtccgg

SEQ ID NO: 147359 - DNA, 4826 bp, Zea Mays
tcttcgccgccaccgccgacaaataaccgccgcaattcgaagcaagagagccgcaccaggagaagatatagtgagagtgagagcccgaggagggggtggcgcgatggggctctcgggcgcgacgatctcggcgccgctcggctgctgcgtgctgcggtgcggggcagttggcggaggtaaggccctgaaggcggacgcggagaggtggcggcgggcgggatggagccgacgcgttggcggaccgaaggtgaggtgcgtggcgaccgagaagcacgacgagacggcggcggtcggggcggcagtgggcgtggatttcgcggacgaggaggactaccgcaagggcggcggcggcgagctgctttacgtgcaaatgcagtcaaccaagcccatggaaagccagtccaagatcgcttccaagctatcgcccatatctgatgaaaatacagtgcttgatttggttatcattggttgtggtccagctggtctttctctagcttcagagtcagctaagaaaggtctcactgtaggtctcattgggcctgaccttccattcacaaataactatggtgtgtgggaggatgaatttaaagatctcggtctagagagctgtatcgagcacgtctggaaggatactattgtctacctagacaataacaagccgatactgattggccgttcttatggcagggtgcaccgtgacttgctccatgaggaactgctgaaaagatgctatgaagctggcgtgacatacctgaactccaaagtggacaagatcatagaatctccagatggacacagagtagtctgttgtgacaagggtcgcgagataatttgcaggcttgccattgttgcttcgggggcagcatctggtaggcttctagagtatgaggttgggggtccccgtgtttgcgtgcagactgcatacggagtagaagttgaggtggaaaataacccatatgatcctagcttaatggttttcatggactacagagattgtttcaaagaggaattctcacacactgaacaagaaaatcccactttcctgtatgctatgcccatgtcacccacacgagttttctttgaggaaacatgcttagcttctaaagatgctatgtcttttgatctacttaagaagaggctgatgtatcggttgaacgcgatgggaattcgtatcctgaaagtttatgaggaggaatggtcctacattcctgttggagggtccttaccaaacacagatcagaaaaaccttgcattcggtgctgcagcaagtatggtgcatcctgcaacagggtactcagtggtcagatctttgtctgaggctccaagatatgcttctgtgatatcggacatcttaggaaatcgagttcctgcagaatatatgctcggaaattcacaaaattacagtccatcaatgcttgcatggagaacactgtggcctcaagagaggaaacgccaacgatccttcttccttttcggattagcgttgataatccaactgaataatgaaggcatacaaacattcttcgaagcctttttcagggtgccgagatggatgtggcgaggatttcttggctcgaccctttcatccgtcgatctcatactattctcattctacatgtttgcgatagctccaaatcaattgcgaatgaaccttgtcaggcatctcctctctgacccaactggctcatccatgatcaagacctacctgaccttataaaaccatttgcaccaggctgcaagaactcttagaaactgtacagttttgtagttgtacataagttagagaggatctggggggttacttggcggcggatctaggggttagcagcaatgctataatacactgtaaatcttttatggttgctatggtgattggatagagaagcacaccgtgttgtgcacgatggaagaataataagagagatcaggtgatggtcatggttcctgcattggccaattttaggttgcatttgctgtttcaaggcttcttacatgtccaatcaattacacccttattttaggttgctcaatgccaattttcttgtggaacaatatttgcaaaagcaaaaaagggaaaaacataattggatgtgcaagaatagtatgaggctgtccttgctcctgcgccatggcatttagctgcaagatgttggggaaggagaagacctgtaggagactaaggttggaggcaagggagagaaaggaaggagggcaggaggagaggcggaacaacccgtctccctccatctctctaccttcttctcctgcgcccctatccatcgctcgcaccacccactgaccggccggcggcatccttattaccataacatcacgggacggtggcgcgatgcaaggaggcccactgagcccggatgagtactgggtgatatcgccgccggcgctgctgcaccagccggcgtccaccatcgtcgtggccatcgaccgggaccggaacagccaactggccgtgaagtgggtggtggaccacctcctctccggcgcctctcatatcgtcctgctccacgtggccgtccattaccacacgacccatgggttcgccatggttgagaccacgcagggtgcgctggaggctgaaatgaaggagatctttgtcccctacagaggattcttcaaccggaatggggtggaagtatccgaggtagtattggaagaggcagacgtgtccaaagccattctaggttacatcactgcaaacaagatccagagcattgcgctcggcggagccaacagaaatgcgttcaccaagtattctttttttttccccatcatttctttttcgtccagattgcaccgtctcagctctcgcctcgggcaggaaattcaagaacgcggacgtgccgtcgaccctgatgaagtgcgctccagactactgcaacatctacgtcgtggccaagggcaagtccgtcaatgtcaggctcgccaagtgcggcgtcccgccgatgcacactggcgccgacatcgcttcggacaccgactccctccgggaatcggtgctctacatgcgacgcggctccagggggcacctgccgcgggtgacgcctgacgcctggcgctccattgacgggcgcacaccgccggagctatccacgcggccactgttccgcgagcgcttgctctcgtcatcggccaccaccaagaactttgtcgtcctgccaggaaaggacaacttcgagacgtcctcccgctcggcgagacacgactcgttaggcggcgacctcgacttcggcccgagcacgcgcttctcctacatagacttgggcgagaacctcgatatgtccaccactctccccgctctggaacccatgtcaccggccaccggcgcgcagcgggataccgaggccgagatgcggcggctccggttggagctcaagcagaccatggacatgtacaacgcggcgtgcaaggaggccatcaacgccaagcagcgggccaaggagatgcatatgatgaagctggaggaagcgcgtcggctggaggaggccaggaacgccgaggaggctgctctggcagtggccgagatggagaaggccaagtgccgcgcggccatggaggccgccgaggcggcgcagaggctggctgacctggaggcgcagcggcgccgcaacgccgaggtgcgcgcgcgccgggaggccgacgagaaggtgcgcgctctggatgccatttccaaccacgacttccggtaccgcaagtaccacatcgacgagatcgagatggccacggagcgcttctccgacgagctcaaaatcggcgagggcggctacggccccgtctaccgcgcctccctcgaccacacccccgtcgccatcaaggtgctccggcccgacgcgcaccaggggaggaagcagttcctgcaggaggtggaggtgctcagctgcatccgccaccccaacatggtgctcctcctcggcgcatgcccggagtacggctgtctcgtgtacgagtacatggaccacggcagcctcgaggaccggctgttccgtcggggcggcacgccgccgctcgcgtgggcccagcggttccggatcgcggcggagatcgcgacggcgctgctgttcctgcaccaaacgaagccggagccgctggtgcaccgggacctgaagccggccaacatcctgctggaccgcaactacgtgagcaagatcagcgacgtcgggctggcacgcctggtgccgccgtcggtggcggacaacgtgacgcagtaccggctgacggcgacggcgggcaccttctgctacatcgacccggagtaccagcagacgggcaagctgggcgtcaagtcggacatctactccctcggcgtgctcctgctgcaggtggtcaccgcgcggccacccatggggctcacgcatcacgtcgagaaggccatcgacgcgggcacctttgagcagatgctcgacatcaccgtcaaggactggcccgtcgaggaggcgctcggctacgccaagctcgcgctcaagtgcacggagatgcggcggagggaccggccggacctcgccacagtcatactgccggagctcaaccggttaaggaacctcggccacgcgtacgaggcacgcatgagcgccgccagggccaacggtggaagtggagagagtggtgcccagatcagcggggactcgacaacggtgggtggttcatgggaaacggcggacagctagcgggcggtccggtgatcggtgtggccggtggcccggatgagtcagttagagagcgagctttttttttgatacgggggagttaaaaaatccaaaaatcttggtgtatgtacagttctgtctatgagaaatactaacgcgtcttgcagt

SEQ ID NO: 147360 - DNA, 2638 bp, Zea Mays
gacctgtaggagactaaggttggaggcaagggagagaaaggaaggagggcaggaggagaggcggaacaacccgtctccctccatctctctaccttcttctcctgcgcccctatccatcgctcgcaccacccactgaccggccggcggcatccttattaccataacatcacgggacggtggcgcgatgcaaggaggcccactgagcccggatgagtactgggtgatatcgccgccggcgctgctgcaccagccggcgtccaccatcgtcgtggccatcgaccgggaccggaacagccaactggccgtgaagtgggtggtggaccacctcctctccggcgcctctcatatcgtcctgctccacgtggccgtccattaccacacgacccatgggttcgccatggttgagaccacgcagggtgcgctggaggctgaaatgaaggagatctttgtcccctacagaggattcttcaaccggaatggggtaaatgtggaagtatccgaggtagtattggaagaggcagacgtgtccaaagccattctaggttacatcactgcaaacaagatccagagcattgcgctcggcggagccaacagaaatgcgttcaccaagaaattcaagaacgcggacgtgccgtcgaccctgatgaagtgcgctccagactactgcaacatctacgtcgtggccaagggcaagtccgtcaatgtcaggctcgccaagtgcggcgtcccgccgatgcacactggcgccgacatcgcttcggacaccgactccctccgggaatcggtgctctacatgcgacgcggctccagggggcacctgccgcgggtgacgcctgacgcctggcgctccattgacgggcgcacaccgccggagctatccacgcggccactgttccgcgagcgcttgctctcgtcatcggccaccaccaagaactttgtcgtcctgccaggaaaggacaacttcgagacgtcctcccgctcggcgagacacgactcgttaggcggcgacctcgacttcggcccgagcacgcgcttctcctacatagacttgggcgagaacctcgatatgtccaccactctccccgctctggaacccatgtcaccggccaccggcgcgcagcgggataccgaggccgagatgcggcggctccggttggagctcaagcagaccatggacatgtacaacgcggcgtgcaaggaggccatcaacgccaagcagcgggccaaggagatgcatatgatgaagctggaggaagcgcgtcggctggaggaggccaggaacgccgaggaggctgctctggcagtggccgagatggagaaggccaagtgccgcgcggccatggaggccgccgaggcggcgcagaggctggctgacctggaggcgcagcggcgccgcaacgccgaggtgcgcgcgcgccgggaggccgacgagaaggtgcgcgctctggatgccatttccaaccacgacttccggtaccgcaagtaccacatcgacgagatcgagatggccacggagcgcttctccgacgagctcaaaatcggcgagggcggctacggccccgtctaccgcgcctccctcgaccacacccccgtcgccatcaaggtgctccggcccgacgcgcaccaggggaggaagcagttcctgcaggaggtggaggtgctcagctgcatccgccaccccaacatggtgctcctcctcggcgcatgcccggagtacggctgtctcgtgtacgagtacatggaccacggcagcctcgaggaccggctgttccgtcggggcggcacgccgccgctcgcgtgggcccagcggttccggatcgcggcggagatcgcgacggcgctgctgttcctgcaccaaacgaagccggagccgctggtgcaccgggacctgaagccggccaacatcctgctggaccgcaactacgtgagcaagatcagcgacgtcgggctggcacgcctggtgccgccgtcggtggcggacaacgtgacgcagtaccggctgacggcgacggcgggcaccttctgctacatcgacccggagtaccagcagacgggcaagctgggcgtcaagtcggacatctactccctcggcgtgctcctgctgcaggtggtcaccgcgcggccacccatggggctcacgcatcacgtcgagaaggccatcgacgcgggcacctttgagcagatgctcgacatcaccgtcaaggactggcccgtcgaggaggcgctcggctacgccaagctcgcgctcaagtgcacggagatgcggcggagggaccggccggacctcgccacagtcatactgccggagctcaaccggttaaggaacctcggccacgcgtacgaggcacgcatgagcgccgccagggccaacggtggaagtggagagagtggtgcccagatcagcggggactcgacaacggtgggtggttcatgggaaacggcggacagctagcgggcggtccggtgatcggtgtggccggtggcccggatgagtcagttagagagcgagctttttttttgatacgggggagttaaaaaatccaaaaatcttggtgtatgtacagttctgtctatgagaaatactaacgcgtcttgcagtgctgctgcctgctgcctcatccttttgagggtcgtcatc

SEQ ID NO: 147361 - DNA, 2524 bp, Zea Mays
caccgccactccactcagctccgttcaggaggtcagctgcctgcgccccagccccattcggccattccattcctttccgagccctcacacctgcacgcgcccacgcacccgcaccaagaaccacgcgcgggcctgtccctgtcgcagctcacacgcgcaacggggggcgcgccgcgcaggcgatggtctccgcccgcctcgtcgcgctggccgccttccacctcctcgtcctcttggccatgggcccgggcgaggcgcgcgcggcggacggcggcgaggtgcgcgcgctgctggcgctgggggccgcgctggacccgacgggccgcctgctcccgtcgtgggcgcccggccgcgacccctgcgcgccgccgccgtccgggggcttcgatggcgtcgcgtgcgacgacagcggcgccgtcgccaacgtctcgcttcaggggaaggggctcgccggcacgctcccgcccgccgtcgccgggctccgctccctcacgggcctctacctccactacaacgcgctccgcggtggcatcccgcgggagctggcggcgctcgccgcgctcaccgacctctacctcgatgtcaacaacttctcggggcccgtcccgccggagatcggcgccatggcatcactgcaagtggtgcagctctgctacaaccagctcactgggagcatccccacccagctgggcaacctcagcaggctcaccgtgctggccctgcagtccaaccgcctcaacggcgccatccccgccagcctcggcgacctgccgctgcttgcgcgcctggatctcagcttcaaccgcctcttcggctccatccccgtcaggctcgcgcagctgcccagccttgtcgcgctcgacgtcaggaacaactcactcactggcagcgtgcccgccgaactggccgccaagttgcaggccggcttccagtacgggaataacagcgacctgtgcggcgcggggctgcccgcgctccgtccgtgcaccccggcggacctcatcgacccggacaggccgcagcccttcagcgctggcatcgcgccgcaggtcaggccctccgacgggcgcgcgccatctaccagggcgctcgcggcagtggtcgtcgtcgccgtggccctcctcgcggccacgggggtcggccttctcgcgctctcatggcgtcggtggcgccgacagagggtcgcggggggatcgccgtcgacggtctccggcggccggtgcagcaccgaggctgcgccgtccgcggcgaaggcgtcgtcggctcgcaagagcgcgtcgtcggcgctggcgagcctcgagtactccaacgcctgggacccgctggccgacgcgcgcggcgggctgggcctcttctcgcaggacgcgctggcacagagcctccgcatcagcacggaggaggtggagtccgcgacgcgctacttctcggagctcaacctcctcgggaggcgcggcaagaaggccggcggcctggcgggcacgtacaggggcacgctccgcgacggcacctccgtggccgtgaagcggctgggcaagacgtgctgccgccaggaggaggccgacttcctgagcgggctgaggctgctcgcggagctccgccacgacaatgtggtcgcgctgagggggttctgctgctccagggcgcgcggggagtgcttcctcgtctacgacttcgtgcccaacggcagcctgtcgcagttcctcgacgtcgacgccgacaacgccggcggcggcagcggccgtgtcctccagtggtccacgaggatctccatcatcaagggcatcgccaaaggaattgagtatctgcacagcacaaggacgaacaagccggccctcgtccaccaaaacatctcagcggacaaggtcctgctggactacgcgtacaggcccctcatctccgggtgcggcctgcacaagctcctcgtggacgacctcgtcttctcgacgctcaaagccagcgccgccatggggtacctggcgccggagtacaccaccgtgggccgcttctcggagaagagcgacgtgtacgcgttcggggtcatcgtgttccaggtgctcaccggcaagagcaaggtgacgacgacgcatgcgcagctgcctgacaacgacgtcgatgagctcgtcgacggcaacctgcagggggataattactcggcggccgaggccgcccagctggcgaagatcggctcggcttgcaccagcgagaacccggaccagaggccgacgatggcggagctgctccaagaactgagcaccgtctgaaatctaatggaggtccaacaatcatccgctgtaactgtttcatgcaagagtcacatgccttttgtaacctagctacgtacgtaccctgtctaggatcaccagtcagtaatcgctgatcttagaaagaatctgagctagtaggctctactagttagctagtaatcgctgatcttaggaagcacatgtgcccatgatcatgagatcttgtatgctaatgatgtgtcgttaccaccgcttttgaaaagtgtgcattgtttggatgt

SEQ ID NO: 147362 - DNA, 2060 bp, Zea Mays
tttgattctttgttgccccactatactactcattcagtcacaccaaattagtactacccccaatcagacggtttggtaatgctgctgatgttggtactccgatccaaatgtttgtagccacaaccgctagccgtggtgcagctctgctacaaccagctcactgggagcatccccacccagctgggcaacctcagcaggctcaccgtgctggccctgcagtccaaccgcctcaacggcgccatccccgccagcctcggcgacctgccgctgcttgcgcgcctggatctcagcttcaaccgcctcttcggctccatccccgtcaggctcgcgcagctgcccagccttgtcgcgctcgacgtcaggaacaactcactcactggcagcgtgcccgccgaactggccgccaagttgcaggccggcttccagtacgggaataacagcgacctgtgcggcgcggggctgcccgcgctccgtccgtgcaccccggcggacctcatcgacccggacaggccgcagcccttcagcgctggcatcgcgccgcaggtcaggccctccgacgggcgcgcgccatctaccagggcgctcgcggcagtggtcgtcgtcgccgtggccctcctcgcggccacgggggtcggccttctcgcgctctcatggcgtcggtggcgccgacagagggtcgcggggggatcgccgtcgacggtctccggcggccggtgcagcaccgaggctgcgccgtccgcggcgaaggcgtcgtcggctcgcaagagcgcgtcgtcggcgctggcgagcctcgagtactccaacgcctgggacccgctggccgacgcgcgcggcgggctgggcctcttctcgcaggacgcgctggcacagagcctccgcatcagcacggaggaggtggagtccgcgacgcgctacttctcggagctcaacctcctcgggaggcgcggcaagaaggccggcggcctggcgggcacgtacaggggcacgctccgcgacggcacctccgtggccgtgaagcggctgggcaagacgtgctgccgccaggaggaggccgacttcctgagcgggctgaggctgctcgcggagctccgccacgacaatgtggtcgcgctgagggggttctgctgctccagggcgcgcggggagtgcttcctcgtctacgacttcgtgcccaacggcagcctgtcgcagttcctcgacgtcgacgccgacaacgccggcggcggcagcggccgtgtcctccagtggtccacgaggatctccatcatcaagggcatcgccaaaggaattgagtatctgcacagcacaaggacgaacaagccggccctcgtccaccaaaacatctcagcggacaaggtcctgctggactacgcgtacaggcccctcatctccgggtgcggcctgcacaagctcctcgtggacgacctcgtcttctcgacgctcaaagccagcgccgccatggggtacctggcgccggagtacaccaccgtgggccgcttctcggagaagagcgacgtgtacgcgttcggggtcatcgtgttccaggtgctcaccggcaagagcaaggtgacgacgacgcatgcgcagctgcctgacaacgacgtcgatgagctcgtcgacggcaacctgcagggggataattactcggcggccgaggccgcccagctggcgaagatcggctcggcttgcaccagcgagaacccggaccagaggccgacgatggcggagctgctccaagaactgagcaccgtctgaaatctaatggaggtccaacaatcatccgctgtaactgtttcatgcaagagtcacatgccttttgtaacctagctacgtacgtaccctgtctaggatcaccagtcagtaatcgctgatcttagaaagaatctgagctagtaggctctactagttagctagtaatcgctgatcttaggaagcacatgtgcccatgatcatgagatcttgtatgctaatgatgtgtcgttaccaccgcttttgaaaagtgtgcattgtttggatgtgctctagtacatggtagtaatgtgaatgcagccatttcctgc

SEQ ID NO: 147363 - DNA, 1584 bp, Zea Mays
agtagtcgcatcatacgcataagtatgttgattaccgtggtaattcaaacaaaagtaaggtattttttctcacagtcacactcatctaagtcaaaaggaaaccacgtacaaagaccagaaaacccatcatcattccagctcgcctagtctcactctcagaaagacgaaatccagtgtgaccgtagcagcagcagcttcggatgggtgcctgattggggaagaaaagaaaaggagaagaagcacacagaaatccatagcatatataaatggtctcagttattacgctcctcccttctccgcgttttccacctcagtcctagctagcagctccgtttactcatccgtcacccccttcccctccattctccatcccttccccaagaagccgagagcgagaggcgcaatgggcgaccgggcgtacgcgccggccgtgaagccggttcccgtgcgggccaccaacggcaccgcgaacggcggcggcgtggggcctccgcggcccgcgccgccgtccatggtgcccggcgggcgcgtgccccctccgccgatgtacaggcggaggcccgcgcagtcgcgtcctccggcgcggcgtgccgggcggagcgcccgcgggtggtgctgcgcgtgctgcctgtggctgacgctggtgctggtggggctggcgttcctgggcgccatcgcggcgggggtgttctacgtggtgtaccggccgcggccgcccagcttcgcggtgacgtcggtgcggctggcggcgctgaacgtgtcggactcggacgcgctcacctcccgcgtggagttcacggtgacggcgcggaacccgaacgacaagatcgccttcgactacggcgacatggcggtgtccttcgcctcgggcggcgcggacgtgggcgacgccgtggtcccggggttcctccacccggcgggcaacacgacggtcatccgcgccgccgcgtccaccgccgcgtccaccatcgaccccgtccaggcggcggcgctcagatccaggaagtcccacgtgatgtcggcgcagatggacgccaaggtcgggttccagatcgggcggtccaagtccaagagcatcaacgtccgcgtcagctgcgcgggggtctccgttgggctcgccaagccggctccggctccggctgcggccgcgcccgcgcccgcgcccgcgccggacgcggagccggccccggcccgcggccgtgggcgtgggcggtcgccgcggtcggtcgtacggacgtcctcctcctcctcctcctccggcggcggtggcggcgggaagttgacgccgacggacgcaaagtgtaaggtccgcatcaagatctggatttggtcgttttgatttgatggatgggcggattccatttggggctttggggggcggcggcggcggggtagagagaaaattttcctcctattttttttccccttcttgcttcttctcttgacaacagtgtatgtggatttattggagtagtctgtaaatggttttcattttcgatacccttgtccatcatcacagcacaaacctttgtttccaaaaattcccaaatccgctacatggatggatggataactggcgtcaga

SEQ ID NO: 147364 - DNA, 1866 bp, Zea Mays
ggagtactggttaaacgggtccaaatctcggacccgcaaacggacctcacccacccgttcctccatctccgccccttgccggcgatggcaccggcgccggcagcggcctcggcggggcggaagtctcatgtcaccgttctcctcctctacgtagtgtgcggcttgatcctgctgcttctcctcgcctcctactcgccccgcctccagccccacgcccacggccgcagcctccaccgccgcctcaagctccacccaaagagctccttaccatccgacgcttcctccggtgggaacggggggcaacagaagacgcagcaccaaaaccaccatgcggcctccttcgacccgaccatcgccgagctggagcgtcggctggacgacaaggagtgggagcgcgagcactacagcctcctccacggcggcgagccggatgaccatatgaaggagtgggaggagttcctcaaggaggaggaggacttcatcaacgacgacgaccgattcaacatcgccgaccgtatccgcgcgctcttccccaagatcgacgtcgccccgcaggacggattcgtctccctcgacgagctcaccgcctggaacctccagcaggccagggctgaccagcaccaccgctccgccagggagatggagctctacaacaagaacggcgatgagatagtctcattcgaagccttcaatgctctgcgccaagaatcccatggagagggcaatatgcttgggttcgaatggtggaaggaggatcatttcaatgcgtcagatgcaaacgctgatggtttccttgataaaactgagttcaatgatttccttaatccaagtgattcggataatcccaaaatcatcaatttgctctgcaaacaagaaataaggcagagggataaagatggtgatggaaagttaaactttgaagaatactttactgggctacatgaccatatacatggttatgatgacgagaatgcagatatttcccaaattgggaacataacagttgcgaaggatcggtttttcaaacttgacaaagataatgatgggtttatttcggagcatgaactagagcctgttcttgataagctctatctttctgaacgctattattctagacagcaagccatccatgctatttcagaggcagacaaagatcatgatgggaggctgactttggaagagatggttgagaacccctatgcattttatggcagtgtttatctcagcagcagcgacaacgacgacgaagactacttccacgacgaatttcgctgagaccaatattgttactatcctgacacacgcaaggaacacagctgacgagcatcaaggtgcgcacagaggttcggaacgtctagcatactatgtgtgatgcccgggctgggctgctgacagaatgggagagcttagagttacggccatggagtgaggaactagtttttagccgcttggttcttcaagttgtttgtgttaaatggaacgacgacagcatcctagtaccggccaggcccagcagtgatggatgttacgcggcaagttgagccacctttatctaggctgagctgcattggtctccatcctgatgttcctgcagcaggggaaatgtagttcaggagaacaatgagtggaggagcgtcatctctgtggcgagcggcttcagaaatctaacgggaacgtgttgtttggtgtccgaaatgtatgtgtgtgtgtgtatgctatgaattcaattatttctggcagaatgtcgcagtctagcgagctggcccatcccattgagaaacattccatcggctgcatgagtgcgccatggacgggagatggatgtgccgaattattggagggaaagggttcactttattcgtgcct

SEQ ID NO: 147365 - DNA, 2664 bp, Zea Mays
gtgacactggccttcttaccctttgcttctcttctctgccgctagggaggcgctgacactgttcctcttccctcctcctgctctctccccatgtcctcctcctccggtcctcggcggccatgactgctgcggcctctttcgtccgtgcctgcgcgctgcatggctgctgccagctctagatacacactcctagctaggcagctgttgccttcacctgctgccgcgcgctgctcgatcgactgcacgtcttcacagttcacaccacagagtagagtggagagagaaagccaagaagccggcaggggagagtagggagagagagagggggaggagtcgtatgatagaaagaatctggaattgctttccctctcgttttgtcccccctgcgcctccttgattattgtgttgcttgctgttcctccctgcctgcttgctccctgcttcggcttggaggccttctcatgcatcaacctccttagcatctctctccccctctcccatacatacccccttgtctgatgcctgcttctgcttgccccatcctccttcatccttcacgagttcgtctctcgatttattgtctgccacacctcccttcagctagctatcttcccctagctagctaggtaccagtagtgtgtgtatatatagatagatttatagatatagacacacacaacaagtgcaagatcaggcgaaagctactagccgcccttgcagtcttggactccattcgtcgtcgtccttgggttctcctcctcacctagctactatgttccaccatcagcaggagctcttgcaggcagaagctgcagcggcagatcgggagagcagcatgtccaacctcacctcctccacgtccggcggccccaacgcggcgcctgctgctgctgctgctgccccgccggcgcccgcggcctccggcaacaacaagcggaaacggagcctcccaggcaaccccgaccccgaggcggaggtcgtggctctctccccggcgacgctgatggcgacgaaccgtttcgtgtgcgagatctgcgggaaggggttccagcgggaccagaacctgcagctgcaccggcgcggccacaacctgccgtggaagctgaagcagcgcggcacgggcaaggaggcgcagcggaggaaggtgtacgtgtgccccgaggcgtcgtgcgtgcaccacgaccccgcccgcgcgctgggcgacctcaccggcatcaagaagcacttcttccgcaagcacggcgagaagaagtggaagtgcgacaagtgctccaagaagtacgccgtccactccgactggaaggcgcactccaagatctgcggcaccagggagtacaagtgcgactgcggcaccatcttctccaggcgggacagcttcatcacgcaccgcgccttctgcgacgcgctcaccgaggagagcgccaaggccatcggcctcaacgccatggcggccgtgccggcgcagcaccaccaccacccgatgctcttctcgccgccgcccacgcacgtcatgcagcaggacgtcgccctcctccaggagcaccaccaccaggaggtcatgcagcaggagcactgcaactacgccatgaagacggagatgccgccgtggccggggatgacctacgaccacccgctgctgcagccgctctgcaacgccgccgcaccgcagagctcggccacgtccacgccgccgccgccgacgacgatgcagcttcccgctgcctacgcgcacctatcggccacggcgctgttgcagaaggcggcgcagatgggcgccaccgtcgccggcgcgggctacacccagatggcgggggccgcgacaagcgccaccttcggcctcggcctcccggacctgcagaatacccagcagcagcagcatcaggacggcgagatcatggccgggctcgcgaggacagcctcccacggccgcggcggcgaggaaggcggcggcggcggaggcgacggcatgaccagggatttcctaggcctgcgcgccttctcccaccgcgacatcctcggcctcgccggcttggactcctcgtgcatgggcgccatcatcagtgccagcgccagcatgaactgctacgacgagccacagcagcgtgcacaggctcaggcagagcagcagcagcaaagcagcaacgagcaatggcacagcatgggcagccatcaaagctaggtcgataaaagctactttcttcttcctctcgccagccgtcatcggtacgtcgccatcgctgcatctcatcgctgccgtcgctgtgcagaggcaaagctagctagggccggccgctcggtgcaccgtgccttttgctcatcttttgcttctgttcaggatatcatctcatgcatgtggtaaccacgcaagcgatcaaaccgttccgatcaaactctagcccggtccaaggatggtgatgacagattggtgatacagaggtacgcagggagttgtataattttttttttttgggttggcgaagagatcggccaacatgtaagctaagctccaatcaagggaagaaaaccatagctatatgtgacagtaataatacatgcatgcattcatcatcttttaaggttggacattgcatccattaattgtagtaataatagatcatatgatccaaatgattcttcgcaattagttcaaaagtaaatataaat

SEQ ID NO: 147366 - DNA, 1247 bp, Zea Mays
tctcttcgttttcttctctgacttcgcgtcgcatgcgaatgcaggcgggacagcttcatcacgcaccgcgccttctgcgacgcgctcaccgaggagagcgccaaggccatcggcctcaacgccatggcggccgtgccggcgcagcaccaccaccacccgatgctcttctcgccgccgcccacgcacgtcatgcagcaggacgtcgccctcctccaggagcaccaccaccaggaggtcatgcagcaggagcactgcaactacgccatgaagacggagatgccgccgtggccggggatgacctacgaccacccgctgctgcagccgctctgcaacgccgccgcaccgcagagctcggccacgtccacgccgccgccgccgacgacgatgcagcttcccgctgcctacgcgcacctatcggccacggcgctgttgcagaaggcggcgcagatgggcgccaccgtcgccggcgcgggctacacccagatggcgggggccgcgacaagcgccaccttcggcctcggcctcccggacctgcagaatacccagcagcagcagcatcaggacggcgagatcatggccgggctcgcgaggacagcctcccacggccgcggcggcgaggaaggcggcggcggcggaggcgacggcatgaccagggatttcctaggcctgcgcgccttctcccaccgcgacatcctcggcctcgccggcttggactcctcgtgcatgggcgccatcatcagtgccagcgccagcatgaactgctacgacgagccacagcagcgtgcacaggctcaggcagagcagcagcagcaaagcagcaacgagcaatggcacagcatgggcagccatcaaagctaggtcgataaaagctactttcttcttcctctcgccagccgtcatcggtacgtcgccatcgctgcatctcatcgctgccgtcgctgtgcagaggcaaagctagctagggccggccgctcggtgcaccgtgccttttgctcatcttttgcttctgttcaggatatcatctcatgcatgtggtaaccacgcaagcgatcaaaccgttccgatcaaactctagcccggtccaaggatggtgatgacagattggtgatacagaggtacgcagggagttgtataattttttttttttgggttggcgaagagatcggccaacatgtaagctaagctccaatcaagggaagaaaaccatagctatatgtgacagtaataatacatgcatgcattcatca

SEQ ID NO: 147367 - DNA, 100 bp, Zea Mays
aacaaaccatcgaacagcaggtgcggtgcattatgtaatgtaatctctgccgagcatcgtcatggcgggcgctgcttccagctaacccctaaaaaacaaa

SEQ ID NO: 147368 - DNA, 703 bp, Zea Mays
gagggaatagtttctccaccaaaaaaaagtgcggcaacgtagcagaggaggagcagggggaggaggaggctagggttgctcggcgatggcgtcggcggcgaagacccttgcacgggttggatcatccctcttcggccgcattctcgcgtctccgtcctcgtccataccccgcgccgggctgccgctagccaggctgcagccacacgtcccgccgccggcaccggcgggggtggacgcttacgaggcggagaccatcgccaggctgagctcgctccccggcgagatatccttcccctgcggacttccctcgctccgcttcttcatcgacgacgtcgaggatcctgttcctaatgacccctttcagttgctcccgaaaagaacttaccagcccagtacaatcaagcggaaaagaacccatggatttcttacacgtaaatcgaccaagggtgggcgcaaggtgattgcccggagaatcgccaaaggcaggcacagaatctcagtttagctagatctcgctcgtagcagccctggatgttttctgtaacacagattcgtatcgtgttctttctatggttagcactctgctgaaggtgagcccccgcgcaagcagcagtccatgtatggatttttattgtgaaacttttttttgggtggtttcagtcctggccatccgtaggatatgccttcttccattttattttgc

SEQ ID NO: 147369 - DNA, 1950 bp, Zea Mays
gagggaatagtttctccaccaaaaaaaagtgcggcaacgtagcagaggaggagcagggggaggaggaggctagggttgctcggcgatggcgtcggcggcgaagacccttgcacgggttggatcatccctcttcggccgcattctcgcgtctccgtcctcgtccataccccgcgccgggctgccgctagccaggctgcagccacacgtcccgccgccggcaccggcgggggtggacgcttacgaggcggagaccatcgccaggctgagctcgctccccggcgagatatccttcccctgcggacttccctcgctccgcttcttcatcgacgacggtacagcttctctcacacacacgcactcatgaatggattgggccgtgattgagtattgaagttgggctcggatcgctagtcactgccagtttcagaaatggggaatagggggactgggatcaatgtttttcataaaccgttcgttgaatatagagattgtagtgtcgttgaatatagaaattgcagtgtgtgactactcgaaactcgcatgatttctgttgtaatgcgcattttctgtgatttgcagttataccatttcactattaagctttgctttttgcggacttgggaagaattgccaagatttcatacagttaccttatttgggggcattgttttctgaaaagtcatggttgccttcatcaatgctgatgtgttacttttatctggcttgtgttgaaagttactaagtgattgatcaaccttgagaagtcacgtttctagtgttattgatgctcttacgcatagaagaacacgttgcttgcaatacagtactcagtatttaaagttccttgatgcctttttgttccttaaatagtaggtggcagaacctaaagattgatacactgcataaattgtttgtggatcatttgacagcctaaaactgagattgtgtggagcttaggaaattctgctatgatttatgttgaaattaagtctggtagaaagtgcagtagaaatactcaattacccaagtctccttttgctaagactgtttatttgcatagtgccaaatggtggccatttcttgttccagctgctgctgattgtcctaaaattggttagaaagtgtatgacaaatactcaagtacatgcagttcgtcctgctgttcctggattgtttccttgcatggtcccaaacagtgactgttccttgctacttctgttgctggaaatgttgccgtagttatatttggtgaatactagagtcttgattatgatatgtaggctttggattatgacctggcagctaggatcaacttttatttttgttagtttgatgtctttttctaatccgttgcttctgttctgctatttgtagtcgaggatcctgttcctaatgacccctttcagttgctcccgaaaagaacttaccagcccagtacaatcaagcggaaaagaacccatggatttcttacacggtctgtctctctagcttttccctggccattattttgcttccctcgtccttcattgaaaaaggaagatgggtttcaagttggtattatcaaattctgtttccgttcatgtttgcctttggcacctcatcatttagattaggaaggtagtttatctggcatgattgtggttcagtgccctcatgtccttgttacattggttctgcagtaaatcgaccaagggtgggcgcaaggtgattgcccggagaatcgccaaaggcaggcacagaatctcagtttagctagatctcgctcgtagcagccctggatgttttctgtaacacagattcgtatcgtgttctttctatggttagcactctgctgaaggtgagcccccgcgcaagcagcagtccatgtatggatttttattgtgaaacttttttttgggtggtttcagtcctggccatccgtaggatatgccttcttccattttattttgc

SEQ ID NO: 147370 - DNA, 459 bp, Zea Mays
atgggcctgcggctagctccgggaacggaaggcgagagcaggagcctgcccgccgggcggcgagataggggcgaaggcgggtcgagcgcggacaggtccctcgcatccaccgagtcgctccaagggacggggagaaaaatactcatcaatcgctcggaacttgcgggttgcgaagggcgaagaggagggaagacccctatagaggagccggcggtggcggcggtggcggtggctgggcggcagcagattggatccgaccggtcccgtggaagtggtggaagaatcgcgactctcgtggcgtttgctctagcgggaagcagagggagagagttgatcagttttgatgtggttcgtggaggaagagtcagagagcggtggtggcgtcacacgattggcggtaggtctgctgcagctgcctcctgctggcgctggcaatggaaagcaagagccaagaggtga

SEQ ID NO: 147371 - DNA, 1649 bp, Zea Mays
ctaacgcccgtccgcttccgtcgagccgccgagaggtcaggtcctcgctccgctccgctcgtcgccccgtccgtctccatcgaggactgcctccgcagagctcttattgattgcaggctgcggacattccaaagaagtttgccccgaccattggcatttttgtggatcaccaccacgggtacgtatgagtggcgacacggagcgccgtcgctccgccactgggcgtaagtcaactgtgtcgaggtacaaggtggtgaagttcgaccttagcaagacgattcagtccgagaagttcgaagataggcgtacctggggcatctttgttgaaggtcggaacgcggtttcggttttggtggccattaacaatgtatccacattcattcatggccgtaatttagattggcgatgtgtggatacatttgatgagcaatacatgaaagataaaatccgtagtttgatcacggataggcagcgactatcacagatacgcaaggaagtacaaagtatccctgaagatgacatgaaagcattttttgatgtgattagtaacattcgcaaattcacactcagtccacgtttgactggcccatcagcttttgaagtgaatcaaccatatatgctactttgtcatctttttacccctgtgtttcatggttgggttgtaagccctgaattgagcagctatgatgcaattaaagggttcactcgtgatgagttgatacagtattgcaacgcgctgatagccttagaaggtgagtcagacaatgtgagagttattcgagacttattgaatgattcagatcagctgctgacagcttatggctttgattgcctggttcaggagatgagagatgacaagtttggattatttttttggcgtagcagatatgatgtaattcataagcatgacggagatctttttttactggtttctgatgagagggttcgcagtgaaatgccccaggccacttggatgttatttgaacaatctccagaaagcagcatctacttcacatcagaatatctacctgttgaaaaccaatacagtattgacagagccagagaatggcaccagcaaaagcttcagcaaaagacttcgagctcgttagagacagtgaagaaagctaaaaagaaaaggaagaacaagaaatcagcaatggcgagcaaagaaatacctgaacaaggtggtccgaatgttgaagatgtggttgttgctgtcagtatcagtgctgagcttcgaaatgaaggtcaaccaacaacaacaagggagatggacaatcctaaacaaggtggtctgaatgttgaagatgtggttgctgctgttagtgtcagtgatgaaccaacaagggagatatttaactaatcaaacttacaagacctaatgtagcagatcctcatcctaaatatttgtattttttgttcagcatttctgcagatttgaaggaagcggctgttaagtatctgacaatgaacggattggactctgttgatgttgagttgaaaataatcggtctccctgagccgaaaaggttggcctgttgacaaaattgataaaagtccattgtgattaatgatgtacatggtgataaaattgtttgttagacaaattgataaaagtccattgtgattaatacgatgcacatggtgat

SEQ ID NO: 147372 - DNA, 2974 bp, Zea Mays
ggcagggacgcggatccttcgtggactcgtcttccatcccttctccctccccccgctcgcgcggcaatgaccggtcgcgggtcgccgccccctccgcaacgcacaacttggactcgtcctagtcctcagcctcagctccgccccgccccgccgtatatgcatgcgcctgcctagttcatttcttgtatatataggcgcccccgtccgcgctgggagtaccacggatcaaccaaccaacaacagctaggtgaacctgaacccccaaaggaaccgcagcgctgcccattaatcttcctgcgatcaactgctgtctctctctagaacgatcggctctccagcgacggcgcagggagggagccgcgagatgactctgaggctgctcaacacagagcacaaccacctgctgcacccgaggccgcagagcccgcgggatgccgccgccttgtcgtcgctgctgaggtcacccagggtgtcctgctccggccagcagagccccaagcccaagagcgccaagatggcgcacggcggcctggagcgctcgctcagcttcaggaactgggaggcggccagccggggcggcggcggcatcaacggcgcgcgcccggggaccctcgcgctgcagcagcagagcccacggcgggtggtgtccgtgtccccgcacccgcacccgcacccgcaggcgcaggccatgatcgagtacatctcccctcgcccccgcgtggagctcgaccaggcggccaccacgctgcagaaggcctacaagggcctccgcacgcgccgcagcctcgccgacggcgccatcgtcgccgaggagctctggtggaagacggtcgactcggtctacctcaacatcaagtccatctccttcttccacgaggacaggcaggagaccgccgcgtcccgctggtccagggccggcaagagggtcgccaaggtcggcaagggactctgcaaggacgacaaggcgcagaagctcgcgctccagcactggctcgaagccaacgagagggcggcgtacgaagtcgtcgtggaggaaggccggctgctgtacaagcaaagcggcgatctggtgaacacgaacgaggagtccaagtggatcttcgtgctgagcaccagcaggtcgctgtacgtcgggcagaagcgcaagggcaagttccagcactcgagcttcctgtccggggcagccacctcggccgccggcaggctggtcgccaaggacggcgtcctcaaggcgatatggccctacagcggccactacctcccgaccgaggagaacttcagggagttcatcgccttcctggaggacaacaacgtggatctcgccaacgtcaagcgatgctcggtggacgacgacgagtacccgtcgttcaagaagcaggcggcggagggcccagaagagccgcaggcagcaggggaggccccagccccagtggccaccgaagaagctgctgaggaggccgtggagctgcccgcggtcgacgtcgtgaaggcggaggacacggccacggacaccgtcgagccgtcgaagatgacgatgatggccagccggccgtcgttcaagtggtcgacgcccacgggcgcgcgcatcggctgcctccagaactacccggccgacgtccagagcatggctctggagcaggtgaacctgtcgccgaggcttgcggcagcggcgccgtccccgcggctgcccatcccgtcgccgcgccccagccccaagatcaggctgtcgcccagcctgcactacatgggctgccccaccccgacgggcagacgctcttcccccaagcagcagcagttcatgggcttctacacggcgccgcccgtggcgctcaccctccccaagcacaaggtcaagtgatctgctcattgacacgacacctccgcagccacagcgccgttttccaaggtgctcgtgctactgcgttgcgttgcgccgttctttccttagcaccagggagggagggagggaagggttaacaatattgttggttggtttgttgcttcgttgtagacaaacatcgtttcggttgcgttctctgatcgggtagcattcttttgtacgtttcttccatcatcgccttttgacctgaggtgcatgcgctccgcctgcacaataaactacaggcctttgcatcctgggtagcctgaatctgcagtttctcggacaaatgtagtactgactgcaggatccttgttgaataaaagaatttgttagcaatacgagcactgccacgagatttcgtgccttcattttcaactacaaatctttgagcagctggatgcttgcattgtcacatctgagttttgtgcataaagatggaagtacagtactcctaaactcctgtaaggcaaaggtgatcaaatgtcagatcttgtcatcaaatgccagaaagggtcaaaggcgcgaaatctcggagaaaggtcagtttccagtatagaacaatggagatctgcaggaaaaggggtcaggaggagtcgaaaccgccgcccggattcgtgtttctgactttttttcgttctcttcggccgacgtgtttcggactatttttttcgcatcttggatatggaattctggtttgttctgtacagcttgcgttttaattttgacttgggagaggccaccagtccaccttctgaaccagagctaggggagctaatcgattgctatatgcctgtttagattgtaagggctaattattagtcactaaactttagcctgtaaattgttagcttatctatcgactaacaattagtccacaaatctttgctaaagtgggctaattttttatggagccgatggaaagaaatttgtgcccccgtcttcaccgtcaaatatagagtttgacttttgtgaaagtgcaatgccacatgtagaatttgacctgtatgatcgtgatggaaactacacaccaatttcggttgagtgttcatctcaaccaatagtgaccacagagatgaaaatgaagacatggac

SEQ ID NO: 147373 - DNA, 1614 bp, Zea Mays
taggtgaacctgaacccccaaaggaaccgcagcgctgcccattaatcttcctgcgatcaactgctgtctctctctagaacgatcggctctccagcgacggcgcagggagggagccgcgagatgactctgaggctgctcaacacagagcacaaccacctgctgcacccgaggccgcagagcccgcgggatgccgccgccttgtcgtcgctgctgaggtcacccagggtgtcctgctccggccagcagagccccaagcccaagagcgccaagatggcgcacggcggcctggagcgctcgctcagcttcaggaactgggaggcggccagccggggcggcggcggcatcaacggcgcgcgcccggggaccctcgcgctgcagcagcagagcccacggcgggtggtgtccgtgtccccgcacccgcacccgcacccgcaggcgcaggccatgatcgagtacatctcccctcgcccccgcgtggagctcgaccaggcggccaccacgctgcagaaggcctacaagggcctccgcacgcgccgcagcctcgccgacggcgccatcgtcgccgaggagctctggtggaagacggtcgactcggtctacctcaacatcaagtccatctccttcttccacgaggacaggcaggagaccgccgcgtcccgctggtccagggccggcaagagggtcgccaaggtcggcaagggactctgcaaggacgacaaggcgcagaagctcgcgctccagcactggctcgaagccaacgagagggcggcgtacgaagtcgtcgtggaggaaggccggctgctgtacaagcaaagcggcgatctggtgaacacgaacgaggagtccaagtggatcttcgtgctgagcaccagcaggtcgctgtacgtcgggcagaagcgcaagggcaagttccagcactcgagcttcctgtccggggcagccacctcggccgccggcaggctggtcgccaaggacggcgtcctcaaggcgatatggccctacagcggccactacctcccgaccgaggagaacttcagggagttcatcgccttcctggaggacaacaacgtggatctcgccaacgtcaagcgatgctcggtggacgacgacgagtacccgtcgttcaagaagcaggcggcggagggcccagaagagccgcaggcagcaggggaggccccagccccagtggccaccgaagaagctgctgaggaggccgtggagctgcccgcggtcgacgtcgtgaaggcggaggacacggccacggacaccgtcgagccgtcgaagatgacgatgatggccagccggccgtcgttcaagtggtcgacgcccacgggcgcgcgcatcggctgcctccagaactacccggccgacgtccagagcatggctctggagcaggtgaacctgtcgccgaggcttgcggcagcggcgccgtccccgcggctgcccatcccgtcgccgcgccccagccccaagatcaggctgtcgcccagcctgcactacatgggctgccccaccccgacgggcagacgctcttcccccaagcagcagcagttcatgggcttctacacggcgccgcccgtggcgctcaccctccccaagcacaaggtcaagtga

SEQ ID NO: 147374 - DNA, 1191 bp, Zea Mays
ttctcttccttttcccttgctctctccagcccctgctgctcctgccgggcgctgcctgccgccgctgaccgcccccgctctctctctctctctctctctctctctctctctctctctcgtcccccaatcaccccaattgccgggtgctcctcttcctgtcacccccatgttgactgctgcccgccaggccgccagagagggaggattaggaaaggggggaaagagagacggacggcttctcgggagtgggtaagactcacatgatgcaattacctccatctttccctcttctccttttgcgggcatactcttctcctccgcctggctagatccttctttcctcgtcccggattagctcccaatctcgccaatggtccaggttgctggccgtggaacatttcttcagttgggcccactctctggtaaggcaaggcaaccagcccacagcacactacttctaagttctaattagggatatgttgttctctctcgcggctgattcatcgttttctgggtcgtctcttttgtctacctggtttcagtgccggttccatcgggttttgacgcaagagtagaggacttggtaggtcgttgtgttgtgactcattgttggagagcaggaccgatttcagattgaggacaatttcagccaattttgcaggaacccgtaaaacccatccggagaattttccctgcgcgtcccatgattaggagctgcggctggacagtgccctacgctctggagttttagtgcgaatcgttgccagtttcagtcaacttttgatggagcccaggtgttgagcgccaatttgggagttccagctgacgctgcagtctgcattcttctaaggccatcagtgaggaattttcgttccttggtggcagatgggttcctccagctctaaagtggacaatgaggagcccgtgaggcgctccaaggacaggaggcggctcatgaagcagctggtgcgccgccgcccagagcttgcagctgcgcacattgcatacctgcacgccctccgcaacacaggagccactctccggcaatttgtggagctggagtctgctttgtcacagcagcctccggtaggccttgcggcgccgccctcgcctactccacagtcgctgccgcagccgcagcccccgccacctcctgaaccctcactgccaccctcgccacaccccccgccg

SEQ ID NO: 147375 - DNA, 652 bp, Zea Mays
cttttgtctacctggtttcagtgccggttccatcgggttttgacgcaagagtagaggacttggaacccgtaaaacccatccggagaattttccctgcgcgtcccatgattaggagctgcggctggacagtgccctacgctctggagttttagtgcgaatcgttgccagtttcagtcaacttttgatggagcccaggtgttgagcgccaatttgggagttccagctgacgctgcagtctgcattcttctaaggccatcagtgaggaattttcgttccttggtggcagatgggttcctccagctctaaagtggacaatgaggagcccgtgaggcgctccaaggacaggaggcggctcatgaagcagctggtgcgccgccgcccagagcttgcagctgcgcacattgcatacctgcacgccctccgcaacacaggagccactctccggcaatttgtggagctggagtctgctttgtcacagcagcctccggtaggccttgcggcgccgccctcgcctactccacagtcgctgccgcagccgcagcccccgccacctcctgaaccctcactgccaccctcgccacaccccccgccgcctctgccttttagtccagtaaccaccataagaaagatggagaagagggatggtgaattc

SEQ ID NO: 147376 - DNA, 827 bp, Zea Mays
aacccaaatcaaatttccccaaacggaggaaagaaacggaagccgaaaagaaaagcgtgctcttttttcatccttcgtgcgtggtgcgcgagcgtgcgcctcccttaccatctcgcgatcccaattcgatccgctcgccagctctccccatcagacctgccctccccggccgggcgattcgccgccgctactcgaattcgcgtggacccgtcatccattctcgctccccggcgccccaaaccctagatccgctgctgttcttcccaccgccgccgccatgttctggcgcatgaccggcctctccgcggcctcgccccttacgtgacaaggctcaggtggaacagttgcttcgttatgttgtggaagaagttccagatgatgctgaaaggaagcgatctttcaagttcccatttattgcttctgaaatatttacttgcgaaatcgatgtcattttgaggaccctagtagaggatgaagagctaatggatttgcttttctcatttgtgaaacctgatcatccgcatagtacattattgtctggttacttcagtaaggtggtaatatgtttggtgctgcggaagactgctccacttatgagttatgttcaggggcatccagagatagttgtccagcttgttgacctgattggcatcacatcgataatggaggtgctgatacgactgattggtgctgatgagaccatatattcaaactatggtgatacgttgcagtggttagaaaatacaaatgtacttgaaatgattgcagataagtttaactcgtcggtaagtacaaaaaaaaccctaatgtgcaggaatatatttagg

SEQ ID NO: 147377 - DNA, 1288 bp, Zea Mays
aacccaaatcaaatttccccaaacggaggaaagaaacggaagccgaaaagaaaagcgtgctcttttttcatccttcgtgcgtggtgcgcgagcgtgcgcctcccttaccatctcgcgatcccaattcgatccgctcgccagctctccccatcagacctgccctccccggccgggcgattcgccgccgctactcgaattcgcgtggacccgtcatccattctcgctccccggcgccccaaaccctagatccgctgctgttcttcccaccgccgccgccatgttctggcgcatgaccggcctctccgcggcctcgcccgtggatacaattcttgacaaagaaaattttacattggaagaacttcttgacgaggatgaaattattcaggagtgcaaagcacttaactcacgactcataaacttcttacgtgacaaggctcaggtggaacagttgcttcgttatgttgtggaagaagttccagatgatgctgaaaggaagcgatctttcaagttcccatttattgcttctgaaatatttacttgcgaaatcgatgtcattttgaggaccctagtagaggatgaagagctaatggatttgcttttctcatttgtgaaacctgatcatccgcatagtacattattgtctggttacttcagtaaggtggtaatatgtttggtgctgcggaagactgctccacttatgagttatgttcaggggcatccagagatagttgtccagcttgttgacctgattggcatcacatcgataatggaggtgctgatacgactgattggtgctgatgagaccatatattcaaactatggtgatacgttgcagtggttagaaaatacaaatgtacttgaaatgattgcagataagtttaactcgtcggattctcctgaagtgcatgccaatgctgcggaaattctatgtgcagttactcggtgtgcgcctccatctcttgctgcaaagatatgcagtccaagttttgttcggaggttgttccatcacgctcttgaagaatcaagacccaaatctgttctgcttcattcactgtcagtgtgcatatctttgctggatccaaaaagactagcatcagcttcgtatcaagcattcaaaagcaacttaagtcatggggcattggtcatggccagtccagagacagttgatggtatgcttgagagtctaggcaacttgctgaatttattggacacatcggctgctgaaagtgtgttgccaacaacttatggatgtttgcgcccacctcttggaaaacatcgtctgaaggta

SEQ ID NO: 147378 - DNA, 622 bp, Zea Mays
agtggcttcaatacggatatcaagtgcgattacgtgactaacaacattgctgaggttttcaacaattggattaaggattggaaggatatgcctgtatgtgatttggctgataggataagggaggaaattatggagatgtttcataggaggaggaggattgcacaaaagttgcaaggaaggatttttaccgtcggttgtgcatatcctacatgccagaacaagaggtttaggtcatttatcagtacgtaaagctgacaactacattgtagaggtcagggacaacaatgatgtgcattcgaagcacattgtcaatgctcagctacgggaatgtttttgcaaagagtggcagcacacgggcaaaccatgtatccatgcattgtgtttgataatagcacaagaatttagggatgtcaggatggaggattttgtcaatgactactattctgtagctcatttcaccaccgcatactcaagggtgattccacttgtgggtgacaaatcattttggccagaagttcctttcgcaaaagaagtgggtgctccaattggaaaacgagctgtgggtcgacagaggaaaataggatgaaaggatgccttgagggaggtagtggaaaaaagaaag

SEQ ID NO: 147379 - DNA, 1553 bp, Zea Mays
cacaagggctgagcccaacgcatccgaaccaccgacccaacccaaccttcacccagcggcgctgcccctgtcgtcgtcttcccgcacgcttccgagcgccgccctccccttctttccccatcgcctcccttccaccccctctcatctccgtctcccgcgccgacgacttaagtagggtttggccttagggttcaggcaagatgggtgagcgcaaagtgctgaacaagtattacccgccggacttcgacccgtcgaagatcccgcggcggcggcagcccaagaaccagcagatcaaggtgcgcatgatgctccccatgagcatccagtgcggtacctgcgggacatacatatacaagggcactaagttcaactccagaaaggaggacgtcgtcggagagacatacttgggaatacaaatatttaggttttacttcaaatgcactaaatgctctgctgagatcacattcaaaacggaccctcagaattctgactacacagtggaatcgggggctagtcgcaattttgaaccatggcgtgcacaggacgaggcagcagacaaagaaaagattaaacgagatgctgaggagatgggtgatgcaatgaaagcgttggaaaatagagcaatggattcaaagcaggatatggacatccttgcagctttggaagagatgcggtccatgaagtctagacatgctggtgtctctgttgaccagatgcttgaaattttgaagcgttcagcacacgagaaggaggaaaaagcaattgcagagcttgatgaagaagatgaggaacttataaaatcaatcactttccgaaactctggattctatgtaaagcggatagaagatgacgacgacgatgatgatgaggatttggctcctggccaatcaagtagaacaataaagatcaatgaatcttctgaatctgtgactaagccaacagatgttttaagcaaaaataacggatcagaggttgccaataaagaagggagcaagagctggatgcccaaatttattgtgaaaccgaagtctgcaagcgcagattctcataagagacagaagattgaatccacggctgtccaagacaccgggaaaggccaagatgatgaacaaaaaagtgaacctgcgaagcaaaccaatgttctccagtccctctgccagaactacgatagtgatgatagtgaatgaatgaggacaccgccctcttgaagccataacagtcctggttgccaatgctgtattataccagaggatgttaacacatgtagttccccaaaccactggcattgtgccatcatggcacatgatatttatcacaaatctctgattgtcaatgggccaactacaagtattggctcttacaaatatgggctatccagatagagctgcgttattggataaaatgatagttgcagaaagtcagatctgcggtttgtacatcaaacagccatacacaagcttgtttatgcagcatcactgaattaatcattgtttgtttgaagtgtgtgatatttacttgcttttgcttgtgaaaattcaatgaaatgtcaaaat

SEQ ID NO: 147380 - DNA, 1916 bp, Zea Mays
tcgaccgtgaactggcccgagtgaagtccacgcatccgtctcttcccgctccggcccattgcccattccgttcacaaattcacttctctctctctccgtcgagatgcttcgtggctccgccgccctcctccgccgcctcgcccctcgtatctcgggcggtggctgcggaaacacgactcaccggcgccttcttcctcccatcgcccccttcctccgcgcccgcttcttgtctgccccgactacctcttcaccgccttcttcgtcttcagctgcctgccacgaggaggatgcggaggacagagacctccccgagatctccaatggtgatgcaggtgcccggctcagcatctccgtcgaccgctccgggctctacaaccccacaggtgttgttgtgtcaaaatgcggcagagcactcgcacgagccgtcgtcggaatccgagctcgtcaagcacatcaagagcatcataaagtttcggagtgggccaatcagcatagctgaatacatggaggaggtgctgacgaacccacagtcaggattctacatcaaccgtgacgtgtttggggaatcaggggatttcatcacctcgccagaggtcagccagatgtttggagagatgattggtgtatgggcaatgtgcctctgggagcaaatgggaaagccagcgaaggtgaatctgattgagcttggcccaggacgaggaacactcttggctgatttacttaggggatcggccaagtttgctaacttcaccaaggcactgagcattaacttagttgagtgcagccctacattgcaaaaaatccagtataatactctgaaatgtgaagatgaacatgttggtgatggcaagagaacagttagcaagatttgtggagcccctgtttgttggcatgcctccctcgaacaggttccctcaggatcaccaaccataatcattgcacatgaattctatgatgccttaccaatccatcagtttcagaaagcatcacgtggatggtgcgaaaagatggtggatattgcagaagattctttgtaagctttacaggctatgtttatgtaattgtaaccgtaaggaaacgtgtaatgcttactttgcagcaggtttcggtttgttttgtctccccatcccacagcctctttaatctacctcgccaagcgttgtggttgggctagctccgaggagcttgagaagattgagcacattgaagtctgccccaaagcaatggagcttaccgaacaaattgcagatagaattagttcggacggcggaggcgctcttattattgactatggaaaaaatggaatagtgtccgatagtctccaggccatccgcaaacacaagtttgtggacatattagacgatcctggctccgctgatttgagtgcctacgttgattttgcttcgatcaagcgctccgccgaggaagcttcagacgatatctcggtccatgggccaatgacgcagtcccagttcctgggttctctcggcatcaacttcagggtagaagctctcctgcagaactgcaccgaggagcaggcggaatcattgcggacgggctactggcgactggttggagacggggaagccccgttctgggaaggccccgaggaccaggcggcacctgttggaatgggcaccaggtacttggccatggccattgtcaacaagaagcagggcacgcccattccgttcgagtgagggtccggctcgggcatagctttccccgttctgttggaatgtagcagcgttgtcgaggggttttgatgatcagatcagccaattcttctctgctttttctcatgtacacgcaaaacatggtctcgttattttgtgacggacggaaggagggtacctactcgactgaaacagctcataattgtgtcctatgccattacaatcgcaatgttcctctcc

SEQ ID NO: 147381 - DNA, 1822 bp, Zea Mays
tcgaccgtgaactggcccgagtgaagtccacgcatccgtctcttcccgctccggcccattgcccattccgttcacaaattcacttctctctctctccgtcgagatgcttcgtggctccgccgccctcctccgccgcctcgcccctcgtatctcgggcggtggctgcggaaacacgactcaccggcgccttcttcctcccatcgcccccttcctccgcgcccgcttcttgtctgccccgactacctcttcaccgccttcttcgtcttcagctgcctgccacgaggaggatgcggaggacagagacctccccgagatctccaatggtgatgcaggtgcccggctcagcatctccgtcgaccgctccgggctctacaaccccacagagcactcgcacgagccgtcgtcggaatccgagctcgtcaagcacatcaagagcatcataaagtttcggagtgggccaatcagcatagctgaatacatggaggaggtgctgacgaacccacagtcaggattctacatcaaccgtgacgtgtttggggaatcaggggatttcatcacctcgccagaggtcagccagatgtttggagagatgattggtgtatgggcaatgtgcctctgggagcaaatgggaaagccagcgaaggtgaatctgattgagcttggcccaggacgaggaacactcttggctgatttacttaggggatcggccaagtttgctaacttcaccaaggcactgagcattaacttagttgagtgcagccctacattgcaaaaaatccagtataatactctgaaatgtgaagatgaacatgttggtgatggcaagagaacagttagcaagatttgtggagcccctgtttgttggcatgcctccctcgaacaggttccctcaggatcaccaaccataatcattgcacatgaattctatgatgccttaccaatccatcagtttcagaaagcatcacgtggatggtgcgaaaagatggtggatattgcagaagattctttgtttcggtttgttttgtctccccatcccacagcctctttaatctacctcgccaagcgttgtggttgggctagctccgaggagcttgagaagattgagcacattgaagtctgccccaaagcaatggagcttaccgaacaaattgcagatagaattagttcggacggcggaggcgctcttattattgactatggaaaaaatggaatagtgtccgatagtctccaggccatccgcaaacacaagtttgtggacatattagacgatcctggctccgctgatttgagtgcctacgttgattttgcttcgatcaagcgctccgccgaggaagcttcagacgatatctcggtccatgggccaatgacgcagtcccagttcctgggttctctcggcatcaacttcagggtagaagctctcctgcagaactgcaccgaggagcaggcggaatcattgcggacgggctactggcgactggttggagacggggaagccccgttctgggaaggccccgaggaccaggcggcacctgttggaatgggcaccaggtacttggccatggccattgtcaacaagaagcagggcacgcccattccgttcgagtgagggtccggctcgggcatagctttccccgttctgttggaatgtagcagcgttgtcgaggggttttgatgatcagatcagccaattcttctctgctttttctcatgtacacgcaaaacatggtctcgttattttgtgacggacggaaggagggtacctactcgactgaaacagctcataattgtgtcctatgccattacaatcgcaatgttcctctcc

SEQ ID NO: 147382 - DNA, 764 bp, Zea Mays
aaaagcagtactttttttagactggaaagagtagtagcgaaatccaaggtcctgaacttatgcattgtttagcacacagagagctaacctcacggagttttttggttgacatatctttcatgataccggatgaatggtctgggaactaagcaaactataatgaataaatacaggccatccgcaaacacaagtttgtggacatattagacgatcctggctccgctgatttgagtgcctacgttgattttgcttcgatcaagcgctccgccgaggaagcttcagacgatatctcggtccatgggccaatgacgcagtcccagttcctgggttctctcggcatcaacttcagggtagaagctctcctgcagaactgcaccgaggagcaggcggaatcattgcggacgggctactggcgactggttggagacggggaagccccgttctgggaaggccccgaggaccaggcggcacctgttggaatgggcaccaggtacttggccatggccattgtcaacaagaagcagggcacgcccattccgttcgagtgagggtccggctcgggcatagctttccccgttctgttggaatgtagcagcgttgtcgaggggttttgatgatcagatcagccaattcttctctgctttttctcatgtacacgcaaaacatggtctcgttattttgtgacggacggaaggagggtacctactcgactgaaacagctcataattgtgtcctatgccattacaatcgcaatgttcctctcc

SEQ ID NO: 147383 - DNA, 375 bp, Zea Mays
atggcgacgacgaaagcgcgaccaccatccgggagcaagtgcgcggggggagggcgggaggtgtcggatcgggctgcaggggctcgccgtggtgccgacgaagaagatggtgccacccccactgcatctccagcggagggggaggcaggtggggggatccgcggcatccgtttgcgcgttgatggcggggagcagagggggaggagggtggggacggcggcttgtcatggaggaggtccggatcttgaagcgcggcgaggaaccgcccgctccagctccctcgccagccccgacgctggtgatagcatccccctgtggcgcaagccgtggcagttgaccagcgcgccatctgctccactggtagagagtgggtag

SEQ ID NO: 147384 - DNA, 1804 bp, Zea Mays
ggcaattaatcccctcgccttcgtaaccgccagtcctccgccacctctccacccaacaacaaaacaagcctaatgggtaatggcttcctcagttcctctccatctcacgccactgcgctgccctagaaccttcgccgccgcccctctttaggattaccgtgtcctcgatcgccccctggcacgcccgccccgatcgccccctggcacgcccgccccggatcctgcaccggaattccgtgtggaattccggacccgatcgaaatcgaaccgcctccctgcgtgctcccctgatcaagaaattctcacgccgcgcgaacgcacgcctgaggcggttggatcctctggtggggttccttggtctcgatttgctgtggatgggggcgccgaagcagcgctggacgccggaggaagaggccgctctcaaggccggcgtcgccaagcacgggcccggcaagtggcgcaccatcctccgggactcggacttcagcgcgctcctgcgcctccgctccaatgttgacctcaaggacaagtggcgcaacttgagtgtcaccgcaggaggttatgggtctagagagaaggcaaggatggcgttgaagaaaggtagacgtgtggtgcctaagcttactgctgagccaatggatgtagatgtgaaggatatggacgatgctcatgacacagccattgatgtggaaccgttagcaatggctttcgagtccttgccaactgaggaaagtccagataagtcagttgctaggctcgatgatctcatattagaagctataaggaagcttaaggagccttctgggcccagtaaggcagccattgctgcatacattgaggaccaatactggccacctgctgattttcagcgcctgctatctacaaaactgaaggcattggttaattccggaaaattaatcaaggtaaaccaaaagtacagaattgcaccaagtccacccccctcgggcagaataggcactaaggtatcctctgctgaagggatgaaggcagaaaataataatgctaaacgtctaactaagcatcaagtgattgctgagctggagaagatgaaaggcatgaccaaggaagaggcagctgcctttgctgccaaggcagttgctgaggcagaagtagcaatagcagaagctgaggaagcagcaagagttgcagaggctgcagaaaatgatgctgaagctgcaaaggcttttcttgatgctgtcactttatcaatgagaaacaggaatgctgcttccatgatgcttcgagcttgctgatcctttacccatgcggtcatatggttttggccagcagcacaccggtgtttctgctgcaaagattttctggatatatgagtttcttgtatagccttatttatagatcacgacgcatcaactggaggggttttcaacatcttgctgttggtcctttgtcgttgcagcctttagacaatcgacaatatgataacaagaattatcgtgaaagtagtcttcatttatttttgttttcttcccattgtgttgctttgtaattaaactctagccttttcgtttagttagttgaaatggtgtcgtctagtagaactgtagtgaaaagaaaatgaagaaaatgttagatagccaccttagttattcaatttgctgtgatagtatgtttctagatatgattagctaatgacagcgtttaagattacattcctgctgtttcgtttttttctatagagattacctcttttaagaaaagcatgtaagatttacaaattcggctcgggacaccaacaaaagtacaaaaaagttcagcacaaatg

SEQ ID NO: 147385 - DNA, 328 bp, Zea Mays
atgattctcagctcacctttttcttttaaaatcagtagttggcacaaccactctatagcacaactcaaagcacagaagcagacgcctaagaaacacaacacccgccggtaccagcgcagtgtgttgccgaccggtgacacaatgacacaagacattatggtgtcggctaccacctccttggacatcttcaggaacgggtccatgttgtggtggtaccagccattttgcctcactcctatggatgttactctccagggcaggtgagttcatctttaactcacagcttgctgctcatcgtcggaccagtagccatcacgtcgcgcatggc

SEQ ID NO: 147386 - DNA, 327 bp, Zea Mays
atgggggaggggcgtggcggtggcggtggccgcggagttggtgaggcgggcgtggaggtagacagtcttgtccctggcgtgggtgaggagcgcggtggtggaggagcggattgcggatctgccgcagtggggaggcgattgacagcggctctggtgtggtgggagcgcggtgggggaggagcggattgcggatctgccgcggtggggaggcgattgagagcggctgtggcgtggtgggagcgcatccgtgcgatgaggagcggagggacaggattgtgcggcagaacatggtgcactattgtgaacgtctacgttgaaggtttatag

SEQ ID NO: 147387 - DNA, 1532 bp, Zea Mays
gtgaaatactactgctaggaaatcgggacatgatgattgtttgttttctaagctcgttcgccctctctcttctctccgtccaacgacggcgcgattcagatccaggcatacaggccatccttccgccgccgcggactgcacctaatcttccttctccagcagccgggcgttcccgtcgtcctcgatcgtcccctggactggatcgcaacggagatccagctggacctgcggtggtcccttccttttctcgatagcataatgagctcgccagtggagaggtgattcgtcaggctggtatcaagttcctagtccatggtgcctggatgagcagtagagatgctactggccgtggaaggaggagggttcttctcgtcttcagctacaggttacagccatggcctcgccctcttgctgctcggacgcaaagctgaggagaagcccgtaaaggtctcgccgtggaaccagtaccggctagtcgaccgggagaccgagcaggtgtaccacctgccctccgccaaggaccaggctcctgggaaatgtgctccctttgtctgcttcggatgcacggctaatggcctcgaggtggcgtctcctccaaaagcgacctccagcaatgcgcttggtaccggtacctcacaggaagaagcatcttgttcagcaaacaagacgttgaccactagtggttccatcagtggcagtgagagacgaggctgtcttaagagcaactccaaaagggattctttggagcaccgtatagtggtgagcgagggtgaagaaccgcgtgagtctttggaagaggtgcaaaccctgagatctagcatggaacggaggaaagttcagtggacagatacatgtggaaaggatctttttgagataagggagtttgaaacaaggtaaccatcttgtgaggtaacttatcttcaagttttcaagtaacaaagataccacaaagttcgagccatcttaatgagtagtctccaaccaaaagcgacgagagtctgtcagatgatgacccagaaaatgaaggtttccggaaatgtgagtgtgtgattcagtagatttcttgtgtgcacaacaagcctgacaggaacatctcctcatgggaagcccatgtcctgctgagaaggacatgccatatgttcttctgggaaggatatgccacacccagtgatttcattgcaactggaacgatcgatgacagtcgaaacaaagcaaacggtgatgaatcgatattgtgctagattatttgttggttctacgcttaactagtctgctcggcagggttatagtttcgatgcccacctgtacaataccaagatcccattcctttctttttgttgtcatgttttgtttctctgactttccatcacctttttcacgcccgctgtaccatatgaggctgccctgttacttctgccatggatggtggatccctgacttcatgctgttcccttttgttttgcccctaacgtgttgagtgatgtcttgttgacattttcgtccaaattggtaaaattcattcttcgttgcgt

SEQ ID NO: 147388 - DNA, 1437 bp, Zea Mays
gtgaaatactactgctaggaaatcgggacatgatgattgtttgttttctaagctcgttcgccctctctcttctctccgtccaacgacggcgcgattcagatccaggcatacaggccatccttccgccgccgcggactgcacctaatcttccttctccagcagccgggcgttcccgtcgtcctcgatcgtcccctggactggatcgcaacggagatccagctggacctgcggtggtcccttccttttctcgatagcataatgagctcgccagtggagaggtgattcgtcaggctggtatcaagttcctagtccatggtgcctggatgagcagtagagatgctactggccgtggaaggaggagggttcttctcgtcttcagctacaggttacagccatggcctcgccctcttgctgctcggacgcaaagctgaggagaagcccgtaaaggtctcgccgtggaaccagtaccggctagtcgaccgggagaccgagcaggtgtaccacctgccctccgccaaggaccaggctcctgggaaatgtgctccctttgtctgcttcggatgcacggctaatggcctcgaggtggcgtctcctccaaaagcgacctccagcaatgcgcttggtaccggtacctcacaggaagaagcatcttgttcagcaaacaagacgttgaccactagtggttccatcagtggcagtgagagacgaggctgtcttaagagcaactccaaaagggattctttggagcaccgtatagtggtgagcgagggtgaagaaccgcgtgagtctttggaagaggtgcaaaccctgagatctagcatggaacggaggaaagttcagtggacagatacatgtggaaaggatctttttgagataagggagtttgaaacaagcgacgagagtctgtcagatgatgacccagaaaatgaaggtttccggaaatgtgagtgtgtgattcagtagatttcttgtgtgcacaacaagcctgacaggaacatctcctcatgggaagcccatgtcctgctgagaaggacatgccatatgttcttctgggaaggatatgccacacccagtgatttcattgcaactggaacgatcgatgacagtcgaaacaaagcaaacggtgatgaatcgatattgtgctagattatttgttggttctacgcttaactagtctgctcggcagggttatagtttcgatgcccacctgtacaataccaagatcccattcctttctttttgttgtcatgttttgtttctctgactttccatcacctttttcacgcccgctgtaccatatgaggctgccctgttacttctgccatggatggtggatccctgacttcatgctgttcccttttgttttgcccctaacgtgttgagtgatgtcttgttgacattttcgtccaaattggtaaaattcattcttcgttgcgt

SEQ ID NO: 147389 - DNA, 1433 bp, Zea Mays
gtgaaatactactgctaggaaatcgggacatgatgattgtttgttttctaagctcgttcgccctctctcttctctccgtccaacgacggcgcgattcagatccaggcatacaggccatccttccgccgccgcggactgcacctaatcttccttctccagcagccgggcgttcccgtcgtcctcgatcgtcccctggactggatcgcaacggagatccagctggacctgcggtggtcccttccttttctcgcataatgagctcgccagtggagaggtgattcgtcaggctggtatcaagttcctagtccatggtgcctggatgagcagtagagatgctactggccgtggaaggaggagggttcttctcgtcttcagctacaggttacagccatggcctcgccctcttgctgctcggacgcaaagctgaggagaagcccgtaaaggtctcgccgtggaaccagtaccggctagtcgaccgggagaccgagcaggtgtaccacctgccctccgccaaggaccaggctcctgggaaatgtgctccctttgtctgcttcggatgcacggctaatggcctcgaggtggcgtctcctccaaaagcgacctccagcaatgcgcttggtaccggtacctcacaggaagaagcatcttgttcagcaaacaagacgttgaccactagtggttccatcagtggcagtgagagacgaggctgtcttaagagcaactccaaaagggattctttggagcaccgtatagtggtgagcgagggtgaagaaccgcgtgagtctttggaagaggtgcaaaccctgagatctagcatggaacggaggaaagttcagtggacagatacatgtggaaaggatctttttgagataagggagtttgaaacaagcgacgagagtctgtcagatgatgacccagaaaatgaaggtttccggaaatgtgagtgtgtgattcagtagatttcttgtgtgcacaacaagcctgacaggaacatctcctcatgggaagcccatgtcctgctgagaaggacatgccatatgttcttctgggaaggatatgccacacccagtgatttcattgcaactggaacgatcgatgacagtcgaaacaaagcaaacggtgatgaatcgatattgtgctagattatttgttggttctacgcttaactagtctgctcggcagggttatagtttcgatgcccacctgtacaataccaagatcccattcctttctttttgttgtcatgttttgtttctctgactttccatcacctttttcacgcccgctgtaccatatgaggctgccctgttacttctgccatggatggtggatccctgacttcatgctgttcccttttgttttgcccctaacgtgttgagtgatgtcttgttgacattttcgtccaaattggtaaaattcattcttcgttgcgt

SEQ ID NO: 147390 - DNA, 585 bp, Zea Mays
gtatactatattctgattgctgccttttggtgtcttggtagcgacgagagtctgtcagatgatgacccagaaaatgaaggtttccggaaatgtgagtgtgtgattcagtagatttcttgtgtgcacaacaagcctgacaggaacatctcctcatgggaagcccatgtcctgctgagaaggacatgccatatgttcttctgggaaggatatgccacacccagtgatttcattgcaactggaacgatcgatgacagtcgaaacaaagcaaacggtgatgaatcgatattgtgctagattatttgttggttctacgcttaactagtctgctcggcagggttatagtttcgatgcccacctgtacaataccaagatcccattcctttctttttgttgtcatgttttgtttctctgactttccatcacctttttcacgcccgctgtaccatatgaggctgccctgttacttctgccatggatggtggatccctgacttcatgctgttcccttttgttttgcccctaacgtgttgagtgatgtcttgttgacattttcgtccaaattggtaaaattcattcttcgttgcgt

SEQ ID NO: 147391 - DNA, 845 bp, Zea Mays
gtgtccaaaccttctccacgcgttccttccttccctccctccctccctcccctcccaagaaacacaagagccaggcagcgcttgcgaggctcaagcgccgcagcaatgtctctggccccgtccatcccttccatcaaggtgaaggtggggcccgtctcggtggcgcccccgcaccgcgcatgccgatccttcgcggtggtcaggagctccaaggcggagggccccatccggagacccgcggcgcccccgctgtcgccaccgccaaagacgccggctttgtccactcctcccaccctgtcgcagcctcccaagcccgctgctccacccacgtcgtcggagtcgacaccaccgtctcctcagccgaaggcggctgtggccacagcccccgcggcagcgctgcagaggccgctggctggggctgtgacgctggagtaccagaggaaggtggccaaggacctgcaagactacttcaagaagaagaagctggacgaggccgaccagggcccattctttgggttcgtgcccaagaatgagatttccaacggaaggtgggccatgtttgggtttgcagtagggatgctaacagagtacgcaacaggctctgattttgttcagcaattgaagatccttctttccaatttcggaattgtggacttggattaataatgccgggcttggtgttttcgttatgcataagtcttttaaatgtaatgtacttaattgatatggcatatagaaaattttatcttgcaccttgtttagcttggtttcgtttgtgctgccctgtttggatacacatgaataccaatttccagtttccttccgttaggtaccttgatttacac

SEQ ID NO: 147392 - DNA, 533 bp, Zea Mays
ccaccccgctcgcgcgctacctcgctcgctgcgccgcgccgcccgctcgacagccccacgccgcctggccgcccgcgctgctcctctcctgagatgggtctgagaaagagaaacgccatggttggtgaggcagccatgttcgccacatcttggtagccctcactcggcattgacatcctctcgttcttggacttgaagttaactcagccatgaggaagcatgggtggcagctgccgtaccaccctctccaggtggttgcgatagccgtgttctcggcactggggttcaccttctcgtcttcttcgtgccgttcgtggggacgaagccgttccagattgtggccatggctatctacactccattgattacatgtgttgttgtgttatacatatggtgtgcggaaacaaatcctggagacccaggcattttcgattcaacgaagaatttgaagtaagataagaatgaaaagcactcctatgtgaattcggatcaggggattaatcatggagaaggccattaagtgagacttttgg

SEQ ID NO: 147393 - DNA, 204 bp, Zea Mays
atgagctcgctgacggcgaggctcgctctgctggcgtacctgctgctcgcgacactgctgcacccctgcctctgccatgccgcggcggcggctccggccgctcgtggtgccggcaactggagaatggatccgaaagcgatcgaccagggggtcgcctacgtcctcatgctcctcgcgctcttcgtcacctacatcgtgcactga

SEQ ID NO: 147394 - DNA, 1746 bp, Zea Mays
acccatcctgctcagtgctcacttccacgcgggccccagcccgccacgagtccccgctcccacctgctcctcgccgccgttagcgcgccccgagccccgacagcctttctccttctagggtttctctctgtttcgtcctcatcgaatcggagtttcgcatggagtcatcgcggtctcggaagcggacgcgccaggcgcatgactgtgccgccgcgccgccaccagagcgagaagtggtagcgaggggtggcgcgtcgccaccatggagggaggatgaccgtgatggacacttcgtattcgaccttggcgagaacttgacccgccgatataaaatcttgagcaaaatgggagaaggtttgggttttctgcaatctgtcgtctcctcttctgctgggtatctccgttattattctaatgaagagggctacgagttggattttcgtaggtacatttgggcgtgttttggaatgctgggaccgtgaaacacatgaatatgttgccataaaagttgttcgcagtatccgcaagtaccgtgatgctgcaatgattgagatagatgtgctcaatcgccttgcagaaaatgaaaagtacagatctctttgtgttcaaattcagagatggtttgactatcgtaatcatatatgcattgtttttgagaagcttgggccaagcttgtatgattttctaaagagaaatagataccaacctttccctgtggaacttgtgcgggagtttggacggcaactgttggaatctgtagcatatatgcatgagttgcggcttatccacactgatctgaagccagaaaacatactacttgtctcttctgagtatataaaagttccaagtacaaagaagaattcgcaaggtgaaatgcatttcaagtgcttgccgaagtccagtgccataaagctgatagattttggcagtaccgcctttgataatcggaaccataactcgattgtttctacgaggcattatagggcacctgaaataatattaggtttaggctggagttttccatgtgatatttggagtgttggctgtattcttgttgagctatgctctggggaagcattgtttcagacacacgagaatctggaacacctagcaatgatggagagggttttgggacctctaccagaggatatgatacggaaagcaagctcttcagctcagaaatattttaggagagcaacacgattaaattggcctgaaggtgctgtttcaagagaaagcatcagagctgtgaggaaactggatcgactaaaggacttggtatcgaggaacgctgaccattcaaaggtggcactggtggacttgctatacggtctcctacggttcgagccatcggaacgcctgacagcagaagaagctctggaccatccattcttcaggaacccaacatgacttgttgagcaggcttgactcatgtaactctactgaaggtggtggtaggaagcaggcagagccgtccccattgcaaagctgaaggcatcttgttcctctataccagagagtttgtgtaaggcctgtcaatggggcttcttgtggtgataaaactgatggctttagtcacccaatgtcatgtacactagcatttttcctagggagcttagttcgccagacggcgcttgtatgttgttaaccgggatacactatgagctgtgccccgatgccctggtgctataatccaatcgcaaatgatgaaatcaagcatagcgtgcgtccgtatagtttatgatt

SEQ ID NO: 147395 - DNA, 1655 bp, Zea Mays
acccatcctgctcagtgctcacttccacgcgggccccagcccgccacgagtccccgctcccacctgctcctcgccgccgttagcgcgccccgagccccgacagcctttctccttctagggtttctctctgtttcgtcctcatcgaatcggagtttcgcatggagtcatcgcggtctcggaagcggacgcgccaggcgcatgactgtgccgccgcgccgccaccagagcgagaagtggtagcgaggggtggcgcgtcgccaccatggagggaggatgaccgtgatggacacttcgtattcgaccttggcgagaacttgacccgccgatataaaatcttgagcaaaatgggagaaggtacatttgggcgtgttttggaatgctgggaccgtgaaacacatgaatatgttgccataaaagttgttcgcagtatccgcaagtaccgtgatgctgcaatgattgagatagatgtgctcaatcgccttgcagaaaatgaaaagtacagatctctttgtgttcaaattcagagatggtttgactatcgtaatcatatatgcattgtttttgagaagcttgggccaagcttgtatgattttctaaagagaaatagataccaacctttccctgtggaacttgtgcgggagtttggacggcaactgttggaatctgtagcatatatgcatgagttgcggcttatccacactgatctgaagccagaaaacatactacttgtctcttctgagtatataaaagttccaagtacaaagaagaattcgcaaggtgaaatgcatttcaagtgcttgccgaagtccagtgccataaagctgatagattttggcagtaccgcctttgataatcggaaccataactcgattgtttctacgaggcattatagggcacctgaaataatattaggtttaggctggagttttccatgtgatatttggagtgttggctgtattcttgttgagctatgctctggggaagcattgtttcagacacacgagaatctggaacacctagcaatgatggagagggttttgggacctctaccagaggatatgatacggaaagcaagctcttcagctcagaaatattttaggagagcaacacgattaaattggcctgaaggtgctgtttcaagagaaagcatcagagctgtgaggaaactggatcgactaaaggacttggtatcgaggaacgctgaccattcaaaggtggcactggtggacttgctatacggtctcctacggttcgagccatcggaacgcctgacagcagaagaagctctggaccatccattcttcaggaacccaacatgacttgttgagcaggcttgactcatgtaactctactgaaggtggtggtaggaagcaggcagagccgtccccattgcaaagctgaaggcatcttgttcctctataccagagagtttgtgtaaggcctgtcaatggggcttcttgtggtgataaaactgatggctttagtcacccaatgtcatgtacactagcatttttcctagggagcttagttcgccagacggcgcttgtatgttgttaaccgggatacactatgagctgtgccccgatgccctggtgctataatccaatcgcaaatgatgaaatcaagcatagcgtgcgtccgtatagtttatgatt

SEQ ID NO: 147396 - DNA, 1711 bp, Zea Mays
acccatcctgctcagtgctcacttccacgcgggccccagcccgccacgagtccccgctcccacctgctcctcgccgccgttagcgcgccccgagccccgacagcctttctccttctagggtttctctctgtttcgtcctcatcgaatcggagtttcgcatggagtcatcgcggtctcggaagcggacgcgccaggcgcatgactgtgccgccgcgccgccaccagagcgagaagtggtagcgaggggtggcgcgtcgccaccatggagggaggatgaccgtgatggacacttcgtattcgaccttggcgagaacttgacccgccgatataaaatcttgagcaaaatgggagaaggtttgggttttctgcaatctgtcgtctcctcttctgctgggtatctccgttattattctaatgaagagggctacgagttggattttcgtaggtacatttgggcgtgttttggaatgctgggaccgtgaaacacatgaatatgttgccataaaagttgttcgcagtatccgcaagtaccgtgatgctgcaatgattgagatagatgtgctcaatcgccttgcagaaaatgaaaagtacagatctctgtgagtatctcagagacctaattacttaaagtataaccctattctgtttctgacttgacagttcctcttcaatttgtcagttgtgttcaaattcagagatggtttgactatcgtaatcatatatgcattatatgcatgagttgcggcttatccacactgatctgaagccagaaaacatactacttgtctcttctgagtatataaaagttccaagtacaaagaagaattcgcaaggtgaaatgcatttcaagtgcttgccgaagtccagtgccataaagctgatagattttggcagtaccgcctttgataatcggaaccataactcgattgtttctacgaggcattatagggcacctgaaataatattaggtttaggctggagttttccatgtgatatttggagtgttggctgtattcttgttgagctatgctctggggaagcattgtttcagacacacgagaatctggaacacctagcaatgatggagagggttttgggacctctaccagaggatatgatacggaaagcaagctcttcagctcagaaatattttaggagagcaacacgattaaattggcctgaaggtgctgtttcaagagaaagcatcagagctgtgaggaaactggatcgactaaaggacttggtatcgaggaacgctgaccattcaaaggtggcactggtggacttgctatacggtctcctacggttcgagccatcggaacgcctgacagcagaagaagctctggaccatccattcttcaggaacccaacatgacttgttgagcaggcttgactcatgtaactctactgaaggtggtggtaggaagcaggcagagccgtccccattgcaaagctgaaggcatcttgttcctctataccagagagtttgtgtaaggcctgtcaatggggcttcttgtggtgataaaactgatggctttagtcacccaatgtcatgtacactagcatttttcctagggagcttagttcgccagacggcgcttgtatgttgttaaccgggatacactatgagctgtgccccgatgccctggtgctataatccaatcgcaaatgatgaaatcaagcatagcgtgcgtccgtatagtttatgatt

SEQ ID NO: 147397 - DNA, 1631 bp, Zea Mays
acccatcctgctcagtgctcacttccacgcgggccccagcccgccacgagtccccgctcccacctgctcctcgccgccgttagcgcgccccgagccccgacagcctttctccttctagggtttctctctgtttcgtcctcatcgaatcggagtttcgcatggagtcatcgcggtctcggaagcggacgcgccaggcgcatgactgtgccgccgcgccgccaccagagcgagaagtggtagcgaggggtggcgcgtcgccaccatggagggaggatgaccgtgatggacacttcgtattcgaccttggcgagaacttgacccgccgatataaaatcttgagcaaaatgggagaaggtttgggttttctgcaatctgtcgtctcctcttctgctgggtatctccgttattattctaatgaagagggctacgagttggattttcgtaggtacatttgggcgtgttttggaatgctgggaccgtgaaacacatgaatatgttgccataaaagttgttcgcagtatccgcaagtaccgtgatgctgcaatgattgagatagatgtgctcaatcgccttgcagaaaatgaaaagtacagatctctttgtgttcaaattcagagatggtttgactatcgtaatcatatatgcattatatgcatgagttgcggcttatccacactgatctgaagccagaaaacatactacttgtctcttctgagtatataaaagttccaagtacaaagaagaattcgcaaggtgaaatgcatttcaagtgcttgccgaagtccagtgccataaagctgatagattttggcagtaccgcctttgataatcggaaccataactcgattgtttctacgaggcattatagggcacctgaaataatattaggtttaggctggagttttccatgtgatatttggagtgttggctgtattcttgttgagctatgctctggggaagcattgtttcagacacacgagaatctggaacacctagcaatgatggagagggttttgggacctctaccagaggatatgatacggaaagcaagctcttcagctcagaaatattttaggagagcaacacgattaaattggcctgaaggtgctgtttcaagagaaagcatcagagctgtgaggaaactggatcgactaaaggacttggtatcgaggaacgctgaccattcaaaggtggcactggtggacttgctatacggtctcctacggttcgagccatcggaacgcctgacagcagaagaagctctggaccatccattcttcaggaacccaacatgacttgttgagcaggcttgactcatgtaactctactgaaggtggtggtaggaagcaggcagagccgtccccattgcaaagctgaaggcatcttgttcctctataccagagagtttgtgtaaggcctgtcaatggggcttcttgtggtgataaaactgatggctttagtcacccaatgtcatgtacactagcatttttcctagggagcttagttcgccagacggcgcttgtatgttgttaaccgggatacactatgagctgtgccccgatgccctggtgctataatccaatcgcaaatgatgaaatcaagcatagcgtgcgtccgtatagtttatgatt

SEQ ID NO: 147398 - DNA, 1598 bp, Zea Mays
acccatcctgctcagtgctcacttccacgcgggccccagcccgccacgagtccccgctcccacctgctcctcgccgccgttagcgcgccccgagccccgacagcctttctccttctagggtttctctctgtttcgtcctcatcgaatcggagtttcgcatggagtcatcgcggtctcggaagcggacgcgccaggcgcatgactgtgccgccgcgccgccaccagagcgagaagtggtagcgaggggtggcgcgtcgccaccatggagggaggatgaccgtgatggacacttcgtattcgaccttggcgagaacttgacccgccgatataaaatcttgagcaaaatgggagaaggtttgggttttctgcaatctgtcgtctcctcttctgctgggtatctccgttattattctaatgaagagggctacgagttggattttcgtaggtacatttgggcgtgttttggaatgctgggaccgtgaaacacatgaatatgttgccataaaagttgttcgcagtatccgcaagtaccgtgatgctgcaatgattgagatagatgtgctcaatcgccttgcagaaaatgaaaagtacagatctctttgtgttcaaattcagagatggtttgactatcgtaatcatatatgcattgtttttgagaagcttgggccaagcttgtatgattttctaaagagaaatagataccaacctttccctgtggaacttgtgcgggagtttggacggcaactgttggaatctgtagcatatatgcatgagttgcggcttatccacactgatctgaagccagaaaacatactacttgtctcttctgagtatataaaagttccaagtacaaaggtttaggctggagttttccatgtgatatttggagtgttggctgtattcttgttgagctatgctctggggaagcattgtttcagacacacgagaatctggaacacctagcaatgatggagagggttttgggacctctaccagaggatatgatacggaaagcaagctcttcagctcagaaatattttaggagagcaacacgattaaattggcctgaaggtgctgtttcaagagaaagcatcagagctgtgaggaaactggatcgactaaaggacttggtatcgaggaacgctgaccattcaaaggtggcactggtggacttgctatacggtctcctacggttcgagccatcggaacgcctgacagcagaagaagctctggaccatccattcttcaggaacccaacatgacttgttgagcaggcttgactcatgtaactctactgaaggtggtggtaggaagcaggcagagccgtccccattgcaaagctgaaggcatcttgttcctctataccagagagtttgtgtaaggcctgtcaatggggcttcttgtggtgataaaactgatggctttagtcacccaatgtcatgtacactagcatttttcctagggagcttagttcgccagacggcgcttgtatgttgttaaccgggatacactatgagctgtgccccgatgccctggtgctataatccaatcgcaaatgatgaaatcaagcatagcgtgcgtccgtatagtttatgatt

SEQ ID NO: 147399 - DNA, 1712 bp, Zea Mays
acccatcctgctcagtgctcacttccacgcgggccccagcccgccacgagtccccgctcccacctgctcctcgccgccgttagcgcgccccgagccccgacagcctttctccttctagggtttctctctgtttcgtcctcatcgaatcggagtttcgcatggagtcatcgcggtctcggaagcggacgcgccaggcgcatgactgtgccgccgcgccgccaccagagcgagaagtggtagcgaggggtggcgcgtcgccaccatggagggaggatgaccgtgatggacacttcgtattcgaccttggcgagaacttgacccgccgatataaaatcttgagcaaaatgggagaaggtttgggttttctgcaatctgtcgtctcctcttctgctgggtatctccgttattattctaatgaagagggctacgagttggattttcgtaggtacatttgggcgtgttttggaatgctgggaccgtgaaacacatgaatatgttgccataaaagttgttcgcagtatccgcaagtaccgtgatgctgcaatgattgagatagatgtgctcaatcgccttgcagaaaatgaaaagtacagatctctttgtgttcaaattcagagatggtttgactatcgtaatcatatatgcattatatgcatgagttgcggcttatccacactgatctgaagccagaaaacatactacttgtctcttctgagtatataaaagttccaagtacaaagaagaattcgcaaggtgaaatgcatttcaagtgcttgccgaagtccagtgccataaagctgatagattttggcagtaccgcctttgataatcggaaccataactcgattgtttctacgaggcattatagggcacctgaaataatattaggtttaggctggagttttccatgtgatatttggagtgttggctgtattcttgttgagctatgctctgttagatctcttcacacactttatttttctagtaccagtctggtaattgttttcctaacatcacattttttagggggaagcattgtttcagacacacgagaatctggaacacctagcaatgatggagagggttttgggacctctaccagaggatatgatacggaaagcaagctcttcagctcagaaatattttaggagagcaacacgattaaattggcctgaaggtgctgtttcaagagaaagcatcagagctgtgaggaaactggatcgactaaaggacttggtatcgaggaacgctgaccattcaaaggtggcactggtggacttgctatacggtctcctacggttcgagccatcggaacgcctgacagcagaagaagctctggaccatccattcttcaggaacccaacatgacttgttgagcaggcttgactcatgtaactctactgaaggtggtggtaggaagcaggcagagccgtccccattgcaaagctgaaggcatcttgttcctctataccagagagtttgtgtaaggcctgtcaatggggcttcttgtggtgataaaactgatggctttagtcacccaatgtcatgtacactagcatttttcctagggagcttagttcgccagacggcgcttgtatgttgttaaccgggatacactatgagctgtgccccgatgccctggtgctataatccaatcgcaaatgatgaaatcaagcatagcgtgcgtccgtatagtttatgattgaattgta

SEQ ID NO: 147400 - DNA, 504 bp, Zea Mays
atggcgagcaacggcaacggggacggcacggcgcgcgtggtggtgccggagatcaagttcaccaagctcttcatcaacggcgagttcgtcgacgccgcctcaggcaagacgttcgagaccagggacccacggacgggcgacgtgctggcccacgtagcagaggcagaccaagctgatgtggacctggcggtcaagtcggccagggatgccttcgaccacggcaaatggccccgcatgtcaggctatgagcggggccgtgtcatgagcaagctggcggacctggtggagcagcacacggaggagctggcggcgctggacggcgccgacgccgggaagctgctgctgctgggcaagatgatcgacatccccgccgccacgcagatgctgcgctactacgcgggcgccgccgacaagatccacggcgacgtgctgcgcgtctccggcaagtaccagggctacacgctcaaggagcccatcggcgtcagaagatacttgtcttcctag

SEQ ID NO: 147401 - DNA, 195 bp, Zea Mays
atggcatccgtgaaggcgtgcgtgtttctgttcacggcgttcttcttctccgggctcatgcagctatccatggcagcacagctggagaagcctgtggcagcggcgagggtggtggtcgacgccaagacgattgatcaggccatcgcgtacctgctcatgttggcagccttgttcgtcacatatctcgcccactga

SEQ ID NO: 147402 - DNA, 201 bp, Zea Mays
atggcgtccgtgaagatgtgcgtgctgctgttcacggccttcttcttctccgggctcatgcagttgtccatggcagcacaggagaagccggcgtctgctgtggcaatggcgcgggtggttgtcgacgccacggtgattgatcaggcagtcgcgtacctgctcatgttcgcagccttgttcgtcacctatctctcccactga

SEQ ID NO: 147403 - DNA, 116 bp, Zea Mays
ccgtttgttgccacggaaaactaaaattagcataaaatataaatatgtaacgacaaacgtcactatgataagcaaaatacatgacaaaatattaccggaacaataatattatattg

SEQ ID NO: 147404 - DNA, 109 bp, Zea Mays
tacgatggcttcctaggcacatggtcttattctacgtgctacctgctatgggatttgacaataaaacacacatttacctttcttctggtgaactctttggtgggaaacg

SEQ ID NO: 147405 - DNA, 1577 bp, Zea Mays
gctagagcgtaagcgtagaagcaggcagccaggcaacgatggagatgcgggttgttcttctgctttgccaggtgatatgtatgcaggcggcggtcatcggcgccgtcgccgccgccgccggcgctcggccaccggcgatgtacgtgttcgggtcgtcgatactggacgtgggcaacaacaactacctgcgggggccggccgtcggcagggccaacagtccctacaacggcgtcgacttcccgggctccatccccaccggaaggttcagcaacggctacaacatcgccgactacgtcgcaaagagcatgggattcgcgtgcagccctcctccctacctgtcgctagcacaggcaccggcaccggcaccggcacagagctccggccctgacctggcccagacggctctcaccattggcatcaactatgcttctggaggagcaggcatccttgactccactaacgccgggaacacgatcccgttgtcggaggaggtgaagtacttcggcgccaccaaggccaagatggtcgccgcagcgggccccagcgcggtgaacccactgatctccaggtccatcttcctcatcggcatgggcaacaacgacctgtacgtcttcggggcttcggagcgggcgcggaacaggtcagacgcagagcagcggagggacgccgccgccgcgctctacgccagcctcgtctccaactactccgccgccgtgacggagctgtactcgttgtcgttgggcgccaggaagttcgccgtcatcaacgtgtggccgctaggatgcgtgccgggggagcgcgtgctcagcccgacgggcgcgtgctccggcgtcctcaacgacgtcgccggcggcttcaacgacgccctgcgctccctgctcatcggcctcgccgagaggctgccgggcctcgtctacgccctcgccgactccttcggcttcacgctggacgtcctggcggacccgcgcgcgtcagggtacaccgacgtcgcaagcacgtgctgcggcggcgggcggcggctgggcgcggaggcctggtgcacgcgcagctccacgctctgcgtcgaccgtgaccgccatgtcttctgggaccgtgtccatccgtcccagcggactgcgtttctcttggcgcaagcgttctacgacggaccgcccaagtacaccactcctatcaacttcatgcagctcgcccactcaagctagtgatgatatggttcatgcatatctgatactacttaacaatacatcggtcactttgtagagaaagggcgcgccgcctgctactagcagagaaaggcaattattagccgttaatataagggcctatgtgttcacgaccgacataatcttgggtgtcatccagcatagccactttccaccgaatcggccagaccggatttgcaaatgttatcaaatcttataatttgagttcaacattgtgttccctttatcattatgttggtccctcttgcccctaccactgctcctacagtgcacatagactgcagtaggatatgacctcagtctatagtcatatcaacttttctatttcagaattaacttatttcagaattaact

SEQ ID NO: 147406 - DNA, 918 bp, Zea Mays
ggtccctcgctgtccccagcttccccgcccctcctctagccgtcgattcgaactctctcaaaaccaaaacagcagtgcatgagaaaaaaggggaaaaatctcgacacatcgcaacgcgccgctcccaaatctaggttgcttggccatggccgacccgccggcccccgacacacagctggaacaggcgtcacccgccgctgcccccgctgaccctgccgaggacgccccggtcgagaagagccccgcggcgcccctcacgctggagccggacgccgctgcggtgtcggatggggcagcgggtgaggtggaggatgaggagtacgtgagcgaccccgacgatgaggcgcttcctacgatgcggcgccgagaggccagtgacgacgaggggtccgaggacgggaggcccacggcgcggatgggccctgaccaggacgacgacggacaaggggcccccgaggcgtacgacgacgaggtggacgaggaggataaggagtactacgacgaggaagacatgggagaggggttcgaggaggagtacgaagggcgcgtggcacttcccatggacgacggcggcggcagccaggtctcgcgcggagaggatggcgtggctatggaggaggggttgacggagggggaggccaagggcgaggggggagagaaggagcaggagccgtttgcggtgcccacttccggcgccttctacatgcacgatgaccggtttcaggaggagaaccgtggcagacgcaggtgtgtgtggatggcttaaaactgcacattcagttctagctgtagaatcacagttattattacttagttttaagttgggcgggaggcttcgggccttttgctctgtgtccagcattgtcaaaacggcacgaccaaatgctctcgtactttcagctcctaaaattgataata

SEQ ID NO: 147407 - DNA, 2689 bp, Zea Mays
ggtccctcgctgtccccagcttccccgcccctcctctagccgtcgattcgaactctctcaaaaccaaaacagcagtgcatgagaaaaaaggggaaaaatctcgacacatcgcaacgcgccgctcccaaatctaggttgcttggccatggccgacccgccggcccccgacacacagctggaacaggcgtcacccgccgctgcccccgctgaccctgccgaggacgccccggtcgagaagagccccgcggcgcccctcacgctggagccggacgccgctgcggtgtcggatggggcagcgggtgaggtggaggatgaggagtacgtgagcgaccccgacgatgaggcgcttcctacgatgcggcgccgagaggccagtgacgacgaggggtccgaggacgggaggcccacggcgcggatgggccctgaccaggacgacgacggacaaggggcccccgaggcgtacgacgacgaggtggacgaggaggataaggagtactacgacgaggaagacatgggagaggggttcgaggaggagtacgaagggcgcgtggcacttcccatggacgacggcggcggcagccaggtctcgcgcggagaggatggcgtggctatggaggaggggttgacggagggggaggccaagggcgaggggggagagaaggagcaggagccgtttgcggtgcccacttccggcgccttctacatgcacgatgaccggtttcaggaggagaaccgtggcagacgcaggcgaatgtttggtgtgaggaagttatgggatgttaaagacaatcaagcttgggtgcatgacagatttgaggagatgaacttgcatgatgatttctatgaagaccagcggatgtcaagaggtcgtggtggtcgaggtaaagcaagaggtggtggccgtggtttttccagaggtggaaagcagcgtaattaccatgaagatagcaacaacacccaaaatcgcaccccaaaggtagtgagagggcgaggacctcgacgttatgaagctgctgcaaggaacaacagagaggttgttggatcccaacgaaaacaagcagctagatttcgagaatctgctccaaatgctgtagcagccagagattccgggcaagtttcacatgcacagccagaggctgcccctcccaaaaggaatgtcatgagttcaagcctaaattctgcgtccccacctttttatccctccagtgcatctactcaagattttccggtagcagctcaaacgagggacatacaagcaggaggttctaataagatccctccatcttccatgaagatggatgataactcaaagctacaatctggttcaatggttagagggagaatagccatggattatggtgggcgtgataagttacttgctgatggtcctattaggtcatcccaaggaagggcaccaacggcgtcactgaattcaggattcacatcatcatctgttaatcctggccaatcccctattgcgagggcttcagggggcaattcaaacatcggaatatcttcaaataatcagccacaaagtcatggatcagtgatgcaccaaaagttagggcaagtgcagaatcagtctgcaacaagaatcccaactcagcaattgagtcatcggactagtaatttgtcaccagtggctcagcatctacctggtaaatcaggagaaagtggcgagaatggttcataccctactctgaatgattcaaagacagcttctgcggtggtaaaagtcaatagccaggaaactgggatgagttcatttatgtatggtggcacccaggttattggggctgcgggcctttcccagggcgatcaaaattttcctggcactccagctctgctgccagtgatgcaatttgggagtcagcatcctggtggtcttggagttcctactgttggtatggccctccctggctatgtagctcaacagcagatgggaatgggaaacaacgaaatgacatggttgccattattggctggtgcagcaggtgcttttggaggatcatatccaccctatatagcccttgatccgagcttttactctagatcttcaggacagacatcatcatcagttccatccagggaacctagtactaatagagggtcaaaatatcctcaaaatgatattgggaatgaggagcttgatgagcgccagaacaagcctagaagatactcagagatgaacttcagccagtgaagcatcttgtaaggtgaactgcatctgaataagctggttatggtcttatgcctgttcgtggagtgttatctgatgggtcacttcacagcagagcagggggtggaattcgttacttgaattatagtattgctcggttgtgctgcgtctggaaatgtcaaatttgttgctgcgtctgaagacgtggacggttgctgaagagagcttgaaaataatggtttgcgttggttgataaagtttaagagttttttttttaaagtacatcctgttagtgactccagttggtggcagtgtactctgatgtatcgggtccgcatatagtggctgctaagaccaagcggcttcattgccgaagcttgtatattttggaatccgttgagtgcggtttgtgacaattttcagcttgcatgagcgtgtccaacatggattttttttttgaaaagccaacaagaggaatccgcccgtctttttatccccgggtgatagaaa

SEQ ID NO: 147408 - DNA, 2865 bp, Zea Mays
ggtccctcgctgtccccagcttccccgcccctcctctagccgtcgattcgaactctctcaaaaccaaaacagcagtgcatgagaaaaaaggggaaaaatctcgacacatcgcaacgcgccgctcccaaatctaggttgcttggccatggccgacccgccggcccccgacacacagctggaacaggcgtcacccgccgctgcccccgctgaccctgccgaggacgccccggtcgagaagagccccgcggcgcccctcacgctggagccggacgccgctgcggtgtcggatggggcagcgggtgaggtggaggatgaggagtacgtgagcgaccccgacgatgaggcgcttcctacgatgcggcgccgagaggccagtgacgacgaggggtccgaggacgggaggcccacggcgcggatgggccctgaccaggacgacgacggacaaggggcccccgaggcgtacgacgacgaggtggacgaggaggataaggagtactacgacgaggaagacatgggagaggggttcgaggaggagtacgaagggcgcgtggcacttcccatggacgacggcggcggcagccaggtctcgcgcggagaggatggcgtggctatggaggaggggttgacggagggggaggccaagggcgaggggggagagaaggagcaggagccgtttgcggtgcccacttccggcgccttctacatgcacgatgaccggtttcaggaggagaaccgtggcagacgcaggcgaatgtttggtgtgaggaagttatgggatgttaaagacaatcaagcttgggtgcatgacagatttgaggagatgaacttgcatgatgatttctatgaagaccagcggatgtcaagaggtcgtggtggtcgaggtaaagcaagaggtggtggccgtggtttttccagaggtggaaagcagcgtaattaccatgaagatagcaacaacacccaaaatcgcaccccaaaggtagtgagagggcgaggacctcgacgttatgaagctgctgcaaggaacaacagagaggttgttggatcccaacgaaaacaagcagctagatttcgagaatctgctccaaatgctgtagcagccagagattccgggcaagtttcacatgcacagccagaggctgcccctcccaaaaggaatgtcatgagttcaagcctaaattctgcgtccccacctttttatccctccagtgcatctactcaagattttccggtagcagctcaaacgagggacatacaagcaggaggttctaataagatccctccatcttccatgaagatggatgataactcaaagctacaatctggttcaatggttagagggagaatagccatggattatggtgggcgtgataagttacttgctgatggtcctattaggtcatcccaaggaagggcaccaacggcgtcactgaattcaggattcacatcatcatctgttaatcctggccaatcccctattgcgagggcttcagggggcaattcaaacatcggaatatcttcaaataatcagccacaaagtcatggatcagtgatgcaccaaaagttagggcaagtgcagaatcagtctgcaacaagaatcccaactcagcaattgagtcatcggactagtaatttgtcaccagtggctcagcatctacctggtaaatcaggagaaagtggcgagaatggttcataccctactctgaatgattcaaagacagcttctgcggtggtaaaagtcaatagccaggaaactgggatgagttcatttatgtatggtggcacccaggttattggggctgcgggcctttcccagggcgatcaaaattttcctggcactccagctctgctgccagtgatgcaatttgggagtcagcatcctggtggtcttggagttcctactgttggtatggccctccctggctatgtagctcaacagcagatgggaatgggaaacaacgaaatgacatggttgccattattggctggtgcagcaggtgcttttggaggatcatatccaccctatatagcccttgatccgagcttttactctagatcttcaggacagacatcatcatcagttccatccagggaacctagtactaatagagggtcaaaatatcctcaaaatgatattgggaatgaggagcttgatgagcgccagaacaagcctagaagatactcagagatgaacttcagccagtgaagcatcttgtaaggtgaactgcatctgaataagctggttatggccctatttaggccctttgtgatctccagttctgatctggagcactttgggtggctttgatacccttaattatgttaggtcttatgcctgttcgtggagtgttatctgatgggtcacttcacagcagagcagggggtggaattcgttacttgaattatagtattgctcggttgtgctgcgtctggaaatgtcaaatttgttgctgcgtctgaagacgtggacggttgctgaagagagcttgaaaataatggtttgcgttggttgataaagtttaagagttttttttttaaagtacatcctgttagtgactccagttggtggcagtgtactctgatgtatcgggtccgcatatagtggctgctaagaccaagcggcttcattgccgaagcttgtatattttggaatccgttgagtgcggtttgtgacaattttcagcttgcatgagcgtgtccaacatggattttttttttgaaaagccaacaagaggaatccgcccgtctttttatccccgggtgatagaaatttctatttcatggtgaaaagctacgattgtcatattctgtaattgtggaatgaaccgcatgccatcttactgaagctagaaatgagtagttttaact

SEQ ID NO: 147409 - DNA, 2118 bp, Zea Mays
ctattcagtcagtttcctagtgcaataggctgtcataatgccacctgccagtggatggtaatatttaatgcttcatatttatctgcccgttcttgcctcctctaaacaggcgaatgtttggtgtgaggaagttatgggatgttaaagacaatcaagcttgggtgcatgacagatttgaggagatgaacttgcatgatgatttctatgaagaccagcggatgtcaagaggtcgtggtggtcgaggtaaagcaagaggtggtggccgtggtttttccagaggtggaaagcagcgtaattaccatgaagatagcaacaacacccaaaatcgcaccccaaaggtagtgagagggcgaggacctcgacgttatgaagctgctgcaaggaacaacagagaggttgttggatcccaacgaaaacaagcagctagatttcgagaatctgctccaaatgctgtagcagccagagattccgggcaagtttcacatgcacagccagaggctgcccctcccaaaaggaatgtcatgagttcaagcctaaattctgcgtccccacctttttatccctccagtgcatctactcaagattttccggtagcagctcaaacgagggacatacaagcaggaggttctaataagatccctccatcttccatgaagatggatgataactcaaagctacaatctggttcaatggttagagggagaatagccatggattatggtgggcgtgataagttacttgctgatggtcctattaggtcatcccaaggaagggcaccaacggcgtcactgaattcaggattcacatcatcatctgttaatcctggccaatcccctattgcgagggcttcagggggcaattcaaacatcggaatatcttcaaataatcagccacaaagtcatggatcagtgatgcaccaaaagttagggcaagtgcagaatcagtctgcaacaagaatcccaactcagcaattgagtcatcggactagtaatttgtcaccagtggctcagcatctacctggtaaatcaggagaaagtggcgagaatggttcataccctactctgaatgattcaaagacagcttctgcggtggtaaaagtcaatagccaggaaactgggatgagttcatttatgtatggtggcacccaggttattggggctgcgggcctttcccagggcgatcaaaattttcctggcactccagctctgctgccagtgatgcaatttgggagtcagcatcctggtggtcttggagttcctactgttggtatggccctccctggctatgtagctcaacagcagatgggaatgggaaacaacgaaatgacatggttgccattattggctggtgcagcaggtgcttttggaggatcatatccaccctatatagcccttgatccgagcttttactctagatcttcaggacagacatcatcatcagttccatccagggaacctagtactaatagagggtcaaaatatcctcaaaatgatattgggaatgaggagcttgatgagcgccagaacaagcctagaagatactcagagatgaacttcagccagtgaagcatcttgtaagattatgtaatatatgcaggccctatttaggccctttgtgatctccagttctgatctggagcactttgggtggctttgatacccttaattatgttaggtcttatgcctgttcgtggagtgttatctgatgggtcacttcacagcagagcagggggtggaattcgttacttgaattatagtattgctcggttgtgctgcgtctggaaatgtcaaatttgttgctgcgtctgaagacgtggacggttgctgaagagagcttgaaaataatggtttgcgttggttgataaagtttaagagttttttttttaaagtacatcctgttagtgactccagttggtggcagtgtactctgatgtatcgggtccgcatatagtggctgctaagaccaagcggcttcattgccgaagcttgtatattttggaatccgttgagtgcggtttgtgacaattttcagcttgcatgagcgtgtccaacatggattttttttttgaaaagccaacaagaggaatccgcccgtctttttatccccgggtgatagaaa

SEQ ID NO: 147410 - DNA, 693 bp, Zea Mays
atgactctggtccaatcgtctgcatatattttcaggctctgagccccggaagaggagacgcatcatcatcctcatggctgcaaggggtttccagctgaggctttcgcgctggtttcagcgatcccatgcaagtgtttcccagtcccaggacgaagacgaccgcggcggcgagaggaacggcttgctgaggagccacttggaccagatcgtgccagtcacggatttcgccggcacgtccaactccaaggcgttagctgttcgtgtggaaccaaagaccgtggcgctgaaggtgtccatgcactgctatggctgcgcaaggaaggtcgagaagcaagtgaagaagctgcaaggagtggtgtccatcagagtggagctggagagcaagaggctgaccgtcgtcggagacgttagccccacggacgtcctggagtgcgtgtgtaaggtgacgaagcatgcggagatcttgcaggctccctagccatgcatcggctttccagtccagtccagttatgatgatgatgcagctgtggtggatgtgcagtacatattgatgtggaggttaatttggtagcacaaaaaatatttatagtacgtgattctccttgcaagatcaggaataaatcctagatctcagtatatagtaaggccttgttcggttacaagagaataaattccaccatggatttaatccga

SEQ ID NO: 147411 - DNA, 813 bp, Zea Mays
agctaggatcagatcatttcaacttcccgactctcgcatcccggattgttccgccgcccgcacacgtctctcctcttccgttgctctcctgcctccagctctccacggtctctgacccgcacaactgaacccgcgatggcgcgccgcctcctcgtcgccctcctcgccgcgtcgctcctgctcccgctcgcccgcccggactcctcctcgtccccgcccgccgccaccgcgtacgacgagctccgcctccggggcttcccgcgcggcctgctcccggccaacgtgcgggcctacacgctcgactccggctccggggacttcgccgtcgacctccgctccagctgccggatcgtgctgcccgcggggagctacctcgccgccttcagcgaccgactcacgggccgcctcgacgaccgccgcatctcgggcctcgacggcatccgcgtcagggccttcttccgctggtggtccatcacggggatccgcgccgatggggaccagctcgtcttcgaggtcggctccgtctccgccaagttccccgcgcgggacttcaacgccagcctcgactgccccgcccaggcggcgtcctaagtcaaggaggtattaaatactacgtacgggtgctcagcgcctcagctcagtactttgggtttctaggcttagttttttattgccactgtctgcttggtttcatccacggaacctcagaaccatcggaacttttgtgcacagtgttgttgttttcacggtttactagggaaaattcgcaaggctaatcgtttagtaaacatgatacctaagctagctaacaat

SEQ ID NO: 147412 - DNA, 969 bp, Zea Mays
agctaggatcagatcatttcaacttcccgactctcgcatcccggattgttccgccgcccgcacacgtctctcctcttccgttgctctcctgcctccagctctccacggtctctgacccgcacaactgaacccgcgatggcgcgccgcctcctcgtcgccctcctcgccgcgtcgctcctgctcccgctcgcccgcccggactcctcctcgtccccgcccgccgccaccgcgtacgacgagctccgcctccggggcttcccgcgcggcctgctcccggccaacgtgcgggcctacacgctcgactccggctccggggacttcgccgtcgacctccgctccagctgccggatcgtgctgcccgcggggagctacctcgccgccttcagcgaccgactcacgggccgcctcgacgaccgccgcatctcgggcctcgacggcatccgcgtcagggccttcttccgctggtggtccatcacggggatccgcgccgatggggaccagctcgtcttcgaggtcggctccgtctccgccaagttccccgcgcgggacttcaacgccagcctcgactgccccgcccaggcggcgtcctaagtcaaggaggtatcctgtcgcatgttccatgacatgtgacattctaaaggggcagttggaagccaagcacatcaatgtttttaatttcatctgtctttattgtaattgtataagtttacaatagatgcatagaacagactggatcgataaaagcgccttcacagaccaaaaacccggtatcacggtagtggttcgtgcatttcgttagaaatgccctacgtcttattttgaaaagttgtgcttgtatatcttacttattgacaatagctgtacttataagactacttgcataaagaagaaaagtgaggtgcaaggccgaaaggcccctatgcgctaaatacaaatgcctttgtgaatagaagactttttttttgttat

SEQ ID NO: 147413 - DNA, 1488 bp, Zea Mays
atgggtacggcggctgtcgtggaggacacgatacgcgtcgtcctcacctgcctccctgatccgcccttccgcaccaccggttcctcccgtccctaccagagtcccagcggcggcggcggcggcggggaccgcatcagccgcctctcagacgcggtgctctctaacatcgtggcgcgtctccccgccaaggacgcagcgcgcactaccgcgctctccaggcgctggcgccgcgtctgggcctccactccactcgtcctcgacgactccgacctcctcgtcttccacgacgacggcggctgctctacgcccaactggttagccgtcacagacaccgtgtcccacgtcctctcctcccacagggggcccatccgctttgtgcgcctcacctgctgctacatggcgctggcctcgcacaacggcgcgctccagtactggctccgggtcctcgctgcggggggagtcgaggatctcgtcctcgtcaaccgcccattacccacctccgtgggcctccccatcgacgtcctccacctcgcctccctccgcaccctctacctcggtttctggtgcttcccggacaccgccaccctcccgcgaggccgcgccaccgtgttcccctgcctccaggagattggactctgcgctaccgtcatccacgccagggacatcgaccacctgctcgcctgcagccccgtgctcgagaagttcgccagcatcaccagcatctacttcacagaccctgtccggatccgcagctgcagcctccggtgccttgtcttctgggagtccctggccaatgagctcgacttggtcgtcgccccgcgcctccagcgcctaatcctgtggcagtcgcgccaatggatgatcggctccgtccatttccgcagcaggatcaggattggctccgccaccgaactcaaggtgctcggctacctggagccaagcatccaccagctcgagattggcggcaccataattgatagtggaacaaagatgaccccatctaacatggttccaagtgtcaagatcttggccttgaagatgcagttcagaatccgcaaggaagtcaagatgctgcccaccttcctgagatgctttcccaatgtggagacattgcatgttctgtcacatgaaactgatgagcaaaatggcaagttcaatttgaagttctgggaggaggttggctccatcagctgcctagagacacgcatcaccaaggtggtgtttgacaaattcagaggagagcgttgtgagctcgcgttcctcaagttcgtcctagagagggcagaatcgctgctgaagcttgtggttgtattggccaatggagatcaagcctcagtggatgagatgcttgctaagttgaagtctctgaccacggtgaaacgagccagcgatttccctactctgttggcagttgcccgtgagggtgacagcgcctggtactttgagagagcatccgatctttctgttactgaccccttcgatttgtga

SEQ ID NO: 147414 - DNA, 1932 bp, Zea Mays
atgagcaggaagaggagagaaggaggcggcggcggaagaggcgctgggccggtggaccatcacggcggcggcaaggggtcggaggccggcgctgccgccaccgatgccgtgtccatggacggcggcctccgcgaggtgtctgtccccgtcgtcttctcggtttggtgcctcctcttcctcctgcgatcccagttcctccacagccaggccgacgacgacccttcgtcagagttctacgaggagcacggcatgcgcgacagctactgcaaggtgaggccgttggaggcctacgtgctcccctaccataacgactcgtgtcagtcctcctactcgcactcacagccgccccaagaagcgccctcgtcgtccgcgctcgcgtcgccgcagtacaatgccaccaccggcggcaacgcgtcgtcgcccgaggcggcgttcgtgggcctcgacgagttccgcagccgcatgatgcagggcaaggcggagaacgacaccggcccgcccacggatggcggcgtcgcgcaccgcctcgagcccaacggcgccgagtacaactacgccgcggcggccaagggcgccaaggtgctcgcgcacaacaaggaggccaagggcgccgccaacatcctcggcggcgacaaggacaagtacctgcgcaacccgtgctccgccgccgacaagttcgtcgtggtcgagctctcggaggagacgctcgtcgacaccgtcgcgctggcgaacctggagcactactcgtccaacttcagggagttcgaggtgtacggcagcacgagctacccgacggaggcgtgggagctgctggggcgtttcaccgccgagaacgccaagcacgcgcagcgcttcgtgctgccggagcccaggtggacgcggtacctccgcctgcgcctcgtcagccactacggatccggcttctactgcatcctcagttacctcgaggtctacggcgtcgacgccgtcgagcggatgctacaggacttcatcgctggcgctggcgccggcgccggcgccgaggccgacgcctccagggaccgcgcgcccatcgacttcgccaaccgggacgccgactgcaacgacaccaccgctcagcaggatgggaacggcggcgctgggaggaatgacagcaccgccggcgacggcaagagcaacagctccaggagcggcgacgcgaagctgccgccgcaggtagcggcgttggcatcgcccacggggcggatccacagcgacggcgtgctaaagatcctgatgcagaagatgcggtcgctggagctgagcctgtcgacgctggaggagtacacgagggagctcaaccagcggtacggcgccaagctgccggacctgcagaacgggctctcgcagacggccgtggcgctggagaagatgaaggccgacgtgcacgacctcgtcgacgggaaggacagcgtggccaaggacctggacgacctcaaggcctggaagtcgaccgtctccggcaagctggacgatctgatcaaggagaaccaggagatgaggtggagcgtcgaggagatgcggggcgtgcaggagacgctgcagaacaaggagctggcggtgctgtccatcagcctcttcttcgcgtgcctggcgctcttcaaactggcgtgcgaccgcgtgttctgcctcttcgccggcaagggcagggaggaacccgacgcggaggagcacacaaggagcagtagggcgtggatgctcgtgctcgccagcagcagcttcaccaccctcatcgtcctgctctacaactgaagctttctagagtttcgcttgctagcacggagcaacgttcttttagccatgttcttgtccccgcatagctcattaactcccctctcaagtagatggggtaacgtatgtactcactatttcagaataaagatgaacacaggttccttgttcattgtaaaacaa

SEQ ID NO: 147415 - DNA, 2355 bp, Zea Mays
cgcggctgccctgccccaccaccgccccctccccctccccttcccggcctcccccatcttgctccctccctctctccatctctcattggccattccgcccgcatgaagccccaaaccctcttcggcatcgccttcgccgcagcagcgcccgcgtagcccgcccctctcgcccccgcccgctcgcccgctcctcgatcccgcccgctctgcagccgatcccgccgggagcacgaccgattacgatgaacggcgccgcggcaccggagcgctcgccctcaccctcgcccccgcctccggcccaggcccaggcccaggcgccgccgtcgccctctccggctcagccgctcgagtggaggttctcccaggtgttcggtgagcgcagcgccggggaggaagtccaggaagttgacatcatctcagcaatagagttcaataaatcaggacatcatcttgccactggagacagaggtggacgagttgttttatttgaaaggaccgatgtcaaagatcatgcttgtagaaaagatgctgagaaagctgatcattctatcagcaggcatcctgaatttcgctacaaaactgagtttcaaagccacgaaccagagtttgattatcttaagagcttggaaattgaagagaagattaaccaaataaaatggtgtcaagcagcaaatggtgcattgtatcttctatccacaaatgacaaaacgataaagttttggaaggtccaagaaaagaaggtaaaaaagctatctgagatgaatttggaccgttcagctgctcctgcaaatggtagtcctggtggcgtgggatatctgagcccatctctctcaaatggcaatgctctaaaacctggcaggcttcctttgcttcgcctgcctgtggtagttacaagccaagaaacaagtcttgccacaagttgccgaagagtatatgctcatgcacatgactaccatataaattcgatatcaaataacagtgatggtgagacatttatatcagctgatgatttgcggataaatctatggaatttggaaatcagcaatcaaagtttcaatattattgatgttaagcctacaaacatggaagatctcaccgaggtgataacatctgctgaattccatcctacccactgcaatacgttggcatatagtagctctaagggatccattcgacttgttgatctgcgccaatcagccctttgcgacactcattatcaaatctttgagcagcatgaggccccaggctcaagatcatttttcactgagattatagcctcaatttcggacataaagttttcgaaggatgggaggcatcttctcagtcgcgactacatgactctgaagctttgggatgttaagatgaattccggtccagttgcaacattccaggttcatgagtatctaaggcctaagttatgtgatttatatgaaaatgactcaatttttgacaaatttgagtgttgtcaaagtggtgatggattaagagtagcaactggttcctacagcaacattttccgtgtgtttggttgtggtactggtaacagtgaggcgacaacacttgaagcaacccgaaaccctacaaggaggcagctccagaatcccactagagctaccagatccctaagttctctgacaagggcagttagacgaggtggagaaagcactggaatagatgtcaatggaaattcttatgatctgagcacaaagttgcttcatttggcttggcacccatctgaaaatctaattgcatgtgctgcagccaatagcttgtacatgtactatgcataaacaagccaaatgaacagagcgacagtatttttggtggttgctcccggtgagaaagacacttttagctcctggtggatttgaagccaggagttgctggggagatggtgtatcttgtgccagtcagatgcagttcttttcggtgccatatagagctgtccagagtccaagaggaagtgactcgatcattcccgggaagcagctttgattctgatttatttttttgtggggaaaggcttgtctttcccccataggtccatttagatttaaagataaggccctagtttggcaatttgtagtagatgttaagaggatgacgatgatccaccgttgtattcatgttgggcatgggtttgtaacttcagggtggccgttgaagctttcgataattttatcttacatacggatcaaccttttttttttctatcttatgtgaggaaccttattttcgaggaataccaggaccttcgccatgtttaatgcgaaccctagaataggtaatatgctgtgtcattttattgtacgtacattttaaaatagctgcaagtggttctactgtttagttatt

SEQ ID NO: 147416 - DNA, 2352 bp, Zea Mays
cgcggctgccctgccccaccaccgccccctccccctccccttcccggcctcccccatcttgctccctccctctctccatctctcattggccattccgcccgcatgaagccccaaaccctcttcggcatcgccttcgccgcagcagcgcccgcgtagcccgcccctctcgcccccgcccgctcgcccgctcctcgatcccgcccgctctgcagccgatcccgccgggagcacgaccgattacgatgaacggcgccgcggcaccggagcgctcgccctcaccctcgcccccgcctccggcccaggcccaggcccaggcgccgccgtcgccctctccggctcagccgctcgagtggaggttctcccaggtgttcggtgagcgcagcgccggggaggaagtccaggaagttgacatcatctcagcaatagagttcaataaatcaggacatcatcttgccactggagacagaggtggacgagttgttttatttgaaaggaccgatgtcaaagatcatgcttgtagaaaagatgctgagaaagctgatcattctatcagcaggcatcctgaatttcgctacaaaactgagtttcaaagccacgaaccagagtttgattatcttaagagcttggaaattgaagagaagattaaccaaataaaatggtgtcaagcagcaaatggtgcattgtatcttctatccacaaatgacaaaacgataaagttttggaaggtccaagaaaagaaggtaaaaaagctatctgagatgaatttggaccgttcagctgctcctgcaaatggtagtcctggtggcgtgggatatctgagcccatctctctcaaatggcaatgctctaaaacctggcaggcttcctttgcttcgcctgcctgtggttacaagccaagaaacaagtcttgccacaagttgccgaagagtatatgctcatgcacatgactaccatataaattcgatatcaaataacagtgatggtgagacatttatatcagctgatgatttgcggataaatctatggaatttggaaatcagcaatcaaagtttcaatattattgatgttaagcctacaaacatggaagatctcaccgaggtgataacatctgctgaattccatcctacccactgcaatacgttggcatatagtagctctaagggatccattcgacttgttgatctgcgccaatcagccctttgcgacactcattatcaaatctttgagcagcatgaggccccaggctcaagatcatttttcactgagattatagcctcaatttcggacataaagttttcgaaggatgggaggcatcttctcagtcgcgactacatgactctgaagctttgggatgttaagatgaattccggtccagttgcaacattccaggttcatgagtatctaaggcctaagttatgtgatttatatgaaaatgactcaatttttgacaaatttgagtgttgtcaaagtggtgatggattaagagtagcaactggttcctacagcaacattttccgtgtgtttggttgtggtactggtaacagtgaggcgacaacacttgaagcaacccgaaaccctacaaggaggcagctccagaatcccactagagctaccagatccctaagttctctgacaagggcagttagacgaggtggagaaagcactggaatagatgtcaatggaaattcttatgatctgagcacaaagttgcttcatttggcttggcacccatctgaaaatctaattgcatgtgctgcagccaatagcttgtacatgtactatgcataaacaagccaaatgaacagagcgacagtatttttggtggttgctcccggtgagaaagacacttttagctcctggtggatttgaagccaggagttgctggggagatggtgtatcttgtgccagtcagatgcagttcttttcggtgccatatagagctgtccagagtccaagaggaagtgactcgatcattcccgggaagcagctttgattctgatttatttttttgtggggaaaggcttgtctttcccccataggtccatttagatttaaagataaggccctagtttggcaatttgtagtagatgttaagaggatgacgatgatccaccgttgtattcatgttgggcatgggtttgtaacttcagggtggccgttgaagctttcgataattttatcttacatacggatcaaccttttttttttctatcttatgtgaggaaccttattttcgaggaataccaggaccttcgccatgtttaatgcgaaccctagaataggtaatatgctgtgtcattttattgtacgtacattttaaaatagctgcaagtggttctactgtttagttatt

SEQ ID NO: 147417 - DNA, 2145 bp, Zea Mays
tccattggtcagtgtctccccgcccgcctctcccatcttcaaaaaccacccacggcccgtcccctcgacctccccgaaaccccacttctcggatcgagactagggttagggtttcgtcactcccgccccgattcgaaccaatccgcctaggcccccgccgcgccatggccgccggttccattgtggtggacttcccctccatgggcgccgccctctgcttccccaacctcgaatcactcctccgagactccgcctcgggtttcctctccgccgtctccgccgccccggcccccggcgccgccgacctcaccaacttccaccgcgtcttctcgcgcgtcctcagcacctactcagacccgccgctcgaggtcgtctggttcttctccgcgctctccttccacgaccgccctgacgacctccgctcactgctccagctcctctccgccttcgccgcttcctcgcccggggccgccaagccgctcgccctcctcgcccccgtcgtctccgagcttttccactcagataagccgcgcagggagaccgaggccgtcgtcgaggctgtcctcagctacatcagcatctgcagcagtcgccccgccccctcttcgactgaaggcaccaccgccgacgctgtgaggctgctgccggctttcggcgatcttgtcaaggtgtggagcgtgcggcactcgagggagaggtgcccgttccaggtgctgttcccgctcgctggtgacgaggccaggcgggagctcatgaaggaaggctgcagcgttgactacctcgctggggtggtgctggttgaggcgttccttctcaggctctgcctcaaggtgcagaatgcaacaggggtgcctcgctctgagctgcagaaggagctcaagatctgggcagtcagctccatcccggtcttccagagccaccaattcttcggggtcctgctgaacatgctcttgaactctccgctgcctgtttactctctagtgagcgctgatgatgaaatcttggtgagggatgttctatatgattctcttatcctggtggattattcattcattaacaatggtgctggagttgatctcttgcctgtatatgtgtcgagattgattatcactcttgatgctgtcaatgatgccaggaggaaaggtgatcaaggtagagcagtgtcatttattaatgccttctcaacctcaaatattcccaattttctcatcaagtgggctacttgtcaagctggctctggtgcactcagcaaaccaatttgcaatacgccccaagctattctcaagtggcttattgaccttgaagataaggggctcaaagtgtttggagattacagttcttgggttatgaggaggtttgtttgcaatgaggtcaagaatgggtatgggaacatggttcagtcagatgcagaccttttctttgttgataaacagagtggtagggaacttatggacaccaaaggcagcgaggatgatgaagctgttgaggagatggagactgcaggtaatgcttttatggctgctgcccagtcaatgaagggggtaactaacggcataaggaagaggaagagctgcggaaacgaagatgcagctgctgtgaagtttgtgaagtacaaggtagaagacagctcagtgaagggctacctgttagcagctaatggcatgagcagtggcagtgaggtagagaacccacagtcggatgatgagatggaagaatccgactgatgcatagaaaatgacagcacccactaatgcttactttggggagagttgctttgaagagtttcttggacaaccgcctttttggagtctggaccagccttgtttcagatgccgcttcttaatgatgtcgtgcagtaccctgttctaggccaataatctgcaggagggcccctctccagctaggctttttttcggatatagtggtaaccgttagctgaccctacttgacaaggagcatgtgatgtctgctatgagctgtatcgtgttctttgttattataatgctatatagtagagacctcaatgtagtcttgcttcattttgcttttgtaatagatgggtacgttgttgttatcccacggaaccagttggaactaatgaactgttaacctttcctgtgtatagcgcctttctgtgcttacttg

SEQ ID NO: 147418 - DNA, 2932 bp, Zea Mays
tccattggtcagtgtctccccgcccgcctctcccatcttcaaaaaccacccacggcccgtcccctcgacctccccgaaaccccacttctcggatcgagactagggttagggtttcgtcactcccgccccgattcgaaccaatccgcctaggcccccgccgcgccatggccgccggttccattgtggtggacttcccctccatgggcgccgccctctgcttccccaacctcgaatcactcctccgagactccgcctcgggtttcctctccgccgtctccgccgccccggcccccggcgccgccgacctcaccaacttccaccgcgtcttctcgcgcgtcctcagcacctactcagacccgccgctcgaggtcgtctggttcttctccgcgctctccttccacgaccgccctgacgacctccgctcactgctccagctcctctccgccttcgccgcttcctcgcccggggccgccaagccgctcgccctcctcgcccccgtcgtctccgagcttttccactcagataagccgcgcagggagaccgaggccgtcgtcgaggctgtcctcagctacatcagcatctgcagcagtcgccccgccccctcttcgactgaaggcaccaccgccgacgctgtgaggctgctgccggctttcggcgatcttgtcaaggtgtggagcgtgcggcactcgagggagaggtgcccgttccaggtgctgttcccgctcgctggtgacgaggccaggcgggagctcatgaaggaaggctgcagcgttgactacctcgctggggtggtgctggttgaggcgttccttctcaggctctgcctcaaggtgcagaatgcaacaggggtgcctcgctctgagctgcagaaggagctcaagatctgggcagtcagctccatcccggtcttccagagccaccaattcttcggggtcctgctgaacatgctcttgaactctccgctgcctgtttactctctagtggtatgtgtttcctgactaatgagcaatttgagagcatgacacaacaagctagtattattatggattcactgcttattaacaaaattataagagtattaattaagcattcacaaggcatgtggtagttgtatggaccataaaaatattaacaaacatggcaaatagcttataaactcatttcatgaattaagaaacatgagtcatgatcatgctttttcattacctgttctgtaaactagttatttacctttgtgaaataagaaatgtgcaacttgttgccttgttcttcaactgtgcttggaatcaggaatctttcctaatttgtggaaactaaagaggagaacagaacggtatatgactattgtgtatcgcaaagctggtgttactatagcattttgctgtcatcatctgcaaggagcatgatttaagatggagttgtgtctcatctttgtgatatgcaaacaggttgaagcctgaactgtggtttgtcctagtatacccttttgtttcggatcatgattatgccttttttatgcggaaatggcaaaataggggtttatgtacaattttacttggttacgtatttgatcactcctataaagttgccagactggttgatttttccgagtagatggctacttcaattttcactgtttagaatctaaaagtatcatatgtcagataccagaccaggagtaacgcctttattgactgagttttgtcagtggcagtttcagttttcttgactcatgtaatttgtgttgtgtttggtttcttggtgactcagagcgctgatgatgaaatcttggtgagggatgttctatatgattctcttatcctggtggattattcattcattaacaatggtgctggagttgatctcttgcctgtatatgtgtcgagattgattatcactcttgatgctgtcaatgatgccaggaggaaaggtgatcaaggtagagcagtgtcatttattaatgccttctcaacctcaaatattcccaattttctcatcaagtgggctacttgtcaagctggctctggtgcactcagcaaaccaatttgcaatacgccccaagctattctcaagtggcttattgaccttgaagataaggggctcaaagtgtttggagattacagttcttgggttatgaggaggtttgtttgcaatgaggtcaagaatgggtatgggaacatggttcagtcagatgcagaccttttctttgttgataaacagagtggtagggaacttatggacaccaaaggcagcgaggatgatgaagctgttgaggagatggagactgcaggtaatgcttttatggctgctgcccagtcaatgaagggggtaactaacggcataaggaagaggaagagctgcggaaacgaagatgcagctgctgtgaagtttgtgaagtacaaggtagaagacagctcagtgaagggctacctgttagcagctaatggcatgagcagtggcagtgaggtagagaacccacagtcggatgatgagatggaagaatccgactgatgcatagaaaatgacagcacccactaatgcttactttggggagagttgctttgaagagtttcttggacaaccgcctttttggagtctggaccagccttgtttcagatgccgcttcttaatgatgtcgtgcagtaccctgttctaggccaataatctgcaggagggcccctctccagctaggctttttttcggatatagtggtaaccgttagctgaccctacttgacaaggagcatgtgatgtctgctatgagctgtatcgtgttctttgttattataatgctatatagtagagacctcaatgtagtcttgcttcattttgcttttgtaatagatgggtacgttgttgttatcccacggaaccagttggaactaatgaactgttaacctttcctgtgtatagcgcctttctgtgcttacttg

SEQ ID NO: 147419 - DNA, 1010 bp, Zea Mays
aagcagctgctgtgttctgttaatggcacagccatcacacgcacgcatacacagcacagagtgaggtaagcatccgaaaaaagctgtgatctgatcgacatggccgccgccaccatggctctcacctcccgcgcgctcgtcggcaagccggcgaccagcaccagggacgtcttcggcgaggggcgcatcaccatgcgcaagactgctggcaagcccaagccagcggcgtccggcagcccctggtacggggccgaccgcgtcctgtacctgggcccgctgtccggccagcccccaagctacctgaccggcgagttccccggcgactacggctgggacaccgcggggctgtccgccgacccggagactttcgccaagaaccgcgagctggaggtgatccactgccgctgggccatgctgggcgcgctcgggtgcgtgttcccggagctgctcgcccgcaacggcgtcaagttcggcgaggccgtgtggttcaaggccgggtcccagatcttcagcgagggcgggcttgactacctcggcaacccgagcctgatccacgcgcagagcatcctggccatctgggcgtgccaggtggtgctcatgggcgccgtcgaggggtaccgcatcgccggtggcccgctcggggaggtggtcgacccgctgtaccccggcggcagcttcgacccgctcgggctcgccgacgacccggaggcgttcgcggagctcaaggtcaaggagatcaagaacggccgcctcgccatgttctccatgttcggcttcttcgtgcaggccatcgtcaccggcaagggtcccgttgagaacctcgccgaccacctcgctgaccctgtcaacaacaacgcctgggcctacgctaccaacttcgtccccggcaagtgagcgagggcatatacatacttgtatgcgtgtaccgggcgttttaaaattttgcattcttcattggtttttctttgcccaacacacacttttcttttacccttctcccaatatttctc

SEQ ID NO: 147420 - DNA, 1121 bp, Zea Mays
gcacagccatcacacgcacgcatacacagcacagagtgaggtaagcatccgaaaaaagctgtgatctgatcgacatggccgccgccaccatggctctcacctcccgcgcgctcgtcggcaagccggcgaccagcaccagggacgtcttcggcgaggggcgcatcaccatgcgcaagactgctggcaagcccaagccagcggcgtccggcagcccctggtacggggccgaccgcgtcctgtacctgggcccgctgtccggccagcccccaagctacctgaccggcgagttccccggcgactacggctgggacaccgcggggctgtccgccgacccggagactttcgccaagaaccgcgagctggaggtgatccactgccgctgggccatgctgggcgcgctcgggtgcgtgttcccggagctgctcgcccgcaacggcgtcaagttcggcgaggccgtgtggttcaaggccgggtcccagatcttcagcgagggcgggcttgactacctcggcaacccgagcctgatccacgcgcagagcatcctggccatctgggcgtgccaggtggtgctcatgggcgccgtcgaggggtaccgcatcgccggtggcccgctcggggaggtggtcgacccgctgtaccccggcggcagcttcgacccgctcgggctcgccgacgacccggaggcgttcgcggagctcaaggtcaaggagatcaagaacggccgcctcgccatgttctccatgttcggcttcttcgtgcaggccatcgtcaccggcaagggtcccgttgagaacctcgccgaccacctcgctgaccctgtcaacaacaacgcctgggcctacgctaccaacttcgtccccggcaagtgagcgagggcatatacatacttgtatgcgtgtaccgtagacatacgtattcgtatatgtactgcaggagatgtaccagtatttgtgaagaagggagcatgggctcagagattgtaccagtagtgtacgtatttgcatgcatgctttggtccttgtggacattatcaatgaaatatgctgtaaattatacatacgtctttaataatgcatactgtacatgatttgctctggcaattaagtcggtgttgtgatgaa

SEQ ID NO: 147421 - DNA, 152 bp, Zea Mays
tctttttttcttttctgttttctctcaatcatctagccgccattttctctctgtggcacgtgcagccgcaggcttggttgtagtatcgcagacacctgtctgtagaaactgaaacctaccagtcttgtcatggctagatgctaataatcaaa

SEQ ID NO: 147422 - DNA, 1965 bp, Zea Mays
ggaagtcaggaagtgggaagtagtagctgagggagccagaggttcgcgcggagcaatggagctctttaatagcttcggcgcattcaccgctttaatggccacttcttccaacgcctctgtcccggcttccacgcgttctcagtgagggctagggtttgcccgcgccgcgtcgctcggcaaggaggaggacagggtgcgctgccgtcggcggcggaggcgcggagctcgttcgtcgccgtcgcgcccccctggcatcgctggttgtctagaggaagaagatgattgtgggctcttcccagcagcagctgctgctgcagaggaaggggaagcccgtggctggcaagggagcggcctccatgaccgtgaaggcagagaaggtggtggtcgcggtaagggcagccacgagggagatctccaagacagccgtcatctgggcgctcacgcatgtcgtgcagcccggcggaagcatcatactcctcgtcgtcatcccggcacagagctctggcagaaaattctggggttttccactgtttgccggagactgtgcaagtggccataagtctatggtggatcagaaatgtgatttatcagagttgtgttctcaaatgttgaagaaattggatgtgtatgatattgacatgataaatgtaatgtataagcttgtttccggctctccttctggtgttgttgctgctgagtgtaagcaagcacaagcaagctgggttgtgctagacaaggatttgaagcacgaggagaagcgttgtgtggaggagcttcagtgcaacattgttgttatgaagcgttctcagcctaaagtccttcggcttaatcttgtgggatctcctgataaagagtctaaagcaacatgtgcagttccacctgtgttagattgttctagtggtaaaactgcaactgatgttaaggaggcacgaagttcaattcgaggacctgctgtaaccccaaatagcagcccagacctggatacacctttcagaagtactgaagcgggaacttcctctgtctcaagttcagaccctggggcatctccattttctgcttctgaaataaatggttctctgaagaaagaggtactagcaacaaaggataaaattcagcattcagatgtcaatatttctgattcggacagtgaaacattgagccctccagcaaatttctcttttcagccatggatgtctgatattctacagggatcagcatcctcaaggtcgcttggaaaagttccacggaaaactcgtactgcaactgcagatgttttgttggaaaagatttccaagctggatctcctgaatgaaattagtgctatgagaagcaggtcagacttaaacttccgcggagatgtcagggatgctgtctcattggcaaggaatgcacctcctggaccacctccactttgttcaatatgtcagcacaaggcacctgttttcggaaagccacctcggtggtttagttatgctgaactggagcttgcaactggtggtttctcccaagcaaatttcttagctgaaggtggatttggttctgttcatcaaggtgtccttcctgatgggcaggctatcgctgttaagcaacacaagcttgctagttctcagggtgatgttgaattctgctcagaggtggaagttcttagttgtgcacaacatcgaaatgttgtaatgctgattggtttttgtgttgaggacagaaggcgtttattggtttacgagtacatctgcaatagatctttggactcacatctctatggtaagattgttttctcggtagcacttttgtacatgaaaccattagtttggttgtggtacttgctgtctccaagttcatgatgcacctaacttttgtgtttctgattcttctcccctctctgtttcactttttttttgtgctaagagtcctgcaagcctagtgatgttgacatatatttgtcttgtaaagctattcttgaaatat

SEQ ID NO: 147423 - DNA, 2061 bp, Zea Mays
ggtggaaaaggctgcctccttttctaactcaatcatctttacctgtcgtgttgctcgcctttttggttcaactccgcctgccaagcaggttcggcgtccaactctagtggcaactaccagtggtacggtactcgctcgcttgctcactcgtctcccctccctgttgccatgagagcgcggttgctgtgttgtttgtactaggcgggcatcaattctagtttgctttggctgtttcttcttgggtcttaggttgttgagttgtttgctttggcagttgggttttctggcttagtgcttctggatttgtaggcatcgctggttgtctagaggaagaagatgattgtgggctcttcccagcagcagctgctgctgcagaggaaggggaagcccgtggctggcaagggagcggcctccatgaccgtgaaggcagagaaggtggtggtcgcggtaagggcagccacgagggagatctccaagacagccgtcatctgggcgctcacgcatgtcgtgcagcccggcggaagcatcatactcctcgtcgtcatcccggcacagagctctggcagaaaattctggggttttccactgtttgccggagactgtgcaagtggccataagtctatggtggatcagaaatgtgatttatcagagttgtgttctcaaatgttgaagaaattggatgtgtatgatattgacatgataaatgtaatgtataagcttgtttccggctctccttctggtgttgttgctgctgagtgtaagcaagcacaagcaagctgggttgtgctagacaaggatttgaagcacgaggagaagcgttgtgtggaggagcttcagtgcaacattgttgttatgaagcgttctcagcctaaagtccttcggcttaatcttgtgggatctcctgataaagagtctaaagcaacatgtgcagttccacctgtgttagattgttctagtggtaaaactgcaactgatgttaaggaggcacgaagttcaattcgaggacctgctgtaaccccaaatagcagcccagacctggatacacctttcagaagtactgaagcgggaacttcctctgtctcaagttcagaccctggggcatctccattttctgcttctgaaataaatggttctctgaagaaagaggtactagcaacaaaggataaaattcagcattcagatgtcaatatttctgattcggacagtgaaacattgagccctccagcaaatttctcttttcagccatggatgtctgatattctacagggatcagcatcctcaaggtcgcttggaaaagttccacggaaaactcgtactgcaactgcagatgttttgttggaaaagatttccaagctggatctcctgaatgaaattagtgctatgagaagcaggtcagacttaaacttccgcggagatgtcagggatgctgtctcattggcaaggaatgcacctcctggaccacctccactttgttcaatatgtcagcacaaggcacctgttttcggaaagccacctcggtggtttagttatgctgaactggagcttgcaactggtggtttctcccaagcaaatttcttagctgaaggtggatttggttctgttcatcaaggtgtccttcctgatgggcaggctatcgctgttaagcaacacaagcttgctagttctcagggtgatgttgaattctgctcagaggtggaagttcttagttgtgcacaacatcgaaatgttgtaatgctgattggtttttgtgttgaggacagaaggcgtttattggtttacgagtacatctgcaatagatctttggactcacatctctatggtcgtaatagagaaacattggagtggactgcacggcataagattgcagttggtgctgctcgtgggctgcggtacctccacgaggaatgtagggttggctgcataatccatcgtgacatgagaccaaacaacatccttgtcacacatgatttcgagccactggtacagtcctactttgctgattgtggtgtaaagttgactatttgttcttgtgcatttgacattaggcacctttccatatag

SEQ ID NO: 147424 - DNA, 1908 bp, Zea Mays
ctgaagctgggtagctcctgctcctatcccggctgctggcgcgccgtggttttgtgctcttgtggacacactggcctccacccatccctctcacgtctctggccatccgcagccaaggcgcgcggcccatcgtcgatttatagccacaccatggccaggaagtgctcccactgtggcaactacggccacaactccaggacctgcggactaggactaggactaggacacagagaaataatgctctgcgaaggtggcgacgacaataatggccgcagcggcctaaggctcttcggagtgcaggtccgtatcggcggcggcggtggcgcagggtcggcgtccatgaagaagagctacagcatggactgcctgcagctcgcggctcctcatgcttgttcgtccctcgtctcgtccccgtcgtcgtcgtcgttgtgctcgtcctcgtccccgtcgtcgctgctgctgtcgattgatgatgggttgcagagaggggcggccgatggatacctgtctgatggacctcatggcagagctgtgcaggagaggaagaaaggtacgtcaagaaatttttttcccttcctgatgaaaagacaaaagaggaagatttgttctttggaaattcagaaacttcaccttacacgaatttcttttcttattggtaatacgtactgtccatcagtcgtctgacctaaaaaaaaagttgcattatgctctacttttttttggcctaaaaaaagagagtaatatagctttatcttccactgatgctgcaacccttcaactgcaagtaacaatgaagcagctgagactgagagatactagtgcttccctgcacattattgagtccttgttgggttggtcggtagcagctgatgtttctaaacaaaaacaatactctggatatataccgacgacgccaggagttccatggagcgaggaggagcacaggcagttccttgccggcctggacaagctgggcaagggcgactggcgaggcatcgccaggagctacgtgccgacgaggaccccgacgcaggtcgccagccacgcgcagaagttcttcctccggcagagcagcatggggaagaagaagcgccggtccagcctcttcgacatggtatgcgcatgcaggcaccaacatctctctcttttttttctgtacgtaattgcttgagttttgataaccgggtccagcggcaggtgccgatctgcgagaacagtgcgagcatctccgatccgctggacgtggcacgccatggcgtcgcctcggcagactccgagagggcggccgtggacgtggacctgatgaattcgacgacggagggtgacgacggcaggagcagggacgtcgtgtcgtcggcgtcaggtgcagggaccgcactgcggttcccggcagcggcagctcagacggagccgctgcatccttcgtcatcgcatggccatgggcgcggccaccactgctctccgttggacctggagctgggcatgtccctgcccgccccatccgtcggaacgtgatggagatgaggcgaggccgaggccgtgcgtgactgctgtctccctcagctgtgtgtgtcagccagatggagatgatgcgctagccaatacagtactgttcgtgatcgtgaaaacggtgtgcaaacactagcacagcggcactaaactaggatgtcgctcctcgcaccatattgtgtactgtaaccacgttgatccacatcatctctatctcttcaccaccgttggatcataggctgtcagtttcatctatccgtccatgtgtcatactcattcacgatgcggtggcttaatgatccagcagtaatttttcttctttcgtgacttaagggtatatacggtggtatttaatgtagaggcttttgatgtatttaaaggggtatttgcaaaaaaatt

SEQ ID NO: 147425 - DNA, 1354 bp, Zea Mays
gttttgtgctcttgtggacacactggcctccacccatccctctcacgtctctggccatccgcagccaaggcgcgcggcccatcgtcgatttatagccacaccatggccaggaagtgctcccactgtggcaactacggccacaactccaggacctgcggactaggactaggactaggacacagagaaataatgctctgcgaaggtggcgacgacaataatggccgcagcggcctaaggctcttcggagtgcaggtccgtatcggcggcggcggtggcgcagggtcggcgtccatgaagaagagctacagcatggactgcctgcagctcgcggctcctcatgcttgttcgtccctcgtctcgtccccgtcgtcgtcgtcgttgtgctcgtcctcgtccccgtcgtcgctgctgctgtcgattgatgatgggttgcagagaggggcggccgatggatacctgtctgatggacctcatggcagagctgtgcaggagaggaagaaaggagttccatggagcgaggaggagcacaggcagttccttgccggcctggacaagctgggcaagggcgactggcgaggcatcgccaggagctacgtgccgacgaggaccccgacgcaggtcgccagccacgcgcagaagttcttcctccggcagagcagcatggggaagaagaagcgccggtccagcctcttcgacatggtgccgatctgcgagaacagtgcgagcatctccgatccgctggacgtggcacgccatggcgtcgcctcggcagactccgagagggcggccgtggacgtggacctgatgaattcgacgacggagggtgacgacggcaggagcagggacgtcgtgtcgtcggcgtcaggtgcagggaccgcactgcggttcccggcagcggcagctcagacggagccgctgcatccttcgtcatcgcatggccatgggcgcggccaccactgctctccgttggacctggagctgggcatgtccctgcccgccccatccgtcggaacgtgatggagatgaggcgaggccgaggccgtgcgtgactgctgtctccctcagctgtgtgtgtcagccagatggagatgatgcgctagccaatacagtactgttcgtgatcgtgaaaacggtgtgcaaacactagcacagcggcactaaactaggatgtcgctcctcgcaccatattgtgtactgtaaccacgttgatccacatcatctctatctcttcaccaccgttggatcataggctgtcagtttcatctatccgtccatgtgtcatactcattcacgatgcggtggcttaatgatccagcagtaatttttcttctttcgtgacttaagggtatatacg

SEQ ID NO: 147426 - DNA, 1515 bp, Zea Mays
gttttgtgctcttgtggacacactggcctccacccatccctctcacgtctctggccatccgcagccaaggcgcgcggcccatcgtcgatttatagccacaccatggccaggaagtgctcccactgtggcaactacggccacaactccaggacctgcggactaggactaggactaggacacagagaaataatgctctgcgaaggtggcgacgacaataatggccgcagcggcctaaggctcttcggagtgcaggtccgtatcggcggcggcggtggcgcagggtcggcgtccatgaagaagagctacagcatggactgcctgcagctcgcggctcctcatgcttgttcgtccctcgtctcgtccccgtcgtcgtcgtcgttgtgctcgtcctcgtccccgtcgtcgctgctgctgtcgattgatgatgggttgcagagaggggcggccgatggatacctgtctgatggacctcatggcagagctgtgcaggagaggaagaaaggagttccatggagcgaggaggagcacaggcagttccttgccggcctggacaagctgggcaagggcgactggcgaggcatcgccaggagctacgtgccgacgaggaccccgacgcaggtcgccagccacgcgcagaagttcttcctccggcagagcagcatggggaagaagaagcgccggtccagcctcttcgacatggtatgcgcatgcaggcaccaacatctctctcttttttttctgtacgtaattgcttgagttttgataaccgggtccagcggcaggtgccgatctgcgagaacagtgcgagcatctccgatccgctggacgtggcacgccatggcgtcgcctcggcagactccgagagggcggccgtggacgtggacctgatgaattcgacgacggagggtgacgacggcaggagcagggacgtcgtgtcgtcggcgtcaggtgcagggaccgcactgcggttcccggcagcggcagctcagacggagccgctgcatccttcgtcatcgcatggccatgggcgcggccaccactgctctccgttggacctggagctgggcatgtccctgcccgccccatccgtcggaacgtgatggagatgaggcgaggccgaggccgtgcgtgactgctgtctccctcagctgtgtgtgtcagccagatggagatgatgcgctagccaatacagtactgttcgtgatcgtgaaaacggtgtgcaaacactagcacagcggcactaaactaggatgtcgctcctcgcaccatattgtgtactgtaaccacgttgatccacatcatctctatctcttcaccaccgttggatcataggctgtcagtttcatctatccgtccatgtgtcatactcattcacgatgcggtggcttaatgatccagcagtaatttttcttctttcgtgacttaagggtatatacggtggtatttaatgtagaggcttttgatgtatttaaaggggtatttgcaaaaaaattatggagccgtctctgcatgaag

SEQ ID NO: 147427 - DNA, 1367 bp, Zea Mays
atgctccagcctctctccgttcgagccactgccccatggaccctccatgcatccggtcctacgccccagcttttctcccccacgccgtatgatgggatgaattccaacgacaacaacacggggaactggaaggcgatcttaacagcaccagaggcccatccggataagcacaaacccgcaaccaccttccgaaataccagttctcgcacatatataacttgcgggccgcgtacctccttacccccccgagccgcaaacctgcaaccaccttcccaaatcctagttctcgcttctcgtcgtctagcctcggcccgttccaaaagccccgcagctctcgcatctcatcagacgccaccaccacctccggcgaccgaagatgatctctccggatgcagcccgcaacgtcgtaggcatcatcggcaatgtcatctcctttggcctcttcctctccccagttctgacgttctggcggatctgcaaggccagggacgtggaggagtttaagcctgacccctacctggcgacgctgctcaactgcatgctctgggtgttctacggcatccccgtcgtccaccctaacagcatcctcgtcgtcaccatcaacggcgtcgggctcgtcatcgaggccatctacctcaccatcttcttcctttactctgatggcccgaaacgcaggaaagcgttcggaatcctggccgtggagattttgttcatggtcgccgtggtgcttggtgtgattttgggcgcccacacgcacgagaagcgctccatgatcgtcggcattctctgcgtcattttcggctcgatgatgtacgcctccccactcaccattatgagccgtgtgatcaagaccaagagcgttgagtacatgcccttcctcctctcgctggtgagcttcctcaatggctgctgctggacggcctacgcgctcatccgcttcgacctctacgttacgatccccaacgcccttggcgccttcttcggtctcatccagctaatcctctacttctgctactacaagtcgacccccaaggagaagaatgtggagctgcccaccgtctccagcaacgccggcggcggcaacgtcaccgtcagcgtcgagcgataggcgacgtagctgcagcggcagcgccgccgcccgtcgagaaagaactcgacgagacgtactttagcaatagtagttgccattcatcgctcttctaggatggtttgttttaagtgagtgctacctagttttgcccggtgcgtgtcgtgtcaaagaacagttaggggtgtttggttcacccaattaaataaagttaaagtttagtatttgctctgaatgtttgaataataattatgactattaaatatagttttaattataa

SEQ ID NO: 147428 - DNA, 147 bp, Zea Mays
atggaggtccttgggagtaaggatgggttcttgacgaagaggattaagagttatagcacaagccagagtgatcctacaaagccacatgcattgcaatgcctttcaccactgatagcaggtcatgtgggtaatggaattgtttgttga

SEQ ID NO: 147429 - DNA, 4659 bp, Zea Mays
catttcgttgctgtcatccctccaaaacggtaacccttgccgtcgccgggcgttctcgctctcggcctccagccggcgcgccgcgtctcccagcgctcctccctccacattcctcggccaccgcacgaacctcaaaactatggcctcgtgccctctgttcctccttgtcccgcggccccctccttcccttgtcggcgccgaccgctgcccaggctccgcgggctgctcagatctcccaactagctgccgtcctcatcctggacgccggcatggttacccatttcgttgcaactcgtcttcttcctcgtccgcgcctcgcgagcgcccgcccaggcagcgccccggtggccgtggcgacgccatcgaccccgtaggcttcctcaccaagctcggcgtctcggaccgcgccttcgcccagttcctccgcgaccggcacaaggccttgaaggaccgtagatgggagctgtgttctcggtttattgatctgaaagaggcatcttctgggtttgagttattgggcatgcaccgacatcgacaacaccgcatcgatttcatggaatgggctccaggtgctcggtattgttctttgattggtgattttaatcagtggtcgccaactgaaaactgtgccagggaaggtcatttaggacatgatgattttggatattggtttatcatacttgaagataagctcagagaagggcaagaacaagatgaatatttcttccaggaatacaattatgtggatgactatgataaaggtgacaatggcattgatgctgatgaaataatgcgtaggatgaaagaagagtattgggaacctggagaaatcaggtcccgtcagtctcagttagagatggttgttaagctatatgagcaaatgtttggcccaaacggtccacaaacagaggaggagctaggtgaaattcctgatgcccaaacaagatacaatgagttcaaagcatcgcagaaggctgactcttccagccagccttcctatgatatcattgacaatgggcaggagttcgacattttcagtgttgtaactgatcgtgcatcatttgaaaagtttcaagcaaaaaaacctccccttgcttactgggttgaaatgaggaaaggtcgaatagcatggcttgagaaatatgttccaacaatttctcataaagacaagtacagggtttattttaatactcctgatggtgctttagaacgtattcctgcttgggctgcatatgttcttccagatgctgaggggaagcaatcctatgcagtacattgggaaccacctcctgaagaaatttacaaatggagatttggacgtccaaaggtgaagggttcacttagaatatatgaatgtcatgttggaataagtggttcagagcaaaaggtttcatcatttcaggagttcacatccaaagtcctaccgcatataaaaaaagctggatataatgctgttcagctgattggtgttgtggagcacaaggattactcctccattggctataaggtcactaattattttgcagtcagcagcagatttggcaccccagatgacttcaagaaattagtcgatgaagcgcatggccttggattagtagtgcttctggatattatccactcctatgcatccgcagatgaactggttggcttatcactttttgatggctctaatgactgttacttccacagtggaaaaagagggcatcacaagtactggggcaccaggatgtttaaatatgatgatgtggatgttctgcacttcttgttgtccaatttgaattggtgggtcactgagtaccggattgatggattccagttccattccttgtcttctatgttatatactcataatgggttttctacttttactggtgccatggaagagtattgcaatcagtatgttgacaaggatgcactgatatatctaattctagcaaatgaaatgttacatcgtcttcatccagatattgtaacaattgctgaagatgcaacattttatcctggattatgtgagccaattactcaaggcggattgggattcaactactgggtcaatctttctataccagaaatgtggttgtggcatcttgaaaatgtccctgaacaagaatggagcatgaataagattattaaagtattagtaagcagtaaccagaatatgctatcatatgttgaaaatcataaccagtccatatctggacgcaagtcttttgctgagataattcttaattcaagagagtgctctgttggttctgttgacgacaatttgattagagcttcttctttgttgaaattgatgaaactaattactttcacgacaagcggaggcgcttatctcaacttcatgggcaatgaatttgcacatccagaaaaagttgaatttcctatgccaagcaatgactattccttcgagttagctaatcggcaatgggaactattggacaaagtttttcataaacatatatttaactttgacaaggatgttatgagcttggatgaaaatgaaaggataatttctagaggtccacccaacattcttcactgtgatgacacaagcatggtcatatctttcacaagagggcctttatttttcatatttaattttaatcctcaagtctcccatcagtcgtatcgtgttggtgtggatgaagctggggaataccaactcatcttcaacacagatgaaactaaatatggtggatgtgaaaccctcaagagtagtcagtatatgcggaggacctctgataaaagagctgatggttgtcgcaactccttggaattggcattgccatctagaagtgctcagatttacaagttagttagaattttgagaatttagcatgtcagcaatataggtattgtaatggaatcatgcaactgcgtagaagatggggctttgtggtccttgtggtttttgttgataagatgaaaaaacaaagggatcgatagcttcgggacatctgttgacgttgaggaccctgcagttttgccctttgcggcaatgcaacttctctaaaatttatacatgctgtgactactgaggctcatctataaaaggctagacagtttactacaacttttgcccttttttattgctacgttgtttactgaaattccactgtttcgttcgtccagtttatggtcgggagaaagatctgtctgtccattcttagctctgacatgccttttcatttctacctgtcctcctggtttctgagtctatgaatcatgtcgtcccctcccctatcaattgccctcgacagatcctcttctccaacgacggtggcatggatgcccacgtcccaacattgtaggtgcaattcccaggtcatactcatcctctccgatggtgcagggtgcggcacatgtgtcgcccccatccacttcatctattgactattccatcatgttcacatcctccctaactcccctctcccatggctccacctcatcgtcttctcacctaccagggcttatcctctccctgctatgaattccgaaccctaacccatttatgttgttatagatcctgattccttttgttttgatcggttcagaacttcagatttggctcatgagttctaaacccaatcaagatattttctatactgtgaatttgttagactactttgttcagggacaaggagtattagagtaatatctttggaaatctacataattctatatctgagtgtgaatattatctgttctttaactgtatgctttagtagcatgcatatgtacatgtctctgttataggatataaattaccgttccctttattttacatggcatggctacacagatataaattatattgtagtaagtataattggtgtctgattgtgattgtatgcttttatgaatccttgctatttcttccgaaaatatatagcatgtccctgcctgtataaagttctataaaagaatgatgaaacacatgttccattggttatttcatacctagctaaacatggtttatggtttccaaaattgctgtggtaactggaccttgtatcgcagaatttcagtattagttgtttgattcttgccatatagtttttgttgcttctatgtttggcacttggtattagtttcctatgttttctctgccttcttgctcagctcatggttagtgattcatacttgccgttttgttcaacctggcgtcatgaagagcttcagctctttctaaagaacgtcggtctgaagctcttcgtgatgttagtttgttaattgatgaagcctgcatattatgccatgtggtgatttccccaatgaattccaatcatctttcagatggtcttgccgcaatgtttatttggtcagccagccggtatgagcactgagcatacctcttttggttacctcagcttgccttctattcttggtaaacttgaccgcttaatataaaaagtgaagtattcattttctgttacagcaaatgcatctgctggtgatgccagtccattacctaacgaatcttacataccatgccatcgaaatttggccactgaatgaactccatcagcatccgaagcatcctgtgtggtgccaccgtttttatctgttcaatgtttcaatctgctgtggacctggtgtgctctactcactatacatgcttcctgtattaggtgcctctcaccttaccttccatgc

SEQ ID NO: 147430 - DNA, 513 bp, Zea Mays
agctctactcctagcatgagaagcccaatccgaggcggaatgctgccgctccatgtcgcggccgcggtggtggtcaccatgctcgcgttcccggcggcggtagtgctgggcatcgccaccgacgaggactgcaagtgcttcatgtgcgtctgcgacctggacccgcacccgctgccgccagaggtgccgacccaccaccctccgccggcgcagccggagccggtcccttcgccgcccccgccgcccccgtccccatcgccaccaccgccggcgccggcgctcccggtgtactacccgccacagaccgggtactactactacccgccgcagccgtacgggtacccggcgggggagatgtacccgcgggacgacaacaggcgggagtccaagtctgatgcggcccggcggcacggcagctgcgggcgcgccagcttggctctcgccgccgcgctcgcgtgcggggtgctggctctgcttctgcgctccgcagcagcttgaatggctggtcattag

SEQ ID NO: 147431 - DNA, 1792 bp, Zea Mays
agccaaatcattcacgtatccatcttcaagccagccgtctccttatccctacgacgccgctcacctgtgctcatcttccagccgccctctccgcccagcagcagagcacaccatcctctccactcggatccccaagccctcgcctccagctttgccacgacatccgtcccctgctcggacctccacccggccgcgtcctcgccggtggccagcgccgctgcatcgccattcctagcgtcggccttggcaccgcttccccgagcgccccagtcgagctcgcccatcctctgctctagccctttctccacgccgtagctgatctcgcccctctcctcagccatggacacgacgacctgcagcccttcttggtggccaagcccatcttcctgctcgcgccccctctttttccacctctgcgcgtatcagctcgtccaacccccatggtgtttcctccctctcggctcccttgctccctccccatggcgttccccctagatgctcgtgatctgttccccacggtgcaggcaaatgttctttccctccctgcagcagcaccttggtggttgtcgagcagcacgtcgcgcttgcgcagcctcggtcacgacgttgttcaccccggtacgctaatgatcgagatgcgaaggccagggtctaggttgaccccaagtggtgcaaaggatggcctacttcgagaggcgatgtcagcggaccaatctagaagattgatgatctctacataaaaacatgattacattgattcaactctgatctggtgtttggcatttgtttttcctctacattagtttctcattattatatttgtatagatttgtattcttgagactaacctaatcaacattctttacataataatattataaggaggattaatttcatatacaatactatatataatgagatgaatcatttggccttacgatatgtgtaagaaataatgctttgataattggcagcctatcaagagtttcattagtgtagaacaattgttttgttgttaacatagtgtataacatttgatgtcgtaatttgttttggaagaaaatttaatctcaacatagaattttttactgacaggtttatggtcttttaatatctacaggttgtggaaactgagatcattgtaactcaaatgagagcttggcacttagcatatagatgccactagaaccaatctggaaatactgtgagatatagagtgataaaaggcattaatgtaagtactacataaatgtactacttgtattttttaataatcaatgcttcaaaagtctatatagatgctgactggtgtcagggttttcccattattgtaagtttgttacaagcaagtgctttccctcacacaacttcaccttttctttacatgtttattacttttgtttgctggttttgacttacagtgaattgtgtatgcaactattgtggtatatcaatgaccttccgagaagatacaatggcgttcttagtagtaacgctgcttgatttctatagttggagtcatcacacagctaacatttgcactttaactgtttggtgaaatgcttgggagaaagaggccagcaagaatggagtcatggaacatcggcaggaggagtgcagcagcggcaaccgatgtatcccttgaacaatctggttttgacaagatgcaaatcaatctagtgtacattgtattccacacttgcaaagattgtttggctaattacaagattatttcagtgttttggtttggattaagagtacacttatgtatgaaatattgattggtactcat

SEQ ID NO: 147432 - DNA, 1939 bp, Zea Mays
agccaaatcattcacgtatccatcttcaagccagccgtctccttatccctacgacgccgctcacctgtgctcatcttccagccgccctctccgcccagcagcagagcacaccatcctctccactcggatccccaagccctcgcctccagctttgccacgacatccgtcccctgctcggacctccacccggccgcgtcctcgccggtggccagcgccgctgcatcgccattcctagcgtcggccttggcaccgcttccccgagcgccccagtcgagctcgcccatcctctgctctagccctttctccacgccgtagctgatctcgcccctctcctcagccatggacacgacgacctgcagcccttcttggtggccaagcccatcttcctgctcgcgccccctctttttccacctctgcgcgtatcagctcgtccaacccccatggtgtttcctccctctcggctcccttgctccctccccatggcgttccccctagatgctcgtgatctgttccccacggtgcaggcaaatgttctttccctccctgcagcagcaccttggtggttgtcgagcagcacgtcgcgcttgcgcagcctcggtcacgacgttgttcaccccggtacgctaatgatcgagatgcgaaggccagggtctaggttgaccccaagtggtgcaaaggatggcctacttcgagaggcgatgtcagcggaccaatctagaagattgatgatctctacataaaaacatgattacattgattcaactctgatctggtgtttggcatttgtttttcctctacattagtttctcattattatatttgtatagatttgtattcttgagactaacctaatcaacattctttacataataatattataaggaggattaatttcatatacaatactatatataatgagatgaatcatttggccttacgatatgtgtaagaaataatgctttgataattggcagcctatcaagagtttcattagtgtagaacaattgttttgttgttaacatagtgtataacatttgatgtcgtaatttgttttggaagaaaatttaatctcaacatagaattttttactgacaggtttatggtcttttaatatctacaggttgtggaaactgagatcattgtaactcaaatgagagcttggcacttagcatatagatgccactagaaccaatctggaaatactgtgaggtaattttatatcttgttctgtaagttggagaattaatagctagcatatgcttccttaatgatgttttctttttccatgcatcttcatattaccaaaccctcttcttgccggaaaaacagatatagagtgataaaaggcattaatgtaagtactacataaatgtactacttgtattttttaataatcaatgcttcaaaagtctatatagatgctgactggtgtcagggttttcccattattgtaagtttgttacaagcaagtgctttccctcacacaacttcaccttttctttacatgtttattacttttgtttgctggttttgacttacagtgaattgtgtatgcaactattgtggtatatcaatgaccttccgagaagatacaatggcgttcttagtagtaacgctgcttgatttctatagttggagtcatcacacagctaacatttgcactttaactgtttggtgaaatgcttgggagaaagaggccagcaagaatggagtcatggaacatcggcaggaggagtgcagcagcggcaaccgatgtatcccttgaacaatctggttttgacaagatgcaaatcaatctagtgtacattgtattccacacttgcaaagattgtttggctaattacaagattatttcagtgttttggtttggattaagagtacacttatgtatgaaatattgattggtactcatttatattatttttattatatcattatt

SEQ ID NO: 147433 - DNA, 1731 bp, Zea Mays
agccaaatcattcacgtatccatcttcaagccagccgtctccttatccctacgacgccgctcacctgtgctcatcttccagccgccctctccgcccagcagcagagcacaccatcctctccactcggatccccaagccctcgcctccagctttgccacgacatccgtcccctgctcggacctccacccggccgcgtcctcgccggtggccagcgccgctgcatcgccattcctagcgtcggccttggcaccgcttccccgagcgccccagtcgagctcgcccatcctctgctctagccctttctccacgccgtagctgatctcgcccctctcctcagccatggacacgacgacctgcagcccttcttggtggccaagcccatcttcctgctcgcgccccctctttttccacctctgcgcgtatcagctcgtccaacccccatggtgtttcctccctctcggctcccttgctccctccccatggcgttccccctagatgctcgtgatctgttccccacggtgcaggcaaatgttctttccctccctgcagcagcaccttggtggttgtcgagcagcacgtcgcgcttgcgcagcctcggtcacgacgttgttcaccccgctaaccattggtgtcatacctcacgtgtcatgtgttcgccgaaatgcctaaacatgtagtctgtcgtcgttgtatccacagtcaattttagtcatggtacgctaatgatcgagatgcgaaggccagggtctaggttgaccccaagtggtgcaaaggatggcctacttcgagaggcgatgtcagcggaccaatctagaagattgatgatctctacataaaaacatgattacattgattcaactctgatctggtgtttggcatttgtttttcctctacattagtttctcattattatatttgtatagatttgtattcttgagactaacctaatcaacattctttacataataatattataaggaggattaatttcatatacaatactatatataatgagatgaatcatttggccttacgatatgtgtaagaaataatgctttgataattggcagcctatcaagagtttcattagtgtagaacaattgttttgttgttaacatagtgtataacatttgatgtcgtaatttgttttggaagaaaatttaatctcaacatagaattttttactgacaggtttatggtcttttaatatctacaggttgtggaaactgagatcattgtaactcaaatgagagcttggcacttagcatatagatgccactagaaccaatctggaaatactgtgagatatagagtgataaaaggcattaattgaattgtgtatgcaactattgtggtatatcaatgaccttccgagaagatacaatggcgttcttagtagtaacgctgcttgatttctatagttggagtcatcacacagctaacatttgcactttaactgtttggtgaaatgcttgggagaaagaggccagcaagaatggagtcatggaacatcggcaggaggagtgcagcagcggcaaccgatgtatcccttgaacaatctggttttgacaagatgcaaatcaatctagtgtacattgtattccacacttgcaaagattgtttggctaattacaagattatttcagtgttttggtttggattaagagtacacttatgtatgaaatattgattggtactcatttatattatttttattatatcattattaaa

SEQ ID NO: 147434 - DNA, 1635 bp, Zea Mays
agccaaatcattcacgtatccatcttcaagccagccgtctccttatccctacgacgccgctcacctgtgctcatcttccagccgccctctccgcccagcagcagagcacaccatcctctccactcggatccccaagccctcgcctccagctttgccacgacatccgtcccctgctcggacctccacccggccgcgtcctcgccggtggccagcgccgctgcatcgccattcctagcgtcggccttggcaccgcttccccgagcgccccagtcgagctcgcccatcctctgctctagccctttctccacgccgtagctgatctcgcccctctcctcagccatggacacgacgacctgcagcccttcttggtggccaagcccatcttcctgctcgcgccccctctttttccacctctgcgcgtatcagctcgtccaacccccatggtgtttcctccctctcggctcccttgctccctccccatggcgttccccctagatgctcgtgatctgttccccacggtgcaggcaaatgttctttccctccctgcagcagcaccttggtggttgtcgagcagcacgtcgcgcttgcgcagcctcggtcacgacgttgttcaccccggtacgctaatgatcgagatgcgaaggccagggtctaggttgaccccaagtggtgcaaaggatggcctacttcgagaggcgatgtcagcggaccaatctagaagattgatgatctctacataaaaacatgattacattgattcaactctgatctggtgtttggcatttgtttttcctctacattagtttctcattattatatttgtatagatttgtattcttgagactaacctaatcaacattctttacataataatattataaggaggattaatttcatatacaatactatatataatgagatgaatcatttggccttacgatatgtgtaagaaataatgctttgataattggcagcctatcaagagtttcattagtgtagaacaattgttttgttgttaacatagtgtataacatttgatgtcgtaatttgttttggaagaaaatttaatctcaacatagaattttttactgacaggtttatggtcttttaatatctacaggttgtggaaactgagatcattgtaactcaaatgagagcttggcacttagcatatagatgccactagaaccaatctggaaatactgtgagatatagagtgataaaaggcattaattgaattgtgtatgcaactattgtggtatatcaatgaccttccgagaagatacaatggcgttcttagtagtaacgctgcttgatttctatagttggagtcatcacacagctaacatttgcactttaactgtttggtgaaatgcttgggagaaagaggccagcaagaatggagtcatggaacatcggcaggaggagtgcagcagcggcaaccgatgtatcccttgaacaatctggttttgacaagatgcaaatcaatctagtgtacattgtattccacacttgcaaagattgtttggctaattacaagattatttcagtgttttggtttggattaagagtacacttatgtatgaaatattgattggtactcatttatattatttttattatatcattattaaa

SEQ ID NO: 147435 - DNA, 1383 bp, Zea Mays
agccaaatcattcacgtatccatcttcaagccagccgtctccttatccctacgacgccgctcacctgtgctcatcttccagccgccctctccgcccagcagcagagcacaccatcctctccactcggatccccaagccctcgcctccagctttgccacgacatccgtcccctgctcggacctccacccggccgcgtcctcgccggtggccagcgccgctgcatcgccattcctagcgtcggccttggcaccgcttccccgagcgccccagtcgagctcgcccatcctctgctctagccctttctccacgccgtagctgatctcgcccctctcctcagccatggacacgacgacctgcagcccttcttggtggccaagcccatcttcctgctcgcgccccctctttttccacctctgcgcgtatcagctcgtccaacccccatggtgtttcctccctctcggctcccttgctccctccccatggcgttccccctagatgctcgtgatctgttccccacggtgcaggcaaatgttctttccctccctgcagcagcaccttggtggttgtcgagcagcacgtcgcgcttgcgcagcctcggtcacgacgttgttcaccccggtacgctaatgatcgagatgcgaaggccagggtctaggttgaccccaagtggtgcaaaggatggcctacttcgagaggcgatgtcagcggaccaatctagaagattgatgatctctacataaaaacatgattacattgattcaactctgatctggttgtggaaactgagatcattgtaactcaaatgagagcttggcacttagcatatagatgccactagaaccaatctggaaatactgtgagatatagagtgataaaaggcattaatgtaagtactacataaatgtactacttgtattttttaataatcaatgcttcaaaagtctatatagatgctgactggtgtcagggttttcccattatttgaattgtgtatgcaactattgtggtatatcaatgaccttccgagaagatacaatggcgttcttagtagtaacgctgcttgatttctatagttggagtcatcacacagctaacatttgcactttaactgtttggtgaaatgcttgggagaaagaggccagcaagaatggagtcatggaacatcggcaggaggagtgcagcagcggcaaccgatgtatcccttgaacaatctggttttgacaagatgcaaatcaatctagtgtacattgtattccacacttgcaaagattgtttggctaattacaagattatttcagtgttttggtttggattaagagtacacttatgtatgaaatattgattggtactcatttatattatttttattatatcattattaaa

SEQ ID NO: 147436 - DNA, 716 bp, Zea Mays
gacccccaaccggtggccgcaactccatgacctcgacacgcggtgacgaaggttcctcgatctggagtagtggcggcggttcccaggtcgaaggcgtcggctccccgatccagagggcgagcgacagcggggcccttgtgcgggcaagcggcagcgtccccgaggtcccgaggaggcggcacttccaaggccggcgagcaagcgatgcccgtcgacatgcgagtagcgacggcgacgcatgagacgcgatgttcgagcgagcggcgtcacggaaggcccgagatgcgcgcagcgatgatcgcgcgtgacatcctccgatctggcgcagttttcttttcgattattgtgttttatgcctaccacatgtattatttacgccaaaaactgtacgattttatgcttaagcgtggagttcgtatatcagtttactgcatacacattggaaaggcaattccttgatttatgatgttcgtaatttgcacgcatgcaatggaagctcccacgatttttgccataatttttggatctgtataaaaatagaaaccgcatgcatgcggctgccatattttcgaatctgtcataaaaataggatagtaataacaacctactagagctatcaacctctcacattgactcggtatttacgcttataattgagggattttatgctcaaaacttaaggtttttacactccaccggagatgcgtccaccagtg

SEQ ID NO: 147437 - DNA, 1488 bp, Zea Mays
aaatcccatccagagattatcgaagcaacgagcgccgctccccttcacccctccgcctccctccaaaactcaaattgacctagcgagaagcagaagaggcgaagagtgataacgaacctctcccacatcgatttccccaaatcgcctggcgcgatgaccacggcaggagaggtggattcggcagcaggaggtgaggacctggagccgctcttcgactacaagcgagtgcagcccaggatgacgttctgctttgacgacagcgacttggaggtggccgacatcttcaaatactgcaacaagcgcccaaaggtccacacctccacggaggaggagggtaagcctgacgaggaggtcgccgctgccaaggtggtggtcctcgatgaggaggattggttgcagccaccgccacccaaggccgcattcagggcaacggcagaggaagatagtgcgtttcgggaactgaggttgaagaaacaagagtgggcaaaattcgctgaatcagctgaggatatattgcaaaagctggatgaaatcacgaacaaagaagttggtcccaaggaaccacctgaacagataattctagatgaggagtctgaacctcaagtcgagaaagccagggaaaagatagtcatatcaatccaggacaaggatgggcagcaacagatgcgtgtatacaaggacgaaaagttcgacaagcttctcaaggtgtacgccaagaaggcaaagctcaacccatctgatctgtcttttgtgtttgatggtgagaagattaatccatcatctacacctcaggaccttgatctggaggacgaagacatgattgaggtgcgtcgtaagcagagttgaggtcatcctcgatatatgctggtttagacaaactcagccttttcgctgtcttcttttgcttccaacaaaggcttatttgtctatatatcatataacaaagacgttgaggccatccttgatatatgcgtgaaaccctcgagatatattgcagctgtaccgtgtacgtgggggtttggttggcaaaagccatctgcagaaatgccagagcagcctctgttattggatgtcagtatacaagacgccagtcagctagcaatgccaacagaagtgactaaggatggcgccaactgtagctaataatcttcttagttttggttactttctaaaaataacatattgattttcaaagttacgtgctggtttctaggcctcaagtcgtctcgcaagacatagtttgtattaaaattattaaagcatgtccaatagttcctcaaaaactctttaaatagggtgttagtaataaaaaccattctataacagttctttaaatgaggtttctaaataaactaaattcttaaatatccctatttagttctcaaactttaggagttgttttgcactttcaataacttgttttgcttatcaatcataccataaaatcacttgtctgctattgagtttgcacatgtgtacagtgatgta

SEQ ID NO: 147438 - DNA, 1485 bp, Zea Mays
aaatcccatccagagattatcgaagcaacgagcgccgctccccttcacccctccgcctccctccaaaactcaaattgacctagcgagaagcagaagaggcgaagagtgataacgaacctctcccacatcgatttccccaaatcgcctggcgcgatgaccacggcaggagaggtggattcggcagcaggaggtgaggacctggagccgctcttcgactacaagcgagtgcagcccaggatgacgttctgctttgacgacagcgacttggaggtggccgacatcttcaaatactgcaacaagcgcccaaaggtccacacctccacggaggagggtaagcctgacgaggaggtcgccgctgccaaggtggtggtcctcgatgaggaggattggttgcagccaccgccacccaaggccgcattcagggcaacggcagaggaagatagtgcgtttcgggaactgaggttgaagaaacaagagtgggcaaaattcgctgaatcagctgaggatatattgcaaaagctggatgaaatcacgaacaaagaagttggtcccaaggaaccacctgaacagataattctagatgaggagtctgaacctcaagtcgagaaagccagggaaaagatagtcatatcaatccaggacaaggatgggcagcaacagatgcgtgtatacaaggacgaaaagttcgacaagcttctcaaggtgtacgccaagaaggcaaagctcaacccatctgatctgtcttttgtgtttgatggtgagaagattaatccatcatctacacctcaggaccttgatctggaggacgaagacatgattgaggtgcgtcgtaagcagagttgaggtcatcctcgatatatgctggtttagacaaactcagccttttcgctgtcttcttttgcttccaacaaaggcttatttgtctatatatcatataacaaagacgttgaggccatccttgatatatgcgtgaaaccctcgagatatattgcagctgtaccgtgtacgtgggggtttggttggcaaaagccatctgcagaaatgccagagcagcctctgttattggatgtcagtatacaagacgccagtcagctagcaatgccaacagaagtgactaaggatggcgccaactgtagctaataatcttcttagttttggttactttctaaaaataacatattgattttcaaagttacgtgctggtttctaggcctcaagtcgtctcgcaagacatagtttgtattaaaattattaaagcatgtccaatagttcctcaaaaactctttaaatagggtgttagtaataaaaaccattctataacagttctttaaatgaggtttctaaataaactaaattcttaaatatccctatttagttctcaaactttaggagttgttttgcactttcaataacttgttttgcttatcaatcataccataaaatcacttgtctgctattgagtttgcacatgtgtacagtgatgta

SEQ ID NO: 147439 - DNA, 2423 bp, Zea Mays
acctcacggcccttaccgtcttatccctctcccttcgcgtcgcatgctccgccccgcccgccgcctccatggcgcctcttccactcccccttcccgccaccatgatcactccccaccattccaaaccgcacgacgcgccgaggcccgaggcctctttgcacgccacgctcgcctccttctcgcagcaagccaacgagggcagcctccgcgacgcgttcgcactggtcgcccgcgccgagcggcagtcctcccccgccgcgggcgttgcggtgggtccggaggtgtacacgtcgctcctccagtgctgcgtgacggccgggtccctccgcgcgggccgccaggtgcacgcggcgctcgtcaagcgcgggacgtactactgccggaacgcgtacgtcggtaccaagctcgccgtctgctacgcgcgctgcggcgcgctcgacgacgcggaacgcgcgttcggcgcgctcccggagagggacaggaacgccttcgcgtgggccgccgtcatcgggctctggagccgcgcggggctgcacggcagggcgctggcggggttcgtcgccatgctcgaggccggcgtccccgcggacaacttcgtcgtccccaccgtgatcaaggcgtgcgcggggctcggcctggctggcaccgggagggcggtgcacgggcacgcgtgcaaggcgggcgtggctgagtgcgtctacgtcatgagcagcctcgtggacttgtacggcaagtgcggggaggtggaggacgcgagggcggtcttcgacgcaatgcctgagcggaccgtggtcagctggaacacgatgctcatggcgtacatacacaacggaaggatcgacgaagccgtggatctgttttacgagatgagggtcgagggcgtgctgccgacgagggtgagcatcgtgagctttctttccgcatcagcgggtctcgaggctatcgacgggggaaggcagggccacgcagtggcagtttcgagcgggctggagatggacgtgattttggggagctccatgatacacttctactgtaaggttggcttggtggaggctgccgaggcagtgtttgagcagatggaagggagagatgctgtggcttggaacttgatgattgctgggtattttcaggacgggcagatcgataaggcgttacacacttgccgaagaatgctggaggctgacctcaagttcgactgcgtgacgctggcgtccattatcatggcttgtgtaaagtcctgcatcacgttgctgggtatagctgctcatggttatgcagtcagaaacggtcttgattcagataagacggttgctgctggcctgatagacttgtacgcgagtactgggaggatcgaacaagcgcgtcgagtgttcaatgccacgagtccgcgaaatccggtcgtctggaaagcattggtttctgcttacgtcgactgtggcatgaactctgaggctcggaatcttgtgaatcagacgcagcttcaaggcatgtcctcaaatgcaacgtgttgggattctgtaatctctgcttttatacagaagggccaactcgaagacgctgtagatatgttcagcgagatgcttctgacgaaaacacggcccaacctgcggacctggagcttgttgataagtgccttgtcgcaaaatggcatgcgccaggaggtaacaagcatatgctgcaagatgcaggaagtggagtcagcgcccagtcccacaatctattcatcagcgatccttgctgttaaaacggcagcttctgtagattacgggaaggcaatccatgcgtgcgttgttaaaaagggcctgctgctgtccagatccgtgatccagtcgcttctgaacatgtacagtagttttgacgacagagacacaatggatggtttgctgagactgtttcctgaataaagcacatggcacaaaatgcacccgatgatatagggtatgcacctgtacatggttgtaccaggttgcacgtacatactgaagaacacatcatcaaataacggggccgcaattttggatcagaatctacagtctgcttggcctttttttttttgggaattgacagaggactgtatgggccaactgctgttgcagtccttattacagttgagacaatagaacaacaatatacccatactgtgaagtctaattagatcacacatatctcttattcttttgggtaaaaagttagagctagaaaactgtagcgttgaatcttacggttacattttactgagtggatttggattttttccagatctgcagctcctccaaatttcctgtgatagacatcaagcttgcaccattggctgtgactttctttcagaaaaagctattttgggtgaccctgcatttgaactggacatgtagctggccatagttatatcgcattgtaatatcaagtatcctaatattcatcaa

SEQ ID NO: 147440 - DNA, 1149 bp, Zea Mays
ccgcgacggccgcggccgacccggacgcgccgcctccgaggtcctccttggacgaggacgtcaagccgccggacgccggcgggggctgccccctggccgccgcggatgtcgcggccttgggcccgtcgcgggcgccggcgccacgacgtctggacaccacgcagagcacggtggcgatgaggatgaggagccccaccaccacggcgcccacgacgatgcccgcgattgcggccccggagagctttcgcttcttggatgagcccggcgcggggccgccgccgccgccgccgccggagggcgggctgggcccgccgggcgacggcgctgggggaaagaacgggctgctgcagggcggcagcgggtccccgcagagctggaggttcccggcgaaggattcccgcgggaagcgcgagagcgatttgggaatggagccgttgaggttgttgtcggagacgtcgaaggagccgaggcccgcgatgctgatgctgggaatgctcccggagaggcggttgccgtcgagcctgagcacgcgcagcgcggtgaggctgttgagcgcgaaggggatggggcccgacaggttgttgcgggagaggaccaggcgctcgaggccgccgagcctctggattcccggcgggatggggcctgacagcaggttgtgctgcaggaacagcgccttgaggaccggcagctggagcacgtcgtcggggatggtcccgaggacgcggttggagcggagcgagagcgcgcggaggttggtgagccggccgagcgtgcccggcgggatggcgccgacgaggccgacgcccgggagccgcacctcgacgacggtggcgttggcgttgtcgcacgtgaccccgacccagccgcacgccggggtggaggcgttccacccgaggcggcgctcgtgcggggtcgcggtcaggaacgccagcagcgccgaccgctccctcggcggcggctccgcgacggcgcagcgtgtgaaggccgcggcagcagcgagcaggaccgccagcgccgctacggatgcgccggggccggccattgcgacgcgcggtggagctgcgacgcggcttacgggtgaggcattggggggagggccgagggggggagctggagctggagcttttcttctcactggctggcgctgcc

SEQ ID NO: 147441 - DNA, 719 bp, Zea Mays
ttgatgggctggtatccttattggaccgttgttggatttgatcctacaaatccgacacccggcgacccgggccgcaccacgctgtgagtgactcggtcgcatcttccccattctccatcgacccaccggcggcggcgcaagtgaagcgaagaggaaaggaagctacgagatgtcggcgaccactgcagcggtgcccttctggcgggcggcggggatgacctacatcggctactccaacatctgcgctgcgctggtccggaactgcctcaaggagcccttcaagtctgaggccgcgtcccgcgagaaggttcatttctccatttccaagtggacggatggcaagcaggagaagccaagtgagtgatctgccctttccttcacccgatcgttcatgtcccactgtccttgattagattcgacgcgatctgcctggatgttatgcgatacgatgccgtcattaggggcatggatctaggtctaggtttgtctagtggttcactgatcctttgcgcttcacggctagtcgtagttgctgatggtgtaaatctgatctaatgtggtgattgatggagttggtcagaatgtgatgagtagaggctaaataattaattcgcgcatatgatgccaccgtagacgtcactactcaagaatcacattttcaggttttgtgaaggtgggaaactcggtaaatcgtttatcaattcttctaattgtttgta

SEQ ID NO: 147442 - DNA, 691 bp, Zea Mays
ttgatgggctggtatccttattggaccgttgttggatttgatcctacaaatccgacacccggcgacccgggccgcaccacgctgtgagtgactcggtcgcatcttccccattctccatcgacccaccggcggcggcgcaagtgaagcgaagaggaaaggaagctacgagatgtcggcgaccactgcagcggtgcccttctggcgggcggcggggatgacctacatcggctactccaacatctgcgctgcgctggtccggaactgcctcaaggagcccttcaagtctgaggccgcgtcccgcgagaaggttcatttctccatttccaagtggacggatggcaagcaggagaagccaactgtccgcacagaatcggatgactaagggctggcgccatggcgacatagtccttcctacagatgatttgaagcgtcgttgcaagtttctgggacttgttatttagttggcttgatttgtaatcaatgctgaagaataaatactttttgcgacaatggtctttttacaatgtcgtgttgttttcgttgctaattgcacttgccctaccctaatcaagcatgtgaactaatggaatgcttcagttttgtgcagtttggtatattgtgctgtgcggcagattctgcctagtccttaaaaataaaggaatagagaatgtactcgggtgtttttgaagcc

SEQ ID NO: 147443 - DNA, 890 bp, Zea Mays
ctaatcctccttccccgatccagtcccgcagcaacgccgagggagagcgaggagagacagatacagatcgcgcgctgagatgtcgtcggactcctcgtcgtgggcgcgcgccctggtgcagatctcgccctacaccttctccgccatcggcatcgctgtctccatcggcgtctcggtcctcggcgcggcatggggtatcttcatcacggggagcagcctcatcggggctgccatcaaggcgcccaggatcacatctaagaacctcatcagtgtcatcttctgtgaggctgttgcaatttatggtgtaattgtggcaatcatcctccagacaaagcttgaaagtgtgccaacatcccaaatgtacgatccggagtctcttcgagctggctatgcgatctttgcatctggtcttatcgttggcttcgctaatcttgtttgcggggtatgtgtggggataatcggaagcagctgtgcactgtctgatgctcagaactcatcactctttgtaaagattttggtgattgagatcttcggcagcgctctgggactgttcggagtcattgtgggcatcattatgtcatctcaggcgacatggccagcaaaagcttgatccttaccgttagtgctctgtatattattcggatggaatgtatcggaatatgcatgcggtccaacggactttccctgttcttttttcttttgcatcttttcggcaaaacacgaaatgttgcaagcgttgcgctaccgattgtagagttgctattccaaatgccggagcgttccaatgtgttacgatatcttgtaggtgctattgcttttgtaagacatttggcaattggcgtattaaataaatgcttgaactgaataagattagaattatttttttgtca

SEQ ID NO: 147444 - DNA, 306 bp, Zea Mays
cacgccttcaacgagaaggtggcggaggtctggcgcgtcgccgtggacgccttcgaacgcctcaagggccggtgggcgtgcctgcagaagcgcacggaggtgaagctgcaggacctcccggtggtgctgggcgcctgctgcgtgctgcacaacatctgcgagtcgcgcggggagggcatggaccccgcgctccgatgcgacatcgacgacgacgagacggtgccggagaaccccgtgcggtcggacggcgccaccaaggctagggacgacatcgcgcacaacctgctccacagcggacgagccggc

SEQ ID NO: 147445 - DNA, 464 bp, Zea Mays
taaacacaaaagcaccacaattatatattcacaaaagaatcacaattataatatcattcacaactagatcatttacagatagctagctagatcattcacaaaagctccagagatgatcagtcacaaaagcaccacagcgacatcactccagcttgaagcagttcaaaagcccacaactacatcactaatgtttcatatcactccagctattgttcaaaagcccacaactacatcactctagctgctccagagttgattagtcacaaaagcaccaaagctacactaatgcttcaagcagttcaaaagccttcagacaaccactccagcttcttgtatcctcctgttttaaggtacaagctttctccactagacggtgttgcagtcttatgcaccaacttcagccttatgccttgtccaagtgatcaactagcgtacctagatgatatacagtaatgcatatgagt

SEQ ID NO: 147446 - DNA, 1433 bp, Zea Mays
gacccttcgtcccgcatcgtttcctcctcctttttccccgttcgtcccctggattggcgtctacccggcgcgacccggaccgaatcctaagtccgcctgccgccgccgccgccggctcccgttggaaacgagtttggagtaaagaaaccaaccttgcatctgtgttctgtctgtctatgctgctttgctttggattcacaaaaaaataagccttgcatctcactgacttgagataactatgcctaaggacaggagctcccgcgtttcctctcacgagagccgccgggctcgtgcctccccatacttgtcagcgtctcatggacagagcagttcttcacgccggtcacaagagtctcctgcggccgcggcagcgaagcaagctgcagagtgggaggatgttcggtgctcggtctgcatggaccacccgcacaacgctgtcctgctggtctgctcgtcgcacgagaagggctgccgccccttcatgtgcgacaccagctcgcggcactccaattgctatgaccagtaccggaaggcctccaaggactcctccaaggattcagggacagagtgcagcgagtgccagcagcaggtccagctctcgtgcccgctgtgccgtgggccagtcagcgactgcatcaaggactacgacgcacggaggtacatgaacaccaaggtccggtcctgcaccatggagtcgtgcgagttcaggggtgcctaccaggagctgaggaagcatgctagggtggagcacccagcggcgaggccgatggaggtagaccctgaacggcagcgggattggcgccggatggagcagcagcgggaccttggagacttgatgagcatgctgcgttcagggttcaacgccaacgttgaggacaacagcggcgaacttggagccaccgaagaaggggaagaggaagccgcaaggactccggcctccataacaatggtcttcatcatgccgtctagaggctcaatcatgcagtacttaacagaacgtagcagggcgatcattctggtcagccggaggcgagcaagcagtggcagtggtgatgctgaggccacagcaccagacagcgaggaaggtgatgaccctatgttgccatcggcagaggcgtctgctggttcgcagcgttcttccgaagaagaggctgacggtgaccacgcccaatgacagaagtcagctagcaggaggtgtgccatggcccatggcatcttcttggcctgaagatcccgacctgcttggtatgtgatgctgtatgctgggaagaaaacatggatgcaggtgccatcaagcaatggaaaggaaaaaaaaacaattgagtggttgcatctatcttgtctgaatggatttctttttccatgcgttgtaattctctctcatatattatcatatgaaatagattcggccgtatttgcactgcataatataa

SEQ ID NO: 147447 - DNA, 1728 bp, Zea Mays
gcggtttcgccgccggcgccgatctgagcgccgccggcgttgaccccacccgattcgctccgggctgctgctggggcccttcttctcagatgtggagttcctccacctacagattataccgcaactgtttgaggagtcctgatccggactagctaagggctcctgctgtgcacgacctgatactacggattttgcgccttctagaggcatgattcctaaatcggagtcttactgtttaaaccagagtttgctttcgttttgaactgtgggtgaatttccattcccgcagaacgtgaagtcggtttaggccaggcctgtttgatccgtgttcatatatgtatatatgttatatgtatggaggatacagaacgctgttgcttgcgatctgattaagactttttttttgttttgcttgctattctgatttccttttcagagtttggagtaaagaaaccaaccttgcatctgtgttctgtctgtctatgctgctttgctttggattcacaaaaaaataagccttgcatctcactgacttgagataactatgcctaaggacaggagctcccgcgtttcctctcacgagagccgccgggctcgtgcctccccatacttgtcagcgtctcatggacagagcagttcttcacgccggtcacaagagtctcctgcggccgcggcagcgaagcaagctgcagagtgggaggatgttcggtgctcggtctgcatggaccacccgcacaacgctgtcctgctggtctgctcgtcgcacgagaagggctgccgccccttcatgtgcgacaccagctcgcggcactccaattgctatgaccagtaccggaaggcctccaaggactcctccaaggattcagggacagagtgcagcgagtgccagcagcaggtccagctctcgtgcccgctgtgccgtgggccagtcagcgactgcatcaaggactacgacgcacggaggtacatgaacaccaaggtccggtcctgcaccatggagtcgtgcgagttcaggggtgcctaccaggagctgaggaagcatgctagggtggagcacccagcggcgaggccgatggaggtagaccctgaacggcagcgggattggcgccggatggagcagcagcgggaccttggagacttgatgagcatgctgcgttcagggttcaacgccaacgttgaggacaacagcggcgaacttggagccaccgaagaaggggaagaggaagccgcaaggactccggcctccataacaatggtcttcatcatgccgtctagaggctcaatcatgcagtacttaacagaacgtagcagggcgatcattctggtcagccggaggcgagcaagcagtggcagtggtgatgctgaggccacagcaccagacagcgaggaaggtgatgaccctatgttgccatcggcagaggcgtctgctggttcgcagcgttcttccgaagaagaggctgacggtgaccacgcccaatgacagaagtcagctagcaggaggtgtgccatggcccatggcatcttcttggcctgaagatcccgacctgcttggtatgtgatgctgtatgctgggaagaaaacatggatgcaggtgccatcaagcaatggaaaggaaaaaaaaacaattgagtggttgcatctatcttgtctgaatggatttctttttccatgcgttgtaattctctctcatatattatcatatgaaatagattcggccgtatttgcact

SEQ ID NO: 147448 - DNA, 1938 bp, Zea Mays
aaattatgtacgcccctagatcctttggattaatataatgtggtttagattagaagttacacggagggattgatttacaccagtatattccctaattaaatagaaactccgtaaaaatgaaaaagaaaacgttttccgagcgaatttgaaaaagcgtgtggatggctccgccgtccactcattttaaaaaccgctgcccctccgccttcgtcttccttcctcgtccgttccggcgtcctctctcccccaccccatgccaacgcccaccccgccgtctccgtccccgtctccctcttctggaacttgccctctgctccggatcggcgcgggccgtcgttttgccatggcatttccatcttgggcgactctgttcttcgccgggatgatggtggtgttggcagcggtggaagcggaagcggaagctggaggagggagcgtctgcttcgaccggatgttcggtttcggggactcgctcacggatactggcaacttcctgctctccgtgcctgacgacttcccggaccccgcgcggaacctcccctacggccagaccttcttcggccgcccctccggccgctattccgacggccgcaacctgctcgacttcttcgcagaggcatttgggttgccatatgtgccaccttacctaggcagtggggacttccagaatggcgcaaactttgcagtcggcggcgcaactgctctcaatggctcgttcttccgtgagcgcggtgtggagcctacatggacgcctcactcccttgatgagcagatgcaatggttcaagaagcttctcccattcattgcaccatctgagacagagctaaatgaaataatgtccaagtcacttttgtttgtgggagagattggcggaaatgattacaaccatttaatcgttagggagaaatctgttgatgagctacatgaaattgttcctaatgttgttggcgccataagctcgggcatcacggaccttataaatcttggagcaaagaagttagttgttccagggaacttcccaatagggtgtgtcccattatatcttgcaatctttcagagccaaaaggagggttactatgaggaacaaacaggatgcattaagtggctcaatgaatttgctgagtaccataataggatgcttcaggaggagttggagaaactcaggaatcttcaccctgatgtaaccatcatttatgctgattattacggtgctgcattgaacatattccgtgccccactcaagtttggcttcacagtcccactgaatgcgtgctgcggaagtgacgctccgtacaactgttccccttcaatactgtgcgggcgtcctggatctacagtgtgccctgacccatcaaaatacatctcatgggatggtctacacttcaccgaggcgagttacaaagttgtcatccaaggagtactaggggggtacgccaaacctcctctttcagaagcctgcaagggtgcggagttcaaagtttctcaacttcaccaatgtacagataatccaacaaacaccgtatcatacgatgccttgagctcttttatttgatctgctgagctcaagtacttttatatttgtgctggtaaaaaaagtgcagtttagagttacagtgggcagtgtagatgctgcaggaccgggtatcttggacacttctcagagcggagaagagatccatcgatctagagtcatgtagttctacaatcaacttggctgctgggaggaggtaaaaaaaggtggggattttgtagtgtggaaatttgcaataaccgaagggatacaggtggtcatactgctatataggaacctagatctatgattctgcttctgagggcaatgtatgtagatatgggctcagttgccttttaacagatacatgcatatatacagtgtaaatttgttgattcacattaaccaggataataaccgttgtcgaa

SEQ ID NO: 147449 - DNA, 1948 bp, Zea Mays
cacacatatgggtcgtcccaatcccaagtcccgaccaaaaccccaacccctccccaccaaacccggccagggcgcccaaccaaaacctcccagcacagcgcaccgcggctcctccacgcctcgctcgccgtccgtccccgcgctctcctgctggtccccggccagtccgtcactcccgtctcgctatgtaatcaccctgcccaggactccatactccagtcagtcagtcactccactagcgggctcgccgcctacagctaaccaataatggcggatcaccccatgaagccaccagcttccggctccatgtgcgcactcgcctgcctcttcctcctctccgccggcatcctcctcgccgccgccgtctaccggccgttccagtcgcgcgcggcggcgtcgtgggacccattctccagggtgcagcagaaggaggaggccccggcgccgccaccgctcgcccgccgcggctcgtaccgtgctgcgccaccggcgccagacgccgtctcaccatcagccggcggccctgctgactggagcccggacgacgacgacgacgccgacgctggaccgccttcaccggccccggcgccgtccgaggaaggatggggggacggcgacgaggacgcccagtgcgacctattcgacggagagtgggtggaggacgcggcggggtacccgctgtacgacgcggcagagtgcccgttcctgagcgaccaggtggcgtgccgccggaacgggcgcccggactccggctacgagcggtggcggtggcagcccaggggctgcggcggcaccacgaggttacaagcattcgtttggacaactgtacagtgcatcatattatatccctaactcgggcatccatgccggccggtccgccttctcgccgtgttccacaggctgggcggcgcggaggccctggagctgtgccgggacaagcggctggtgctggtgggcgactcgctgaaccgcaacatgtgggagtcgctcgcctgcatcctctacgcggcagtgccggaccggttgcggacgcgcctcatcgacgacgctggctccgagtacatgatcttccgcgccatggattataattgctccgtggagttcttctggagccccttcctcgtgaagctcgaaacaaaagacaacaagaccaaggcactcgagctggaccagctgccgccaatgctgcagcggacgctcggtgctgacgtcctcatcttcaacaccggtcactggtggactcacaccggcaagctcagggcgtgggatcatctcgagtggggcggaaagacggtgcagatggcaggtgaggaagccttcgatggagcactgaggacctgggctaggtggatcgactacaatatagaccctagcagaactcgagttttcttccgaagtgtctcacctgaacacaagagcgtaaattggtgctacaaccaaacggctcctatctccagggggaacatcgctccatggtttccacaaagtttgatagacatcatcgagaaaaacatcaagaggatgaaaacgcctattgtatatatgaacatcactcgcctctcagaactccgaattgatgcacacccatcaatttacaccatcactcacgaaggaaaaccacttagcaaagagcaacggcaacaaccactcacatacagtgactgcagccactggtgcctaccagggctacctgatacatggaacatgcttttgttcaacttcctaattagacctctccccagtacataaaaagctcgggtgttttcaattgttcatcattcatgtatttctactaaggtgaggtcattttttggacagtagtttatcattatcatgttacagagtgaatggcaaatcaatcaaaacggagggctgtacaaacagagaaacatgatacacagacattaccgcaaagaatcacaatatacatacattgcaacattggtaa

SEQ ID NO: 147450 - DNA, 2520 bp, Zea Mays
cacacatatgggtcgtcccaatcccaagtcccgaccaaaaccccaacccctccccaccaaacccggccagggcgcccaaccaaaacctcccagcacagcgcaccgcggctcctccacgcctcgctcgccgtccgtccccgcgctctcctgctggtccccggccagtccgtcactcccgtctcgctatgtaatcaccctgcccaggactccatactccagtcagtcagtcactccactagcgggctcgccgcctacagctaaccaataatggcggatcaccccatgaagccaccagcttccggctccatgtgcgcactcgcctgcctcttcctcctctccgccggcatcctcctcgccgccgccgtctaccggccgttccagtcgcgcgcggcggcgtcgtgggacccattctccagggtgcagcagaaggaggaggccccggcgccgccaccgctcgcccgccgcggctcgtaccgtgctgcgccaccggcgccagacgccgtctcaccatcagccggcggccctgctgactggagcccggacgacgacgacgacgccgacgctggaccgccttcaccggccccggcgccgtccgaggaaggatggggggacggcgacgaggacgcccagtgcgacctattcgacggagagtgggtggaggacgcggcggggtacccgctgtacgacgcggcagagtgcccgttcctgagcgaccaggtggcgtgccgccggaacgggcgcccggactccggctacgagcggtggcggtggcagcccaggggctgcggcggcaccacgaggctgggcggcgcggaggccctggagctgtgccgggacaagcggctggtgctggtgggcgactcgctgaaccgcaacatgtgggagtcgctcgcctgcatcctctacgcggcagtgccggaccggttgcggacgcgcctcatcgacgacgctggctccgagtacatgatcttccgcgccatggattataattgctccgtggagttcttctggagccccttcctcgtgaagctcgaaacaaaagacaacaagaccaaggcactcgagctggaccagctgccgccaatgctgcagcggacgctcggtgctgacgtcctcatcttcaacaccggtcactggtggactcacaccggcaagctcagggcgtgggatcatctcgagtggggcggaaagacggtgcagatggcaggtgaggaagccttcgatggagcactgaggacctgggctaggtggatcgactacaatatagaccctagcagaactcgagttttcttccgaagtgtctcacctgaacacaagagcgtaaattggtgctacaaccaaacggctcctatctccagggggaacatcgctccatggtttccacaaagtttgatagacatcatcgagaaaaacatcaagaggatgaaaacgcctattgtatatatgaacatcactcgcctctcagaactccgaattgatgcacacccatcaatttacaccatcactcacgaaggaaaaccacttagcaaagagcaacggcaacaaccactcacatacagtgactgcagccactggtgcctaccagggctacctgatacatggaacatgcttttgttcaacttcctaattagacctctccccagtacataaaaagctcgggtgttttcaattgttcatcattcatgtatttctactaaggtgaggtcattttttggacagtagtttatcattatcatgttacagagtgaatggcaaatcaatcaaaacggagggctgtacaaacagagaaacatgatacacagacattaccgcaaagaatcacaatatacatacattgcaacattggtaaacatttacattgaagaacatagatacaaatttacatcgacgaacatataccactaggatcaataaggcagttcttatcgcaggctcgcggggagagaaaatgcactcaatggctcaaatcgactaacctgcctctgtcccaaattaaaaaccattttaggtaattaatgattgatgtatgtattttatgtctctaaatgcataatcatccatttgaatttgaatgtagatataaaacccaagagctaaaacgaatactattttgggacgtagggagtaccaatacagcacaattcttatcgcagggggaaaatagcacctcaatggttcaaatcgaataaacaatcaactccattccaaaatataagttattctaacctcttttttaaggtgcataaaagagagcagacccatggctcccggaagggataaactgacaagccttcccctagatgctgataggctcattcaaacccaggatattgactgagacagctctcgccactacatcagacatctgtcctttcttagattcatagcttttactatatatctagacataatacatggttagacctgtgtttctgttagcctctctagatagtaattatactctatctattccaaacatccgatcaaaattgacacattactatgtatcttgacaaaatc

SEQ ID NO: 147451 - DNA, 506 bp, Zea Mays
gcgggagataccagtaaacggcgacgaagacaattctctaccaagaagaggactgatcgagtgggagagatatggacggcggcaagagcagcgggattggtggcaatgtcgaaggaggaggcggtgatggcaagagcggcgtcggcgctgtcaagggaggaggctccaactccatgggaggcgcgggctctggcaactcaggtggcggcgttgcgggacatggtgatggtgcagggaagtcgggctccggcggcgacggcatgatgaaggctcccggcggcggcggctacatcccccgctcctacttcgaagccaacccgaaggagttcttccagggcctccaccagcagggaggaggaggcaaaaagtagatccatcgagctagactgctagcaagctagctgcttgttgcatggcaatctagcgtgggatttgtgatcctgaatgaatgtatggaccgtcgtcagtctccgtagcctctaaataaaatgttaagctgctcgatc

SEQ ID NO: 147452 - DNA, 490 bp, Zea Mays
ggcgacgaagacaatcctctaccaagaagaggactgatcgattgagacagatggacggcggcaaggggagcgggattggtggcaatgatggcaagagcggcgatggcaagaccggcggcagcgctgtcaagggaggaggctcctactccgggggaggcgcgggctcgggcaactcaggtgtcggagttgcggggcatggtgatggtgctgagaagtcgggctccggccgcgacggcatgatgaaggctcccggcggcggcggctacatcctccgctccgacttcgaggccaacccgaaagagttcttccagggcctccaccagggaggaggcaaaaagtagataaatcttgctagacttgttagcaagctagctgcttgttgcatgacaagctagcgtgggatttgtgatcctgaatgaatgtatgggccgtcatcagtctccgtagcctctaaataaaatgttaagctgcttgatcgtttttggacatc

SEQ ID NO: 147453 - DNA, 1106 bp, Zea Mays
atgcaggtcttagacggtggagtcaatggcatagcagccaagcacgtggatgaaagacgcaaacctctcaatctcctagatggcctcgtggacgcgcgggaccgtgtcgcagagccagccatgcgcgacgtccgtccctcactctcttcgattctggactgctcgcgcctctcgcctccgtgttcacatcgccctacccgccgtaccacatgccagacgctggccaccggctccgccgccgcagcgactacatcgggggtgtgcagcctcccatcagactcccgccagcgccaaacccttcgactcggcgatggccacaccggagaagaagtcatacccacctgccatggtcgcggaggaggtgagggtgtgaggctgactggcgattggacccgtccccccattccacccgccgtcgccgacgtgtctgtccaagcttggcatctggaaactggttcgtcccttcttatatgaggccagctattttcaactcaactctgaatgaagtttcagaggcaggaacacaagcacaaactactgtccagattgacgaggagccaggttctgatgaagacgacgatcttccaccacttgaagcaaacaccaacatgaatagaccatatgaactaatttctcaacggaacaactaattgaattttttgtccagtgcaaggtattagttgtgtaacaaattgttaaattctcacatgtcagatagtggtgcattccatggcttgatctgtctctttttactctaggccagcggcagacgcgctgcctgcctcccctggcttgctcctggccatctagcgtctgtcatgtgttctgcctgatgggttttctccttttttgcatatgccatatgttctgcccatctgttaattgccgccgctgttttcaggaaggtttagcgattgaggctgagtttgggcagacctcatcattgttagtttgtttgttatagagtaagctagcccaggggaaaaatagtgaacctggcagatgatggtatggagtaacctgttgttccattcaataggacaatctgagattgtagagatgtggtttctgcacttaatttttgggcgacaatttcaagggagtaa

SEQ ID NO: 147454 - DNA, 1224 bp, Zea Mays
cacatcaactgaatgtacaacaatttgccaagtatatgctatttgtcaaggacattacaagcaagattgaagagaagcgtggtgtgactgttacagataatgggaacacagaggtaaaatcatcaccttcattggcaaacgggatccattctgaacctatgtcaggacaaataccagttgcaaagagcagccctgcatgggatgaagactggggtcctactaagaaatccggtgttccatctctttcagttgattctagtgcacaaacaaagcaaccctcagtagacccttttgacttcggtactcaaacaaagcaatccacaacactcccctttgatttgagcacccaggcaaagcagccaccatcagtttctcatgttacagcagctacaatcccacctgcgcaaccacaaccatcactacaatctcttgcggctagttcaggacctaaaatttctggctcatgtgtccctgtcgacattgagtggcctcctcgaagaagctcgtcatccaacttcaatgcacccttgtctattagcaaggataatggttctggaaggctgtctagcgatggagttgatgatattgatccttttgctgattggcccccaatacctagcaatgttaatagcatttcagcaaccgagcattggccaagcataaatcaaaatatttcgggatttagctcaggcaacatagtttttggtggcagcgggaattctgtagggcaaacgaaaagcaaccaaatgagctggtcaaacacgtctaatctaatgggcacaaactcaactggcagctatttgaatcagggcagtgcagctctaggtttcggaaatccaaatggaggattgagcacaggtctctccaatccaagtagttccagtacaggcctgagcatgatgctaccaaaatctgattctggatcattgtcgacgtcggtcaacaatgccgcacatgggctactaagacttgcccctcctccatccacatcggttggaagagggcgcggtagaaatcaaggacagtccgcactctcccgagcatcaaggcctcatgccaactcggcatcaggacaacaacctatcctggatttactctagtaagagatggtcgcctctgttcttcgcgttcggattgtcaatgtgtacatcctcaaacctttgtaaggtgagcatcatactgttcttttggacatgcatgtggcgaaagcagttctttttgttc

SEQ ID NO: 147455 - DNA, 1368 bp, Zea Mays
aagcaaccctcagtagacccttttgacttcggtactcaaacaaagcaatccacaacactcccctttgatttgagcacccaggcaaagcagccaccatcagtttctcatgttacagcagctacaatcccacctgcgcaaccacaaccatcactacaatctcttgcggctagttcaggacctaaaatttctggctcatgtgtccctgtcgacattgagtggcctcctcgaagaagctcgtcatccaacttcaatgcacccttgtctattagcaaggataatggttctggaaggctgtctagcgatggagttgatgatattgatccttttgctgattggcccccaatacctagcaatgttaatagcatttcagcaaccgagcattggccaagcataaatcaaaatatttcgggatttagctcaggcaacatagtttttggtggcagcgggaattctgtagggcaaacgaaaagcaaccaaatgagctggtcaaacacgtctaatctaatgggcacaaactcaactggcagctatttgaatcagggcagtgcagctctaggtttcggaaatccaaatggaggattgagcacaggtctctccaatccaagtagttccagtacaggcctgagcatgatgctaccaaaatctgattctggatcattgtcgacgtcggtcaacaatgccgcacatgggctactaagacttgcccctcctccatccacatcggttggaagagggcgcggtagaaatcaaggacagtccgcactctcccgagcatcaaggcctcatgccaactcggcatcaggacaacaacctatcctggatttactctagtaagagatggtcgcctctgttcttcgcgttcggattgtcaatgtgtacatcctcaaacctttgtaaggactgggggttcaactgcagtggtgctgtgagccgtgcatgcgatggacaactctcctatcgagcattttcatcaattcgctacacggccctacatccctgtgcctgtgtgtgtaccactagcttgcattgcattgcatgcagagtgtactattgatgggtgatgcattggatggggcatgcacagcaggaatatttgcagttgatgagcggcaggaatcagtggctcagggaaaattgaatggcgatctggccttcactccacatgagtacgtacctatacgtacgcatgtatcatcagacggagtcaggaggatgcgggtagtgtccctgtgttgtctaccattttgtctcaccaatgtggtcccaaagtacatgatgtttttttacttttacacactttaaaccgaccgtaatatttaattcttctgtaaatacttattttattttatcattaaatatattttttaa

SEQ ID NO: 147456 - DNA, 940 bp, Zea Mays
ggctgtctagcgatggagttgatgatattgatccttttgctgattggcccccaatacctagcaatgttaatagcatttcagcaaccgagcattggccaagcataaatcaaaatatttcgggatttagctcaggcaacatagtttttggtggcagcgggaattctgtagggcaaacgaaaagcaaccaaatgagctggtcaaacacgtctaatctaatgggcacaaactcaactggcagctatttgaatcagggcagtgcagctctaggtttcggaaatccaaatggaggattgagcacaggtctctccaatccaagtagttccagtacaggcctgagcatgatgctaccaaaatctgattctggatcattgtcgacgtcggtcaacaatgccgcacatgggctactaagacttgcccctcctccatccacatcggttggaagagggcgcggtagaaatcaaggacagtccgcactctcccgagcatcaaggcctcatgccaactcggcatcaggacaacaacctatcctggatttactctagtaagagatggtcgcctctgttcttcgcgttcggattgtcaatgtgtacatcctcaaacctttgtaagaggtttaccttttctcatgctcccgtgcttagggttttgaattgggcatcgaggccatcttcatactggtgacagaagaaatgttttgtgtatatttctgtccaaactcggctgtagctttcagagtttgtgaatagttgacatgtttatatgggctgtgaagttttgaaatgtttaatgggccttacaggtgtgtaccttttctcatgtactccgcgcaaaattgtacaacaatgtttaatgggccttataggtggacctttctcatgtactccacgctccaccaacaatgtttggccttatatatatttggtgactcggtgttatagac

SEQ ID NO: 147457 - DNA, 764 bp, Zea Mays
ggctgtctagcgatggagttgatgatattgatccttttgctgattggcccccaatacctagcaatgttaatagcatttcagcaaccgagcattggccaagcataaatcaaaatatttcgggatttagctcaggcaacatagtttttggtggcagcgggaattctgtagggcaaacgaaaagcaaccaaatgagctggtcaaacacgtctaatctaatgggcacaaactcaactggcagctatttgaatcagggcagtgcagctctaggtttcggaaatccaaatggaggattgagcacaggtctctccaatccaagtagttccagtacaggcctgagcatgatgctaccaaaatctgattctggatcattgtcgacgtcggtcaacaatgccgcacatgggctactaagacttgcccctcctccatccacatcggttggaagagggcgcggtagaaatcaaggacagtccgcactctcccgagcatcaaggcctcatgccaactcggcatcaggacaacaacctatcctggatttactctagtaagagatggtcgcctctgttcttcgcgttcggattgtcaatgtgtacatcctcaaacctttgtaaggtgtgtaccttttctcatgtactccgcgcaaaattgtacaacaatgtttaatgggccttataggtggacctttctcatgtactccacgctccaccaacaatgtttggccttatatatatttggtgactcggtgttatagacaaaagccagatgtt

SEQ ID NO: 147458 - DNA, 3101 bp, Zea Mays
cttctctcctcctccccgagggctgaggatatcctttaacccatccacctcacgaggaatcagcactcgcttttgctccgcgatttattgctcagggttcttgctgggtggtggtggcgggtggcgcgagcagtagttcacaagagcaagctgttcttgtgtgcgtggttctatgcctgcttgcttgccgaggggaggagaaggaggcggagtagtgggagttgaggagtgcaggtaccggcattgctgaggcggcgccgggagatccggcgatgtcggaagccgaccggatacgccactgcacagcagcgctggcgctgcacgacgatgaggtaagagacaagccagacgccaaggcgaacgtcttcgcggatctcggctcgccggtgtcgccgctgcgggtgcgggcgagcgtggcgacgtcgtcgtcctcgtcctccgggtcggccaagtcgccggctccgtcgaatgctgggatggcgggcgggaggagccactccggcgagctggtgggcgagtgcaacccgccgcggctgatggctcacaggcggtccggatctggacagttgatattcactggcggcggcagccgggggaggggcggcggcagcggggaccgtgggagcacggcgagctcgccgatgctgaatgcacttcccaccgggaacatcttcccgcccgtgcgtgtcccggcaacggcggccgcgccccctccgtcgcgctcccgcccggacgtgctcggatccggcaccggccactacggccacgggagcatcatgcgcggcaccggcatggcccctgccaggagcagcattgactcctcgttcctcggacactcctcgagatcgccggcgagcttttcggcaagcagtgggagcctccaggaggtgacccgcttggggaacgagtggtacaaaaagggtaagtacggggaggcgctgcggcactacgagcgcgccgtggcgctgtgtcccgagagcgccgcatgccggggcaaccgagccgccgcgctcataggactcggccgccttgccgacgcgcttcatgaatgcgaggaggctgtccgactcgacccggtcagcggccgcgcccacagccgcgtcgcaggcgtttgccttcgactggggatgattgacaaggcgcggaggcatttcacccaggcgggtcatcttcagcattcagaccctgccgagtggcataagctgcaggaggtggaggtccatctgggaagatgcacagatgcaaggaaaattggggattggaagagcgctctgagggaggctgatgccgccattgctgctggcgccgactcctctcagttgcttcttgccttgaggtcagaagcacttctccgccttcacaagctggaggaggccgagtcgactcttgcaagcttgctgaaactggacagtgcattgccctcatcattgacagcagcaaaactctcggggatgcttgctgagtcatacatacatattgttcaagcgcaggttgacatggcatttgggaggtttgatactgctgttgctgcagctgagaaggctagagatcttgatcctgggaacgcagaaatcgggatggttttgaataatgtgagactagtcgcaaaagcccgagagcaaggaaatgatctctttaaagctgccaagtttttagatgcgtccatagcctatggggaagggctcaagtatgatcccttaaattcagtgctccactgcaatcgagctgcttgctggtcaaagctagaaaagtggggaaaagctgtcgacgactgcaacgaggcactaagaatacagccaaactatacaaaggctctcttacggcgagctgcgtcgtatgctaagcttgagcgttgggtggactgtgtgcgggactatgaggtgcttcggaaggagtttcccagtgacaaggaggttgctgaggcattgttccatgcccaaattgccttgaaggcgactcgtggtgaggatgtatcaaatatgaagtttggaggagaggtggagatggtttccaatgtagagcaactcaatgctgccataagttcgcctggggtaactgttgtctacttcatgtcgacaatgaatcagcaatgcacacaaattacaccatcgatcaacattctatgcactgaatgcccctcagtgaattttctcaaggttaacgtcaacagcagcccaatggtagcaaggacagagaacgtgcggatagtcccgacgttcaagatatacaaaggaggggtgaaagtgaaggaaatgatctgcccgagcttgcatgttctgcgctactccgtgcgacactattctgtatccagttcttgagaagctttaggtacccgtaccccaatttcccattttccctaatgcatagagcagagcacccggtcaaacttgcagcatcaccaggcaccaggcaccagcctccagagcattttcaccacctgcgtagctactccccattgagcatgagcataaggaagactgtcaggtggaagagcccctcattccccatctcctgtcgttttcgcctcttcaccgttcatataccgacccattaaattcaatagcttttccatgtttggggctctccacctcattttgtatttgatacttcattttcgttcaccccatcatagtccatatgccagcaccctgtgtctcaagaaaaaatggaaatgtttgtaatgtcgtctaggtttagcatatactctctatactttagggagggagaggagggggggccgggccctgggggttgcagttttcgttacatgtacataccttataggaaaaacatgagagaaatccattggaagattggttccctggcgaaaagagagatggtggcatcagattgagctgagatttcggcggttggggtcaggtacagggctagtagttgttctgagtttccactggagtctttatctatctatctttagaggggggagagacagcgagaggtgttaagttaactgatgatgcagagatggttggtgtccattgaagacgatgacatgtcgttttgctgcttctgttgggtttcatggcgctgataccatatatgctaccgtttccatgaataaaacattgcaacactcgttc

SEQ ID NO: 147459 - DNA, 1566 bp, Zea Mays
aacgtttaacccaaagtaaccgtcccgtgtttccgtttgcttcgcctggtcaccttccgtggtgcctgtggctgtgtacgcggtcgtctccatccgacccatcaatcatccaaaaactaaaccaaatcttccccatcgatcccaacttccagtcgatctcctcgctcggctgttgcctcccaaagccgtgccttacaacgagattcctcccctcctctctccaataaccctagcctcctccgccgccggcgacgaatccggtaagcgtcctcgcttctgctagatccaccgcctccagatcggtgcggcccgcgactagggagagggtcggtcgcgatccgccgttcctctgccttaggtcatcgcggtcggttagtcggcacccgtggacaagctctccttttccactccagttatttttgggttgtgcttgcaattgctacttgatgagtttctcgaattagcttgtgaatgccgttgttttgcctcgcaggcgttttgagtttctgttgccagcgtagccatgtccatgttcaataggatcttcgggaagcccaaggagcaggccaactccaatgccttggccactctggacaagttaaatgagactcttgatatgctggagaagaaagaaaaggtgctggagaaaaaagcagccgctgagcttgagagagccaaggagttctcaaaagctaagaataaaagagcggctatccaatccttgaagaggaaaaaactttatgagcaacaaattgagcagcttggaaattttcagttgagaatccatgatcagatgatcatgttagaagcagctaaagctacaacagagactgttgatgcattgagaactggagctgcagctatgaaagcaatgcaaaaagcaacaaacattgatgatgtagacaagaccatggatgaaattaatgaacagactgaaaatatgaaacaaattcaggatgctttgtcagctcctctcggagcttctgctgatttcgatgaggatgaactggaagccgaacttgaagaactggagggagcagagttggaatctcagcttctggagcctgttgcagctcctccggtgcatccagtgcatgccccagccaacaagcaaccagcgcgccctgctccacagaaagctacagctgaagatgatgagcttgctgcactgcaagctgaaatggcattgtgatcaggtttccaatgaagaggtggaatgtgtatatgaatggcgttatgctaccaagatgaaagttgagtcaggatttattatatttgccatgtgtataatcttgggggatatttggcaagcagaaaaaaagctgctccaggcagtgtttgtttcagtgattttgggctctgttttccacaaacagtttaatgtcgcccggttagctctaagctaactattcaggtcaccaacgtgcattgtttgtcacagtatttttcatttacccatattgtctggagccatgtaagagtgttggaacgtataaagcctcagggtacacatttgatgtgccggtttgcagctatttcgacctcagtcagcatgtttcatcgttg

SEQ ID NO: 147460 - DNA, 1444 bp, Zea Mays
aacgtttaacccaaagtaaccgtcccgtgtttccgtttgcttcgcctggtcaccttccgtggtgcctgtggctgtgtacgcggtcgtctccatccgacccatcaatcatccaaaaactaaaccaaatcttccccatcgatcccaacttccagtcgatctcctcgctcggctgttgcctcccaaagccgtgccttacaacgagattcctcccctcctctctccaataaccctagcctcctccgccgccggcgacgaatccggtaagcgtcctcgcttctgctagatccaccgcctccagatcggtgcggcccgcgactagggagagggtcggtcgcgatccgccgttcctctgccttaggtcatcgcggtcggcgttttgagtttctgttgccagcgtagccatgtccatgttcaataggatcttcgggaagcccaaggagcaggccaactccaatgccttggccactctggacaagttaaatgagactcttgatatgctggagaagaaagaaaaggtgctggagaaaaaagcagccgctgagcttgagagagccaaggagttctcaaaagctaagaataaaagagcggctatccaatccttgaagaggaaaaaactttatgagcaacaaattgagcagcttggaaattttcagttgagaatccatgatcagatgatcatgttagaagcagctaaagctacaacagagactgttgatgcattgagaactggagctgcagctatgaaagcaatgcaaaaagcaacaaacattgatgatgtagacaagaccatggatgaaattaatgaacagactgaaaatatgaaacaaattcaggatgctttgtcagctcctctcggagcttctgctgatttcgatgaggatgaactggaagccgaacttgaagaactggagggagcagagttggaatctcagcttctggagcctgttgcagctcctccggtgcatccagtgcatgccccagccaacaagcaaccagcgcgccctgctccacagaaagctacagctgaagatgatgagcttgctgcactgcaagctgaaatggcattgtgatcaggtttccaatgaagaggtggaatgtgtatatgaatggcgttatgctaccaagatgaaagttgagtcaggatttattatatttgccatgtgtataatcttgggggatatttggcaagcagaaaaaaagctgctccaggcagtgtttgtttcagtgattttgggctctgttttccacaaacagtttaatgtcgcccggttagctctaagctaactattcaggtcaccaacgtgcattgtttgtcacagtatttttcatttacccatattgtctggagccatgtaagagtgttggaacgtataaagcctcagggtacacatttgatgtgccggtttgcagctatttcgacctcagtcagcatgtttcatcgttg

SEQ ID NO: 147461 - DNA, 1493 bp, Zea Mays
aacgtttaacccaaagtaaccgtcccgtgtttccgtttgcttcgcctggtcaccttccgtggtgcctgtggctgtgtacgcggtcgtctccatccgacccatcaatcatccaaaaactaaaccaaatcttccccatcgatcccaacttccagtcgatctcctcgctcggctgttgcctcccaaagccgtgccttacaacgagattcctcccctcctctctccaataaccctagcctcctccgccgccggcgacgaatccggcgttttgagtttctgttgccagcgtagccatgtccatgttcaataggatcttcgggaagcccaaggagcaggccaactccaatgccttggccactctggacaagttaaatgagactcttgatatgctggagaagaaagaaaaggtgctggagaaaaaagcagccgctgagcttgagagagccaaggagttctcaaaagctaagaataaaagagcggctatccaatccttgaagaggaaaaaactttatgagcaacaaattgagcagcttggaaattttcagttgagaatccatgatcagatgatcatgttagaagcagctaaagctacaacagagactgttgatgcattgagaactggagctgcagctatgaaagcaatgcaaaaagcaacaaacattgatgatgtagacaagaccatggatgaaattaatgaacagactgaaaatatgaaacaaattcaggatgctttgtcagctcctctcggagcttctgctgatttcgatgaggatgaactggaagccgaacttgaagaactggagggagcagagttggaatctcagcttctggagcctgttgcagctcctccggtgcatccagtgcatgccccagccaacaagcaaccagcgcgccctgctccacagaaagctacagctgaagatgatgagcttgctgcactgcaagctgaaatggcattgtgatcaggtttccaatgaagaggtggaatgtgtatatgaatggcgttatgctaccaagatgaaagttgagtcaggatttattatatttgccatgtgtataatcttgggggatatttggcaagcagaaaaaaagctgctccaggcagtgtttgtttcagtgattttgggctctgttttccacaaacagtttaatgtcgcccggttagctctaagctaactattcaggtcaccaacgtgcattgtttgtcacagtatttttcatttacccatattgtctggagccatgtaagagtgttggaacgtataaagcctcagggtacacatttgatgtgccggtttgcagctatttcgacctcagtcagcatgtttcatcgttgcaactgaattaccagtattgtttttgtaccgagcagtgtgtttcgcctgagaatgacggtcgaacatgtaggcatgaacactgaaagcattaggctctagtcttggtttctatgattcataacaataagattattgtaattaatgtgtttggaagggttc

SEQ ID NO: 147462 - DNA, 435 bp, Zea Mays
gctttgcgtgttttaaagttattgctgctcttggtcattgttattaaccctaccgaaacttgcaggtttccaatgaagaggtggaatgtgtatatgaatggcgttatgctaccaagatgaaagttgagtcaggatttattatatttgccatgtgtataatcttgggggatatttggcaagcagaaaaaaagctgctccaggcagtgtttgtttcagtgattttgggctctgttttccacaaacagtttaatgtcgcccggttagctctaagctaactattcaggtcaccaacgtgcattgtttgtcacagtatttttcatttacccatattgtctggagccatgtaagagtgttggaacgtataaagcctcagggtacacatttgatgtgccggtttgcagctatttcgacctcagtcagcatgtttcatcgttg

SEQ ID NO: 147463 - DNA, 100 bp, Zea Mays
ctcactggtcaggcggtgtcacacccggatttaagggataaagtcgggtgcgtctcatatgtgcgccaaagaagaacatcacatataatgacaaagtgta

SEQ ID NO: 147464 - DNA, 2393 bp, Zea Mays
gtcactcactcgggagtcactctcccgtcctgatgccccgtttcaatttttgaactcccgatctggcaatccccacccacgctcccgagcaactttctactcactccggcgtcgcttcgaatcccagcgcggcggcgtgacgcgtgaatgcgtgatcgacgcgcggcgctgctcctccgggaaaccgcatggacgccgccgaccctctctgcgccatcacctcgcctgcgcggctccttccgcggacccttggccccaccccctcgaaggtccgcggtgcgctcctcgaggccatcgcactcgcccggtcgcggaaagggtctgaggagctggttaagcaggctgcaatggtgctgaaggagcacggggacatccagactctctaccatgatgatgcaatgaaagccatgccccccacaaatgtcagcaaagggcaacagggaagaagggcagcactggatcgcaaacgggctcggttcactatgaaggacactggaagcaaagcggtgcctgttgtggatcgatctaagttattgaatatttcggatccagtcgcattcttcatggccttggatcggcttgaagaagctgaggatgagatcaaacggctaaatggagaggcagaaaagcgcatattgatttttgatcctttagacgaacccattagacagcctggtttgcgtgggagaaaatcattccgcagtttcaaagtaactgaggatgctactactcaagatcccattgaggtactggcttcccaaacagcaactatgacaggatctcagttctcacaggatgttatgcatgctgttgctgacaaaaatgaacagtctgttccttcacgatctggtgaagctatttcagatgtttcaggaaaagaagattcattagctgagaaggatggccgtgatgatttggcttatttactgacctcgatccaagatttggatgaatctgaagaggaagcatttatccggaagaccttagggcttaaagaaataaggaagggaagagttagtctctgtaactccattcctggagtcaggtccttaagaagcgatactgaacaaaaaggttcaatgaaggttcgccctccagaaagtcatttgcctcagactcgccaagatcgaatttcagagttggagaaacatttatttcctggaggtgcagcaaatgctaaatgcacagatgatgaatctgaagggtcaccagatattgtgatgggtgaaccatcattagtgcatgattcttccgaggttctgatgaccaatgagaactctactggaagtgaaattgacaggaggaccccaaatctgtgtgccagagcagcagaccacgctcttgatcctgaaccaaacttgcctgatcatgcatacgaaaggcaaaccagaggctcctcacttggtttgtgcaaaaacacagaagttgccaatgaacacgaggaagatgatgtacacatagaatatccaactactggcgggtctacttatcaaacagaagtttcttctcatgatttggagggcagcttgacagaagaattggtcagtgaaccaggtaggcatgcggctccagatgatatctataggacttcacatgcagctgaggatagcattcaacatctagaagtggtcaaacagggtggtgttctacaagacaagtcaagccagtcgttggagatgcctctggaagatattgatccactatatcggcctcagatgcatggtggaagcactaagaaatcgacacctgttctgtgcaatgcactgtccccgatcgaacagaagcaacaagcagctcaagaagggaaaaggaagcaacaggcaaagagggtaaaaaaagtgtctgatgaatctagccatgcactggaaatatcccaagcaaatttcgaaccggagaatgaacctcataatgttgacgtgaacatggagcaaccgacagttatgagtagcgccaaggggcaaaagggagctcaaaggagaaacaagaccaaaaaattgaatcaaagaaaaatccttggagatgttgaccttgcgcggcagtctggagtgagaagaagctcaagaatacgctcgaggcctttggagtattggcttggtgaaagattactatatgggccgatacaggacactttgcctgcagttattggcatcaaagcatactctcctggccaggatggcaagaaaacattgaaagtgaaatctttcgtgtctgaacagtattcagatcttgtcgctcaatttgcgaagtactaaacaagacaccatttttctaagaggatcacgccttgtgacttgttgctttgtcacctgactttatgatgttacatgtgttggtggaaccatagtactgcacaatgaaaaggcacacgtcctaccgaatggttgccagtatct

SEQ ID NO: 147465 - DNA, 822 bp, Zea Mays
ttttttttccattcttggtgacatacctttgtattcgattattctcgtatctacttagttttgttaaaacgcttgattatgtataatggcttatatttttttttgtctggggtgttgaatgtattttctttacagatgaatctagccatgcactggaaatatcccaagcaaatttcgaaccggagaatgaacctcataatgttgacgtgaacatggagcaaccgacagttatgagtagcgccaaggggcaaaagggagctcaaaggagaaacaagaccaaaaaattgaatcaaagaaaaatccttggagatgttgaccttgcgcggcagtctggagtgagaagaagctcaagaatacgctcgaggcctttggagtattggcttggtgaaagattactatatgggccgatacaggacactttgcctgcagttattggcatcaaagcatactctcctggccaggatggcaagaaaacattgaaagtgaaatctttcgtgtctgaacagtattcagatcttgtcgctcaatttgcgaagtactaaacaagacaccatttttctaagaggatcacgccttgtgacttgttgctttgtcacctgactttatgatgttacatgtgttggtggaaccatagtactgcacaatgaaaaggcacacgtcctaccgaatggttgccagtatctatcttgtttggatgccatttcggctattcgatcggtggagtgtagcgtatgtgcagcggtatcacattagggatcgattcggataggcatggaatccaatagacataacattatttatcatattttaattcgaatttag

SEQ ID NO: 147466 - DNA, 510 bp, Zea Mays
gttttactctgaagctcgacattcatatgcttcctcggaccttttcagcaaccgacagttatgagtagcgccaaggggcaaaagggagctcaaaggagaaacaagaccaaaaaattgaatcaaagaaaaatccttggagatgttgaccttgcgcggcagtctggagtgagaagaagctcaagaatacgctcgaggcctttggagtattggcttggtgaaagattactatatgggccgatacaggacactttgcctgcagttattggcatcaaagcatactctcctggccaggatggcaagaaaacattgaaagtgaaatctttcgtgtctgaacagtattcagatcttgtcgctcaatttgcgaagtactaaacaagacaccatttttctaagaggatcacgccttgtgacttgttgctttgtcacctgactttatgatgttacatgtgttggtggaaccatagtactgcacaatgaaaaggcacacgtcctaccgaatggttgccagta

SEQ ID NO: 147467 - DNA, 1082 bp, Zea Mays
aacatggagatcttttgctctcacgcaagacgcaacaaaaggtttggatagaacactctgcttccccgtccttcggtctagcccgagtggacgtaggaagggacgaggggtcttgacgccggcgagccatggcgggggctctcctctcctctccgcacactctcccgagccccacatctcagtccgggctcgtgtcttctttcgcaatcatgctccccatttcagaagcatatgctgtcatggagactgatgaagacgtgaagatgaacacacaaattgatgagatcaatgcatactcttttctttacccggtggaactgccagggaagaaatttaccttcaaatgggtagagtccagaaaaccagagcgatattcctctgcagcgccactatcgcctgatgcaaggcaacgtatcgtatcagagcgagttgacatgatacacaatgttgtcatctcggtctcgattgggccaccgaattcacgttttttgccttcaaaagacaagagctcgtgggatccaaaagatgttgctgattgcattttatctgatagatctaccatgaaggtgacaactggccagcgcatgacagagagttctgtccttgacgcacacgttgcagaggttgatggagaaccatactggtattatgagtatcttgttcggaaatcaccaacaaaatctgcaccagaaccaaatttgtttcggcacaatgtagcctgcactgctgagcgtgatgggtacctgtactcactgaatgcttccactcttagcaaacagtgggaatctatggggccctttctacaaaagaccgtggcatcctttcgccttctccccggtacagaaaactatgttcctccctacaaggatccttggagattttggtgaatggagattcttcttgtagtcatcatttttatcccttcagatgactttatagcttcaggttttagaccatatttttcacgtcagatgtttagtgagtgtctgtcctttcagcttgacagataaaattcagagacccagtttggtatcagtttcgcccatcgtgttcgttctgattaataacagtcccagactaaa

SEQ ID NO: 147468 - DNA, 1268 bp, Zea Mays
aacatggagatcttttgctctcacgcaagacgcaacaaaaggtttggatagaacactctgcttccccgtccttcggtctagcccgagtggacgtaggaagggacgaggggtcttgacgccggcgagccatggcgggggctctcctctcctctccgcacactctcccgagccccacatctcagtccccgttccgccccaggagcaggggaccactccacgctggggcagcgcgtgttctgccaccgaggaggagggcctttgtgctcgcttcgtgctctcgcgagcctgccgctaggaaccgcgggttggaggtggagaggaggcgccttctcatgtccgggctcgtgtcttctttcgcaatcatgctccccatttcagaagcatatgctgtcatggagactgatgaagacgtgaagatgaacacacaaattgatgagatcaatgcatactcttttctttacccggtggaactgccagggaagaaatttaccttcaaatgggtagagtccagaaaaccagagcgatattcctctgcagcgccactatcgcctgatgcaaggcaacgtatcgtatcagagcgagttgacatgatacacaatgttgtcatctcggtctcgattgggccaccgaattcacgttttttgccttcaaaagacaagagctcgtgggatccaaaagatgttgctgattgcattttatctgatagatctaccatgaaggtgacaactggccagcgcatgacagagagttctgtccttgacgcacacgttgcagaggttgatggagaaccatactggtattatgagtatcttgttcggaaatcaccaacaaaatctgcaccagaaccaaatttgtttcggcacaatgtagcctgcactgctgagcgtgatgggtacctgtactcactgaatgcttccactcttagcaaacagtgggaatctatggggccctttctacaaaagaccgtggcatcctttcgccttctccccggtacagaaaactatgttcctccctacaaggatccttggagattttggtgaatggagattcttcttgtagtcatcatttttatcccttcagatgactttatagcttcaggttttagaccatatttttcacgtcagatgtttagtgagtgtctgtcctttcagcttgacagataaaattcagagacccagtttggtatcagtttcgcccatcgtgttcgttctgattaataacagtcccagactaaaggtgtgtttgaatgcactagaatttttttctcg

SEQ ID NO: 147469 - DNA, 1262 bp, Zea Mays
aacatggagatcttttgctctcacgcaagacgcaacaaaaggtttggatagaacactctgcttccccgtccttcggtctagcccgagtggacgtaggaagggacgaggggtcttgacgccggcgagccatggcgggggctctcctctcctctccgcacactctcccgagccccacatctcagtccccgttccgccccaggggaccactccacgctggggcagcgcgtgttctgccaccgaggaggagggcctttgtgctcgcttcgtgctctcgcgagcctgccgctaggaaccgcgggttggaggtggagaggaggcgccttctcatgtccgggctcgtgtcttctttcgcaatcatgctccccatttcagaagcatatgctgtcatggagactgatgaagacgtgaagatgaacacacaaattgatgagatcaatgcatactcttttctttacccggtggaactgccagggaagaaatttaccttcaaatgggtagagtccagaaaaccagagcgatattcctctgcagcgccactatcgcctgatgcaaggcaacgtatcgtatcagagcgagttgacatgatacacaatgttgtcatctcggtctcgattgggccaccgaattcacgttttttgccttcaaaagacaagagctcgtgggatccaaaagatgttgctgattgcattttatctgatagatctaccatgaaggtgacaactggccagcgcatgacagagagttctgtccttgacgcacacgttgcagaggttgatggagaaccatactggtattatgagtatcttgttcggaaatcaccaacaaaatctgcaccagaaccaaatttgtttcggcacaatgtagcctgcactgctgagcgtgatgggtacctgtactcactgaatgcttccactcttagcaaacagtgggaatctatggggccctttctacaaaagaccgtggcatcctttcgccttctccccggtacagaaaactatgttcctccctacaaggatccttggagattttggtgaatggagattcttcttgtagtcatcatttttatcccttcagatgactttatagcttcaggttttagaccatatttttcacgtcagatgtttagtgagtgtctgtcctttcagcttgacagataaaattcagagacccagtttggtatcagtttcgcccatcgtgttcgttctgattaataacagtcccagactaaaggtgtgtttgaatgcactagaatttttttctcg

SEQ ID NO: 147470 - DNA, 1743 bp, Zea Mays
catcgaagtcaactgtccgttgcaattgcaaaccaaaccagattcctctccatcgcactccgcctccctccgcctcccttggatcacctccccgtccccaacccaacgaggcaacgagtccccaacgccacccaaagtccagttcacccacacgcgcgctcaccggccgcctagcgcgctctgccccccacggaaatctgcagcgaatagaaaggatttccatcctttccaatcccttccaattctttacggcgtccctcaatccccctataggatccaggttgacccgcattgcccgagccagtcggtttccgtttttggaatttttgtttccacgtgctgccgccgccgctcctaggttcttgttacaagcgtggaagacggcgagctatatggcgtgcaatcgcggcgtgaaggagcaggaggaccccagcgcggcgtctgcagccccagctccggcggctgtggctagggcgagggcggcgcggcctccgaggccaaggagccgcaaggggctcggcgtgcggcacctgctgaagccctgccgattccttgcagctgtccagagggcgaatgccagggtgagggaagcgggggaggcgaccctcgtggcagcgcttgcggcggcccaaaaggagagcgagagggagaacgaggtggtggccgatgtatgcggcgggtggaagagtgaggatggaagtttaaattgtggatactcaagcattagaggcagaagggtaaacatggaagacttctatgacataaaatcttctagagttgatgataagcaaataaatttttttggagtatttgatggtcatggaggtacccatgctgctgggtatttgaaacaacacttgtttgaaaacctcctaaaacatccagcattcattggtgatactaagtctgcaatgagtcagtcctataaaaaaactgacgcagatttcttggatactgaaggcaatattcatgttggggttgggtcgactgcatcaacagcagttttgattggcaaccatctgtatgtggccaatgttggtgattcaagggctgtactatcaaaggcaggcaaagctattgcactctctgatgaccataaaccaaacagaagtgatgagcagaaacggattgaggatgctggaggagttgttgtttggtctggaacatggagagtaggtggtatacttgcaatgtctagggcatttggcaatcgtttgttgaagcagttcgttgttgcagaccctgagattcaggatctagaaatagatggtgatacggagtttcttattttggccagtgatgggctctgggatgtggtgccaaatgagcatgctgttgcatttgtgaaggacgaggatagccctgaggctgcagcccggaagcttacggagatcgccttcaggcgtgggagcaccgacaacatcacatgcattgttgtagaattttgccacgataagatggttgatggttctcccccgtcaaccaataagagttgacttcatcattcgtgttttaattatcccagatttgctaccatgatgctgcgcctctcgaagtatggtctcatcattggttgtctattatgttcgtttatagtcctgccatgctgattttgtttgcttcggcgcccccaattggttagcctgttgtttggatgcccagcactgtttcgtgcacgctggaccctgactccctgagcacccaggtcaatattatacttcattttcgattttggctgatatt

SEQ ID NO: 147471 - DNA, 1329 bp, Zea Mays
cttggatcacctccccgtccccaacccaacgaggcaacgagtccccaacgccacccaaagtccagttcacccacacgcgcgctcaccggccgcctagcgcgctctgccccccacggaaatctgcagcgaatagaaaggatttccatcctttccaatcccttccaattctttacggcgtccctcaatccccctataggatccagctgtccagagggcgaatgccagggtgagggaagcgggggaggcgaccctcgtggcagcgcttgcggcggcccaaaaggagagcgagagggagaacgaggtggtggccgatgtatgcggcgggtggaagagtgaggatggaagtttaaattgtggatactcaagcattagaggcagaagggtaaacatggaagacttctatgacataaaatcttctagagttgatgataagcaaataaatttttttggagtatttgatggtcatggaggtacccatgctgctgggtatttgaaacaacacttgtttgaaaacctcctaaaacatccagcattcattggtgatactaagtctgcaatgagtcagtcctataaaaaaactgacgcagatttcttggatactgaaggcaatattcatgttggggttgggtcgactgcatcaacagcagttttgattggcaaccatctgtatgtggccaatgttggtgattcaagggctgtactatcaaaggcaggcaaagctattgcactctctgatgaccataaaccaaacagaagtgatgagcagaaacggattgaggatgctggaggagttgttgtttggtctggaacatggagagtaggtggtatacttgcaatgtctagggcatttggcaatcgtttgttgaagcagttcgttgttgcagaccctgagattcagtgatgggctctgggatgtggtgccaaatgagcatgctgttgcatttgtgaaggacgaggatagccctgaggctgcagcccggaagcttacggagatcgccttcaggcgtgggagcaccgacaacatcacatgcattgttgtagaattttgccacgataagatggttgatggttctcccccgtcaaccaataagagttgacttcatcattcgtgttttaattatcccagatttgctaccatgatgctgcgcctctcgaagtatggtctcatcattggttgtctattatgttcgtttatagtcctgccatgctgattttgtttgcttcggcgcccccaattggttagcctgttgtttggatgcccagcactgtttcgtgcacgctggaccctgactccctgagcacccaggtcaatattatacttcattttcg

SEQ ID NO: 147472 - DNA, 1752 bp, Zea Mays
cgccggtggcggagacaccgatgccggacgaccttgctgtgactgactgactgaccgtgattgatgttttcttctctcccgtttcggccgccctcccgcgacccgaccccgcgtggccgcgtgcgtgcgtacaccagcgcttacttttactcgagtgacctactggcgttcgctgttcccggaaatacccctccagtctcatcacagagcttgctactactccgcgctgccgtggcggaggcaagcgcggtcatctgcccacttcaccagtcctcgcgctgtcgtgccgtctccggcttctcgttcttgctcttgccccggcaccttcggtttccaccaccaccgcgcgcgccgcggccgacctgccctgccccaactgtgtgtgctctttaaagccctcgcatcgccatttgcagaattgcccagtgctctaaccagatctgctccgctccgctccgggctgactaaccgagcccgccgtctctgtagctagctggtcgtccgtcgtcgccaccaacaggctaaccaccaaccgcccaaacgtctccaccgcgcgggcggagcgcagctgcccgccccggattaacctccctctcgccctccccacgcctccgagatcgcgagcgagaggacgccacgctgacatggcggcggcgaccgtcgctgccgcgggcacggcggcgccggcggcggccatgcacgccggcatccggcgctcgcgctccgagccgcacctccgctgcccgcgccgcgcgggcgccgcgctcaccaccagccgctccatcggcgtgttcccgttccagctcggcgcggcgccgctgcgcccgccgccgctgcccgacggcggcgccgacggctcccggctgctcaccgtcgccgacgacgacccgccggaggagcctgggccggaaatgccgcccgcccggaggcccgaggcgcactggctcggccgcctcctcgagctccgctcccgcttccacgacccgaccaagcgcgacgtactcgacgacgacgacgacgacctctaccgcctcgacgctgaccaccacgacggcgggtgcggcgtgagctacgacgacgaggaggaggatgccaggtgggaccgccactccttcgccaagctgctggcaagggccccgctcggagacgcgcggctgttcgcgcagctggccttcctctgcaacatggcttacgtcatccccgagatcaaggtcgaggagctgaagaagcactacgggttgcggcgcggggggcgccatactccgggaccacgagtccagcaactacttcagggctctcagtgcgctggccagggcgccaccgcggcgccggaagcaaccggagatcgtgtggcagttgcccggcgtcgagcggctgcagcagtattggtggccggggatcgccggcaccgtcatccccgcaccggtggccgtcctcagcaacaaggagctggtgtccgaggcataggacttcacgctgcgttccttgggtttgctcgcttgagcaatgtaacattatttggttctttggttggttccgcacgaggtacatagagaatgcacagcttcttttggtgtttgcgttcgtgtaaaaactgtaataatcatgcatagcgtaggacggtaggagcgtgtctggtttggtgtcctgatccgcggctgctcaataagacaatgggctttgtcttgggttcctgcgaaggaacggatgagttaacatgtaaacttgtttcaatgaagccttagaattctt

SEQ ID NO: 147473 - DNA, 2870 bp, Zea Mays
cgccggtggcggagacaccgatgccggacgaccttgctgtgactgactgactgaccgtgattgatgttttcttctctcccgtttcggccgccctcccgcgacccgaccccgcgtggccgcgtgcgtgcgtacaccagcgcttacttttactcgagtgacctactggcgttcgctgttcccggaaatacccctccagtctcatcacagagcttgctactactccgcgctgccgtggcggaggcaagcgcggtcatctgcccacttcaccagtcctcgcgctgtcgtgccgtctccggcttctcgttcttgctcttgccccggcaccttcggtttccaccaccaccgcgcgcgccgcggccgacctgccctgccccaactgtgtgtgctctttaaagccctcgcatcgccatttgcagaattgcccagtgctctaaccagatctgctccgctccgctccgggctgactaaccgagcccgccgtctctgtagctagctggtcgtccgtcgtcgccaccaacaggctaaccaccaaccgcccaaacgtctccaccgcgcgggcggagcgcagctgcccgccccggattaacctccctctcgccctccccacgcctccgagatcgcgagcgagaggacgccacgctgacatggcggcggcgaccgtcgctgccgcgggcacggcggcgccggcggcggccatgcacgccggcatccggcgctcgcgctccgagccgcacctccgctgcccgcgccgcgcgggcgccgcgctcaccaccagccgctccatcggcgtgttcccgttccagctcggcgcggcgccgctgcgcccgccgccgctgcccgacggcggcgccgacggctcccggctgctcaccgtcgccgacgacgacccgccggaggagcctgggccggaaatgccgcccgcccggaggcccgaggcgcactggctcggccgcctcctcgagctccgctcccgcttccacgacccgaccaagcgcgacgtactcgacgacgacgacgacgacctctaccgcctcgacgctgaccaccacgacggcgggtgcggcgtgagctacgacgacgaggaggaggatgccaggtgggaccgccactccttcgccaagctgctggcaagggccccgctcggagacgcgcggctgttcgcgcagctggccttcctctgcaacatggcttacgtcatccccgagatcaaggtcgaggagctgaagaagcactacgggttgcggttcgtgacgtcgtctctggagaagaaggcggaggccggcatcataagcgccaagctggacgcggactccacgcggccgcgcaccgcgccggcgtacgaggtggcctccggcccgcagccgcgccggcccatacgaccgcacctggcctacgaggtggccgcgtcggccgcgaactacgtccgcgcgcgcgcccgcggcctgctctcgttcggaacgccgcaggcgcagctgcaggccggccacggcaggctgtacaactcgggcgtggccgcgtacatggccgcgtcgacggtgacggcggtggtggccgccgaggacgaggcgcgccaggaggcggcgcgcgacctgcgctcgccgctgtcgtcgccgtgcgagtggttcgtgtgcgacgaggcggacgcgcggacgcggtgcctcgtcatccagggctccgactcgctggcgtcgtggcaggccaacctcctgttcgagcccaccgagttcgagggcacgggcgtgctggtgcaccggggcatctacgaggcggccaagggcatctacgagcaggtggtgccggaggtcgaggcgcacctgcggagggcgcgcgcggggcgcgcgccgcggctgcggctcacgggccactcgctcggcggcagcctcgcggtgctggtcagcctgatgctgctggcgcgcggcgtggtgacgcccgaggcgctgcacccggtggtcaccttcggggcgccgtccgtgttctgcggcgggaaccgcgtcctggaggcgctgggcgtcggcgaggcgcacgtccggtccgtggccatgcaccgtgacatcgtgcccagggccttctcgtgccgctacccgggccaggccatcgcgctgctcaagcgcctcaacggcgtgctccgcgcccacccgtgcctcaacacgcacaggtcgctgtacatgcccatgggcgccacgtacatccttcagcccgacagcagcgtgtcgccgcgccacccgttcctccccgagggcgcggcgctgttccgcctggactcggagcgctcgccgacggccctggtagccagcgcgctgcgcgcgttcctctactcgccgcacccgctcgagacactgagcgacctgtcggcctacggcgcggggggcgccatactccgggaccacgagtccagcaactacttcagggctctcagtgcgctggccagggcgccaccgcggcgccggaagcaaccggagatcgtgtggcagttgcccggcgtcgagcggctgcagcagtattggtggccggggatcgccggcaccgtcatccccgcaccggtggccgtcctcagcaacaaggagctggtgtccgaggcataggacttcacgctgcgttccttgggtttgctcgcttgagcaatgtaacattatttggttctttggttggttccgcacgaggtacatagagaatgcacagcttcttttggtgtttgcgttcgtgtaaaaactgtaataatcatgcatagcgtaggacggtaggagcgtgtctggtttggtgtcctgatccgcggctgctcaataagacaatgggctttgtcttgggttcctgcgaaggaacggatgagttaacatgtaaacttgtttcaatgaagccttagaattcttaac

SEQ ID NO: 147474 - DNA, 1467 bp, Zea Mays
tggatccaagtcgatgatttaggttgatgaggcggcttgcgcggggggcatcgtgcaatggcgcggcggtgcccgtgcaggctgctgctagccgtggcggcggcggccgtgctcgtggccgcggcagcgcaggcgcaggagacgtgctcggggaccgtccccgcgccgccgcgccgcggggcgcgggtgtccgtggccagcttcggcggcgcgggcgacggacggacgctcaacacggcggcgttcgcgcgcgccgtcgccagcatcgagcgccgcgccgcgccgggcggggcggagctctacgtgccgcccggggtgtggctcacggggcccttcaacctcacctcgcgcatgacgctcttcctcgcgcgcggcgccgtcatccgcgccacgcaggacacatcaagctggcctctgattgaaccgctgccctcatacgggagaggacgtgagctgcccggcggaagatacacaagtttaatccatggcaatgggcttcaggatgttgtcatcacaggcgagaatggaactattgatggtcaaggcagcgcgtggtgggatatgtggaagaacaggacactgctctacacaaggcctcaccttcttgagctgatgagctcttctgatatcattgtctccaatgtcgtctttcaggattcgccattctggaacatccatcctgtttattgcagcaatgttgtgatcagaaacgtgactatcctagctccacatgactcccccaacacggatggaattgatccagattccagcagcaacatctgcatcgaggattgctacatttctactggtgacgattccatcgccatcaagagtggctgggatgagtatggaatcgcctatggccgcgccagttctggcatcaccgtgcggcggatcacaggctcctccccgtttgctggcttcgcggtcggaagcgagacatcaggtggcgtggagaacgtccttgcagagcacttgaacttcttcaactcagggtttgggatccatgtcaagaccaacacaggcaggggcggcttcatcaggaacatcactgtctcggatgtgacgctggataacgtccggtacggcctgcggatcgttggcgatgtcggcaatcaccccgacgacagctacaaccggagtgcgctcccgatcgtcgacgcccttacggtaaagaatgtccagggccagaacgtcagggaggctgggctgatcaagggcatccccaactcggccttctcccggatctgcctgtcgaacgtcaagttcactggtggcgcacctgtccggccgtggaagtgcgaggctgtcagcggtggcgctctcgacgtgcagccgtcaccatgcacagaactgacttcaacgtctgggacgagcttctgtacaaattcgctttgatgctttgccagctagctgagctgctgctatgcttctgtatctacgagtatgtatactggtgctttaaag

SEQ ID NO: 147475 - DNA, 2038 bp, Zea Mays
cggtgtcagtgcgtcactactttccacacgcgcctctcgccccgtacgcagccgctctctcgtaaatcgtgatcttgtctgttgctctgctcttcgttcttcgcgtccgtccagcgacatcgtgcgcccggcaaggcaagaggcaagctgccccacttccagttactattcgagggagagagagaaagagaccactaattaccttgtaaatcccccgtagccgtagcgataagaacgcaaacccatctgtgtcccatactcccatcccacgtaaatccacccgcaaacaactcgcagtaaccttttgtttgttcttttgttgccttccttttctccgcactcatcgcttgttgcggttcgctctctacaaggaggcggcttgcgcggggggcatcgtgcaatggcgcggcggtgcccgtgcaggctgctgctagccgtggcggcggcggccgtgctcgtggccgcggcagcgcaggcgcaggagacgtgctcggggaccgtccccgcgccgccgcgccgcggggcgcgggtgtccgtggccagcttcggcggcgcgggcgacggacggacgctcaacacggcggcgttcgcgcgcgccgtcgccagcatcgagcgccgcgccgcgccgggcggggcggagctctacgtgccgcccggggtgtggctcacggggcccttcaacctcacctcgcgcatgacgctcttcctcgcgcgcggcgccgtcatccgcgccacgcaggacacatcaagctggcctctgattgaaccgctgccctcatacgggagaggacgtgagctgcccggcggaagatacacaagtttaatccatggcaatgggcttcaggatgttgtcatcacaggcgagaatggaactattgatggtcaaggcagcgcgtggtgggatatgtggaagaacaggacactgctctacacaaggcctcaccttcttgagctgatgagctcttctgatatcattgtctccaatgtcgtctttcaggattcgccattctggaacatccatcctgtttattgcagcaatgttgtgatcagaaacgtgactatcctagctccacatgactcccccaacacggatggaattgatccagattccagcagcaacatctgcatcgaggattgctacatttctactggtgacgattccatcgccatcaagagtggctgggatgagtatggaatcgcctatggccgcgccagttctggcatcaccgtgcggcggatcacaggctcctccccgtttgctggcttcgcggtcggaagcgagacatcaggtggcgtggagaacgtccttgcagagcacttgaacttcttcaactcagggtttgggatccatgtcaagaccaacacaggcaggggcggcttcatcaggaacatcactgtctcggatgtgacgctggataacgtccggtacggcctgcggatcgttggcgatgtcggcaatcaccccgacgacagctacaaccggagtgcgctcccgatcgtcgacgcccttacggtaaagaatgtccagggccagaacgtcagggaggctgggctgatcaagggcatccccaactcggccttctcccggatctgcctgtcgaacgtcaagttcactggtggcgcacctgtccggccgtggaagtgcgaggctgtcagcggtggcgctctcgacgtgcagccgtcaccatgcacagaactgacttcaacgtctgggacgagcttctgtacaaattcgctttgatgctttgccagctagctgagctgctgctatgcttctgtatctacgagtatgtatactggtgctttaaagcttgggcacccaagtatttatcttcccgaaaattaatttggttttactaatttatttgaacctctctatacgaagagaataattcttgactcgtataggactgaacaaaaaagtgtcactggttttcttatttacctgactcaatgttttattcacaaagtacttgtttctaagcatgtcctacccacatcctctccttattacatagctcgaacttgaagagctatc

SEQ ID NO: 147476 - DNA, 1854 bp, Zea Mays
cgatatttaaatgataaaaatgttaaaattatacacaaatcaggttcaacctatagttgttagctccaaaattatattcacaattatttagttaataaaaaacatgtctttgcattttaaacactgtacttagtaaatggaaaccgtagcaacagcaacgtacgatcactttgatagtgataattttacgttccactcatggcaaaaaaaaatatacatttccaaatctaacagcctcgtcgccgctgccggagaaatgccgccgaggaggcgagatcgccggagactccgcgacccgtcgccgccgtcctccgatgcaagagcaccaccctccgccttaggcttgcgtctcaccctcctcgttcccctccttatcctggttctcgtcctcgccgcccttggcttctccggcctcctctcccattcccctccccactcccaaacgctacagacaaccgcccactccgtctacgagcgcggtctggtcaagcgcgacgtctccgcacgagagatcctctctgagcacacaagggtttccgagaaccggtcgcagcggaacttcgcgaaccccgtcctcgcctatgtgaccccctggaactccaaaggttatgacatggcaaagttgttcatcacaaagcttactcatgtatcaccagtgtggtacgatttgaagagtgataggaacaggctagttctggaaggagaacacaattttgatgccaaatgggtctctgaacttcaaaccaatgggtctctggtagtgccgagaattgtcttggaagcacttcctgctgttttactattcgaaaagaagcaaaaggcaaaagctattgatataatagtgagtgaatgcagggataagggctatgacggtattgtgctcgagtcctggtcaagatgggctatttatggcgtgctggatgatcaagagctacgttacatggcacttgaatttgttaagcagctgggagaggctttgcattcagtcaattccaaatcaagtagccaccatttggaactaatttatgttattccggctccaagaatgcaaaagctcaataatcaggactttggacccaaagatctcatgcatctggctgacactgtagatggtttttctcttatgacatacgacttctcaggacctcagaatcctggtcccagtgcacctctgaagtggatacatcattctctagcagcacttctttcagcaaaaggttcctctcatagcaattcacattcacggatgatattccttggcatcaacttttatgggaatgattttctactgtctggaggtagtggtggcggtgctatcaccggaagagattttgttcatttacttgagaagtacaagccatctttgcagtgggatggaaaaagtttggagcacttctttatctattcagatgaaggcgtgaagcatgctgtattttatccaacgctgatgtcactctctgtacgtctggatgaagcccgaaattggggaacaggcctttcaatttgggagatcggacaaggtttagactacttctttgatattttataggaatgtctcaatatgtcttttggtactgtgtggagttgtgtccactaatctagtatgtgaattacgcattttggtactgtatgcaccgtgggcattgttcttttcagcattgtaatatcagctggcaacagctcacattaaccgtgagaaactgcttcactgaatatttctgccggctgggtacacactagtgtagtaagaggcatctgtattcatctttgcttatggcatatgtgctgttatacatcttctaaaacgtactggtattttctggtgttttgtacatttccttactgtgcttttgc

SEQ ID NO: 147477 - DNA, 1842 bp, Zea Mays
cgatatttaaatgataaaaatgttaaaattatacacaaatcaggttcaacctatagttgttagctccaaaattatattcacaattatttagttaataaaaaacatgtctttgcattttaaacactgtacttagtaaatggaaaccgtagcaacagcaacgtacgatcactttgatagtgataattttacgttccactcatggcaaaaaaaaatatacatttccaaatctaacagcctcgtcgccgctgccggagaaatgccgccgaggaggcgagatcgccggagactccgcgacccgtcgccgccgtcctccgatgcaagagcaccaccctccgccttaggcttgcgtctcaccctcctcgttcccctccttatcctggttctcgtcctcgccgcccttggcttctccggcctcctctcccattcccctccccactcccaaacgctacagacaaccgcccactccgtctacgagcgcggtctggtcaagcgcgacgtctccgcacgagagatcctctctgagcacacaagggtttccgagaaccggtcgcagcggaacttcgcgaaccccgtcctcgcctatgtgaccccctggaactccaaaggttatgacatggcaaagttgttcatcacaaagcttactcatgtatcaccagtgtggtacgatttgaagaggctagttctggaaggagaacacaattttgatgccaaatgggtctctgaacttcaaaccaatgggtctctggtagtgccgagaattgtcttggaagcacttcctgctgttttactattcgaaaagaagcaaaaggcaaaagctattgatataatagtgagtgaatgcagggataagggctatgacggtattgtgctcgagtcctggtcaagatgggctatttatggcgtgctggatgatcaagagctacgttacatggcacttgaatttgttaagcagctgggagaggctttgcattcagtcaattccaaatcaagtagccaccatttggaactaatttatgttattccggctccaagaatgcaaaagctcaataatcaggactttggacccaaagatctcatgcatctggctgacactgtagatggtttttctcttatgacatacgacttctcaggacctcagaatcctggtcccagtgcacctctgaagtggatacatcattctctagcagcacttctttcagcaaaaggttcctctcatagcaattcacattcacggatgatattccttggcatcaacttttatgggaatgattttctactgtctggaggtagtggtggcggtgctatcaccggaagagattttgttcatttacttgagaagtacaagccatctttgcagtgggatggaaaaagtttggagcacttctttatctattcagatgaaggcgtgaagcatgctgtattttatccaacgctgatgtcactctctgtacgtctggatgaagcccgaaattggggaacaggcctttcaatttgggagatcggacaaggtttagactacttctttgatattttataggaatgtctcaatatgtcttttggtactgtgtggagttgtgtccactaatctagtatgtgaattacgcattttggtactgtatgcaccgtgggcattgttcttttcagcattgtaatatcagctggcaacagctcacattaaccgtgagaaactgcttcactgaatatttctgccggctgggtacacactagtgtagtaagaggcatctgtattcatctttgcttatggcatatgtgctgttatacatcttctaaaacgtactggtattttctggtgttttgtacatttccttactgtgcttttgc

SEQ ID NO: 147478 - DNA, 2688 bp, Zea Mays
gtaggagcaagttttccaagactgcgcagttttttcccagttgcttcatcgattacattgcctgacatctcaatagaatatgacatgccagatgtccgtggtagtcctcttcctacaagtaaatctaaatctctttgatgcagttctctgccattgacaaaaacacctgtatccccaccggcacaatttttggccatcggataattaaattctctaataaatggctggacaatgccaatacattcccgtcccatgacaccccaaaaaccagcatgaaacacttaccaatatgtacctgggtcaacaggaccagctttcttctctgccttcttaagggctttttcagagattggatgaccattaattgaaaccttaacattgtccatggacttatttaataaagaaaggtccttaaaacccttcttcagaaaaccagcaaaaaatgatgaatccccactcttaccggtagaggactgatcttcatccaacccagcctctgatgaaccacgagaaaacccagaatttgtccgctcattaactgatgaaccactccctgtttgagaattggcatcttcaataaatggctgctgcaatttctcattatcttcttcgattttcagcccatcatgtctctcacttatgcttccagtttccatgacatctgcattattttcatcacagttttttctaatgctctcagctccaagaacataattttcatctctttttacctttgactcatatttattgcatgtgtcctcgcctccggggctgctatcttcatctttaatattcatacactggtacttttcacttccatttactagactactagtgtcatcttctccactattctgctcatatgttttgctactatcttcaatgttgcatgagttatcttccttgctcttctgttcataacttctgcatgagatttcatcttcagtggcatctttgtcatcttcattgctctcctgtttgcttcttgtactaatgcccccatcatactgatcattaacatcatattctcctttgcaagttaggtctgatttgtaagccatggccatgccttgatcatcctcgtcgttacatttttcttgggcacacaatgggtcaacaagtttgtcctctaaagctggagaccgtgggctaactggaccacctacagaaggctccaccttgcagtctgtgtccctctcgcacaatatatcctttgggcttccattgtctacagacctacttggagagaaagggagatcctcagcttttgactgaatgcttctagttgaaccacaatctttgccaatcctgtcattactcatggtcgaagaaagtgaattatcatcagtggaatccatgttgttttgcatgttgctatgatcatttgaattgtagaacatagaattaaaatcctcatgatgttgatggacagtatctcgcctcatctggtcacttgagctttgctctgtttcaggcgcatataaggataatgacggtgcaaagggaataccattttcttcatcatgcttcagactaactatctgacaacaagacccgcattgaaatcggttctgcttccgccctatgcatttttctgtaggcatctgcagtagtttataacatgaactgcacacagagaaaggtgcagcaccatccactggacggcagatatgttccgccttcttcctgaagtactctgctctcctcttcgatacagaccggtgcgagtaaagtgatgacgccacagacctccgatcataatcggatgaaacagatggtgacctctcgaaccggtacgattcatgctgcctggcgaagtacctcgccatcgggatgttctcctcttgcggcgaagtcctctgcccatgcagacagtgtggacaggcacacccgtagtgatggaagctcccaggccccatcccaccgttctcccactgcctcccagggtactggcggtagtgcccgctagactgcctcacatacctttccccatgttcagggcgcggcggtgcgtatgggcctggaggcggcaagcccggcccaaaccgcccgccatggcgggagcggtggtaccccggcagaggcggtggctcctccagatgctcggcggggagcatggagaccgcgcggcggctggccctgcggggctcccgccgctgggcgacgacgttgcaggagcgcgcgatctggtccctcagctcgtccagcttgcgcagcagctcgacggggtcctgctgcagcgcggcccagcccgcgccgcccctccggtcgctgcattgcggccgctcctccgccccgatcctccgcctgtacttcatctccttgagatcactccccatggcgggggcggcgaggccgctccgcgctcccgctttctcccaccggatcggcaagcactggcgttatcctgcacggagttgcgcgacgcggagccaaagttttaggggaggtggagcggtgaacgagcagatcagaggggtcccgagggggcggtggggaatggagtaagatctgtcggtttcctacgggagagagagagagagagagagagagagagagagagaggcggggggtgcggaacggcgcttaccttgagacggagctcgctgcggcgcgggggcgtggcggcggctccggttctccattagggtttcgtcccgcagctcgaggagtacgccatgagagaga

SEQ ID NO: 147479 - DNA, 967 bp, Zea Mays
acttatagactagtatactagacgctcacgagtcttagcacagtcgcatcactgccaatccattgctctcgcctagtacacgaccaatcgatgatggccttggaaccctaggagcggccgcgcggctcagcttcgccatgggctccctcgacaagggaggagcggcggcggcggcggggaggtacaagcgcgttccgggcccagcgctgcgggctggcttcgtcggcggcgcgcggaaggtgcgggcgagatccaggctcgcgcgcttcctgctgtccgagaaggtggactatctccagtggatagtcggcgccaccgccttcttcttcgtcgtcatcgtcttcgtcgcgtttctcccggagttgggcgtcttcgagcggcccaggctgacgctcccttcgcgccgcgcgggagagggacgcgtcggaggcggaggcgggattgagggccgcagcggcctcgtcatgtgggaggcgggcgtggcgtcccagttccagccgaccaggctgagggagaaatgggcgagtgagcggagggaggaggccaagagcttggcggagctcgggacgcccgtaacgaggctcggggcacggaagccgcggcttgccatggtgttcggtgacctgtatcccagcgcaatgcagcttcagatggtcagcgtcgcttcggttctggaggccatgggctacgaaatgaaggtgcgtccctgaacctgaaatgctgtctcgcgaaccataggctagaagtttacttgttggtcgtcagacaagttcgtggaggtagtactgatttgagtggaacacgcgcccttgtgtttgttttgtgacattttgcttctagcagattgttcatggctaaactaggctgttgtcattaatcgtcaatattttggagcaagttgggttgtcttgtcatgtctgatgtatgcacctattcagtaatgcatgagccttgttgttggtctcta

SEQ ID NO: 147480 - DNA, 1041 bp, Zea Mays
agaaaccacacatataaagatttttggtccttctgtgatgcgatcaatgctgggaactgcaggttagctgttttggaggccttccaaaggatgtatggtgtacaccttgatcatgacctggattctctgttacatatgcctaatgatggagacacatggtctgtgatgcaaagttgggttttgcctacacggtcattcctagaatttgttatgttttcaagaatgtttgttgatgcactggatgcacaaatgtacgacaaacaccatcaaactgggcattgcatcttgagtcttcacaaggaccggcactgctactctcgtgtcctggagttgattgtgaatgtttgggcattccacagtgcacgacggatggtctatgttaatcctcagactggtgcaatgcaggagcagcaccatctcagtggcaggagaggtcaaatgtcagtgcagtttttctcctacaccactctgaagagcatggacgaggagcttgcagaagagtttgacttggatcatccggacaggaggtggctctggccacaaactggagaggtcttctggcagggtctctatcagagggagcggatcatgcggcagcaggagaaggagcggcggaagcagcagagcagagagaagatccagagaatcaagaatagagctcggcaaaagacgctgggaaagtatataaagccaccgcctgatgatacaggtggctcgaacgatacaacatcagtagatttgtagcattttgaccatgatgattcttaccgtggggaatttggttcattatttgtaacggctgtccttggtcctcactgagaacccccggacggttgtgaatattttgtcagttttgtcgtgccctctggtgtctgggtgctttacaggcgattttgtaacatatctaggccattgagttgtgaagctgccatcttaggtgtaaatttgggtttccgtagggttgtttttgtccatttcgcttatgagcttctctataacagacagttaacacttaacagctgctccgcatttgcagtctcc

SEQ ID NO: 147481 - DNA, 664 bp, Zea Mays
ttggtactatgtgggagcgttgcgctgcgagtggcggcttcttatcatgttgggcttgggtggtttctcaaggcccatctgtactgtaacggctcattgttaggtgagaagtaaggaagagtaacagacctacgcgcttcgcacgagacgctcgacgcacgaaactggtgctttaatagagtagagattaaaagatttcatgcaaagttttgatttactgattctgttcaataagcttttctatttttccaacagattgtgagtaggattaagaaagagtgccctaatgtaccccttgtgttgtatataaatggaaatggaggtttacttgagcgcatgaagaacacaggagttgatgttattgggcttgactggacagtggacatgactgatggaaggaggcgccttggtaatggcattagtgtacaagggaatgtggatccagcatttttgttctcaccattaccagtactgactgatgaaattcataggttagtaaaggctcaaagatttccatttaatttacgttattttgtgtttttgcttaatgctcatgtgcaattcattaatgagatcacctaaagtgctgcttgagcagtgtactatacatcttcatgtcaggtatgattggttgcctgcactatgataaacctgcattacaccc

SEQ ID NO: 147482 - DNA, 506 bp, Zea Mays
gacacaagagtactacaggatactttaataacttatgcggacaggttcccccatccaccggaaggtaaatactatcttgtcgattcgggttatccaaatagaaaggggtaccttgcaccttataagggtcagaagtaccacattacggaatggcaaaatgcgaggcaacctattgggagtaaagaagttttcaactatgcgcactcatccctacgaaatgttattgagcgatcatttggggtgctaaaaatgaagtggagaattctattaagtctcccttcattttcgcttgagaaacaatcgaagataattattgcatgtatgacactgcataacttcattagagatagtgctctacacgatagagattttgatgaagtaggacgtaatagcctaagtcatgatctacctgcaggtgagagtagtactagcacatctgatgagttagacatgagtgattttcgagatgcaattgcaaatgcattagtgtcgtagttaacttagtg

SEQ ID NO: 147483 - DNA, 769 bp, Zea Mays
atgaaggagaaggtggacgtgtcggcggtggacctggaggccggtatcggggagacgttgtaccgtggatctcgtgaagatgtcatcccttccgtcttcctttcttctcccccaccccctctggatcctccatcgctgccacaactttcgtctatgtgggacaaggagggtgcggccaagggcaacgcggtgaccccaacgttagccacggccatgctgggctcgctggcgccctgggtgtgcgccgccgcgggggcgcccgtgatggcgcccaggcttaagctactgcaaggggcccaaccccgttcgaattatagggttccacgcgcacaaggggcccaccttgagcaggacacaacccgtagcacaggggtggcgaggagtgggagaggaggcgtatataacaagacgctgctaggggataagcttggcaagttctcggcgtcgctgctgatgaacaccatgcatttcgcgctacaggcggggctctccaagctcatcatctgcttccagcccaaggggcccgaggccgccgtcgacatgggatggaaggactacttcatgagagtcgtgccaactgctctcgggacggccttggacataaacctgagcaacgcgtctctggtgttcatgtcggtgacgtttgctactatgtgtaaatcagcctccccgatattcttgttgctctttgcttttgcatttagggaagaaaatgactaccatagagcatttctaggtttctgttgcctccttttgaatgagagtttgt

SEQ ID NO: 147484 - DNA, 2055 bp, Zea Mays
acttcagttgcggatgcggccaccttctcccctttcctcagaccccaggccccagcccggcaagcagacatgggcaaccgtgcgtcgcgccaccaccgccaagccgccgagcagcaaccggcgacgccgaccctgccgaagccccagccccagatccagccgccgcctccgcctccgccgacgcagacgcagcagtaccagcaggcgccgccgcagtcgcagcagaagccgaagccggcggcggacgtgggggcggtggggcgcgtgctggggcggcccatggaggacgtgcgcgcgacctacactttcggccgcgagctcgggcggggccagttcggggtcacctacctcgtcacgcactcggagaccgggcagcgcttcgcctgcaagtccatcgccacgcggaagctcgtccaccgcgacgacattgaggacgtgcgccgggaggtgcagatcatgcaccacctcacgggccaccgcaacatcgtcgagctccggggagcatacgaggacaggcactcggtcaaccttgttatggagctctgcgagggcggggagctcttcgaccgcatcatagccaagggccactacaccgagcgagccgccgcctcgctctgccgcgagatcgtcgccgtcgtccacagctgccactccatgggggtcttccatcgggatctcaagcccgagaacttcctgttcctcaataacaaggaggactccccgctcaaggccacggacttcggtctctccgtcttcttcaagcacggggagacgtttaaggatcttgtgggaagtgcatattatgttgctcctgaggtactgaaacggaaatatggggcagaggctgacatatggagtgctggggtcattctttacatccttctgtctggtgttcctcctttttgggcagagaatgaggatggcatatttgatgctgtcttgcgcggtcacatcgatttctcttctgacccttggccttcaatatccaatggtgcaaaggatttggttaagaagatgctgcgacaagacccaaaagaacgcctgactgctgctgaaattttgaaccacccatggattagagaggatggagaggccccagataagccacttgacattactgtcattggtagaatgaaacagttcagggcaatgaacaagctcaagaaagttgcattgaaggttgtggctgagaacttatcagatgaagagattatgggcctaaaagaaatgttcagatccctggatacagataacagtgggacaattactcttgaagagctaagatctggtttaccaaaacttggtacaaaaatttctgaatcagaaattaaacaattgatggaggcggctgatgttgatggaaatggtaccattgattatgcggagtttatatcagccacaatgcatttgaatagattggagaaggaagaccacatactcaaagcttttgaatatttcgataaggatcacagcggatacataaccgtagatgagttggaagaagctttgaagaagtatgatatgggagatgacaaaactataaaagaaatcattgctgaagtagatacagatcatgatggaagaattaattaccaggagtttgttgccatgatgaggaacaacagccctgagattgttccaaatcggaggcgcatgttctaactgtcatggacaatcacattgaatactttcaagaacaatctgcccttagacataatctttgtcccattttctttttggaacagccgttaagaagactccttaatttgagatccatgtctctgctgcccggacctgtttgtcccaaaatagggtggtgttatagtgattcgtacttgatgctttgagcttcatggactcttgcgtggcaatgtttatccccattgtacgtctggttgttctgctgcttcgatctgaggctttctttaggtgtaaacggatatctgaattattaggataaatttaatattttaaaatagatatgtatgaaatttgatgttaatatcttcttatgttacgaagcatattattttaaataaaaatatgattttgtat

SEQ ID NO: 147485 - DNA, 615 bp, Zea Mays
ggcctaatttttggcttcattcaaccgtacaaatgttcacatgacatatttcacaaatttacatatccaatgaccaaaattgtggcagacaaattccaattcataggtcacaatacatctagcaagaagcaacattgttcaacaaaacttaaggctactagtaacaaaaatcaacaaacttggagccactaagtcctacttgtgaaaaactaacaaccaactattgataaaacaacccgacatagttcaaccaacaaccaattttcaaaaaagaaacatactacaataattcactgttgggggcttaaaaactttatggccttggattgtgctggccctggttgaagtttagcggttaacaaaggaggacgtgcatttcttgtgatgtcatctttacaacttctatttcctcataatgttttacccttgaagtttctgattccgtcttcaagttatccaacacttgtcaaagttttgttttttcttgcttctccttctcaagctcaacctgaacatcctgaacctataaataagcataacttatttacttcatatgtaaccatgcacacacagccaaacaagaacaaaaacatagttaaaaatatgtatacaaat

SEQ ID NO: 147486 - DNA, 1686 bp, Zea Mays
taataatataaccacagaaatccatcgacgaacaactgagaagagctgcgcctgcgcctgcgcctgcgggaaagggagaacatggtggggaagaagaggggtgttatctccccgctggaccatctcgctgggctgctggaggtgcgcgtggtgaggggagtggacctcgccatccgcgacctccgatccagcgacccctacgtcgtccttcgcatcggcaaggcgcaggtccgcttctcctcccctcccttttggtttgctttgctgctggtaggttttatcggcaagagatccggcgaattccgctcgaatcgatccccggtctacagcacagatcacgactaatatgctatatagctgtttggatttttcattttattttattttccctgttcagagttgcctgccctattgagttgtctgtctctcttctcacacttgcgtgcgccggctaaccgtgattgtttttttccccccaatgtttcacagaaagtgaagacgcgagtggtcaagaagagcatcaatccggaatggaacgaaaaactcaccctctctattgaagaccctgccgttcctattagactggtacgccttcgcttccacctttccttcccgaactctacaagtattctgagcaaacgagtaacagaggaaataatttactgctagctagtagtaccaatctattactcgtcttccttgatatgtgcaggtgtagctgttagttgttatatgtacaatcaattgaacgaaacattcgtgagccatatatgtttcgtactacagtttttttaaaaaagattaaagttgttctgtacggtgagaaaatcacgtctctcctgatgtaatattagtgattatatatgctaactcagcatgcggtcactaccgaatgacttccatattatggaaattaactttgtctattcttacatgcacacttgtaatttgcctatgccagccaatacagttcagattaagccatatttacggtgttttaagcttttacgttgcacgcatcagtttcgtgagcctgcctgtggttttgatatttgagttgagtcccaagaactttcctagctcaaaaacactgattccaagtcctttcagaagactattttatagcctagcgattacacacccgtgacttcattttccaactctcttaaagagacagacgctcatgctgagtattgacaagtaataactctttctcatttttattttttcaggaagtatttgacaaggacactttcgttgatgatgcaatgggtaacgcggagctggacatccgcccgttagtcgagattgtgaagatgaagctccagggtgtcgctgacaaaacggtggtaaagaagctggtgcccaacagacagaactgcctagccgaggagagctccatatacatatcggaggggaaggtgaagcaagacctggtcgtacggctaaggaacgtagagtgtggcgaaatcgagctccaacttcagtgggtccacctccctggctctaagggtgtatgagaagagttatgagcgctgcctagcttgcactgctcaggttcttcgcttcacattaaagtaatctatttgaactgtagttgtaatctatagagataaaagcagtgtaaaaatagtagaaatcgttatggattaaagacagtcgacccagctcttgctagttgaaaag

SEQ ID NO: 147487 - DNA, 865 bp, Zea Mays
taataatataaccacagaaatccatcgacgaacaactgagaagagctgcgcctgcgcctgcgcctgcgggaaagggagaacatggtggggaagaagaggggtgttatctccccgctggaccatctcgctgggctgctggaggtgcgcgtggtgaggggagtggacctcgccatccgcgacctccgatccagcgacccctacgtcgtccttcgcatcggcaaggcgcagaaagtgaagacgcgagtggtcaagaagagcatcaatccggaatggaacgaaaaactcaccctctctattgaagaccctgccgttcctattagactggaagtatttgacaaggacactttcgttgatgatgcaatgggtaacgcggagctggacatccgcccgttagtcgagattgtgaagatgaagctccagggtgtcgctgacaaaacggtggtaaagaagctggtgcccaacagacagaactgcctagccgaggagagctccatatacatatcggaggggaaggtgaagcaagacctggtcgtacggctaaggaacgtagagtgtggcgaaatcgagctccaacttcagtgggtccacctccctggctctaagggtgtatgagaagagttatgagcgctgcctagcttgcactgctcaggttcttcgcttcacattaaagtaatctatttgaactgtagttgtaatctatagagataaaagcagtgtaaaaatagtagaaatcgttatggattaaagacagtcgacccagctcttgctagttgaaaagaacccagctcttgccatttgacatgttgatcatgtagcggtagccgaagaggatgcaatcctaaatggcccatgtgcattatagttc

SEQ ID NO: 147488 - DNA, 1440 bp, Zea Mays
atgcagatcctacgcctgctcgcggcgcggcgtttccgccgccgccgccgccgcccggtgtccacgatcactgcgacggcgaccgcgccagtcacccctcgcggcggtgccgccggaggctgcatgtacgggtacggcgaggaggaggatgagggcccgttcttcgacctggacctgacctgctgctccgcgcccgcgtccagcgcgggcagccaggcggccgagtcgggctccgagtccgaggacacctcgtcctgcggcgccgccgccgacggcggcgccgccgcgcgcagcgacctggacttcgtcatatcgctgcaccgtagccgcccgtcgtcgccctcgtacgaggagcgcctcttctgccgcggcgccgcgccggcgcggcccccgccgctcatgttctgcgcgtccgagccgagcgacgccgcgtcgcgctcgcgcgcccgcgacagcagcggcggcggccggctgcggctccggacgctcagcttcgggtccgccaaggctgccttctccggcgggcgcgccagcttctcccggagcaccagcggcgcgcgctcggcgaggctcttcgccgcgtacgaccaggacctgccggacgagggaagggcgctcaggccgccctccggcgacgtcatccgccgctacctgagcaagatctcgagccggctgcggcgcgtgggcgtgggcgttggcgtgtctcatcccgctgccgctacggacctccggctgaggaagagccgctcggcctccgccgcgcaggcgtcctcgacggcccagtcgccgccgccccgacgcgacgactcgctagccgagaagcaggacggcatcgccagcgccatcgcgcactgcaaggagtccctccaccgagcgtccgtgtcggaggcggtggacacgtcgctggcgcgatcgcggagcgacccagggccgtaatctgtaaagcttcgtcgtggacgaggacgctgggttttctcatccggcgccacgccatgctcgccactccgctccgggacggcggcggcggccgaagcttcgcgctgaatctcctcgcgaaggacgcgacgaaaagacgacgaacttgccgccgcaagtacgggttgctaaaggctcgtgacgaacatgcagcgggcggagcgcctttagcccgccgtaggcttgtttatgtgtgcgaaggagctcttttcgtggttttaggcgtgggaaaagagctccttttaggatcctttagccactaccttccctccctccccccatgtacaagcgtggatctgtgtcgcttcattaccttttcttcttttttttttcccgttcagttttctctctttttttcggttcgacgctttgtacgagagacttgcaacaggacgtgtaattagtacgtactagtagctaggtgctcatccttatgcaaacttaacatgttgggttcgttgtgtc

SEQ ID NO: 147489 - DNA, 817 bp, Zea Mays
tgccaggcacaggagcatgacccgcgttctccgcctcgcactaaggccgacgccttcctctcttggatcgtcgcgcggttccccttcctgtttccacctccgcccgcgtcgagcgagggacacaccgcctccggccgcgcggcacgatctccgttccccaacatgagcacgacagaggatgagaggtccggcgccgccgcagaagcgggaggaggggaggaggagagacgggagaggagcgtcggcctgatggccggcctcgtggacagggccaagggcttcgtggtggagaaggtggcgcagattcccaagcccgaggcggcgctggatcgagtctccttccagagcataagccgcgagggcgtcgagctgcacagccacgtcgacgttagcaacccctactcgcaccgcatccccatctgcgagatcacctacaccttcaagagcgccggcaaggtgatagcgtcgggcatgatgcccgaccccgggtggatcgcggcgagcggtagcaccaagctggagctaccggtgaaggtgccgtacgacttcatcctgacgctgatgaaggatctgggaggggactgggacatcgactacctgctggaggtagggctcaccatcgacctccccgtcatcggcgccttcactatcccgctcaccaccgagggcgagatcaagctccccaccttccgagacttactgttctaggcaatcggcaaatgaaatgatttattatccatatcaaaatcagtgctctatcaaagcaatgatggtcgattagcaatatttgggtttctatataactgttcagggattt

SEQ ID NO: 147490 - DNA, 1508 bp, Zea Mays
aactctctagaacctcgcgggccattcaaaaggctgcgccgttaaccccatcccttcgcctgccctgcccacgtggccacgtacgagtgacctcgattattctgtttgctctcgttcaagtcatcgtctggtcgcgtcggcagcagacgcccagagccggagggagcgccatggccgcgtcggatctggagagcaaagccaaggaggccttcgtcgacgacgacttcgagctggccgccgaactctacacgcaggccatcgacgccgggcccgccactgccgatctctacgccgaccgcgcccaggcgcacatcaagctcggcaactacactgaggctgtggcagatgctaacaaagcaattggtcttgatcctacaatgcataaagcctactaccggaaaggtgctgcatgcattaagcttgaagaataccaaactgcaaaggctgctcttgagttaggttcttcctatgcaccaggcgattcaaggtttacccgtctattgaaggaatgtgatgagtgcattgctgaggaatctagccaggcaccagcaaagaatgtcgaggctcctgtagctgctactgttgaggacaaggaggatgtcgcaaatatggataatacaccgccagtggtagaacccccaagcaaacctaaatataggcatgactactacaacagtgccacagaagtggtcctcacaatatatgctaagggtgttcctgctgatagtgtagtcattgattttggtgatcagatgttgagtgtatccattgaagtacctggtgaagaaccgtaccattttcagccccgtctgttttctaagattatccctgagaaatgcaagtatcaagttttatccaccaaggtcgaaatacgccttgcaaaagctgagcaggtgacatggacaaccctggattatagtggaagaccaaaggctattccccagaagataagcacgccagctgaaacagccccaagaccttcatacccatcttcaaagtcaaaaaaggactgggataaactggaagctgaagtaaaaaaggaggagaaggaagaaaaacttgaaggtgatgctgcattgaacaagttcttccgtgatatctacaaggatgctgatgaagatatgcggagggccatggacaagtcattcagggaatctaatggtaccgttctctcaaccaattggaaagatgttggatcaaagacggtggaagcgagccctcctgatggtatggagctcaagaagtgggaaatttgaagtttggactgcccctcttgtaaatccaggtcttggaagttatgacctagttctgtccacccatttggtgtcgtaagtttggttaagtgtgtgtgtgtttttggttcagctgtcgttcgaggaaaagctattgtaagttgtggactgtgtaaaagctgcaatagattgtgggttgtgaaaaaggtgtatgctgtttaatttaaacaagcataaaacttacacgtgtctctattttttcattttcttgaaacc

SEQ ID NO: 147491 - DNA, 782 bp, Zea Mays
cttgcatttcttatagacacattttatttgtatatatattctgcagctgaaacagccccaagaccttcatacccatcttcaaagtcaaaaaaggactgggataaactggaagctgaagtaaaaaaggaggtttgatcaagatgcccacttttaggcatcacttttacttcagcaacttgggtttctcaaatatgaacggtgtttgtgtcggcaacaggagaaggaagaaaaacttgaaggtgatgctgcattgaacaagttcttccgtgatatctacaaggatgctgatgaagatatgcggagggccatggacaagtcattcagggaatctaatggtaccgttctctcaaccaattggaaagatgttggatcaaagacggtggaagcgagccctcctgatggtatggagctcaagaagtgggaaatttgaagtttggactgcccctcttgtaaatccaggtcttggaagttatgacctagttctgtccacccatttggtgtcgtaagtttggttaagtgtgtgtgtgtttttggttcagctgtcgttcgaggaaaagctattgtaagttgtggactgtgtaaaagctgcaatagattgtgggttgtgaaaaaggtgtatgctgtttaatttaaacaagcataaaacttacacgtgtctctattttttcattttcttgaaacctgcaattgttctctagtttcatttcgctattttagaaagtagaaaaccaacaaaaaacaggatctgcaataactaaaagtagctgcttctgacaagcagc

SEQ ID NO: 147492 - DNA, 2560 bp, Zea Mays
gcctcccgttgtcccctccatcagtcccctcgtccttctcccctctccacacggcgtcgcggctcccctcattcgccggcgtcgacgatgaacggaggcagccggcggcagcggtactcctcagagcagctcctcttcgacgtccccgccaatgccggtgccggccggtgggcgcagcagcgtggcggggtgcgtcgcggggacggggagatcttcgtgtcggtggagcccgcgacgccggcgcggctgtgcggaggggacgccgcggccggggactcgccgggacagaggcagcagctcagtcccgggttgctcgacctccatgcgttcgacaccgagcttattcccgattttcaagtaccaggaatctatgatggtgcccaaaagtttggctatggaggaggtctagatgaatctgatatgagattcacatcaaacaagatgatgagcaagtctactatttttcctgatggtaactatctgaaggccttcactgagaaagaaaaggcagcacctgtcgcgaaaatcaaagtggtggtgcgcaaaagaccacttaacaaaaaggaagtatcaaagaaggaagaagatattgtagacattgaacaaagatcaaactctttgactgtccatgaaactaaacttaaggttgaccttactgaatacgtcgaaaagcatgagtttgtattcgatgctgtcttagatgaagatgtttcaaatgatgaggtttatcgtgaaacagtggagcctgtagttcctgcaatttttaatcgaactaaggcaacttgttttgcttatggacaaaccggtagtggaaagacttataccatgcgcccccttcctcttaaggcttcccaagatgtcttgaggttaatgcaccatacctatcgaaaccagggatttcagttgtatgttagcttctttgagatatatggtggcaaattatttgaccttctcaacgataggagcaaactttgcatgagagaggatggaaagcaaaaggtttgtattgttggtttgcaagagtatagagtgtccgatatagagactatcaaggagttgattgaaaaaggcagtgctaccagaagtactggcacaaccggtgcaaatgaagagtcctcaaggtctcatgccattcttcagcttgccattaaacgccgtgtggatggcaatgactcgaaaccacccagaccagtcggcaagttgtcatttattgaccttgctggcagcgagcgtggtgctgatacaactgacaatgataaacaaacaagaatcgagggtgctgagatcaataaaagtttgcttgccctaaaggaatgcattagagcgcttgataatgatcagactcacatacctttccgaggtagcaaattaactgaagtgctgcgtgactcattcattggagactcacgcactgtcatgatatcctgcatttctcctagttctggctcttgcgagcatactctgaacacattgagatatgctgacagagtgaagagtttgtcaaaaggaagcaacgccaagaaagacgtgtctttggcagtgcctttaagagagtcgaactcttccccactgccttcagttgtaccctcattctctgcatctgaggtgatgaacgatatcaccgggagaagcaatttcggttggcccaagcagcagtatgttaaagaacagcctgctccaacatttgttgaacgaatgcccaaggcaaaggatgcggtggagttcacatcatcaaatatagctgaagtaccagatataatgtaccagctgggaaggcagccatcaaggaaagatgtcactttggcgaacaatatgagaaattccgttgcttacccaactagaagggttgaaccagatgatgatgatgagcatctaaataatcttctccaggaagaggaagaattggttagtgctcataggaagcaggttgaggagactctggacatcctgaaagaggaaatgaacatattaggcgacgcggatcagcctggcttccaactcgatgactacatcacaagactaagcagtatgctctcgcagaaggcggctgtgatcgtggacctacaggctcgtctggagcagtttcagaggcttttgaacgagaacaatgtgctgctatatgctcagagcccttgaccgtagctccgtcggattcatctgttgccctgttgccaccggaaaaggtgggcactggtgatgagtctcgggcggcaacctgtgcgttgttgctgtggccatggtgctgctactgtaatccgtcggtgccagtgaaacgcggaactagatggctagttcacagcatgttgccatgcttctttggcatggccggcccggcaacctattttgtactagagttgctgcatccttgtgttcctgcgccccatccaatgtgtatatctcatatttgtccgtgtcacatgaatgctctgttatttgtagctcaacagatacgtttttctccccctttctgaattctgatgtatgaagttttccagagtgtatggtatcatcccgttatacacagcttttcttggatctttattagaaggaattctatgcc

SEQ ID NO: 147493 - DNA, 1248 bp, Zea Mays
tgcagcaacccgcccccgcctgccttttgagagaattgacctcgatccatccacaaaccacgggcgcttgcctgctgcgtgctgagcggagcggacggccggggccgacgacggcgctgaaggcgaggcccgatcgtgtctccgatatatatatttgccatcgcccgcccggttctcgtcaagccttccggccggctgatgatggacggcctccacaccgacctcgcgctggggctgctcgggtgcggcggcgtcggcgttggtagtagcggacgaggcgagcagctccagacagcgcccttcgtggccaagacctaccagatggtgtgcgacccgcggacggacgcgctcgtccggtggggcagcgagaacaacagcttcgtcgtcgtcgacccggccggcttctccaggctgctcctcccctgcttcttcaagcaccgcaacttctccagcttcgtgcgccagctcaacacatacgggttccggaaggtacacccggaccggtgggagttcgcgcacgagtcgttcctgcgtggccagacgcacctgctgccgcgcatcgtgcgccgcaagaagcgcggcgagggagcctgcacctcctccggcggcgatgcgcaggcgcagtacgcggcggcggcggccggctgctgcatcagtatgggcggcgaggaccatcgtacggagggggaggcggaggcggcggtgctcgaggaggtgcagcggctgcggcaggagcagacggccatcggggaggagctggcccagatgagccggcgcctgcaggccacagagcggcggcccgaccagctcatgtccttcctcgccaggctcgccgaggaccccgacggcgtcacgcgccacctcgtcgagcaggccgccgagaagaagcgccgccgcatgatgcagctcgcctcccagcccgtccgccgcctcccgcctccgcctccgccaccgccagtactccaccacccgctgctggcgctcggaggcgccgccgccgccgccgccaagggcctggacggcggctgccaatgggcggagcagaagaagccgtctgtcgtgctcaccgccgccttcgatcatcccgccgccagctactgcggggcgcagcatgctgtgccgaatctcggaggcggcaacggcggcggcggcatcaacggcatgggcctgaccgctgacgagaccgcggtagagaccacgacgacccccttcccgttctgcctgctcggccagggtttcttttgaccc

SEQ ID NO: 147494 - DNA, 2963 bp, Zea Mays
ctgcctcggccgaccaccgccatggctcccacggtcccttcggcggcgaagtctgcctctccttcccaaccttccgggaagagcgaggtggcagatctgaagcagcagctgcggcagctggcggggagccgcgctcccgatgcggacgaccagcgccgtgatgtcttcaagagggtgatctcctgcatgacggccggcatcgacgtgtcggccgcgttcggggagatggtgctctgctccgccacctccgacgtagtaaccaagaagatgtgctatctctatgtaggctcccacgcgcgcgcgcacccggacctagcactcctgaccatcaacttcctccagcgggactgccgtgatcaggaccccaccattcgcggcctcgcgctccgcagcctctgctccctccgtgtccccaaccttgtcgagtatctcgttacgccactcacgaccgggctgaaggatcctagcgcctacgtccggacgatcgctgctgttggtgctgccaagttgtatcacatatctgccacagcttgcattgatgctgaccttccggcttcgctcaaggcgctcatgctctccgatccagacgcacaggtagttgccaattgcctacatgcattgcaggagatctggaccctagaagctgctaactcagaggcagcagcaagagagattgagacattgtatagcaagccagtggtattttacctgttaaacaagatcaaagagttcagtgaatgggcacagtgtattgttcttgagttggcatcaaagttccttccatctgataataacgaaatatttgacataatgaatctgctggaggatagacttcagcatgcaaatggagctgttgttttggcaacgattaaagtttttctccatttgacaatgtctatgactgatgtccatcaacaggtttatgaacgtattaaagcacccttgcttactctggtgggtgctggcagtcctgaacagtcatactctgtgctatgccatctacatcttctggtgatgcgtgctccaatgttattttcctcggactataaaagcttctactgccaatttagtgatccttcatatgtgaagaagttgaaacttgagatgttgactgctatagcaaatgaaagcaacacatatgagattgtcactgaactatgtgaatatgctggaaatgttgatgtaccaattgcaagagagtctatccgggcagttggaaaaatagcactgcagcagtatgatgttaatgccattgtggacaggcttctacaatttcttgaaatggataaggattatgtgactgctgaaactctagtcttggtgaaagatcttctcagaaaatatcctcaatggagtcatgattgtatagcagttgtgggaaatatcagcagcaaaaacattcaggagccaaaaggaaaagcagctctcatatggatgttgggagaatattcacaggacatgcatgatgctccatacatccttgaaagtcttgttgaaaactgggatgaagagcactctcctgaggttcgcttgcatctcctgacagcagtgatgaaatgtttctttaaaagacccccagagacacagaaggcactaggggatacattagcagctggtctatctgacacccatcaggatgttcatgacagagcacttttttactacaggcttttgcaatacagtcctaatgtagcagaacgtgtagtaaaccctcccaagcaagctgtctctgtatttgcagacacacagagcagtgaaatcaaagatcggatattcgatgagttcaacagtctatcagttgtatatcagaagccatcgtacatgtttacagataaggagcatcgcggaccatttgagtactcagaggatcttacaggcttgactgaggatccagaaaatgtaatttctgcccaaagatatcaagaaaatgataatgatcttttgctaagtacttcagataaagaggacaatggtacaagagccagcaatggttcttccacctctacatacaatgctccttccgatttgattagtccttcattgataagctcgcaagcaccagctgaaacttcactagtaaatactggtgggacatattcctcacaatcaaacttcagtctcgatgaccttcttggccttagcgttactgaagctcctgctttaccacaaccaacactggcccttaactcaaagcctgtgctagatcctggtacgttccagaggaaatggggccagctagcattggcactgtctcaggaatgttctttgagtccacaaggggcagtagctttgatgaatccccaatcactcatccgtcatatgcaaagcaatcacatccaatgtattgcttcaggcggtcagcctccgaactacaagttctttttctatgctcaaaaagatggggctgctgctttcttccttgttgaatgtattgtcaacacagcatcagcgaaggcacagctcaaaatcaaggctgatgatggaactgctgctgaggcattctcgagtttgtttcagtcagccttgtccaaatttgggctttcttgatcctgagtaatttgtctgagcgattcaccggtccacagttttttatgggtttcacagtttgccccaactccactgtcttggcttgtccagtacttgtgatcatattattggagaatcagagtagaaggtgcaaaagggtactggagttttgcggagctaaaaatcctatttgtactatttgggtgaactgtgcatttgtacatgactacatgtcacccagataaatagctgggttatttaggactgtactgtttgatgttctgggttatttaggattgtgatagtttgatgccttgatctcttctgaagggtttcgtttccttgaaggatgtagaaacaacacgcaacaacccctttcatgtatgctatttaccatttcttgcacagatgatcaataagatgtttcgtcttccatt

SEQ ID NO: 147495 - DNA, 594 bp, Zea Mays
agacgcgcaacaaaatcagtacacgcagacgaaaacggatatagttcatacaatcataagcactgcagatcacataaccaagacatttttgatccgatgtatagaagacatccgccactacaaaattattaaaccaaatccttcaaattcgcccagaaagcatgatccaccttcttcaactcgatctcggacatatgtaagcaaatgaagtaccagctacaaactactacggaccgacctcatccgggccctgacggggagatccgatcagacgggggagaggagctggaacacggagggcttgggctcggagttcatgccgatgacgatgacgagggggatgaagccgtagtgcgccaccaccttcgccttcttcatcgtccacgtggtccactccttcatgagccgcaccgtggtcgccgccgcggtggcgtcctcgtcgtcggcggtggccttcttcccgcccttgcccttgggcttcgacttcagcgacggacgcgacgccatggaggatcccccgaactggatccgacgagccgagagcaaaaccctagggaggcggaggcggaggcgtttggggattgtttgatctga

SEQ ID NO: 147496 - DNA, 1503 bp, Zea Mays
ccaccgctgaaaagctcaatcctctccgccctttccacactaaactcccagcagactcccccactccccatgtcttctggagtaagaagtggcggcggaggagatcaccatggcgtccaccaccagcatggccacggccacctcgccggagccgacgacggcgccgagtacgcgttctacagcaacgacatggagagcttcttcttcaatcagccggcgtcggcggacgtcaataatggaggcagcagaactggcgccgacgagctcaccatgccgccgtactccagcgtcacggactacctacaggggttcatggacatggacccctctgggctagctcggcacctcgacgcgccgtgcctgctggcggaggacgccccgctcaagcatgagctgtccgtcgatgtgagctacgacagccagggcaccagcggcgcgcccggagatggggcggcggcgatgcacacgccgaactcgtcggtgtctctctcgtcgagcgaccgggagggggagggccagcttcgtcggtgcaggaagggcaggccgaaggcggaggatgatgcggagggggatgagaaagatcaagaagacggggagaattccaccaaagcgaacagatccaagaagaaggccgagaagaggcagccccgcgttgccttcctcaccaagagcgaggtggatcaccttgaggacggctaccggtggcgcaagtacggccagaaggcggtcaagaacagtccttacccaaggagctactaccggtgcacggcgcccaagtgcggcgtgaagaagcgcgtggagcggtcgtaccaggacccgtcgacggtggtcaccacgtacgagggacagcacacgcaccacagccccgccagcttccgcgccggcggcgcgcacctcttcatgcccaacgcgcacgcgctgccgccgcagcacctgatgctgccgtccagcttccgcccggcggacctgatgggcatggtgcaccccgtcagcatgggcgcaaaccttagcatgttcctgccaactatgcctcctcatatgccatcgccggcgtctcgtgctcatcctcttcagcagcagcagcaccagttcactgactacgcgctcttgcaagaccttttcccttccacaatgcccaacaacccataactaactgctacacaattagctagcctagctagaatcgacatgagagatgctgtccaagtactctgcgccatatgtgatcacctgatggccttgcgctttgggcttggtctaatggggagggaactgcagttattattgattgattaatctgctagctttcatcttaaacattggtttacagttcttacccttccatttgtcaactctccgctgcgcggattgcatgggaggtactagagatggaaccgagtactttttatagctatcactataacggcaactaatttatgtacggcgcctctagacttcttgtacgtgtacatatcatgtgttcctcattgaatcatttgggag

SEQ ID NO: 147497 - DNA, 108 bp, Zea Mays
ggaacttttaaaagttctgcactcactgaaaatcgccgcagaaaaacaaattcagttctatcagatagagcaaaagatgatactttgtccatttaaatggcaagaatc

SEQ ID NO: 147498 - DNA, 93 bp, Zea Mays
gtcccttgatcacttgtattatatattaatcagtaaagggaaacccctcttattgcctaaaaaggcaccctgtttcctggcagcatatttttt

SEQ ID NO: 147499 - DNA, 1841 bp, Zea Mays
ctgatgtccttattcaatcccctctagaaagtagaaacattgcttaattggcttggctattgctgttagctccacacaaaagagagaaccggcggcgagctaggagctagccatggacggacacggcgcggtctcgccgtggagcgtgctaggcggggcggcggctgtgctgttcctgtggttggcgtcgcaggtgctggagtgggcctggtgggcgccccggcgcgtgaaccgtgcgctgagggcgcagggcctgaggggcacccggtaccgcctcctctgcggcgacctcatcgaggagcagcgtctccgcgcggcggccctggcaaggcccgtccccgtggatcggccacacgacttcctccctcgcgtcgcgcctttccttcaccgcgtcctccaagagcacggcaagctctcgtttacatggtttgggccgaccccaagagttctaatcaccgatcccgagcttgcccgggaagtgctgtcgaataagtgtggcgacttcgtgaagtcgctgctctctcccctgtcaacgctgctggttgctgggctcgtcgtccttgacggtgaaaagtgggtcaaacatcgaaggattctgaatccggcattccacgcggagaagctgaagggaatgctgccggcgttcttagcatgttgcaacgaactggttgacagatgggagaaacagatctctgcttccgctgaaccaactgagctggatgtctggccagagttccaaaacttatcgggagatgtgatttcaagagctgcgttcggtgttagctatgaagaaggcagaagaattttcctacttcaggcggagcaagctgaacgccttgttcaatctttcaagacaaattacatccctggcttctctctcctgccaacagaaaacaacagaaggatgaatgaaatcgacagggaggtgaagacgatcctgaggggcataatagagaagagacagaaggcagccaagaacggtgaagcaaccaaggacgacgacctgctgggcttgctactggagtcgaacatgaattacagcgactcggacggcaaatccagcaaggggattacggtggaggaggtgatcggcgagtgcaaggtgttctacttcgcagggatggagaccaccgccgtgctgctcacttggacagtggccgtgctaagcatgcacccggagtggcaggaccgtgccagggaggaggtcctgcaggtctttggtgaaaacaagccggacttcaatggtgtggcacgcctaaaagtggtcaccatggtgctctacgaggtgctgcgcctgtaccctccggtggcggccatcaaccgccggacacgccagccgacaaagctcggaggcgtcacgtacccggcgggggtcatgcttacgacgcccgtcatgttcatccaccgggaccctgccctgtgggggtccgacgccgacgagttcaacccggggaggttcgccgacggcgtgtccaaggcgtgcagggaccccggcgccttcgcccccttcagctggggcccgcgcgtctgcatcggccagaacttcgctctcctggaggccaagctggccgtcagcatgatcctgcagcgcttcgcgttcgaggtgtcgccggcgtacgtccacgcgccctacaccgtgctgacgctgcacccgcagcacggcgctccggtcaggctgcgcaggctatgaatacacgatcggtgcttccgttaagcaatctctctccaatacccgaagactctgtttattcatttcaaagttacgactacaaaacataatgcaaaatctcaaacctatatataccagagcatgtaaaagctagcaaaagctatattgtgat

SEQ ID NO: 147500 - DNA, 267 bp, Zea Mays
ggtagaataccttggactcggtgtcattggttgaatggaagctatggaacaacaaaatcacaatggaacacatgcatactgagccacatccattgaaaaatgaacgggggagaaatggcaagaaggatgatgacctgaaaaatgaagcattaccttttggtgatttctcttgtgggactatctctgcaagttcagactttataggagaggcagctccaaggctttgcaaagagcacaccgccgatgctgaaagtatatggaaccgtt

SEQ ID NO: 147501 - DNA, 1961 bp, Zea Mays
actcaccttaattaacaaatgggcacaagagactagtgcagccaaagtgaaagtggcacctctatttaacctggcgccgtagccgtaccgtacccatctcaagtcaactccactcgcaccagcagacaattgccgtcaaagcaatggtagtcctcgaagtgtcgtttgccgctgcagcctcatcagtagtgcgatggatcctcatgctcgggggcctgatggcggcggcggcgctcctgtggcaggccgggcgtctgctgcgcctgctgtggtggcagccccggcggctggagcgggcgctgcgcgcgcagggcgtccgcggcacgtcgtaccgcttccccgccggcgacctcaaggagtacggccggctggcgaaggaggcctggtcgaagcccctgccgctgcggtgccacgacaccgcgccgcgagtcgcgccgttcctgcaccggctggtcctggagcacgggaggacgagcatgtcctggttcggccccagccccaaggtgaccatcgtcgacccggagctggccaaggacgtgctgtccaacaagttcggccacttcgagaagctcaaggtcccggcgctgtccaagatgctgggctccggcgtggccagccacgagggcgagaagtgggtcaagcaccggaggatcctcaaccctgcgttccatcttgagaagctcaagcgcatgctgccggcgttttctgcgtgctgcgaggagctggtgaacaggtgggcggcggagtcccttggctccgacggctcgtgcgagctggacgtctggccggagctgcagaacctgacgggagacgtcatttctcgcaccgctttcagcagcagctaccgcgaagggagaaggatcttccagctacaggccgagcaagcttcgcttgtcatgaccaacattcggaagatcatgatgatccccggttacatgtacttgcctaccgcgaacaacaggaagatgcgcaggaacaacagggaggtggagtcaatcctgcgagagataatcgggaagagaatccaggcgatggaacgaggcgagggcaccaaagacgacatgctgggtctactgctggagacaaacatgagagacgacatggggatgacgatcgaagacgtgatcgaggagtgcaaggtgttctacttcgcggggatggagaccacgtcggtgctgctcacgtggacgatggtggtgctcagcatgcacccggagtggcaggaccgcgcgagggaggaggtgacggctctgttcggcagggacgacaagcccgagtacgacggcctaagccgcctcaaagtcgtgaccatggtgctctacgaggtgctccggctgtacccgccggccacgtccgttgtccggcaaacgtacaaggagatggaggtcggaggcgtcacctaccccgccggcgtgatcctggagctgcccgtgctgctcatccaccacgacccggacatctggggaggcgacgcgcgcgagttcaggcccgacaggttctccgacggcgtgtccagggcctccaaggaccccggcgcgttcctcccattcggctggggcccgcgcatctgcatcggccagaacttcgcgctgctagaggccaagatggcgctctgcatgatcctccagcgcttcgagtttaggctcgcgccgtcgtacactcatgcgccgcatactgtgataaccttgcatcctatgcacggtgcacagcttaagctcagagcaatatgatctcgacatgatgtcccatcgtgtcgatgccagtgttacgtacatgtatatgtataaccttacaattcagataggcattcggccttgttaatgcctgaaataaatatcttcgtgttggcattttgtgatgtgcttttcacgtaccattggtgctttattgccttttgttcttcactcgttcttatatataaacatgtgcatatatgtaactcatacattacacaaacaaac

SEQ ID NO: 147502 - DNA, 2040 bp, Zea Mays
atggagctctacgagggtggcaagctctttgaccgcatcgtcgcgcgggggcactacaccgagcgcgccgccgccaatgtcacccgcaccatcgtcgaggtcgtccagctctgccagcggcacggtgtcatccaccgcgacctcaagccggagaacttcctcttcgccaataaggataactcgccgctcaaggccatcacttcggtctctccatcttcttcaagcctggtgagtcacaccaaccgagatcgtttcccaatttcggacgattttctgcgcacttccgtgatttctggttttagtgggaggaaacttgacggtagagctcagagtagcaaaatgaacatctctggttatctggagttggcggtggccttttcattcctggttgcctgcactcattcgggttgtagcaatatcggtctccaggtgcaccccatgattaagctcctatgtccagatatgtatattacctatcaacaaatcttggcatccaggtttaaactcctcccgctgctcgccgatgtaaagatctcctacctctgcgattctaaaaagaagattcaggtcattgctgatcatttgtctgctgaggaagttgaggatataaaggatatgttcaagactatggatactgccaatgatggaattgacaagtcttctacctccaacctaaagattgaagcacttgtattaacaaggcttgttatggtttcacattcgccatctgtgtttcatccatacatcaagacactttctgcacctatattgtctgctatcagagatagatattataaagtcactgttgaggctttgcggacaaccgcagttgattttaagccatacattggtccaatctataatgcgatattgggacgtttggccaatcaagatcaggatcaggaggtaaaagaatgcgccatatcttgcatgagtttggtggtctctacttttggtgatggtcttgaaagagaattaccagcatgccttcccatactcgttgacaggatgggtaatgaaattacaagacttacagttgtcaaggatactgctgaggcgtaccttggcaagaagatcaacgatgctgtcgtcactgtccctgcatacttcaatgatgcgcagaggcaggcaaccaaggatgctggtgtcattgccggcctcaatgttgctaggatcatcaatgagccaactgctgctgctattgcctatggtttggacaagaagggtggcgagaagaacatccttgtctttgaccttggtggtggtacttttgatgtcagtatcttgaccattgataacggtgtgtttgaggtgctggccaccaatggtgacacccatcttggaggtgaggattttgaccagaggatcatggaatacttcatcaagttgatcaagaagaagtacaacaaggacatcaacaaggacaaccgtgctcttgggaagctgaggagggaagctgagcgtgccaagagagccctgagcaaccagcaccaggtccgagttgagatcgagtccctctttgacgggaccgatttctcggagccgctgacccatgccaggtttgaggagctgaacaacgatctgttccgcaagactatgggccctgccaagaaggccatggaggacgctggccttgagaagagccagatccacgagatcgtcctggttggtggaagcaccaggattcccaaggtccagcagctcctgaaggactactttaatggcaaggagcccaacaagggtgtgaaccatgatgaggttgttgcctttggtgccgcggtgcagggaagcatcttgagcggcgagggtggtgacgagacaaaagatatcctcctccttgatgtggctcctctcaccctgggtattgagaccgttggtggagtcatgaccaagttgatcccgaggaacactgtcatcccgaccaagaagtcgcaggcattttcagttattgcgaattcacctctacgtattgatctctcgtgtgtcctggatcatgttgtttctgagctcacagctttccttcgtaagttgcagtcataa

SEQ ID NO: 147503 - DNA, 1797 bp, Zea Mays
tccgagtgccgtacgatatgcagcacatccagtgaaagtccacttggcaaattgtctgcagcaatgtttctgggagctctgttcgccgcggtgaccacgtcggcaccagcagcacgcagcctgctggtgtacggtgtccctggcctcgtcctgctttggcagggcgggcggctgctgagcaggctatggcgggagcctcggcggctggagcgggctctgcgcgcgcagggtctccgcggcacctcgtaccgcttcctgacgggcgatctgagggagttcggccgcctcaacaaggaggcttgggccaggccgccgctgcccctggggtgccacgacatcgtgccccgcgtcacgccgttcctctgcggcaacgtccgggagcacggcaagacgtgcttctcttggttcgggccgatccccaacgtgaccatcaccgacccggcgctggtcagggacgtgctctccaacaagttcggccacttcgggaagccccagttcccggccctgacgaagctgctctccgacgggctcaccagccacgagggcgagaaatgggttaggcacaggaggatcctcaaccctgcgttccatctcgagaagctcaggctcatgctgcctacgttctctgcatgctgcgaagagcttgtcggcagatgggcggcgcggtgcctgggtcccgacggcggctcgtgcgagctggacgtctggccggagctccaggccctcacgggggatgtcatctcccgcaccgcgttcggcagcagctacctcgaaggaagaaggatcttcgagctccagtccgagcaagccgagcgcttcgtgggtgccattcagaagatcgtgatcccaggctacatgtacttgccgacaaaaaacaacagaaggatgcggcagatcaacaaggaggtgaactcgattctgcgaggggtggtcgggaagaggatgcgggctatggctatgagagaaggcggcgaaagcaccaccggcgccgacgatctcctgggcctgctgctggagtccaacaacacgaggcacgaaggcgagaccggccacggccagcagtccgcccttgggatgacgatcgaagatgtcatcgaggagtgcaagctgttctacttcgcagggatggagacaacgtcggtgctgctgacatgggccatggtcctgctgagcatgcaccgcgagtggcaggaccgtgcgagggaggaagtgactggcctgttcgggagagacgacaacaagccagagtacgagggactgagccgcctcaaaacagtgaatatgatcctctacgagactctccggctatacccgccggccgtggtgttcagccggaaggcctacaaggagatgaaggtcggaggcgtgacgttgccggccggcgcgatcattgagatccccgtcctgttcatccaccacgaccccgacacctggggagacgacgcgcacgagttcaagccggagaggttcgccgagggggtctccagggcgtgcaacggcgcctcgggcgcgttcatcccgttcggctggggccctcgcacgtgcatcggccagagcttcgcgcttctcgaggccaagatggcgctgtgcgtcatccttcagcggtttgagatggagctcgcgccgtcgtatacccacgcgccgcataccgtcatgacgctgcatccgatgcacggtgcgcagatcaagctcacggcgatctgatcatacatacgatcgatgcgactgccgtatacttgtttatattattactaagctataccagttgttggccgggtcttggaaataaatacgtac

SEQ ID NO: 147504 - DNA, 557 bp, Zea Mays
tacagatgttgagcttgacgggacattaggattgctctcacgagggatcacccatttctcccagtcatcatgcttcctgatcttgttatcctgcattaacagacaccgcggcctatacaataagcacaataggcccaaatcattcagggctcaggcatttaaaaaaaatcaaacacaaatgcctaacgtgtctaggtatggaatttacccacgaggatggcagggcacaaatttgaaaggggaatcaattacaccagtgcatcaaaaaaattgcagctcccgtgatgagggtaaagcattgacacagtgatgagggtaaagcatggacgggaggtaacctatgtaccaacaattgttagcattactcagatatcagagtcctataatttttgttgattcggctacctatgtaccagtgttggattcaagtggaatttggtgtgaattattttaatgtttctcttcagcacattttatttactgccttcatggttcacttgtggtaaacctctactgcttaatctcatacaagcctgtttcttaataatgagattaac

SEQ ID NO: 147505 - DNA, 200 bp, Zea Mays
gatctctctccaagtcgttggtcctctggagccccatcacctaaaaggtcaacatcttgggctccatggatatcggcaagtttgtgccacaaaaagcttgtttacgatggcgtagaaggccagtacacaatctttgtttttttgattatgtgtatttagtaaattgtcgagatatttgtctattctgtattgattcttta

SEQ ID NO: 147506 - DNA, 2004 bp, Zea Mays
tactcccactcccacttgatcggcggcccgtaggcgcccagctaaagcaacactgcgctcctcatcagcctgctgcagagcacagtcgcgcggctgatcctgcggccaaaagaacccggccggccggtccctcgctcgcggctagcctgcacaccccgccgtcccaccggccaccgccgcggcctgccagccgaccgaaccgcccatggcgtccagcggcgagacaacagcactgctcggcagcagctccgccggcgacgcgcaggcggcgccgttcccgtggaagctgctgctggtgctgtacgcggcggcggcgctcgcgtggtgcgccgtgcgcgtgctggcgtgggcgtggtggcggccgcggcgcctcggccgggtgctgcggtcgcagggcctccgcggcacggcgtaccgctccctcgcgggcgacgcgcggctgacgcagcggctcaaccgggaggcgaggtcccggcccatgccgctgggctgccacgacgtcgcgccccgggcgatgcccctgttccatcacaccatgaaagagcacggcaagacgtcgatcacctggttcgggccggtgccgagggtgaccatcaccgagcccgagctggttcgggaggtcctgtccaacaagttcggccactacgagaagctcaagttcggcaggctccagaggatgctgcacaacggcctgggcagcctcgagggcgagaagtgggcaaagcaccgcaggatcatcaaccccgcgttccatctcgagaaactcaaggggatgttacccgctttcgccgcgtgctgcacggagctggtgcagaggtgggaaggcctggtcgcagatgggcagccgtgcgaggtggacgtgtggcctgagatgcagaacctgacaggggacgtcatctcccgcgccgcgttcggcagcagctacctcgaaggccggaggatcttccagctccagggggagcaggtgcagctcgtcgtccaggccatgcacaagcttcacatccctggccacttgtacctgcctacgaaaaccaaccgacggatgaagcagatcgcctcagaggtcgaggagctcctcaagggcatcatcgccaagagagagaacgcgctgagaagcggcagcgcggcgggcgacgacgacctcctcgggctgcttctggagtccaacatggagcactgcaggggtgacggcagcgacgccgccagggccggcatcaccaccgacgacgtcatcggggagtgcaagctgttctacttcgccggcatggagaccacgtcggtgctgctcacgtggaccatggtcgtgctctccatgcacccggactggcagcaccgggccagggaggaggtgctccacgtcctgggtcacacgacgacggcgccggactacgatgccctgagccgcctcagaatcgtgacgatggttctgtacgaggtgcttcgtctgtacacgccgctgacggcgctccagcgccagacgtacaagccgatggagctcggcggcgtcaggtacccggccggcgtgatgctgatgctgccgctgctgtgcatccaccacgacaaggacgtctggggccccgacgccagcgagttcaggccggagaggtttgccgagggggtctccaaggcgtccagggacgcgcccgccttcttccccttcggatggggaccgcgcacctgcgtcggccagaacttcgccctgctcgaggccaagatggggctcgccatgatcctgcagcgcttcgcgttcgagctctcgccggcctacacgcacgcgccgtttccccacggcatgctgcagccggagcacggtgcgcagatcgtgctcagggccagggggctcccctgaacccctgacatgatggcttcatatatctgcatgtacagcatatgtacactacgtagtagatgcaaatcaacacacttggatttggaaggcgcgattgtgaagagttagggagttcctaaattatataaaaaaattggaaccatttgctctgtgtc

SEQ ID NO: 147507 - DNA, 1838 bp, Zea Mays
atcgagctgtcccctccctgtgctctactgctcttgcgccttgctagcttgcttgcttccctgctccctccctcctcctcctcgtcgcctcttctctggttcttcctggtgtttgccggagcgaggctaggcgcaaggggagggagctgcgctcagccagagctcatcggcgctacgcaagcgcgctgcctggaagagagaaatgtccatttacagttgagaattgacccatttgtggcttgtaaaggtagaactggaagcatatttattgtgtcaaagtggaaaagggaatgttctagttaatgtgttcaaatgatgtgtgctgcattgccgaactatcaggggaaaacactgaaataatggaaatcagcttattgcataatgaatctgatgcaggaagcaccagtttgctaccgctgccattgttgtcatatggtccaagatcaatggttccaatacaagtaccaccatcatcagactttgagagtatcctgtcaccagagccaatctacagtgatcttcagttgaaagagatgaactacaatgcagcagcaatggatgaaagcactgagttccttcacttgattcttagtggcaatgatgaaggatacaatagcacaactgaattacaagtttgggatgttgtggacttctatgtctcagaaaacttttctgctctccaatttgatagtttgatgggttttacaaatgaagttagtacttcctacaatgattgtatgaatttagttgatatggtagagcggcccgtggctcgtctgtctctagatgatacaccaaaacccagtaacagtgatgatgcggttccggcagacaatgtcacaatggaccctgatgaaacatccttataccttcagacaaaaccaacagattcagaaacagaaagtagttctgccgcaggagatgttgaaactgaatatctagatctaaagctactttctagatgtatgcctgatttaatggatgttgactcgcccaattgcttatcgaaaacaccagtgaaaaaaaagcatgtgactcttgtgcttgatttggacgagactctggtacattcaacattggatcactgcgacaatgctgattttaccctagaagttttctttaatatgaaaaatcacacagtgtatgtgagaaaaaggccttacctgaaaatgtttcttgagaaggttgctcagatgtttgaggttgtcattttcacagctagtcagagagtctatgctgagcaacttatagataaacttgaccctgatggaaaatatatctcacggcgtatttatcgtgaatcttgtgtattctctgacggttgctatacaaaggacctgacaattctggggatcgacttggcaaaagttgcaatagttgacaatactccacaggttttccagttgcaagtggataacggcataccgattaagagctggtttgatgacccctcagatcaggaactgatcgagttgctcccgttcttggagagcctcgtggattcagaggacgtgaggccaataatttcaaagacctttcatgacaaacttgagcagaattagtttgaggcgacagatgtatcatccagtgaacctgtcgctgaagttagcttcgctccacatggtgcaggccatcattcttgggaagttagatataggatgaaaaatcacaatttctgttatgttagctgttacaaatagcaagcataaactgcggtcgttgtctcgtcgatgaaaatggcttgtatatgtatgtccctttgggcttccgtgtcacggatcattgtacagagacgaacattagtgctgaataaagtgatctgagtgcaattttgctca

SEQ ID NO: 147508 - DNA, 1719 bp, Zea Mays
atcgagctgtcccctccctgtgctctactgctcttgcgccttgctagcttgcttgcttccctgctccctccctcctcctcctcgtcgcctcttctctggttcttcctggtgtttgccggagcgaggctaggcgcaaggggagggagctgcgctcagccagagctcatcggcgctacgcaagcgcgctgcctggtgtgctgcattgccgaactatcaggggaaaacactgaaataatggaaatcagcttattgcataatgaatctgatgcaggaagcaccagtttgctaccgctgccattgttgtcatatggtccaagatcaatggttccaatacaagtaccaccatcatcagactttgagagtatcctgtcaccagagccaatctacagtgatcttcagttgaaagagatgaactacaatgcagcagcaatggatgaaagcactgagttccttcacttgattcttagtggcaatgatgaaggatacaatagcacaactgaattacaagtttgggatgttgtggacttctatgtctcagaaaacttttctgctctccaatttgatagtttgatgggttttacaaatgaagttagtacttcctacaatgattgtatgaatttagttgatatggtagagcggcccgtggctcgtctgtctctagatgatacaccaaaacccagtaacagtgatgatgcggttccggcagacaatgtcacaatggaccctgatgaaacatccttataccttcagacaaaaccaacagattcagaaacagaaagtagttctgccgcaggagatgttgaaactgaatatctagatctaaagctactttctagatgtatgcctgatttaatggatgttgactcgcccaattgcttatcgaaaacaccagtgaaaaaaaagcatgtgactcttgtgcttgatttggacgagactctggtacattcaacattggatcactgcgacaatgctgattttaccctagaagttttctttaatatgaaaaatcacacagtgtatgtgagaaaaaggccttacctgaaaatgtttcttgagaaggttgctcagatgtttgaggttgtcattttcacagctagtcagagagtctatgctgagcaacttatagataaacttgaccctgatggaaaatatatctcacggcgtatttatcgtgaatcttgtgtattctctgacggttgctatacaaaggacctgacaattctggggatcgacttggcaaaagttgcaatagttgacaatactccacaggttttccagttgcaagtggataacggcataccgattaagagctggtttgatgacccctcagatcaggaactgatcgagttgctcccgttcttggagagcctcgtggattcagaggacgtgaggccaataatttcaaagacctttcatgacaaacttgagcagaattagtttgaggcgacagatgtatcatccagtgaacctgtcgctgaagttagcttcgctccacatggtgcaggccatcattcttgggaagttagatataggatgaaaaatcacaatttctgttatgttagctgttacaaatagcaagcataaactgcggtcgttgtctcgtcgatgaaaatggcttgtatatgtatgtccctttgggcttccgtgtcacggatcattgtacagagacgaacattagtgctgaataaagtgatctgagtgcaattttgctcatgagga

SEQ ID NO: 147509 - DNA, 760 bp, Zea Mays
ttacagggcaaataaagatgtctcactaaactgagaaatgagcttaaaatattggagaccgaacatgcagaatgtcttgtgaaggcaagatcaaataggcaaatcaagtctttcagtgtcggcttgcactccaaaggaaacacttgcaatactgaagttataaaaggatttttcagatcttgcctgcatactaccagatgctggaggtcaagcttctatctgagctaaaaaatgaacttagaatctcacacattgagcataacgaagttcttatgaagatcattttaaatgagcatgtcaagtcattgagaatttaatttggtccatctctttccaccctgtagaatggttggttcccaaaaatcttcattgttcttctcagatacctttttcttcgtatgaaaccccacaaactgcgtcgaccccggtccggccaccacgccaccataccctcacagtacttgcatttgtttcatagaaacaatctactgttcctcgcaagacggaagtttattttgtattgtaaggttaaccttcatttattttttcaaatggtgaaattctggaatcaatagtatgtgtttgtttgatttggagacatctggattatttttaggcgtattgtgtgtctggggtttgcgtttttttgtttagtagcatatatgtaattctgttatttggtggatctcatcctccctttacaggaaggcttgtacttcggacattcttttctttcttataaatacaaatatttacgact

SEQ ID NO: 147510 - DNA, 1659 bp, Zea Mays
tttctcaaaccacagccaattttctccacaaacaagtgcaagttgtcaccaactcgggttttaaatggcccgggaccttcgtagcagcagctacttgtccgcgcaatgcagagccacgaaatggcgagtctcgttccccgcgccgcggccgcttccctcctcgccgtcctcgtcatgacaacgaccaccaccaccaccccggcatcagctcagaggtttccggtgagggcgcgcccaaccaggtcgggctacctcaacatcacgtccaccaactccctctacttcgccttctacgaagccaccgagccggtgacaaccccagcgaccgccgtgccgctgctcgtctggctccagggcgggcccggctgctcctcgctcattggaaatttcgctgaggtcggcccattcctcctcctcaactctagctccagtggcctctcccgcaaccgcaatcgctggaaccgacgcttcggcgtcatcttcatcgacaacccgctcggctccggcttcagcgcgcccgcttcactcgccgacatccccagggacgagcccaccatcgccgcgcacctcctcgcggcgctgcagtcgttcatggcgctcgacgcggccttccgcgcgcgccctctgttcctcgcaggagagagctacgccggcaagtacatccccgcggccgcgaggcacatcctcgacgcgaacgacaagctccccgcgggccagagggtgaacttgcagggcatcgtcatcggcaacggcatgactcaccccgtggcgcaggtgaccgttcacgccgaccaggcgtacttcgccggtctcatcaacgccaagcagaaggccaccgtcgagggcatgcagaacaggacggtgagcctggtgagggccggcaactgggcggaagccaggaaggagcggaacggcatcataagcttcctccggaaagccaccggcgtggcgacggccttcaactacgcgcgcgagagtgcgagaccaagtatccgacgcgcccgctgcgcaacttcctcaacaccgacgaggccaaggcggctctgggcgcccggcgcgacgtgaggtgggtgcgctgcagcaaggacgtgtccgaggcgctaggcgacgacatcatgaagagcgtgaagggcgacgtggagaacatcctggcgcggaacggcaccgcgcgggtgctgctgttccagggcgtgttcgacctgcacagtgcgccggcgtccgtggcggcttgggtgcgggagctgtcgtggccggggttgcccgcgttcctggacgcggaccgcgccgtgtggaagcttgggggcggtcggctcgccgggtacgtgcagagctcgggagcgctttccaacacagtcatcgtcggggctgggcacatggcggccggcgacaaccgaccggccgcgcaggcgatgatcgagggctgggtgctgcagacggggcccttcgccacagccggcggccaggcgtcaacgccggcggccatagagccagtcccagtttgacacaatacttatgtttgagttatttatttatacattaataattgtaaggggataatttaaaaagatgtgtaagcattatttttgcttatttaattgttttctgaatcacatattttgataatttaaatgcacattctagggtacattttagtatttt

SEQ ID NO: 147511 - DNA, 744 bp, Zea Mays
catgttgaaattgacctttctaaaaactagcaacgaaaattcaaactttggagtttggcacggaatgcaaaagagggagtaagcacccccgaaagatcctcggcactatcagaagaaggctggacctctggaaacaacaaagtttttgcatcaacggaaaacgggggagagatcaaacaagttggtcggcagccggcgaccaaaatgaaggaaacaaaacgctcgcacgagcagctggatcccagcgagacagactcagacacgctgcaaattggcagcaaagtgatcgcgaaacgtgcagatccgagcccaccttcttgcgctgatcgtgctgcatcacgccggccttcggatctcgcacggaacctcctcaggaaacgccgtaccggcaaggacagcgagctcgggtggctagctggccacctccgagtggaatcaatcccaaagcgacggtcaggcacacagcattggctcgcgccgcgccgtcgaggccgaacgcagacacgccgctaggcgccccccgcgcgtcgggcggggggatcggccagagcgagaagacggcggagggattggcaaggaaggcgggggccccggggagaccctaaccctggcgacgccggcgcgcagggcagggctagggctccctgcctctctctctcctcctcctcgtggtccgcacgagcgctccggcctccggggaggggggaatagagagagagaggagggccgaggacgggtggtggt

SEQ ID NO: 147512 - DNA, 4036 bp, Zea Mays
aggcttgatatttaacgggctctgggcagagtttaacaagtttcagcaatggggtttgataatgaatgtatcttgaatattcaatcccttcctggtgaatatttctgccctgtttgccggacacttgtgtatcccaatgaggccctacaaactcaatgcacacatctctactgcaaatcctgcttggcatatgtagtggcaaccacacaagcttgtccttatgatggataccttgtaacagaagctgattcgaagcctcttatggaatcaaataaaactcttgctgagactattggcaaagttgcggtctattgcctgtataataagagtggctgccaatggcatggagagctatccgcctgtaccacacatggtactacttgtgcatatgggaactctcctgttgtttgcaatcgttgtgggacacaaattgtgcatcgtcaagtacaagaacatgctcaactctgccatggcttacaatctcaaacccaacaagctgatggtagtcaggtgcagctagcggcggcaacaactcagccagtcacccaagacccatcacttgcttcagctggatctgctgcacctgcagttacaaccctaccaaagccatctttaactacagccacagctgtaacaagttctgcaacagcaacaggaggggcagctggtgcaaccacagcagcagtgccttcttcagccgcatctatttctgcttcccaaactccaacagctgagcaatggtaccagcagcagcagcagctccaatactcacaatattatcagcagcagcatcctggatccaacccttacatgcagcaatatcaacagtataaccaataccagcaggcgtatcagcattacatgcaaccttcaatgcaagtaccatcccaaaatgtggtgcaaggatctgcacaacctgcttcttatgttcagcctcaagtgcaatcctcccaactgatgatgcaagctcaaagtcaaccccaggtccatccattgacaagtcaaccgcagcttcagcagcatccagttcaacctcatccccaaagtcaccctcatctttcccatgttcaactacctgcagatcagtcacagcttcatcaatcaattcagtcagcccaagttccacagttccaaccaagtcatgttcctctccaaccatctggtctccaagtacaacctgcagcacatccatctgctcttactcaagttggtaaccagcaagttgctactcaagcaacggctcatcaggtgcagccacatgtacgagttcaacctccgcagcagcaacatattgttgcacagcaacaacatccacatctgcaagctttacctccacatcaaaatattcaacctcagatgcagttaaactctcaagttcagctgcagcctccacatgcccagcagcaagcttacccacaaccacaggcctatcctcaacaaacacatcatatgcacccccagaatgcttcatatacacagcagcaaacacaaggtgctcttttgcaacctgtacctgtgtcccatcaacaagcacatgtttctcatcatcctgcaccaatgcgtcctccgttgccaagtcaacagccagctttgcagccttttcagggaattcaacgtacaacacaacatggaaaacatattggatttcatgctcagtggccaccaatgggttccaacatttcttcccaggcaccaccacagggattccctgcaaactcatctgtttcttcacaatcagttcaaccataccagcaaggaatgtcttcatcacaacaggtgcattcccaacctggtcagccttatacacagcatcatgttactggcaatactggacatgttcaaacttcagctggcagatctatgactcatcttgcaccaacacagcagtttcagcaccaacaatcagcagtgcttagaactgagtcacctgctgctgcgcaccctattgggcagggttctttagatcttgaaaaacatacttcaaaatcagggaagtcagaaaatgcaattaatgctgctgtcagtgaaaataaaattagcggtgctgactcagctgccatgagacctacaaagcctcaatcaggtgaggaaaacatgaacagtgaacaaaatggttttgttggtgttagaaaagatgcagtgcaaactggcattgtatcacacggtttagatggttcaattaggagggatgggaatactgaccaggcaggtaattcacatggtctagttgtgcagggaggcaaagaccataaggcttcagatgttactaatcgtgagaaagaacaatcatttcagcaggcatcactgcaaaatgcaggggcactgggctcttatgtgcccccaggtgtggtaccacaacatccatctggaccagataaaatgcttcctcagcatattatgaatcctggtcataagcatggttcctctgaaaatatccgtcctccgttgcaacaaccatatggtttgtttcattctggaaagatatcaaggccatttggagagaaccagattcagatgcctatgtcacagcctgggggtatcagacctggtgatggtatgatccgacctcctgtggttggcccattacctggacatcatggtgcagtgttgtctccttttgatcttgaacatttgggccagccacattctctcggtaatactgtggattgtaggcaaattcttcctgtttttttgttgtttcaagtatgctgacctaactttcattccatttatttaggaatgttgaacagcaatgactttggtggtgaggggttcaatacttcaaggggtgctgcatatcccggaagacatgataatatcgaagacgatcggaaacattttccagcaccagcccttctggatggtcaaggcttgcaaagggaccctagacattttgagagagctttagttagacctgatggtttccttgattcagtacctggaaggcctccttttccaaaccatagaagtgtaggtttgcatgagggttttccaagaaaacaaaacacaactgccagtcaccctgacgtcctgtcacatggagcagaatttgatcatcacagggctattggaatgcctaatttcagaaatccaggcccatttgctcaagggacaagtggtggtcctggtgcgccccctaaaaaccagcttggctctggtaaccttcctggaaacatacaacatgcttttgcaggcccagacatccctccagctccttttaaccttggtgacatgcatccaggtgaccctcatcttgttgctgactattctcagcatggatttcctaaaactgcagcacactttggtttgggtggattctcgagaaatgggaattctggttggtgccgaatatgcatgtttaactgtgggaccgcagagaatctggatctgcatgtacaaacaagggaacatcagcaatgtgcaatggacattatcctgaaaatgaagcaagatgttgcaaagaggaaaaaactgaattatggaggccccaagtcggtcaacaacaaaaaggtttctgggaagggccattttcgtgggaataggcgctagtgttacctgattcagcttgatgtgaatttgaaggttgctactggtgcttttggacgtttcataggcaattgagagttgagatctcttcagacatcatgttcacgcggttcagagtatttgaagtggaacttgtaatgttcccaaacttttgttgccatgttgatctgcagagttcacatggctatgtttactttacgtatttttgctgaagttctgggattgcttaacatgctagtacccttcttctgtatgcgatgatttatgactactgtttgtttcaactaggctcatgctttgtctaatgcgacctaataatagaccacactgaaacttttacaaagagacatgtaattgtgtcatcagacatccagaacatggtaattttttgttggaatcttttggtaaggggctgatgggaacatgtaaaaggtactttcagtgcctgaaaattatgctagtttttcatagtttaattcaaaaaaaaaaa

SEQ ID NO: 147513 - DNA, 5628 bp, Zea Mays
aggcttgatatttaacgggctctgggcagagtttaacaagtttcagcaatggggtttgataatgaatgtatcttgaatattcaatcccttcctggtgaatatttctgccctgtttgccggacacttgtgtatcccaatgaggccctacaaactcaatgcacacatctctactgcaaatcctgcttggcatatgtagtggcaaccacacaagcttgtccttatgatggataccttgtaacagaagctgattcgaagcctcttatggaatcaaataaaactcttgctgagactattggcaaagttgcggtctattgcctgtataataagagtggctgccaatggcatggagagctatccgcctgtaccacacatggtactacttgtgcatatgggaactctcctgttgtttgcaatcgttgtgggacacaaattgtgcatcgtcaagtacaagaacatgctcaactctgccatggcttacaatctcaaacccaacaagctgatggtagtcaggtgcagctagcggcggcaacaactcagccagtcacccaagacccatcacttgcttcagctggatctgctgcacctgcagttacaaccctaccaaagccatctttaactacagccacagctgtaacaagttctgcaacagcaacaggaggggcagctggtgcaaccacagcagcagtgccttcttcagccgcatctatttctgcttcccaaactccaacagctgagcaatggtaccagcagcagcagcagctccaatactcacaatattatcagcagcagcatcctggatccaacccttacatgcagcaatatcaacagtataaccaataccagcaggcgtatcagcattacatgcaaccttcaatgcaagtaccatcccaaaatgtggtgcaaggatctgcacaacctgcttcttatgttcagcctcaagtgcaatcctcccaactgatgatgcaagctcaaagtcaaccccaggtccatccattgacaagtcaaccgcagcttcagcagcatccagttcaacctcatccccaaagtcaccctcatctttcccatgttcaactacctgcagatcagtcacagcttcatcaatcaattcagtcagcccaagttccacagttccaaccaagtcatgttcctctccaaccatctggtctccaagtacaacctgcagcacatccatctgctcttactcaagttggtaaccagcaagttgctactcaagcaacggctcatcaggtgcagccacatgtacgagttcaacctccgcagcagcaacatattgttgcacagcaacaacatccacatctgcaagctttacctccacatcaaaatattcaacctcagatgcagttaaactctcaagttcagctgcagcctccacatgcccagcagcaagcttacccacaaccacaggcctatcctcaacaaacacatcatatgcacccccagaatgcttcatatacacagcagcaaacacaaggtgctcttttgcaacctgtacctgtgtcccatcaacaagcacatgtttctcatcatcctgcaccaatgcgtcctccgttgccaagtcaacagccagctttgcagccttttcagggaattcaacgtacaacacaacatggaaaacatattggatttcatgctcagtggccaccaatgggttccaacatttcttcccaggcaccaccacagggattccctgcaaactcatctgtttcttcacaatcagttcaaccataccagcaaggaatgtcttcatcacaacaggtgcattcccaacctggtcagccttatacacagcatcatgttactggcaatactggacatgttcaaacttcagctggcagatctatgactcatcttgcaccaacacagcagtttcagcaccaacaatcagcagtgcttagaactgagtcacctgctgctgcgcaccctattgggcagggttctttagatcttgaaaaacatacttcaaaatcagggaagtcagaaaatgcaattaatgctgctgtcagtgaaaataaaattagcggtgctgactcagctgccatgagacctacaaagcctcaatcaggtgaggaaaacatgaacagtgaacaaaatggttttgttggtgttagaaaagatgcagtgcaaactggcattgtatcacacggtttagatggttcaattaggagggatgggaatactgaccaggcaggtaattcacatggtctagttgtgcagggaggcaaagaccataaggcttcagatgttactaatcgtgagaaagaacaatcatttcagcaggcatcactgcaaaatgcaggggcactgggctcttatgtgcccccaggtgtggtaccacaacatccatctggaccagataaaatgcttcctcagcatattatgaatcctggtcataagcatggttcctctgaaaatatccgtcctccgttgcaacaaccatatggtttgtttcattctggaaagatatcaaggccatttggagagaaccagattcagatgcctatgtcacagcctgggggtatcagacctggtgatggtatgatccgacctcctgtggttggcccattacctggacatcatggtgcagtgttgtctccttttgatcttgaacatttgggccagccacattctctcggaatgttgaacagcaatgactttggtggtgaggggttcaatacttcaaggggtgctgcatatcccggaagacatgataatatcgaagacgatcggaaacattttccagcaccagcccttctggatggtcaaggcttgcaaagggaccctagacattttgagagagctttagttagacctgatggtttccttgattcagtacctggaaggcctccttttccaaaccatagaagtgtaggtttgcatgagggttttccaagaaaacaaaacacaactgccagtcaccctgacgtcctgtcacatggagcagaatttgatcatcacagggctattggaatgcctaatttcagaaatccaggcccatttgctcaagggacaagtggtggtcctggtgcgccccctaaaaaccagcttggctctggtaaccttcctggaaacatacaacatgcttttgcaggcccagacatccctccagctccttttaaccttggtgacatgcatccaggtgaccctcatcttgttgctgactattctcagcatggatttcctaaaactgcagcacactttggtttgggtggattctcgagaaatgggaattctggttggtgccgaatatgcatgtttaactgtgggaccgcagagaatctggatctgcatgtacaaacaagggaacatcagcaatgtgcaatggacattatcctgaaaatgaagcaagatgttgcaaagaggaaaaaactgaattatggaggccccaagtcggtcaacaacaaaaaggtttctgggaagggccattttcgtgggaataggcgctagtgttacctgattcagcttgatgtgaatttgaaggttgctactggtgcttttggacgtttcataggcaattgagagttgagatctcttcagacatcatgttcacgcggttcagagtatttgaagtggaacttaaactggaaagtgtaggataatttccagcagagggctcctgtcatacttgcttgtttccctaacgatggtaaggatgacatgctttgatatgctggtaaggaaagatatgtattgagcttttactacaatacacttcaaacttttggactgaagtttttcatatatggattattgctaaagtgctgaaggccgaagccaatctgtgacctgtcaattacttggacactaatgacctgtttggttcgctgcctaacttaccacagtttgccacacataaggttaggcaagtttgatcaacttaggcgcgtgtttggtttgtagtcacagttgtggcaagatttgtctcttgctgcgttggtcccactcatcaatgacttataaaagtgtagcatgattctcttaggcattgccaaaatgcggcaaagaatttgagcgcctaacctttggcatgtgtggcagaaaatatatggcaatttatgacaccttagccgtacaaccaaacagacgctaaaggtcccagtttgtataattgtgaggccatcatgaactgctatgcttttgttcgtaggaaacaacataagatatatttatgtgtaaattaatagattgttcatatctatgttcattcggggtaaggagtgacattacaatgtcttggttgaactcaatttatgtgatcgccaagtggttcaagtgtgccccaatgttatgtttgttcactttccagtgcttagtttgccggatgctgttgcccacagaagatgcccccccaaacaaacaaaattggttgggcatcacttgtaatatatttctcccaaatgcaggttgtttggggttagacttgttacatacattcttcacctgctcatggattttgtccaaactactcatagggttatcgttcacatgtgtaacttattcagcacactactgtgatttttttatagaactaggtaggatggttatttagcaagatgatggtatgattcaaaacaacttggtgctttctgctactacccttgacttgtagcccgctattagtttggatataaccaatcaattaaaaggcaccctttggatgtaagcacaattcggttggctgcttccaattgatttggctacagatcaaatcctcttcaaaattgcatggtgtattttgcgttgctcaaagacaagaaatcattcaagatgcttacactgcccctatttattttctctgactggaacggggttggctaccatgacgacttagcaattggaatgccaaactctaggttcatcaatggttttgtaattttgaggtcaccagtgatttgttatacagaattgtgggtgaaaatgaaaacatctctggcaagttccagtcagtttctgaccagtttttgacacagactggtctgatgttgattgtcacatttttgtagcacatactcttaaggatcgggccaaaaagtctgttttcttgaatggttccttcctatttaggtttgaattgtagaatcactggtgctggtgcccctttgtcactcgtgtcaaatagtaaaaggaaatgtgccgttatcgatcggaattgtagaatcacattactgtacgattatcgatcgaattactgttacaatagtaacttgcagtgcagtatattcaatttggtagtaattagcaacttggtgacattgttgttcgtgcttggcataatgtagacgatctatgtttcttctgtctcttttcttttgtgtttctttgggattcttgtagatggtggatgtgcctgggtgccgactactgtttgaacgaactgatcgtgccttgctcattttctaccggcatcggatgtttttgaccgactccagggcacctcatatctaccgttgctgaggtttaaattgtaaaattcccgtcctgtagttctttaattacaactaatgcaccaggcgaacgaaaattcttgtaatgtattcacaaatatttctagagaagtttgcagtgtaaatataacaatgttcgtttcaatggagtgcacctactaattaa

SEQ ID NO: 147514 - DNA, 2809 bp, Zea Mays
tgccgccgacgcgtcgccacctgtgacctgtgtccgtagagcccgtgcggacagctgggaccggaggcagactcccactcgaacttgcccacctcgacggttgttctacggtttggttcattgaacctggcctggcccttcaacactccccaaggccagccaagccaaggccgccaaggggcgtccggactccggcgtctcctccttgcttctgcccagccacagcaagccctgcctcccgtcccgccctccgctctccgcctacaccttctcccgtccaagaccacacgcgcacagaaaaaagtacagctggtcagtggtcctggtcagctgctcccgtacaaaaagcgcaccacaagcggcggccaagccgtccgctgccccccgcatcgccatggctctcgccgtgcgcacgccccgcttccagcctcgaccggcctccatttctgcgcccgcaacacccgcctcgaattccctcgccgccgccgccgccgcgaacgcgaggccccgcacctgcgccggcgccgccgtccgcgcttcgcccttcaccgaggccacctcctcctcgcgctacctccgtgacgcctggtcctacgccaccgattgctcctccaactccgcatcccgttcctccgatgccgccgctgcggcggcggcgctgggccgccgggacgacgagatcgcactgcagctgccggagctgcagaggctcctggacgcgctgagggcgtccagaaggaggggcgcagagggcggcggcggcggcggccgcggacccgggagggtggcactggtgggtacagggcccggggaccccgagctgctcacgctcaaggcggtccgggctatcgaggcggcggacctggtgctctacgacaggctggtgtctaacgacgtgttggacttggtcggggagggctccaggcttctctatgtcggcaagaccgcgggataccacagccgcacccaggtgtgggagcactgttccttcgtttcaatttggaagtttacacgcgattggaaatgctagttgggcgggcattctgcaataacgatttcaagtaggtactttttcttgagcacgtgtgagacaacatccatgaagaacagagaattgaggcgacctcagcttaggacgttgtacctttccttccgctttcttggtcatttgtatgtttgatgactggttgatgcaatgtaggaggagattcacgagctgctgctgagctttgcggaggctggtgccaatgttgtgcgcttgaaaggtggcgatcctctggtttttggaaggggtggagaagagatggatttcttacagcaacagggaatcaaagttgaaattatcccaggaattacctctgcttcaggaattgcagcagaactaggcattccgctaacccatcgaggtgttgctaccaggtaagattagccttctgtaattttattctacctaactagtaactacgcaaaaaagatttcccctttaatatgcaatgcattttctaaatggattttccacaagattcaccatttcctatcaggtttttgtttaggatctgcaatactctctcgaatgcagcaattagcatgcctgcttgtggattttgtgagtatttgctgtagagttgaggctttaaatgtactagttacttgctgtaactcttaatggttcctgtttttgaccatacatgtctcattgcgtagtgaaagttcttggtattattttctgatgtcctgatgtgctatggctaatggagtagcaaatgtttttaataataaaacgctcttgcattgttaaatgagcagaaaggcgctagtttgtctctgataccttagtgtagagagataatcattcttgatgcttactagaataaatagttgagatataatcttctcttcagtgtcagatttttaactggacactccagaaatggtgggacagacccactatatgtagctggaaatgcagccgatcctgacactactttggttgtgtacatgggtttgtcaacacttgcatcacttgcaccaaagttaatgaagcacggcctgccaccagatacccctgctgttgcagtagagcgcgggactacacctcaacaacgaatggtgtttgcgttgttaaaggatcttgtggatgaagtcaagtcagctgatcttgtttctccaactctaataattatcgggaaagtggtatccttgtcaccattttgggttgagtcatctgaacatgatgccctgaaaattgagagctcgtatgcaagtgaagccagatgataatacgttttcatgattttagtgattggacaatacatacttgagtaacgcaatatcccagatatgagcagttccagttgggatccatttaggacatgcgagcacaggttcgacctggtgtacacaacatttcaggaagcatggattctgaatgacggatgatagcttaagcccataacagcctttggggtttgggcagaagcgcacttgggagttgatgagggcatgtctggaggcttcagcttcagtaaatttacggctttcaattcggtgtcttcttcgtcaaagaagactcggtagatgtatggttttcaattcaatagcacctgcaaactcctttctgactggaggtccattcggagtgcagggattttacagaaattagacaaaaaaagttctgttttttggggggaattagaaaaatctctgcttcccaagcgtagataactgtaagatttttgttgtcatctttaaaataattgtattgtttttatgtgttatattcatctttaaaaactcttggtaaaacaga

SEQ ID NO: 147515 - DNA, 2123 bp, Zea Mays
tgccgccgacgcgtcgccacctgtgacctgtgtccgtagagcccgtgcggacagctgggaccggaggcagactcccactcgaacttgcccacctcgacggttgttctacggtttggttcattgaacctggcctggcccttcaacactccccaaggccagccaagccaaggccgccaaggggcgtccggactccggcgtctcctccttgcttctgcccagccacagcaagccctgcctcccgtcccgccctccgctctccgcctacaccttctcccgtccaagaccacacgcgcacagaaaaaagtacagctggtcagtggtcctggtcagctgctcccgtacaaaaagcgcaccacaagcggcggccaagccgtccgctgccccccgcatcgccatggctctcgccgtgcgcacgccccgcttccagcctcgaccggcctccatttctgcgcccgcaacacccgcctcgaattccctcgccgccgccgccgccgcgaacgcgaggccccgcacctgcgccggcgccgccgtccgcgcttcgcccttcaccgaggccacctcctcctcgcgctacctccgtgacgcctggtcctacgccaccgattgctcctccaactccgcatcccgttcctccgatgccgccgctgcggcggcggcgctgggccgccgggacgacgagatcgcactgcagctgccggagctgcagaggctcctggacgcgctgagggcgtccagaaggaggggcgcagagggcggcggcggcggcggccgcggacccgggagggtggcactggtgggtacagggcccggggaccccgagctgctcacgctcaaggcggtccgggctatcgaggcggcggacctggtgctctacgacaggctggtgtctaacgacgtgttggacttggtcggggagggctccaggcttctctatgtcggcaagaccgcgggataccacagccgcacccaggaggagattcacgagctgctgctgagctttgcggaggctggtgccaatgttgtgcgcttgaaaggtggcgatcctctggtttttggaaggggtggagaagagatggatttcttacagcaacagggaatcaaagttgaaattatcccaggaattacctctgcttcaggaattgcagcagaactaggcattccgctaacccatcgaggtgttgctaccagtgtcagatttttaactggacactccagaaatggtgggacagacccactatatgtagctggaaatgcagccgatcctgacactactttggttgtgtacatgggtttgtcaacacttgcatcacttgcaccaaagttaatgaagcacggcctgccaccagatacccctgctgttgcagtagagcgcgggactacacctcaacaacgaatggtgtttgcgttgttaaaggatcttgtggatgaagtcaagtcagctgatcttgtttctccaactctaataattatcgggaaagtggtatccttgtcaccattttgggttgagtcatctgaacatgatgccctgaaaattgagagctcgtatgcaagtgaagccagatgataatacgttttcatgattttagtgattggacaatacatacttgagtaacgcaatatcccagatatgagcagttccagttgggatccatttaggacatgcgagcacaggttcgacctggtgtacacaacatttcaggaagcatggattctgaatgacggatgatagcttaagcccataacagcctttggggtttgggcagaagcgcacttgggagttgatgagggcatgtctggaggcttcagcttcagtaaatttacggctttcaattcggtgtcttcttcgtcaaagaagactcggtagatgtatggttttcaattcaatagcacctgcaaactcctttctgactggaggtccattcggagtgcagggattttacagaaattagacaaaaaaagttctgttttttggggggaattagaaaaatctctgcttcccaagcgtagataactgtaagatttttgttgtcatctttaaaataattgtattgtttttatgtgttatattcatctttaaaaactcttggtaaaacagagcctgaagaatgaacctttaagctgaa

SEQ ID NO: 147516 - DNA, 2100 bp, Zea Mays
gcaccacacggcacctggcactgccagcctcgtcgcgcacggcctatatatccccagtctcttcatctgcagcgacaaaaataggaaccgagcaaaggtctggcgagctaccaataaactaccatctccacaaacaggccagcacgtagctatatgccagaactgacctagctagtagaggatcgatcgcagatggtgtttcctgccatcctccccaaggtggccgcacgatggctcttcacgttctaccgcgccgccagaaagctcaggcgccacgccttccagctctactaccgcaacactaccgccgccaagccgtcgtccgccgccgccgccgccgtctcgcagcaacagaccggggccgccgccactgccgccttgaagaccggggccgccatccctgacgccgccggccggaccgttgtgtgcgagatgcacggcgccctgctgcgctccaccgcgctcttcccctacttcatgctcgtggcctgcgagggcggcagcctcgtccgcgccatgctgctgctctgcgccttccccctcgtctgggcgctcggggagcgccgcggcgccggcgtccgggtgatggcgttcgtcaccttcgcggggctcaggcccagggacgtggacctcgtggcccgcgccgtcctgcccaagcactacatggagcagctcaacgcgctggtgtacggcagcctctggctcccggccaggaggaaggtggcggtgaccagcgcgccgcgggtcatgtccgagtggttcctcaaggagtacatggccgccgacgcggtggtcggtctcgagctgcagcacgtcaacgtcggccgccgccggtacttcactgggttgctgtcgtcgtccggtcacgcgacgggaccggagctgaggcagaaggcgatcagggaggcgttgttaggcgccgaggacgaccccattgccgtcgtgggcatcatcaacgactccagcccgctcgacgacgagctcttcgtcccctactgcaaggaagtttacgtcgtgagcagagagagcgcaaagaacgacaagctctcgcgggagaaatacccgaagccgctcatcttccatgacgggcgcctcgccttcctccccacacccgccgccatgctcgccttcttcctcttccttccgctcggcgtcgtcctctccgtcatccgcattaacatcggtatcgttctcccttacaagatcaacttcgcgactgccgcgatcttcggcgtccgcttccgcgcctccggcctccgcgccccgccggcagacggcaagcggcggaggggcgtcctctacgtgtgcacgcaccggacgcttgtcgaccccatcatgctcaccacggcgctgcagaagcccgtgccggccttgacgtacagcctcagccgcctgtccgagctgatcgcgcccatcaagacggtgcggctgacgcgcgaccgcgcgcgggacgccgagaccatgtccaggctgctggcgcagggcgacctcgcggtctgccccgagggaaccacctgccgcgagccttacctcctgcgcttcagcccgctgttcgcggagctcgcggacgacatggagcccgtggcgctggacgctcaggtgacgacgctctacggcaccacggcgagcggacacaagtggctcgaccctgtggcgttcttcgccaacccggtgccctcgtaccgggtggagtttctgggtgccgttccgcgggagtggacgcgcgccgggggcaggacaggcgtcgaggtggctaactgggtgcagcggcggctgggccaggctctggacttcgagtgcaccgggctgtctcgccgcgacaagtacatgatgctcgccggtaacgatggcgtggtcgccaagtagagagagcgcccggcgcgcgctgcaacagctgggtgtgtttttattatgcatacatgctgggtaaattattgtcgaaagctagttcgttactgtaatttgcatggcagtaatggatcttttggttccgctgtgtagagaaaatttgattagctgcaaaactaatcaaatactagatgcttggatttaaattcaaatcaaaatagtatatatattttgtctgatcgttttgcagtc

SEQ ID NO: 147517 - DNA, 1364 bp, Zea Mays
aggacctactttacacctcttcttcttcttcgtgcagcagctgtccattgccgctgggttttctttgttcgcattgggttttggaggagaggtcaaggctgagactcggagacgaaatgggtcataggatgttcagtcccttgggcttctttcttcttgccatcgtcgtcctctacggtggaacagagcagaggcgagcggaggcagcagaaggagcgagcccgcacaggatgctggccaccatctcggtgtccaagccgtcttaccccatggtcaccacgcccatgtcggcctacggcgacccggtctccacgccaggcaccccgtactcaacgttcccgtcgctggcgaccgggaacggcggtgccggtgccggtgccggtgcaggcggcggtgctggtgtaggcgggggcggcggcgggggcgctggtgtaggcgggggcggcggcggcggcgggacgtggtgcgtggccagccagagcgcgagcccgaccgcgctgcaggtcgcgctggactacgcctgcggctatggcgccgactgctccccgatccagcagggcgggagctgcttcaaccccgacaccgtccacgaccacgcgtcctacgccttcaacagctactaccagaagaaccccgccccaaccagctgcgacttcggcggcacggccaccatcaccaacaccgatcccagttcagggtcgtgccagtacccatcgtcaagcggtggcgctcagagcacgatgccgccgccgtccccgacgagcatgccgccgacagtgcccaccgccccgatgaccccgacgccgatgacgccggacaccaccccgaccaccggcaccccggtctacggattgtccccacccgactacggctcattgtccccacccgactctggctcgatgtcccctcccggctacggatcgacgtctcccccggactacaacgacgtcggcgccgccgcgacgacggggcagggcggcgcggcgctggcgctggcgcttctgtgcgtcctggtcgcgacagtatcgctgcacgtctccaaatgagagcggcggcataggaggaaattatgcatgcctgtttcggttgagacgttacatggcgcgccccgtgcgtggtggctgaaagacgcacgcacaggtccatcgccgaagatctccggtggtgtgctgcccggcgccgggggagcattcgagcagtgttgcaagtctgcttagtgttgtataagaaatgaggcgagcttctagcagcgcccgagttctagcagatgcaccagatgtttatacatacatacatgcttaaatatataatggccattccactattgtacttaggagtatatgagaaaatttgtttccttgccc

SEQ ID NO: 147518 - DNA, 1404 bp, Zea Mays
aggacctactttacacctcttcttcttcttcgtgcagcagctgtccattgccgctgggttttctttgttcgcattgggttttggaggagaggtcaaggctgagactcggagacgaaatgggtcataggatgttcagtcccttgggcttctttcttcttgccatcgtcgtcctctacggtgagcagaggcgagcggaggcagcagaaggagcgagcccgcacaggatgctggccaccatctcggtgtccaagccgtcttaccccatggtcaccacgcccatgtcggcctacggcgacccggtctccacgccaggcaccccgtactcaacgttcccgtcgctggcgaccgggaacggcggtgccggtgccggtgccggtgcaggcggcggtgctggtgtaggcgggggcggcggcgggggcgctggtgtaggcgggggcggcggcggcggcgggacgtggtgcgtggccagccagagcgcgagcccgaccgcgctgcaggtcgcgctggactacgcctgcggctatggcgccgactgctccccgatccagcagggcgggagctgcttcaaccccgacaccgtccacgaccacgcgtcctacgccttcaacagctactaccagaagaaccccgccccaaccagctgcgacttcggcggcacggccaccatcaccaacaccgatcccagttcagggtcgtgccagtacccatcgtcaagcggtggcgctcagagcacgatgccgccgccgtccccgacgagcatgccgccgacagtgcccaccgccccgatgaccccgacgccgatgacgccggacaccaccccgaccaccggcaccccggtctacggattgtccccacccgactacggctcattgtccccacccgactctggctcgatgtcccctcccggctacggatcgacgtctcccccggactacaacgacgtcggcgccgccgcgacgacggggcagggcggcgcggcgctggcgctggcgcttctgtgcgtcctggtcgcgacagtatcgctgcacgtctccaaatgagagcggcggcataggaggaaattatgcatgcctgtttcggttgagacgttacatggcgcgccccgtgcgtggtggctgaaagacgcacgcacaggtccatcgccgaagatctccggtggtgtgctgcccggcgccgggggagcattcgagcagtgttgcaagtctgcttagtgttgtataagaaatgaggcgagcttctagcagcgcccgagttctagcagatgcaccagatgtttatacatacatacatgcttaaatatataatggccattccactattgtacttaggagtatatgagaaaatttgtttccttgccctctccatttgctcatgctaaataatatagttatgattaggtaagca

SEQ ID NO: 147519 - DNA, 2153 bp, Zea Mays
ctctcctctctctttctttttctctctctccctcgctttttctgctgtctatccccgcgccgcgcgaggttgctgccttggccttgctggttctttgcttgtgggatgagtggaaggaaggccggtcctcgctgcagaaagagggagaagacttcatctgcacgtgctgctgatgtgcattagaggatccgtgctgataatatacagctgacacccacaagatcgactggataagttcgagcctgacggcatcatgggttccggcgatttgagctcggagatggagaggacggttcttggcctgacgctgtgggtctggattgccatcggcgtggtcgcgcttctcgtggcaatcctgctgatgatctgcatttgggtggcgtcccgcctgaggaccaagagaaccatggacagcctgaggcagacgcagatccccatctactccaaggagatccccatcgaccgggtcggcgggcgcagcctggcacagacaatgcatgagcgcgagcagccgagcttgccgccgccggacaagtacgcgaaccgggagccggccggggcggctgtggggcacctggcactcagcaagtcctcggatcatgacaacatgagccaggggagctcggtttgcaatgctgaccgtgctggcactggcagcatgcactccggtgaggatgggagctcaggacctcggaggaaacccaactctcctgcggcgttcgtgtcagcttcgcccttggttggccttccggagttctcgcatcttggttggggtcactggtttactcagcgtgaccttgaacttgctaccaaccgcttctctaaggagaatgtgctcggggagggtggttatggagttgtgtaccgtggacgtctggtgaatggaactgaagtcgcaataaaaaagatctttaacaacatggggcaggcagaaaaagaattcagagtggaagttgaggctattggccatgtccgacataagaatttggttcggctgttgggatattgtgttgagggcgtaaacaggatgctagtatatgagttcgtgaacaatggtaatttagagcagtggcttcatggagctatgcatcagcgtggtgtttttagctgggaaaatcgcatgaaggttgtaacaggcactgcaaaagcgcttgcttaccttcatgaagctattgagccaaaagttgtacatcgagatataaaatcaagcaacatattgattgatgatgaatttaatggcaaagtatctgactttggattggctaaacttttgggatcagacaaaagccacattactactagagtgatgggaacatttggatatgttgcacctgaatatgctaatactggaatgttaaatgaaaagagtgacgtttacagttttggcgttctcttgttagaaactgtgacaggaaggaatcctgttgactacagccgatcttccaatgaggtcaatcttgttgaatggcttaaaacaatggtggccaatcggagggcagaggaagtggctgatccaagcttagaggctagacccagtatccgggctctcaagcgggctcttttggtggcactgaggtgtgttgatcctgactctgaaaagagacctaagatgggccaggttgttaggatgcttgagtcagaagaagtaccataccgggaggatcggagaaatcgtagaagtcgcactggaagcatggatattgagtccattgcagagggttccaactctgcggagtttggaaagaaggtagaaaggactggaagctctatatctgacagatctcaaccatgaggcctggaaatctaagctatatcaggaactgtctcagaaacgatgttaatcaccaaggtgattgctgtcctgataggggatgctggtaggtgacagaggcaaggcaggcccaggtattactgcctaagtattaggctttagttttcaggtgcagtagaagcattcttggatgaggaacctcctggtctcctcttatttgtataggtatatgttggtgcctgaggaattcctcttggtttgggtgtttaacatttgttcggttcttttatttcttgcattgttgccttcttaaatcagtttcacttctccctgatgaaatgctgaacatgaggttgtggacttgtggtcttagcgatactgc

SEQ ID NO: 147520 - DNA, 2254 bp, Zea Mays
ctctcctctctctttctttttctctctctccctcgctttttctgctgtctatccccgcgccgcgcgaggttgctgccttggccttgctggtactatctctgtcctgattcagagtttctagctgggactggggggaagtgcacgatgattcggtctctcagctccgcggggttcttttttcctgtttcaggttctttgcttgtgggatgagtggaaggaaggccggtcctcgctgcagaaagagggagaagacttcatctgcacgtgctgctgatgtgcattagaggatccgtgctgataatatacagctgacacccacaagatcgactggataagttcgagcctgacggcatcatgggttccggcgatttgagctcggagatggagaggacggttcttggcctgacgctgtgggtctggattgccatcggcgtggtcgcgcttctcgtggcaatcctgctgatgatctgcatttgggtggcgtcccgcctgaggaccaagagaaccatggacagcctgaggcagacgcagatccccatctactccaaggagatccccatcgaccgggtcggcgggcgcagcctggcacagacaatgcatgagcgcgagcagccgagcttgccgccgccggacaagtacgcgaaccgggagccggccggggcggctgtggggcacctggcactcagcaagtcctcggatcatgacaacatgagccaggggagctcggtttgcaatgctgaccgtgctggcactggcagcatgcactccggtgaggatgggagctcaggacctcggaggaaacccaactctcctgcggcgttcgtgtcagcttcgcccttggttggccttccggagttctcgcatcttggttggggtcactggtttactcagcgtgaccttgaacttgctaccaaccgcttctctaaggagaatgtgctcggggagggtggttatggagttgtgtaccgtggacgtctggtgaatggaactgaagtcgcaataaaaaagatctttaacaacatggggcaggcagaaaaagaattcagagtggaagttgaggctattggccatgtccgacataagaatttggttcggctgttgggatattgtgttgagggcgtaaacaggatgctagtatatgagttcgtgaacaatggtaatttagagcagtggcttcatggagctatgcatcagcgtggtgtttttagctgggaaaatcgcatgaaggttgtaacaggcactgcaaaagcgcttgcttaccttcatgaagctattgagccaaaagttgtacatcgagatataaaatcaagcaacatattgattgatgatgaatttaatggcaaagtatctgactttggattggctaaacttttgggatcagacaaaagccacattactactagagtgatgggaacatttggatatgttgcacctgaatatgctaatactggaatgttaaatgaaaagagtgacgtttacagttttggcgttctcttgttagaaactgtgacaggaaggaatcctgttgactacagccgatcttccaatgaggtcaatcttgttgaatggcttaaaacaatggtggccaatcggagggcagaggaagtggctgatccaagcttagaggctagacccagtatccgggctctcaagcgggctcttttggtggcactgaggtgtgttgatcctgactctgaaaagagacctaagatgggccaggttgttaggatgcttgagtcagaagaagtaccataccgggaggatcggagaaatcgtagaagtcgcactggaagcatggatattgagtccattgcagagggttccaactctgcggagtttggaaagaaggtagaaaggactggaagctctatatctgacagatctcaaccatgaggcctggaaatctaagctatatcaggaactgtctcagaaacgatgttaatcaccaaggtgattgctgtcctgataggggatgctggtaggtgacagaggcaaggcaggcccaggtattactgcctaagtattaggctttagttttcaggtgcagtagaagcattcttggatgaggaacctcctggtctcctcttatttgtataggtatatgttggtgcctgaggaattcctcttggtttgggtgtttaacatttgttcggttcttttatttcttgcattgttgccttcttaaatcagtttcacttctccctgatgaaatgctgaacatgaggttgtggacttgtggtcttagcgatactgc

SEQ ID NO: 147521 - DNA, 2136 bp, Zea Mays
gtcacgagaggacttggggaccttttcccctttcccctggctgtagaattcagcatcctgtatgcatcgatgaaaggagaggggcacaatcttgggccacatctaatctctctggctgtggcgcttggagaagacttcatctgcacgtgctgctgatgtgcattagaggatccgtgctgataatatacagctgacacccacaagatcgactggataagttcgagcctgacggcatcatgggttccggcgatttgagctcggagatggagaggacggttcttggcctgacgctgtgggtctggattgccatcggcgtggtcgcgcttctcgtggcaatcctgctgatgatctgcatttgggtggcgtcccgcctgaggaccaagagaaccatggacagcctgaggcagacgcagatccccatctactccaaggagatccccatcgaccgggtcggcgggcgcagcctggcacagacaatgcatgagcgcgagcagccgagcttgccgccgccggacaagtacgcgaaccgggagccggccggggcggctgtggggcacctggcactcagcaagtcctcggatcatgacaacatgagccaggggagctcggtttgcaatgctgaccgtgctggcactggcagcatgcactccggtgaggatgggagctcaggacctcggaggaaacccaactctcctgcggcgttcgtgtcagcttcgcccttggttggccttccggagttctcgcatcttggttggggtcactggtttactcagcgtgaccttgaacttgctaccaaccgcttctctaaggagaatgtgctcggggagggtggttatggagttgtgtaccgtggacgtctggtgaatggaactgaagtcgcaataaaaaagatctttaacaacatggggcaggcagaaaaagaattcagagtggaagttgaggctattggccatgtccgacataagaatttggttcggctgttgggatattgtgttgagggcgtaaacaggatgctagtatatgagttcgtgaacaatggtaatttagagcagtggcttcatggagctatgcatcagcgtggtgtttttagctgggaaaatcgcatgaaggttgtaacaggcactgcaaaagcgcttgcttaccttcatgaagctattgagccaaaagttgtacatcgagatataaaatcaagcaacatattgattgatgatgaatttaatggcaaagtatctgactttggattggctaaacttttgggatcagacaaaagccacattactactagagtgatgggaacatttggatatgttgcacctgaatatgctaatactggaatgttaaatgaaaagagtgacgtttacagttttggcgttctcttgttagaaactgtgacaggaaggaatcctgttgactacagccgatcttccaatgaggtcaatcttgttgaatggcttaaaacaatggtggccaatcggagggcagaggaagtggctgatccaagcttagaggctagacccagtatccgggctctcaagcgggctcttttggtggcactgaggtgtgttgatcctgactctgaaaagagacctaagatgggccaggttgttaggatgcttgagtcagaagaagtaccataccgggaggatcggagaaatcgtagaagtcgcactggaagcatggatattgagtccattgcagagggttccaactctgcggagtttggaaagaaggtagaaaggactggaagctctatatctgacagatctcaaccatgaggcctggaaatctaagctatatcaggaactgtctcagaaacgatgttaatcaccaaggtgattgctgtcctgataggggatgctggtaggtgacagaggcaaggcaggcccaggtattactgcctaagtattaggctttagttttcaggtgcagtagaagcattcttggatgaggaacctcctggtctcctcttatttgtataggtatatgttggtgcctgaggaattcctcttggtttgggtgtttaacatttgttcggttcttttatttcttgcattgttgccttcttaaatcagtttcacttctccctgatgaaatgctgaacatgaggttgtggacttgtggtcttagcgatactgc

SEQ ID NO: 147522 - DNA, 638 bp, Zea Mays
aaggcaaaggcaaataaaggcagcgcacgtacgtgttgaggtggcacttggcagcagcttgagttcttgagacccgacctgatcgttttgcgttgtgatggcgggcgcgggcagcaggatcaagagcaaggtgcgggagtggatgcggaagcggatggcgccgaggaggaagacggccgcggccgcggccgctacagggagcggtgacaacagcggcggcgtcggcggcagtgcgtcggcgtcggcgccggcgcagtcgtcgccgcggcggaagctcctggcggccgcgctcccgtcggcgctgcggtggaggaagccgcgcgggaacgtgctggcggcgctgttccagcgcgcggcgtaccacctgctgtggctcgtggagtccgtggtggtggtcgcgcagctctgcttcttcttcgtgcgcttcggcttcaggctgtgaggaggggaaaaaaaaactcgccctcagcctgagggaacgatgcctctgattctctcgattgtttgcattctttttcttctggccatatctccagtgcctctttcgatttccaacaccacaagctgtaagtaacgtgttcttcttgtgttctggacaaaatgtgtatagtgcaaccttgcgaactgtctgtttttat

SEQ ID NO: 147523 - DNA, 231 bp, Zea Mays
gaaatggtagagatgctactttgcatgaaagattgggaactaggagaagctagaggccaacactctacacaggacgaagaccttgaagaagcatttgaaggactttatcttgatgacccttagggcctagggccctacactttgtaatctcctactattcttcctatttctactctattctggtgatgtaaactgtactcttagacatgaacttattaaattagagctggg

SEQ ID NO: 147524 - DNA, 339 bp, Zea Mays
atgtcttggatgaccatggttggcattactgctcccaggtgttttcttcttctgcttcttggtacttcccaattgtgctgcatccgctccatgatgtggcacatggacattgatgccattggagcggagcaaggagccagagaaggcgcgccggcgccactccttgcgcgcctcgtgggttccatctacggtgaggcgaccctcgcctctcctgcccatccatcactatctctctgttactttttattcccaccaagtgttaagaacaaattttcttgggccaaatcacagatgcaaagttgtcattcaccaattgcgtgcatgtcttctgcttcctga

SEQ ID NO: 147525 - DNA, 1324 bp, Zea Mays
agaggtggatgaggagcacaagcagcaaggtcaactcaggcctccgcaagctagctcaaagaaaaacgaaatgagggatgtggtggcaaagcgggaggcgatgaagggaggcgcgagctcgaaagggccggtggtggtcacgggggcgtcgggcttcgtcggctcctggctcgtcatgaagcttctccaggccggctacaccgtccgggcgaccgtgcgcgaccccgagaacgttgggaagacgaagccattgctggaccttccaggagcaacggagcgcctgtccatatggaaagccgacctggcagacgaagacagcttcgacgaagccatcaggggctgcaccggcgtcttccacgtcgccacacccaccgacttcgagtccaaagaccctgagaatgaggtgatcaagccgacggtggaagggatgatccgcatcttgcgagcctgcaaggaggccggcaccgtgcgccgcatcgtcttcacttcctccgctgggacggtctgcgtcgaggagcggcagcggcccgtctacgaccacgacaactggagcgacgtcgacttctgccgccgcgtcaagatgaccggatggatgtacttcgtgtctaaatccctggcggagaaggcggccgtggcgtacgcggcggagcacggcctggacctcgtcagcgtcatcccgacgctcgtggtcggcccgttcctcagcgcggccatgccgcccagcctcgtcaccgcgctggcgctcgtcacggggaacgaggcccactactcgatcctgaagcaggtgcagttcgtccacctcgacgacctctgcgacgccgagatcttcctcttcgagcacccggccgccgccggacgctacgtctgctcctcgcacgacgccaccatccacggcctcgccgccatgctcagggataggtaccccgagtatgacatcccgcagaagctccgcgggatcgaggacgaactgcagctcgtgcacttctcgtccaagaagctcctagaccatggcttcactttcaggtacacggtggaggacatgttcgacgccggcatccggacgtgccgggagaagggcctcatcccgctcgccacggccggaggggtcggctctgcctcactgcgcacacccggcgagaccgcgagacggatgtgacgaatggcgcttagacaataatcgcttgtttcaagaaaaatcactacaacttgcctctacagtagaaatcctacgaataagctatatgtagaggctgtgatgtaatattattgttttcctgcaacaactcaaaacacatctgttcccaaatcaaacagaacttcttat

SEQ ID NO: 147526 - DNA, 3671 bp, Zea Mays
ttttcgcctaaaatcctgacaaacagtagcgtggccggctctggagtttgctatttaaacccgtttcctctcttccccctcctcacaatcacaggcctcccggcctcccgtgcgctattctctatcagcttacccagcacacagtacacactctaatctccacacgacccaatagatatacggggctgaaggatgaagcttagagcaaaagggatcggcctcctgcttctccttgtcttgcttgctctttgctccaccattgaagtcggcgaggcaagaagaggcaagcattggaggtcgtcgaggagctcaccgggctcatcccagctcaagaaaggcaagggaaagaagagcagctcccaccggcagtacggcgccaaccggccaggtccgaagccaccggtcagctcgacaccaagctctggcgctggcaagggaaatcatcagaatccgtaccaaccaagcccaagtccaagcccgaatgcccctgacatccctcctatgccaagccctgccaatggcagcaggcattccactcccgagccgccggctccaagctgtgggaagggtcagcagcagccatcacagccgccgccagcgacctcgcagggtgcagtattcaatgtggttgattttggagccaagggtgacggagttacagacgatactaaggcttttgaaggagcgtgggctgctgcctgcaaaaagggggcatgtacagttctcgtaccaccagaactagagttcctagttgggccaatctcgttctctgggccttactgcaaatcgaatattgtctttcagctggaaggaacaatcctagctccaaccagtgctaaatcctggggttcaggcttgctccagtggctcgagttcaccaaactaaatggaatggttattcaagggaacggcattataaatggcagagggcaacaatggtggacctactcagacacagaagacgaggatgatgatgacacgtacgatgtggagtttgaaagaatgccacagattaaacctacagcattgaggttttatggtagtttcaacgttgtagtggctggtatcactattgtcaacagctcacagtgtcatcttaagtttgacaactgtcaaggagtgatggtccatgacttgactatatcctcccctgagaacagtctcaacactgacggaatacacctgcagaactccaaagatgtcagcattcatcatacaaacctggcttgtggtgacgattgcatctccatccagacaggatgcagcaacataaatatacataacgtgaattgtggaccaggccatggaatcagcataggtggactaggccgagacaacacaaaagcatgcgtatcaaatgttacagtaagagatgtcaacatgttcagaaccatgaatggtgtcagaatcaagacctggcagggtggtgtaggattggttcaagacataaggttctcaaatatacaagtctcagaggttcaaacacccatcatcatagatcagttttattgtgacagaagcacttgcagaaatcaaacatcagcagtggcagtatcaggggttcaatatgagaatatcagaggaacatttacaatcaaacctgtccattttgcatgcagtgacagcttaccttgttcaggaatctctcttaccggtgtgcaactcagaccagtgcaagtaccccactaccacctgaataacccattctgctggcaagcttttggggagctctacactccaactgtccctcctatagcttgcttgcagattggaaaacctgctggcaataacttacagtcatatgatgacatatgctgaaacactcaaagtgcctttgtttgttgattggtgcttatccatgagtggtcgttgtgatagatgcgaccccatttgcaccattgcttgctgatgagcacatatacagttattttgaggtcatcttattacaacattgtagcttttttcatcaaagtaaacataaatatattcatttgaaatggtcatacagcaacagtatgtacttgagttctccaaaaatgagtaaacataatgacaattgtttatttaaataagtgtaaacagggctatggcaaagggtccaactataaattgataaacaacatgggcgtacatttacaactataatgatagctaatcctgaagaatgagattaataattagaagtcaatgtctaagggtaagatctcttggatcaaatacggaaagaaaatgattgctcggaaaaactagacaatgtttagaaaaatgagtaagcataatagtcagtttctagttaacaaatatgacatattgcactgcacgaatatgattaccatagagataacacttaggaaaggggctattgatgtgtttagctgaaataattatgaaaaatggcaataaaaatgttctgtaaatatgcagaaagaggaaataactaatcaaaagaacatgatatttagaaatcaattccaatgtaaacaacatccatatgcatattttttttttgctttgttttctagaacctcagctaaataataaaacaaagcagcataaaaatagtaaatatgtaaggtcctgcaatcggttactaacttcatattcgttaacacattatgaggaagaaggaaactgaaagcaagatttagaattgtgaaagatattgtaccagttagaaaaagataaaacatagcatatctttttttctgtgcctttcttaattttttcaactaaacatagtatacctatgtgtcgccagctgtctattatcaagaaaaagtatgaattggtcaagaattttccctctaccattcatcttattgtctccactcacactggttgccaaaattcttgaagctctaatccatcaatcaatatttaaaacttacataatcgtaggtagaagggtagacctggtaggctggtacagtggtgagagatatctcactaagtcagcagtttgcggtttcaaagcagcctctctgcattagcgaagggaaagcttgcctcggtttatcccttccccagatccgacttatgtggggggcctttggcactcggtctgccatgcccttagataatcgtaggtctagtgccatggaactggaagtcttcctaacttcctattgattaatctaaggtcacatatgttacatacttacacggaagttcaatataacttaaacactgatggccataattcgaaagttttgggaagatggtgatgtccaattgttagtggactacgtcatctgcagtccatactgccattgcacgcttgtccaacagtcgaccagccaacaaaatcgatgtggcatatgaaggttatatcatacaaacaaaaaactgatcaagtacaaaaatgcaagctctcaccatgaattggaacatgaaaataaaccacatccattaactctgatttggggatactagcaatgccaatttgacaaagaacatcacccactgtttgcgtcccataaatcaaacaggtgataaatctttatattttgatcccagggagggggtgatttacccaataaaagatgcagcctaactaatcctgtcactgaaacatgatgcatttgcatgttgtaagggccagctacagatttatctcattgttactttgttagaaattttgtgtctcagtggtacgtttattaagactgaga

SEQ ID NO: 147527 - DNA, 2009 bp, Zea Mays
acaatcacaggcctcccggcctcccgtgcgctattctctatcagcttacccagcacacagtacacactctaatctccacacgacccaatagatatacggggctgaaggatgaagcttagagcaaaagggatcggcctcctgcttctccttgtcttgcttgctctttgctccaccattgaagtcggcgaggcaagaagaggcaagcattggaggtcgtcgaggagctcaccgggctcatcccagctcaagaaaggcaagggaaagaagagcagctcccaccggcagtacggcgccaaccggccaggtccgaagccaccggtcagctcgacaccaagctctggcgctggcaagggaaatcatcagaatccgtaccaaccaagcccaagtccaagcccgaatgcccctgacatccctcctatgccaagccctgccaatggcagcaggcattccactcccgagccgccggctccaagctgtgggaagggtcagcagcagccatcacagccgccgccagcgacctcgcagggtgcagtattcaatgtggttgattttggagccaagggtgacggagttacagacgatactaaggcttttgaaggagcgtgggctgctgcctgcaaaaagggggcatgtacagttctcgtaccaccagaactagagttcctagttgggccaatctcgttctctgggccttactgcaaatcgaatattgtctttcagctggaaggaacaatcctagctccaaccagtgctaaatcctggggttcaggcttgctccagtggctcgagttcaccaaactaaatggaatggttattcaagggaacggcattataaatggcagagggcaacaatggtggacctactcagacacagaagacgaggatgatgatgacacgtacgatgtggagtttgaaagaatgccacagattaaacctacagtaagaattactatttttatgcacactattatcataccaaactgaaatgaagtaatgacaacactgatttcatacctgatgcaggcattgaggttttatggtagtttcaacgttgtagtggctggtatcactattgtcaacagctcacagtgtcatcttaagtttgacaactgtcaaggagtgatggtccatgacttgactatatcctcccctgagaacagtctcaacactgacggaatacacctgcagaactccaaagatgtcagcattcatcatacaaacctggcttgtggtgacgattgcatctccatccagacaggatgcagcaacataaatatacataacgtgaattgtggaccaggccatggaatcagcataggtggactaggccgagacaacacaaaagcatgcgtatcaaatgttacagtaagagatgtcaacatgttcagaaccatgaatggtgtcagaatcaagacctggcagggtggtgtaggattggttcaagacataaggttctcaaatatacaagtctcagaggttcaaacacccatcatcatagatcagttttattgtgacagaagcacttgcagaaatcaaacatcagcagtggcagtatcaggggttcaatatgagaatatcagaggaacatttacaatcaaacctgtccattttgcatgcagtgacagcttaccttgttcaggaatctctcttaccggtgtgcaactcagaccagtgcaagtaccccactaccacctgaataacccattctgctggcaagcttttggggagctctacactccaactgtccctcctatagcttgcttgcagattggaaaacctgctggcaataacttacagtcatatgatgacatatgctgaaacactcaaagtgcctttgtttgttgattggtgcttatccatgagtggtcgttgtgatagatgcgaccccatttgcaccattgcttgctgatgagcacatatacagttattttgaggtcatcttattacaacattgtagcttttttcatcaaagtaaacataaatatattcatttgaaatggtcatacagc

SEQ ID NO: 147528 - DNA, 1925 bp, Zea Mays
acaatcacaggcctcccggcctcccgtgcgctattctctatcagcttacccagcacacagtacacactctaatctccacacgacccaatagatatacggggctgaaggatgaagcttagagcaaaagggatcggcctcctgcttctccttgtcttgcttgctctttgctccaccattgaagtcggcgaggcaagaagaggcaagcattggaggtcgtcgaggagctcaccgggctcatcccagctcaagaaaggcaagggaaagaagagcagctcccaccggcagtacggcgccaaccggccaggtccgaagccaccggtcagctcgacaccaagctctggcgctggcaagggaaatcatcagaatccgtaccaaccaagcccaagtccaagcccgaatgcccctgacatccctcctatgccaagccctgccaatggcagcaggcattccactcccgagccgccggctccaagctgtgggaagggtcagcagcagccatcacagccgccgccagcgacctcgcagggtgcagtattcaatgtggttgattttggagccaagggtgacggagttacagacgatactaaggcttttgaaggagcgtgggctgctgcctgcaaaaagggggcatgtacagttctcgtaccaccagaactagagttcctagttgggccaatctcgttctctgggccttactgcaaatcgaatattgtctttcagctggaaggaacaatcctagctccaaccagtgctaaatcctggggttcaggcttgctccagtggctcgagttcaccaaactaaatggaatggttattcaagggaacggcattataaatggcagagggcaacaatggtggacctactcagacacagaagacgaggatgatgatgacacgtacgatgtggagtttgaaagaatgccacagattaaacctacagcattgaggttttatggtagtttcaacgttgtagtggctggtatcactattgtcaacagctcacagtgtcatcttaagtttgacaactgtcaaggagtgatggtccatgacttgactatatcctcccctgagaacagtctcaacactgacggaatacacctgcagaactccaaagatgtcagcattcatcatacaaacctggcttgtggtgacgattgcatctccatccagacaggatgcagcaacataaatatacataacgtgaattgtggaccaggccatggaatcagcataggtggactaggccgagacaacacaaaagcatgcgtatcaaatgttacagtaagagatgtcaacatgttcagaaccatgaatggtgtcagaatcaagacctggcagggtggtgtaggattggttcaagacataaggttctcaaatatacaagtctcagaggttcaaacacccatcatcatagatcagttttattgtgacagaagcacttgcagaaatcaaacatcagcagtggcagtatcaggggttcaatatgagaatatcagaggaacatttacaatcaaacctgtccattttgcatgcagtgacagcttaccttgttcaggaatctctcttaccggtgtgcaactcagaccagtgcaagtaccccactaccacctgaataacccattctgctggcaagcttttggggagctctacactccaactgtccctcctatagcttgcttgcagattggaaaacctgctggcaataacttacagtcatatgatgacatatgctgaaacactcaaagtgcctttgtttgttgattggtgcttatccatgagtggtcgttgtgatagatgcgaccccatttgcaccattgcttgctgatgagcacatatacagttattttgaggtcatcttattacaacattgtagcttttttcatcaaagtaaacataaatatattcatttgaaatggtcatacagc

SEQ ID NO: 147529 - DNA, 648 bp, Zea Mays
ctaaacacgtgagaagtcgaggcgttgggacatggacgcatggtgccgcgtgaacgagcatgtccgcttcgtgcttacccatactttgtttgatccggtgaccgcgcttgcggtcgactggtcgtggacgattcgcatccaatcagacgagagcgatcgctttctgggctgagatggacgaggattttttttttcacgtataccccgtccctgccaccggggccgggccgggccgaggggcgcgcgcgagagcttcagagcgagcgagagaagcagccgggtaggttggtgtgggggaggacggacgggacggctggtaccttgcgtctccagcgcgaggcggacggtgtacccgtgccggaggaggcggtcgacgacggcgaacccgacgaaggagatgccgccagttacgcacacggcgcgcgccgcggcccctccggcgtcaccccggggagcgcgcttagcgtccgcgtggcccgccgagcggcgccacccgcccgccaggagcgcggcgcgcagctcgtccacctccgcctcaaggctctgcgtgctccgaagcacgcccatgcctgccgggcctgctcccgcgctgctgcggtagtgcctctcggtgttggtggagagggtattcacggcgagtggggtggg

SEQ ID NO: 147530 - DNA, 1243 bp, Zea Mays
cctgaccgcccacccctgatcggggcccctcgccggagctctccacctgccagcgccggtgctcgagcgtgcgggcgagagagagagatagacggcgctcactcgttctgggggattttcccttcgagacagggccaaagggtaccggttaccaaacgaaaccgctccgtcctgtccgtcgcccctcggtccctctcccttcggttcgaccaaagtcaccaaacgtatcgcaaacaagctcctcgacccgagttcgagctcaactcggcggagatctccactcttcagcaaggcgcgggatgccggcgatggcaccggaggacgatgaagcactgtacgagatccaccggcacgcgtcgggatcccacgtgatccctccacagttgctggatggagattatcagaaaacgtgttgaacttggtgagctgcacaaggtacttgaacttctagaccgagcatctttgaaacacagcgtgttcctagaggaagaagaagcacacagcttggttgaacttgtatctgctctggactgcttcatggcccttaaaactgtgttgctactcccatatgaatctctgagactgcagtgcctgcagatggtggaggtgaaaatgagggaaggaatcgtgtccacctcatcaaatgctgatgatcaggagctccttgccttggttctttcctctggaactatgcagaagatcatcacagaagaggcatactctaaatttttctcttacatatgccatcttgtcgggcaccttgcaaggtcattccagactgatctcctcgtacaatggaacgaagcaacatctaagatcaacagatctttactgttcgctagagttctgtttccatgttttgtatctgaactggtcctcggagggcagtatcttctggctgggttcgtcatctcgagatggatgcacacacatccatctctgggcctgatggatatcaccgagaccagtgtgcgatgcttccttcaaggccaggttgcccaacttgatgaggtgggagggagcgatgctgctctcactgacggtgaagtttgtgtaaggcacacaatctccaccctacagccgaaacttgtttctcttctgcagtctgcattagctctttcgaacaaagagttgtaggcaaagtcctgtgtagttaacttttacactcttgctgtactaccggtgtacctgtaacataaaatgtttttttagataatggtaaaagtgaatggtggaagatttc

SEQ ID NO: 147531 - DNA, 7747 bp, Zea Mays
cctgaccgcccacccctgatcggggcccctcgccggagctctccacctgccagcgccggtgctcgagcgtgcgggcgagagagagagatagacggcgctcactcgttctgggggattttcccttcgagacagggccaaagggtaccggttaccaaacgaaaccgctccgtcctgtccgtcgcccctcggtccctctcccttcggttcgaccaaagtcaccaaacgtatcgcaaacaagctcctcgacccgagttcgagctcaactcggcggagatctccactcttcagcaaggcgcgggatgccggcgatggcaccggaggacgatgaagcactgtacgagatccaccggcacgcgtcgggatcccaccaagaagaataccaaggtgctgcgacaagttgtggtagctcagatgctggaggaggaggtgtcctctcctatctctccttgcaaggtgtgagcaaacttaaggaaaagtgggataggtacagggtgctggggaagagtaggcagaggaagaagggggatggcgtcgcactgtttgtctcaccaaatgcagaatatgtgtctgtaactgttgggaatcacatcatcatcttgaggaaagccgatggctatgcatcaccttgtggtgtttacacaaataatgaccgaatagcatttttcacaaatggggcttggctggaggctcaaggcgtttttggtgtggtggatgacctaagcacactttacttgatcaaagaaaatggggagttactagcaaggaggacatgtgatcagttgaagctatcttcttccattattgatctggttttgcaggatggtacaagcttacttaggccaggtttctacatttttacaagtgactgcttggttcatagatttgattacactgaagaacctgaggcatgtttatgcgaagttcccatatcaactaaagatgcaatgtcagctaggactatccagttacctcgaagtttatcgtgcattgattaccatcaacgtcactcgctatttgtcctagttggagattccaatgtttcatttagctccaatagttattctggaacctattttatgtatctattacacttcaacaaaaatctggaacttagtctttcatttaaaagcatgcagttggaaggggtattttgtcccctgaaggatcaaagaacctttgtttcatccccgaaaatcaggatctcgcctcagggaaagtatattgctacgttggatttgactggttttgtaaactttttttcacttgatggtgacttgcgcactgttccacttcaaactcttggaaaggctagacacctaattgatgttaaggacatcagttggtggacagataatgttcttatgttggtaagaaaagatggtagcattagcatgtacagcatcactgaagacaagatagtttccaatgatgacccggttttatctacaccaatattggagaaggcaaaggctactgaaggacatgcttttgttttgcaatctaggagatatggaacaaacactccagttaataagcggatggatagtgactcggaaccttgtctgctgagtggttctggggagcaccaacaaacagaaggggatgaaatgtcctggagtctgatatcattctccaaagttacagtagcagaaatgtactctgttctgataagagagaaacgatacaaggacgctttagattttgcttctagatacaatctagataaggatgaagttcttaaagcatgctggttgcactctgatgccaatactcatgagatagactcgtacttagcaaaaattaaagaccaagtatttgtattatcagaatgtgtaaacaaagttgggcctacagaagcagatttaagggctctactttcttttggactttgtataactgattgttacagattttctgagttagataacagcagtaagggctcaacatgggacagtcgcaccattaggcttcgtttattgcggcacatagacatgttagagacattcttgggcattaatatgggaaggtatgcagcaggagaatatagcaaattccgttcaatgccattggtggaaacagccatagcattagccgaaagtggcaaaattggggctttaaatcttatattcaagcgtcatccatatactgtctcttcagatattttacgtgttttgtctgctatcccagaaacccttgctgttcagacttatagtcagttgctgccagggaaatcccttcccagtgttgtcatattaagagctggtgattgggttgaatgtgaacagatggcttcatatataaacaattgccctgccgagttggacaaggtcgaagagatcaaaacggaaatacttgtaaagcactcaaaaggcttttcatggccttcagttgctgaactttgtgagtggtataagaacagagcaagggacattgactgcttaagtggacagctggaaaactctctggccatgatagagcttgcatgtcagaagggcattgtagagttgcagccattctttgatgatattaaatgcctctaccaggttgtatattctaatgaattgaatgagtttacaatgaatcttttgacatgggaagatctgcctgattatgaaaagttcaaaatcattctcaaaggagtcaaagaagatacagttgttcaacggctagaagaaaatgctatccgttttatgaagaaattatatgaacacaaacaagaatcctaccttgttagttggctgaaagaggtagctgctaaaaatgagcttttgatttgcttagctgtcattgaaaatggttgtggggaatcaccaatatatggtctcttcaaggatcttgctgagatgatagaaacctctgttcactgcatttatatgtgcagtgcaactaaccagtggaataccatgtcatcaatattatcaaagtcactctataaaacaaagagggagaaatcgttagtggctagtgaagaagactgcaatctgaaagatgctaagcatgctcttggttcttctatggtttcttatgaggagatgcaatgtgtctgtgctgatatcttatctggtctgggcaatgctccagaagatttttatcactatgattcagtacctgacaaacctaatgatgtcaaatatcttgatatattggagaagaggctaaaagttgctgaaggccatgtagaagtaggacggctctttgcttattatcaggtcccaaaatcaatgcatttcttccttagtgctcacttagatgagaagaatgtaaggcaaattatacggctgcttttatcgaaatttggcagacgtcaacctgttcgatcagacaatgagtgggctaacatgtggcgtgatttaaaactcttccaagaaaaggcatttccttttcttgattcagaatatatgctggccgaatttatcagagggctattgaaagctggtaaattttcgctagccaggaattatcttggaggaaccagtgcagtttctttatccacagagaaggctgaaaatcttgtgatacaagctgcaagggagtatttcttctcggcttcaactttatctgggaatgaaatttggaaagccagggaatgcctaaatttgttacctaatagcaaaaatgttcaagcagaaactgatataattgatgctcttactgttagacttccttatctaggggtgactatccttcctcttcagttcaggcaggtaaaggatcctatggatatcatccgcatggtgataacatgtcaagcaggtgcataccttcattttgaagagatcattgatgtcgctaaacttctgggattaagaagtgaagaggaagtagcggatgtggaggaggctattgccagagaagctgtggtaaatggtgatcttcaacttgcccttgatatctgtttaaatttaacaaaaaagagtcatggtgcagtgtgggatttatgtgctgcaattgctagaggccctccacttgacaatttggatactggtacccgtgaaaagctattgggtttcgctctcagccattgtgatgacgattctgttggggaattgttgaatgcttggaaggagcttcatgctcagggtacttttgagaaattaatgattacaaccgcaacaaatcctcccaatttcttgattgatggatcttcaatcacaccacttcctgtacaaagtgtgcaagacatacttgacctgagagatgacaatggccatgatagacgtagcgaccttgtgggaattgttaaagacatgctgtcaaaagtttgcttggacttttctaatggagacacacataattgggagtctatgttggaagaaaaccggaaattgttgtgctttggagcactggtattaccatggcttttgaaattgttcagtaatgaagcatgtgatggtgaaataatggatcatctcactaggagatgtcgattttcaacaaaagtaaaagcagcaaccagtatcatatattggttagttataaatggtttggcccccaatgataatataatcatgattcttgcaaagtctataatggagcctcccattgatgaagagtttgatgtacttggctgctcggttcttttgaatctcatggaccctttcaatggagtgaaaataatagaggaagagctaaaaagacgagaatcttatcaagaaattagcagcataatgagtgtaggaatgttatatagttccctcaataattctaagaaagagtgctccactcctgaacagaggagaaacctgttgcttcacaaatttcatgagaagttcacctcagccgataccgatgatttagaccaggttgatatggcaaatacaaccttctggagagaatggaaatcaaagttagaagaggataaacaactggctgatcaagcgcggatgctcaagcagatattacctgatatagacacatctcgattcttgtctggtgatgttaattatatcaaaatagtagtttactcctttgttaattctgtaaagatggagaaaaaacacatactcaaggaagcagtgcggatagctgaggcatatgggttgcaacgaactgaggtgcttttacgatttctcgcctgcagtcttgtgtctgaatactgggataacaatgatattctgaacgaaatttctgaattccgggaggatattgtcagctcagctaagggtgtgatcgatatgatatattcagatgtctatctggagatagatgggtataataaacaacgtctttcttacatttacggcattctttcagcatgtcattcatatctgaagaggaccaatgagatagaattgagatacccagtgcatgtgcatacccataagcttgaaccatttcagtactataaggtacttgaggaagagtgcaagaaagtctgcttcattgatggcttgaactttaaaaacattgctggactggataatctgaactttgagcatttcaatgacgaagtatgcaagaatatccatgcctccaccgtcactgctatagccgatatggtacagtctcttgtgagtatgtatgttgatgtactggccaagggactcatatcacaacaaggtgtttacaagcactatgttctggggttgctggcatcacttgaaggccgcagtgaagcacaatcgaacaacacagattatgaaaagttgcaggcttccctatgcgaatttgagttgaactatgatagttgcagggagtacatccaagctcttccagccacagatatttcatatattgtaagaaggtattgcaccctttgctttccatctaacttagcacgaagccatccacaggaaccttcatggaggaaacctcttgccacgctactagaattttggtctaaagttgttgatgacataccgggggattcaattgatgcttgctcatatggaagaacagactacttaaattcaaataggttatctctgtgcatgagagctttcaggcagctattaataattgatgagatagcactgcaccaaggttgggatgccatttccatgtatgtaaaagattgccttagaaatggaaagatgatggaaacaccatgcttttgtcgagctatgattctatcaggctgcagttttgaatctgtagttgaagtatactttggaggacaaggacagttagggagtgagaatgcagatccaagcaattatttggacctcttagaactttataatgctgctacagaaaagtgtttgtcggatttgagtgaggaatcttgcgaatatcgaatattgcttcataatttgctgtcatctttgagccggtcaacgggaaaacatgctggtgctctagaaatggtcagatctggtgtttgggggaagttaatccgctattcggaagacatgcagctagagagccaattacgagtctatgcactacagctgatgcaatgtatcacaggaagaaaccttaaatctcttccaaatgaaatggtgtgtcaggttgagccatgggaatcatggtatgagcatggagcgggtgctgccatagctgatgagagtatcaactcctctagcagcatcacagggactcttgtcgcacttagatctactcagatggtcgctgcagttctgcctgacgctaatatcactccagaaaacctagcaactcttgactctgcagtatcttgttttttaaaattgtcagaacgtgcttctggtgtgagcgttgctgtttttgaagcagtgctagaagagtgggagcaattgttctcccccaaagaagagcatgttgcacctcatgaatcaccaaaagaaacaagtgactggagtgatggatgggatgatggctgggaggcgctaccggaagagttggagagtccaaagaataaacaagagggtgtgttgttatctgtgcatcccctccacagttgctggatggagattatcagaaaacgtgttgaacttggtgagctgcacaaggtacttgaacttctagaccgagcatctttgaaacacagcgtgttcctagaggaagaagaagcacacagcttggttgaacttgtatctgctctggactgcttcatggcccttaaaactgtgttgctactcccatatgaatctctgagactgcagtgcctgcagatggtggaggtgaaaatgagggaaggaatcgtgtccacctcatcaaatgctgatgatcaggagctccttgccttggttctttcctctggaactatgcagaagatcatcacagaagaggcatactctaaatttttctcttacatatgccatcttgtcgggcaccttgcaaggtcattccagactgatctcctcgtacaatggaacgaagcaacatctaagatcaacagatctttactgttcgctagagttctgtttccatgttttgtatctgaactggtcctcggagggcagtatcttctggctgggttcgtcatctcgagatggatgcacacacatccatctctgggcctgatggatatcaccgagaccagtgtgcgatgcttccttcaaggccaggttgcccaacttgatgaggtgggagggagcgatgctgctctcactgacggtgaagtttgtgtaaggcacacaatctccaccctacagccgaaacttgtttctcttctgcagtctgcattagctctttcgaacaaagagttgtaggcaaagtcctgtgtagttaacttttacactcttgctgtactaccggtgtacctgtaacataaaatgtttttttagataatggtaaaagtgaatggtggaagatttcatattgttat

SEQ ID NO: 147532 - DNA, 393 bp, Zea Mays
gagttgttgacaaacaacaagttatctgagttggcatgtttggcattatatctcatgtatgagaaaaagcaaggaaaggattcattttggtacccctacattaaggaacttgaccgacatcgaggaagggggcagctagctgttgaatcaccacttctatggactgaaagtgaactggactaccttagtggaagccccttgaaggatgaagttgttgctagagatgaggcaataaggagagagtataatgagcttgacacattgtggtttatggcaggttcactatttcagcaatatccttttgacatacctactgaggcttttccgtttgaaatattcaagcaggcttttgttgcagtacagtcttgtgttgttcatttgcagctagcatga

SEQ ID NO: 147533 - DNA, 1280 bp, Zea Mays
gaaatgctcctaattgactcagttatgcttcttatccaagagcagaaagttagtcttgctcgaaggttcgcactagttcccttggggccgccactattgacttacaagagcaactgcaaagcgatgttgacagttgatggtgagtctgttcgattggtggtggatcggccatataaagctggagaaccaataatcatctggtgtggaccccaaacaaactccaggcttgttctgaactatggttttgttgatgaaaacaatccctttgatcgcatatcaattgaggcatctttaaatacagaagatcctcaataccaagaaaagagaatggttgctcagaggaatggaaagcatgctatccaaaattttaatgtctatgtaggcaaagagaaacaaactgttgcagaaatgcttccttatttgagattaggatacatttcagatccagacgaaatgcagtctatactctcttctgaaggagatacatgtccagttagtccatgtacagagcgagctgtacttgatcagcttggtggttacctggaatctcggttggctggttatccaacaacattgaatgaagatgaagctatgttggcagatggcagtttggaaccaaagcaggaagttgctactaggcttgtgaggttggagaagaagatgctccatgcctgtctccaggccacaaatgagtttataactgacttgccagaccacacagtatcaccttgccctgctcaatatgcccctgaaatgaaatgaggttgcatgttgttttctttcccaaatggtcatatcattaagaatgtcacaatttgatcaatgtgcatatctttttgaagaccatatatgctgcaaggtggatataatatttgaaagaatttgctccttgttttctttagagattacgtaaacgcaattgcttgctagaaggtaaatgaggctgaccgaagttgtgttacattgtttcatgccaaaaagcgcgatacgtaatacaaatgtattgttcattgatacgaacgctgcttatggttacagcttgcgtgttccaggaaatcacatctcttgatgttccaagttataagggtatcagtggtcttcagcgggatatggtaatggtctccaacgggatgtggccatgttgtagttattagttgcaatgcaccaaagtagtggcggacttaggatttgaacctcgggtattctaagacataaaaaatggtatgtaataccatatacagttcagtaacacatatatataatggtaggcgtttcggaga

SEQ ID NO: 147534 - DNA, 1175 bp, Zea Mays
gaaatgctcctaattgactcagttatgcttcttatccaagagcagaaagttagtcttgctcgaaggttcgcactagttcccttggggccgccactattgacttacaagagcaactgcaaagcgatgttgacagttgatggtgagtctgttcgattggtggtggatcggccatataaagctggagaaccaataatcatctggtgtggaccccaaacaaactccaggcttgttctgaactatggttttgttgatgaaaacaatccctttgatcgcatatcaattgaggcatctttaaatacagaagatcctcaataccaagaaaagagaatggttgctcagaggaatggaaagcatgctatccaaaattttaatgtctatgtaggcaaagagaaacaaactgttgcagaaatgcttccttatttgagattaggatacatttcagatccagacgaaatgcagtctatactctcttctgaaggagatacatgtccagttagtccatgtacagagcgagctgtacttgatcagcttggtggttacctggaatctcggttggctggttatccaacaacattgaatgaagatgaagctatgttggcagatggcagtttggaaccaaagcaggaagttgctactaggcttgtgaggttggagaagaagatgctccatgcctgtctccaggccacaaatgagtttataactgacttgccagaccacacagtatcaccttgccctgctcaatatgcccctgaaatgaaatgaggttgcatgttgttttctttcccaaatggtcatatcattaagaatgtcacaatttgatcaatgtgcatatctttttgaagaccatatatgctgcaaggtggatataatatttgaaagaatttgctccttgttttctttagagattacgtaaacgcaattgcttgctagaagcttgcgtgttccaggaaatcacatctcttgatgttccaagttataagggtatcagtggtcttcagcgggatatggtaatggtctccaacgggatgtggccatgttgtagttattagttgcaatgcaccaaagtagtggcggacttaggatttgaacctcgggtattctaagacataaaaaatggtatgtaataccatatacagttcagtaacacatatatataatggtaggcgtttcggaga

SEQ ID NO: 147535 - DNA, 1724 bp, Zea Mays
atgagtcagcgagtcgtttgtcagtttagcgaggccgaaatctgcaaccttggcctcgaaggcgtcgtccaggagtatgttggccgacttgatgtccctgtgtatgatcctaggatggccttcttcgtggaggtacgtcagcccacgcgccgctccgatcgcaatcctcatccgcttcggccaatccatcacgggcagcccttttccgtgcaggtgatgctccagcgtcttgttggccacgaactcgtagacgaggagtcggtggttctcggtgacgcagtagccgacgagcgtgacgaggtggcggtggtggatgcggctgatgatgtccacctcggcgcggaactccttctccccctgcccgctgcccagcttgagctgcttcaccgccacgcgccgcccgtcgcccagcgcgcccatgtacaccttcccgaacccgccctcgccgatcacgttcgccgccgagaacccgcccgtgatgcccgccagctcgtcgtacgtgaaccacgacttgttggcccccgacaggtcgtacgagctcgacgtcccgctcggcgacggcgacggcgccggcccgttcgacggctggtacacgtccgccgacaccacgcccgcggctgcgccacactgacgttccggcaccacgatgctgtgcctgcgcgacgcgtgccgctcccgcttcctcccccggttgccctgcttgccggttgcgcacgcgattatcagcagcgacgccagtgccaggaccagcccggcaacggagatcccgatgaccaccgcctcgttcttcatgttgctgttgctgcccgacccacccccacccgcggggggcccaggcggggacctccacatgccgcctgcaggtgggccgccagagacgccgcccggcatgatcaccgtcagcgccatcggaggaggcagcatttgcgtgggcgccggcggaggtggctggtgaccggcggtgtccggtggcgtcgacggtgtctcgcgcggtggcggttgtcccgcatttgggggaggtgacgaggccgtcgtcccggcggctgctccgggcttctccgacgacgggggtgtcggtggcttggtcggttccggtgccggaggcgactgctgcgacgtcgacgccgcgggcggcggcggcgaagactgcggaggtggcgacgggggcggcgaagacggcgaaggaggaggagaggaccggcttggtggcggcggcgaggccggaggaggaggggaagccgccggagacttctctggcggggtcgctggtgtgttcggcgacgtcgtgctgttgtgggccgggggaggcggggacgactgcttcgacggtggcggcggcggtgtcggcggcggaggagacgacgaggaagccttcggcgggggtggcggcgacgacgatgattccggaggcggtgctgcccgtgccttcggccctggcggccctcccgcgggggacgacgccagttgctcggttgacgccatgagggcgcgcggcgtcacagggccgccgcgcggtcggcggtatcgtcgtcgttccggggagagtggttaggagccgagccggaataatggcatctcaaacgcgcatcggcaggggagacgggggcagcggcggccgggcctctcacatagacatgggcatgggtaaacgtccgtccgtccgtccgccggcaggtccgatcgagctaggcagcgtggagacacggaatgcgcctcgccttggc

SEQ ID NO: 147536 - DNA, 1507 bp, Zea Mays
agtagcagttgctttgcttccatttccctccctacgccggccagtacacacacccgaccgcgaagaaaccgagcaacaaaaacatgcgagaaatggagcacaagaggccggttgtccgccgccaggagcccaccgtcgcaaggacggaggacgacgtggcttccggcgacgaggaatccgacgtcgagttcgagttccccttcgtgagccaggagtccggcgcgggcgcgggcgccgcggcggccgacgagctcttcgcggacggccgcatccgcgcgtcctacccggtgtttggccgagtcctagacgaggccgcggcgccggcgccgagggcgccgctggggcggctgttccagctggagcgggcgcggacctcgtccgtcgcgtccaggtcgtcgtcctcgtcctcgtcttcgtcgacggcggcggacgcggacgcgggcgtcgacggcgcgtcgccggacagctactgcctctggacgcccgggtcgtcgccggcgtcctcgccctcgcggccgccgcggaagagcgggtccacgggctccgtcgcgcggtggcgccgcatcggcgagctcgtcgtcggccgcagccacagcgacgggaaggagaggttcctcttcctctccgcgccgccgtccccggccagggacagggaccactccacggactccaaggcgaagcagccttccagagcaagtaaatccgcagccgccgagctcgacacggtccccgcggggcgccggatgtcctacggcggcggcggcggcgccaaggcgtccaccggcggccggcgcacgttcctgccgtaccggcaggacctcgtggggctgttcgccagcgcgcacgggctcagccggagcaccctgccgttctgagccggtgtagccacgacgcgcagtggcgtggaggacccgttccaaaaggcgatgccttggagattgaaattgaaaccgggatttgaaatttcaagacatttgaattggagatccactgcatgtaaccctgctttgcgaagaccagtattagcattagcatacgtgtgggattaaagcgattattacgcgagtcaaaaaaggcaaggtgtcaagtcagagaaagcaggggaaacgtgagccttaccattagcattcggctcggaatcgggctctcgagtcggttccgaccaccgccattcattctatacccaaccaacacgcgaagaaattaagacacgttttcctctcacacgggatttgcagcatccgcaggattaacgttgagcgcgttcggctgccctgcacggagcactgttgcagctgcaatccctagagagaaaatactgtagaagccgcagccgcagtcggattaaagccgcagcgaacaagccaaagcatagacacgtggcagttataattttcatgtggacacgttataggagatacacatatacggacacgttggacaagaagtttacatgtggttgtttgtacatgatcattgtatagtactaatgcatagagattacaca

SEQ ID NO: 147537 - DNA, 378 bp, Zea Mays
gaatatttccgaatttcttcaaatttccctcgcttttgcttcagactatgaccaagaactgtgaccccgctccctgcaaagcaagcaaatctggaaaaaaaactttattaatatattttttaaggaaacagaaagaaaacacttcaaatggagctattctgactcgggcagtccggcctcggcggtgctccgggtccgggcgccggcggggcgagcgtcgctgcggcctcgacggtgaatgatacagccacccagtcgggcgtcggtggtgctccggcttggctgcgctgtgccgatgcgtgctgcggcggcggccccaggctcatcaagaacgccgccgccctcttcgccgcagccgtcagccccctccactcttgt

SEQ ID NO: 147538 - DNA, 1093 bp, Zea Mays
agaacagagcacaaacgcgcgcgcttgtagaatgcccgcctttcccgtccgcgcctccgcttcgtccagcgtcgtcggtagcctcaccggtacccgccgccccaggctcatcaagaacaccaccgtcatcttcgccaccgccccctccaccctcgtggccatgggcgacgccgtggagcacctcaagagcgggttccagaagttcaagaccgaggtgtatgacaagaagccggagctgttcgagcctctcaaggccggtcaggcccccaagtacatggtgttcgcctgctccgactcccgcgtgtgcccgtcggtgaccctgggcctgcagcccggcgaggccttcaccgtgcgcaacatcgccgccatggtcccggcctacgacaagaccaagtacaccggcatcgggtccgccatcgagtacgccgtgtgcgccctcaaggtggaggtcctcgtggtcatcggccacagctgctgcggtggcatccgggcgctgctctccctccaggacggtgcacccgacaacttccacttcgtcgagaactgggtcaagatcggcttccctgccaaggtcaaggtgaagaaagagcacgcctccgtgcccttcgatgaccagtgctccatcctggagaaggaggccgtgaacgtgtccctggagaacctcaagacctaccccttcgtccaggaagggctggccaaggggaccctcaagctggtcggcgcccactacgacttcgtgtccgggaacttcctcgtatgggaaacttagccacacccgccgctcagcgcgcggcttcgtcgtcacaactcctatatcttcataaatatatatatccactacctatatatacctaccgatatgtgaatgcgaggagtactattacctgcatgttttcagcagtatgcagctacgtacatatatatgtaccggatcgcctaacgacgtgaatgtaataagcaataatattttctaccgcttttttttatttctttctaacctcgagcttctatatgtagcaacaacattttctacgtacatatatatgtgccacccgtattccgactgatatacctatcactagtacaaaagaga

SEQ ID NO: 147539 - DNA, 855 bp, Zea Mays
atgggaggagggaggggggcagcgaagccatccatccatccatagatccctcacctcactcactcgtgaagaaccagagaacccacccaccctccttcatctcctacatccacatctatccaagaaggccatgggcgacgccgtggagcacctcaagagcgggttccagaagttcaagaccgaggtgtatgacaagaagccggagctgttcgagcctctcaaggccggtcaggcccccaaggtacgtgactagtactactcgccctgtagctctctctctatcgtcaccggcccagcattgccgcgttctcccatctttctgaactgcaaggacgaccctgccgcacctacggcgctgctccatcatccacacaccccagctgtgtcgctgggtgcgcaactgcattatttgcgcgtgtgacgaggtcaacgcgttgcggtagacaaacggaaacaagtagtagtctgttggattggatatgatatgcgtacataactagcttatacatatttggttcgtactttatttgttatattttagttcaaaataaactagcgggtgataaatattcaaaagtgcatgtagcgccggatatttatacgcgtacgtgcatgaaccgtggacactaacgtgcatgcgcgccggccgccgaggtgcatccatccccatgtgcaaatccaccggccggtagtagtcaaatattctttgcaccaaaagaaaaaaaaagacagaggcagtctagccgtgttgaatttgaattacaatggtagtctcacgtccacacctacctagccgtgttgaattacgtacattatttgtttttgaacatatatatatggtcacgtacgtccatg

SEQ ID NO: 147540 - DNA, 601 bp, Zea Mays
atgggaggagggaggggggcagcgaagccatccatccatccatagatccctcacctcactcactcgtgaagaaccagagaacccacccaccctccttcatctcctacatccacatctatccaagaaggccatgggcgacgccgtggagcacctcaagagcgggttccagaagttcaagaccgaggtgtatgacaagaagccggagctgttcgagcctctcaaggccggtcaggcccccaagtacatggtgttcgcctgctccgactcccgcgtgtgcccgtcggtgaccctgggcctgcagcccggcgaggccttcaccgtgcgcaacatcgccgccatggtcccggcctacgacaaggacttcgtgtccgggaacttcctcgtatgggaaacttagccacacccgccgctcagcgcgcggcttcgtcgtcacaactcctatatcttcataaatatatatatccactacctatatatacctaccgatatgtgaatgcgaggagtactattacctgcatgttttcagcagtatgcagctacgtacatatatatgtaccggatcgcctaacgacgtgaatgtaataagcaataatattttcta

SEQ ID NO: 147541 - DNA, 1063 bp, Zea Mays
atgggaggagggaggggggcagcgaagccatccatccatccatagatccctcacctcactcactcgtgaagaaccagagaacccacccaccctccttcatctcctacatccacatctatccaagaaggccatgggcgacgccgtggagcacctcaagagcgggttccagaagttcaagaccgaggtgtatgacaagaagccggagctgttcgagcctctcaaggccggtcaggcccccaagtacatggtgttcgcctgctccgactcccgcgtgtgcccgtcggtgaccctgggcctgcagcccggcgaggccttcaccgtgcgcaacatcgccgccatggtcccggcctacgacaagaccaagtacaccggcatcgggtccgccatcgagtacgccgtgtgcgccctcaaggtggaggtcctcgtggtcatcggccacagctgctgcggtggcatccgggcgctgctctccctccaggacggtgcacccgacaacttccacttcgtcgagaactgggtcaagatcggcttccctgccaaggtcaaggtgaagaaagagcacgcctccgtgcccttcgatgaccagtgctccatcctggagaaggaggccgtgaacgtgtccctggagaacctcaagacctaccccttcgtccaggaagggctggccaaggggaccctcaagctggtcggcgcccactacgacttcgtgtccgggaacttcctcgtatgggaaacttagccacacccgccgctcagcgcgcggcttcgtcgtcacaactcctatatcttcataaatatatatatccactacctatatatacctaccgatatgtgaatgcgaggagtactattacctgcatgttttcagcagtatgcagctacgtacatatatatgtaccggatcgcctaacgacgtgaatgtaataagcaataatattttctaccgcttttttttatttctttctaacctcgagcttctatatgtagcaacaacattttctacgtacatatatatgtgccacccgtattccgactgatatacctatcactagtacaaaagaga

SEQ ID NO: 147542 - DNA, 1124 bp, Zea Mays
agcgaagccatccatccatccatagatccctcacctcactcactcgtgaagaaccagagaacccacccaccctccttcatctcctacatccacatctatccaagaaggtccgttctctcctccccgctcccctcagcaataatctccgcacggcaacctcgctcctccgttttggttttcctctgtgtgccatgggcgacgccgtggagcacctcaagagcgggttccagaagttcaagaccgaggtgtatgacaagaagccggagctgttcgagcctctcaaggccggtcaggcccccaagtacatggtgttcgcctgctccgactcccgcgtgtgcccgtcggtgaccctgggcctgcagcccggcgaggccttcaccgtgcgcaacatcgccgccatggtcccggcctacgacaagaccaagtacaccggcatcgggtccgccatcgagtacgccgtgtgcgccctcaaggtggaggtcctcgtggtcatcggccacagctgctgcggtggcatccgggcgctgctctccctccaggacggtgcacccgacaacttccacttcgtcgagaactgggtcaagatcggcttccctgccaaggtcaaggtgaagaaagagcacgcctccgtgcccttcgatgaccagtgctccatcctggagaaggaggccgtgaacgtgtccctggagaacctcaagacctaccccttcgtccaggaagggctggccaaggggaccctcaagctggtcggcgcccactacgacttcgtgtccgggaacttcctcgtatgggaaacttagccacacccgccgctcagcgcgcggcttcgtcgtcacaactcctatatcttcataaatatatatatccactacctatatatacctaccgatatgtgaatgcgaggagtactattacctgcatgttttcagcagtatgcagctacgtacatatatatgtaccggatcgcctaacgacgtgaatgtaataagcaataatattttctaccgcttttttttatttctttctaacctcgagcttctatatgtagcaacaacattttctacgtacatatatatgtgccacccgtattccgactgatatacctatcactagtacaaaagaga

SEQ ID NO: 147543 - DNA, 1122 bp, Zea Mays
agcgaagccatccatccatccatagatccctcacctcactcactcgtgaagaaccagagaacccacccaccctccttcatctcctacatccacatctatccaagaaggtccgttctctcctccccgctcccctcagcaataatctccgcacggcaacctcgctcctccgttttggttttcctctgtgccatgggcgacgccgtggagcacctcaagagcgggttccagaagttcaagaccgaggtgtatgacaagaagccggagctgttcgagcctctcaaggccggtcaggcccccaagtacatggtgttcgcctgctccgactcccgcgtgtgcccgtcggtgaccctgggcctgcagcccggcgaggccttcaccgtgcgcaacatcgccgccatggtcccggcctacgacaagaccaagtacaccggcatcgggtccgccatcgagtacgccgtgtgcgccctcaaggtggaggtcctcgtggtcatcggccacagctgctgcggtggcatccgggcgctgctctccctccaggacggtgcacccgacaacttccacttcgtcgagaactgggtcaagatcggcttccctgccaaggtcaaggtgaagaaagagcacgcctccgtgcccttcgatgaccagtgctccatcctggagaaggaggccgtgaacgtgtccctggagaacctcaagacctaccccttcgtccaggaagggctggccaaggggaccctcaagctggtcggcgcccactacgacttcgtgtccgggaacttcctcgtatgggaaacttagccacacccgccgctcagcgcgcggcttcgtcgtcacaactcctatatcttcataaatatatatatccactacctatatatacctaccgatatgtgaatgcgaggagtactattacctgcatgttttcagcagtatgcagctacgtacatatatatgtaccggatcgcctaacgacgtgaatgtaataagcaataatattttctaccgcttttttttatttctttctaacctcgagcttctatatgtagcaacaacattttctacgtacatatatatgtgccacccgtattccgactgatatacctatcactagtacaaaagaga

SEQ ID NO: 147544 - DNA, 714 bp, Zea Mays
gccatccatccatccatagatccctcacctcactcactcgtgaagaaccagagaacccacccaccctccttcatctcctacatccacatctatccaagaaggccatgggcgacgccgtggagcacctcaagagcgggttccagaagttcaagaccgaggtgtatgacaagaagccggagctgttcgagcctctcaaggccggtcaggcccccaagtacatggtgttcgcctgctccgactcccgcgtgtgcccgtcggtgaccctgggcctgcagcccggcgaggccttcaccgtgcgcaacatcgccgccatggtcccggcctacgacaagacttcgtgtccgggaacttcctcgtatgggaaacttagccacacccgccgctcagcgcgcggcttcgtcgtcacaactcctatatcttcataaatatatatatccactacctatatatacctaccgatatgtgaatgcgaggagtactattacctgcatgttttcagcagtatgcagctacgtacatatatatgtaccggatcgcctaacgacgtgaatgtaataagcaataatattttctaccgcttttttttatttctttctaacctcgagcttctatatgtagcaacaacattttctacgtacatatatatgtgccacccgtattccgactgatatacctatcactagtacaaaagagatctaagctaccagtacgcac

SEQ ID NO: 147545 - DNA, 441 bp, Zea Mays
atgaatagtaggtcacagccaacggaagaggcacaccaatattcgagtaaccgggccggattgggccgtatagttgggctgcgtcttgtaaaggattaccttttgcgtcggcctgcctataaaaagaagcggatgacttcacctccgggcatgatgaatgagaataacaaagttccaacccctacattcttcttctacctctgccatcctctctgtatttttcccagctcctatcttctcttcgtcgtagtgctgcccttcagcgaggtgctggactggagcaccttctcggtggtgctcgccgagagaagggcataccggcggacctcaagaacttcctgtggcacgccgcacgccacgcccatcaagtacgacttcttccacatgatcctgcactccatctggttgagtagagcgaaccaggtcgagctcgacggctga

SEQ ID NO: 147546 - DNA, 1635 bp, Zea Mays
tacttcggcaacccgctgtcccatgcgctcacatggaatggaagctcccgcacgaactcgaaccaccttcgcctcgccacctcttcctcttccccagtagccgccgtcacccacccactgcggcagccaaaccacgtgaggccttccacccagctcaagcccacagcatccactgacactgccaccgccgctcacctccccggcgttcccggctccaccaactactgcaagcatgaggcagcccaccagcgcgggcggcgacgctgggttcgtgcgcgcggaccagatcgacctcaagagcctggacgagcagctcgagcgccacctcggacgccgggcggagcggggagtcggcctaccctccgggacggggagccgcggcggcgagtccgcgaggctgggcccggaggagctgacgccgctgcggcggtgccgtgaagactgggagatcgaccccaccaagctcgttatcaagggcgtcatcgcgcgcggcacctttggcaccgtccaccgcggcgtctacgacggccaggacgtcgctgtaaaattgcttgactggggtgaggatggtcatagatcagaacaagaaattgctgcactgcgagcagcttttgcacaagaagttgttgtctggcataagcttgaacatccgaacgttactaagtttattggtgctataatgggtgcaagagatttaaatatacagacagaacatggacatcttggcatgcccagtaatatttgctgcgttgttgttgagtacctccctggaggtgcactgaaaagttttctgataaagaacaggagaaggaagcttgcctttaaagttgtggtccaaatagctcttgacattgccaggggattatgctatctccactcagagaagatagtgcatcgtgatgtcaagactgaaaatatgcttctggacaaaacgagaactgtaaaaattgctgattttggtgttgcccgagttgaggcttcaaaccctagcgatatgacgggcgaaacagggacacttggttacatggctccagaggttctcaacggccatgcttacaacaggaagtgtgacgtgtacagctttgggatctgcctgtgggaggtatactgctgtgacatgccgtaccccgaccttagcttttctgaagtcacctctgccgtggttcgccagaacctgaggcctgagataccgcgctgctgcccgagctcgctagcgaacgtgatgaagcgatgctgggacgcgaacccggacaagcgtcccgagatggcggaggtggtgtccatgctggaggtgatcgacacgtccaagggtggcggcatgatccccaaggaccagacgcagggctggctctcgtgtttccgccggtaccgaggcccctaacgcagagttgcttttacccggcgaaatgatgatattggtctccacgactcagtgtaatctaatcgcagaactggctataattgagagttttctcgttgtcctgggcgtaaatgcatggatgggccggcagttgacgattgatgtccgttcaaatgcttgctgtaagttaattcaggtgtagagggagttgctgtggccgtttgctcacatcgtttaatttcatggccgtgacgtgaagcaggtcatttttagaa

SEQ ID NO: 147547 - DNA, 1626 bp, Zea Mays
tacttcggcaacccgctgtcccatgcgctcacatggaatggaagctcccgcacgaactcgaaccaccttcgcctcgccacctcttcctcttccccagtagccgccgtcacccacccactgcggcagccaaaccacgtgaggccttccacccagctcaagcccacagcatccactgacactgccaccgccgctcacctccccggcgttcccggctccaccaactactgcaagcatgaggcagcccaccagcgcgggcggcgacgctgggttcgtgcgcgcggaccagatcgacctcaagagcctggacgagcagctcgagcgccacctcggacgccgggcggagcggggagtcggcctaccctccgggacggggagccgcggcggcgagtccgcgaggctgggcccggaggagctgacgccgctgcggcggtgccgtgaagactgggagatcgaccccaccaagctcgttatcaagggcgtcatcgcgcgcggcacctttggcaccgtccaccgcggcgtctacgacggccaggacgtcgctgtaaaattgcttgactggggtgaggatggtcatagatcagaacaagaaattgctgcactgcgagcagcttttgcacaagaagttgttgtctggcataagcttgaacatccgaacgttactaagtttattggtgctataatgggtgcaagagatttaaatatacagacagaacatggacatcttggcatgcccagtaatatttgctgcgttgttgttgagtacctccctggaggtgcactgaaaagttttctgataaagaacaggagaaggaagcttgcctttaaagttgtggtccaaatagctcttgacattgccaggggattatgctatctccactcagagaagatagtgcatcgtgatgtcaagactgaaaatatgcttctggacaaaacgagaactgtaaaaattgctgattttggtgttgcccgagttgaggcttcaaaccctagcgatatgacgggcgaaacagggacacttggttacatggctccagaggaagtgtgacgtgtacagctttgggatctgcctgtgggaggtatactgctgtgacatgccgtaccccgaccttagcttttctgaagtcacctctgccgtggttcgccagaacctgaggcctgagataccgcgctgctgcccgagctcgctagcgaacgtgatgaagcgatgctgggacgcgaacccggacaagcgtcccgagatggcggaggtggtgtccatgctggaggtgatcgacacgtccaagggtggcggcatgatccccaaggaccagacgcagggctggctctcgtgtttccgccggtaccgaggcccctaacgcagagttgcttttacccggcgaaatgatgatattggtctccacgactcagtgtaatctaatcgcagaactggctataattgagagttttctcgttgtcctgggcgtaaatgcatggatgggccggcagttgacgattgatgtccgttcaaatgcttgctgtaagttaattcaggtgtagagggagttgctgtggccgtttgctcacatcgtttaatttcatggccgtgacgtgaagcaggtcatttttagaaaaaaaatatgtattaat

SEQ ID NO: 147548 - DNA, 1884 bp, Zea Mays
gctgtgctggacagctggagcaccaactctcatcaaaccgactccgcacacgttgacgaatcggggtctccctttcgtgcttagtgcaagcgaattcaatcctcagattctacgcaaaaaaagcttaatcggagagccacggagatcagatcatcagctccgcagacgcgcaaatggcatcgccaacgaatagagcgcttgaacggtacaagagcgccatcacggccgccacgtccgtggtgggcgcggccatgctgctgcgtcggctcgtcgctggcgtcctcccagccggcacgccgccgctggtgggcgcgctgctcctcctgccgccgccctccgcccggcgccacgccgtggtgatcgaggagttcgacggcgccttctacaaccgggtcttcctagcggtcagggcgtacgtctccacgctcctcgccgcggcgccgaccggcgcgccacccgtggtcaaggccagcctgccgcgcggcgccggcgccggcgcggagcagatcaggctcgccatgggccccggcacggccgtcgtggacgtgttccgcggcgccgagctcacgtggcgcctgaggagtcacggtcacggcggcggcgcgggcgaggcgttcaggctcagcttcgacgggcagcacagggacctggcgctcggcgcctacctgccgttcgtcatggcccgcttcgaggccatggcgcgggaccggaggcaggccaagctctacagcaacgagtgggggaagtggcggtccgtcaggctccgcaacgcctccacgttcgcgacgctggccatggacgcggcgctgcggcaggacgtgctggacgacctgggcaggttcctgggccagaaggagtactacgagcgcacggggtgggcgtggaagagaggctacctcatccacgggccgccggggaccggcaagtccagtctcgtggccgccatgtccaaccacctccacttcgacgtgtatgacctcgacctcggcgccgtccggtcgaacaccgagctgaggaaactgctgattcggatgaagagcaggtccatactgctgatcgaagatgtcgactgcgcgtcggtgacagcgcagagcagagaagccgatgcgagcaacccggctcccaagcatcaaaaggtcaccctgtccgggctgctcagcatggtggacgggctctggtccagcagcgggcacgagcgcatcctcgtcttcaccaccaaccacatggaccggctcgacccggcgctgatccggccgggccggatggacaagcgcatccacatgggctactgcggtttcggcgccttcaaggagctcgcggccatctaccacggcgtcgacgcccaccgcctgttcccggagattgaagcgttgctgcgggaggtggacgtggcgcccgcggagctcgcggaaaagctgcttgcgacggacgacgccgacgccgcgctcgagacggccgcgaagctgctgagggatagggaggcggggatcgaggaggatggcggcgggtacgtcaaacagaagctgcacgtggggccgacccgggcccgaccccgcccgcggccagtgccggcgccggcgcggggtgtgagtgctgcgcgacaggtggtgtttggcgaggaaatcgtgctgggcatctcgcggcgacaggggcacgggtctgggcggcgcggtgccggtcaaggtggaagtggaatgcgcggactgggaaggggacggcgataggcctcggccacggccagtcgggctagctgccagtgccaactgccaagtccaagaaaaacattaggatgcttatgctttgtctcgtgagtgagttactaccatgccagcataactttttttttgtatggataaataacataggcacctttcattaggcccc

SEQ ID NO: 147549 - DNA, 255 bp, Zea Mays
tttcttttctttttgtagttttataatttattttattctctgttttaaattattcaaattcaggttgagttttgaactccaaattaaatgcacagtcaaagaagagctcaacatgcaatgcaagatttattttattttatatatcatttatgtactttgtcaaatgcctcgaatatataatattcacatattattccctttaggtaagtattatcttgaacgtgtgataaaatcaaaagttaatttaaaataaat

SEQ ID NO: 147550 - DNA, 1299 bp, Zea Mays
tcttctcccctgtctgcttctgtggactgtggatgtgctcactgcttagtttggtgggttctgctcaccaatctcgctcgcagtatacgaagcctccatagtccatcatcctactgcactcggagaccacggacttggaataccaccctcgcccacagtcccacaccaggaaccatgaggaccatcatggcgaagagcccccacgactcctccttctcccggaggaacttcaagtggccggttcttgtcaagagcagcagccatggcgccgcagccggcggcggggaggacagctccggcaagggcgcggaggacgccgacgaggacgaggcgaccatggcgttctcctccagctgcccgtcgttccactcggaggacttcgtatccccgccgcccaatcccaaggcgccacctccaccgaagcagcggggcaagaggtgccgcgcggcggtctcccggctgcgcgcggcgcttgccgcggccatcgccggacggcaccgacaggtcgggctcggagcgcggatcacgggcacgctctacggccgccgccgcggccacgtgcacctcgcgttccaggtggacccgcgcgcgtgccccgcgctgctgctcgagctcgccgcgcccacggcgtcgctggtgcgcgagatggcctcgggcctcgtccgcatcgcgctagagtgcgaccgcgccaagggcgcctgcgccttcccgagcgccgcggccgcaaccaatggcggcgccggtgggtgcaggaagctggtcgaggagaaggcgtggcgcgcgtactgcaacggcaagggctgcgggtacgcggtgcggcgcgagtgcggtgccgcagacctgcgcgtgctgcgcgcgctggagcccgtctctatgggcgcgggcgtcataccggcggcgtgcggtggcggcgagggggacgtcatgtacatgcgcgctcgctttgagcgcgtcgtgggctcccgcgactcggaggcattctacatgatgaaccctgacagcagcaccggcggcaatggcggcccggagcttagcatctacctccttagagtttgattgcacatttaacttcgcggcgcatgcgtcagacaccgtgatcttgcatgctaacctgctgtctttctagtacatttgatttcttcgtgcttattattgctctggtggttgtgaaaaatgcttgtcagtttagactgcagaacgaaacttattggcagacttccttttctgggcagtgtgggcttctggctggatttcccatatattgtgaatttgtgctgttggtcaatcatctctcctctg

SEQ ID NO: 147551 - DNA, 1107 bp, Zea Mays
atgcccagtgtggacgatgatgatgactttgagccccccaaaaaaagactcaacattagatgcaacccacaagatgttcttacgtccattcagataatgaatgaaagacaatgtcaagttatagtcagtaaagttttctccaacattcttgacacggcgattgatgcaattggatgtcagacacatctttgttggctcatgcagaagctagaccccaaagacatgactctttgtattggtccagacaaagaactgaaaatcaccaaggagactgttcgtctaatattgagtcttccaaattcgggtggtgggaagacactaaattttgatgaagcgaatgtcgctgcaaaccttcagtcctccctgggcattaacaatgatgagtttttgtattatttggaccacctgcaccacgccacagcacccaacaataaaagtggcactccacgcatcaagtattttaacaagaatatcataagggcattgtcaatggctgataagcgtaacccgcgacagtttcggagcagcaatgagacttgttacgtcacaaaatctgcatttattggtcagtttgagtctacgctaaggccagaatcaattgaggcagacccaaatgaacatggtggacttcccaatacatacatccaactgcctcttatccaagacctgatatcaactaagatccagcggctccatgtcgcccgtagccaagaccttgatcctgtccaatatgggcaggaactctggcgagaggggtggcttggtcctccattgcttgcggtcgagggctggcccattgctcggcaggatgaggcggtcgttggcctcggtgctggcaatcacccagtcgttgcgctagttttcccacctcgcaccaccaaaggtggggatgtagactacggtcggatctggcctcgtcttaaagtagtaggcaccgatgtggtccctagtcttcccggacctgaccaacacgaagaaatagaggaagagggaagtgcaagtggccacacctacaaacatctcgcagaggtggacgaagatcgctgcctggaggatggagtggggcgtgtgatgttgaagctgaagcccgaactcctccagcagtag

SEQ ID NO: 147552 - DNA, 856 bp, Zea Mays
ctctccagccactcattccttacaccttgtcccactgcctttgtccgaaagctcaactattgggaagggtcaagaaaagcgaggaagcaacgagccaccttctccaactaacataaccagagcattctaccgtccgtcgtagcagcgatgatggctgtgacgtctctgcagttgcgcccaacccctcgtctccttccggcgagaaatagctccacgggcactgggccgcggatggccgccttgagctgcagacacaaccagtccaccaatgtccaaggacgaacagggctcagaagccacgtaacgacgcgcagagacgccctgtcattcgtgtcatccgcgctgctggcagcgttgttcgtggtggccggtgcagcagaagctagaacttcgaggttggagaacaaaaagaaagccctggagaagctccgggagaaggcgttgggccgaaaggaggagaacggagccaccggtggcaagaagatgccgcctccgacgaacttgctaatccgataatccctcgtccggccgtcgtggctaaaggcactttgccgaggggccctttgtgttgatggcgatgctaatgtgagtttgtacgttgttggagtcttgtatgactgccaactggaatctgagttttcagtctacattttcttaagcattgctgtactgtttgttcatcaggttatatgcctgaaaatccaattgttagaactgcatcttatatctaccattaggtttattagaacatcctccgtccttctcgcttgagagcaatcggaccattggtggcttcttcgcaaatcgacatgtggcgatgcatatttttcaaaaaaataaaaaagatctacactct

SEQ ID NO: 147553 - DNA, 984 bp, Zea Mays
gtagacgacgtgcatgtgtggccggccaatttacgcgccgccacatgctctgctcgcccatcgctttcgagctttgtgtaaatggactagagcggaaggcatagcatgcataggaataggagcaactaaccaccggcctctcgctccctcgctgcgccataaggctgcgactgcgagagccagccgcacccgcaccagtccataggccggcctcctctcttaccttcccacaccccttctcgaccgtacgtagcctagttgtgcttggtagccagccagaaggtcgtcggccgatgatgggaggaagaacagtggccccgccgctcgtcctcgcgctggtgaccatcatcgccatcgcggcggccgagggggacgaggtgaagtgtggcgggtgctctccgtgcggcggcgccgactgcccggtgctgtacccgtcgccgcccccgccgccgtactactactacagccctcccccacccgcgacctaccccggggagtcctcgtcatactaccagccgccgccgccgggcgcgtacatccagatcgggagcgcgccgccgggcaagggcccgctgtacccgcaggacccagggttcatcccggccggcgcgccgggccgcgccgcgccgctcgcggtcgtcgctgcgctcgcgccggcgttggcgtgcgcatgggccttattgtgatctctatgtgcttgacttgacaagcgcaggcgagctgcttattcgtcggtaagtaacgcggcggatcgtgccggcgttccacgtacgtacgggttaattcccccagtgtatctacgcatgctccttgtgatatatataataatcttcattggccgtcatttgggctaagctgcagtagttcttggaatgtatgaatgtttttcattggccgtcatctgctagtgtaatagtgatatttttctatgtgtaatctctcaggaaacataaagaaaagtacgtaaggttcttcttctcacta

SEQ ID NO: 147554 - DNA, 2203 bp, Zea Mays
cctgctttcactccattcgcgtctcggggtttggaccagccacccggcggcggcgggcaaacacagacagggccgcagggccgagcgaccggagcgccgccgccaccggcaaagccacggcacggcacccatggagtcgcgcgccctcctgcacgcccggcctgccgccctccctgcccgcgccggcctgcgcctccctccccagctcccgcgcccgcgggcagtctccttctcccccgccgccaagcccgcgctccggtccccgctcctcgcgtcgaggggccccttcctcccgcggcacgacgcgcttctggggaacgggttcctgaagcagagagcggtcagcgttggcggtgacgtgtccttccgcgcccaggcggcggcggcggcggtgccggcgccgcagccggaggagtccgctaaaaagttcctcggcatcgacgtgaagacgctcaggaagatcgtgccgctggggctcatgttcttctgcatcctcttcaactacaccatcctgcgggacaccaaggacgtgctggtggtcaccgccaaggggagcagcgccgagatcatccctttcctcaagacctgggttaacctgcccatggccatcggattcatgctcctctacaccaagctttcaaacgttctctcgcgggaggcgctcttctacaccgtcatcttcccgttcatcgccttcttcggcgccttcgcctttgtgctctacccgctcaggaacgtcatccatcccaccgcgctcgcggacaagctgctcgccgcgctcggcccgagcttccttgggcccgtggcgatactgaggatttggagcttctgcctgttctatgttatggctgagctctggggcagcgtcgtcatctccgtgctcttctgggggttcgctaatcagattaccacagttgatgaagctaaggaattctacccgttatttggccttggggctaatattgcccttatcttttctgggcgcactgtgaagtatttctcaaatttgcgcaagacattgggtcctggaattgatggctgggaagtatctttgaaaggaatgatgagcatagtcgtacttcttggacttgtcataacttccatctattggggagtaaacaaatttgttttgaatgatccttcacttccaaagtctgatcgtaagaagaaaaaggaaaagcctaaacttggcatgaaagagagtctgaaggttctgctctcctcgaggtatgtgagggatctagctaccctagtggttgcttatggcattagtatcaatcttgtcgaagtcacatggaaatcaaaactcaaggcacagttccctagtccaaatgaatactcatctttcatgggtgatttctcaaccgcaactggaattgcaactttcacgatgatgctgttaggacgtattatactacggaaatttggctggggtgtggccgcaatgatcacccccaccgttctgttgctaactggtgttggattcttctctctgattttgtttggacagccgctgactcctatgcttgccactatgggtatgacccccctactggcagccgtttatgtgggcgccatgcagaatatatttagcaagagtgcaaagtacagtttatttgacccatgcaaggagatggcttatattcctttggatgaagatatgaaggtaaaaggaaaggcagccattgatgttgtttgcaacccactgggcaagtccggcggtgcacttatccaacaattcatgatcctgacgttcggatccctggcgaattcaactccataccttgggggcatactgctggtcatcgttctcgcgtggctaggcgcggcgagctcattggacaagcagttctcgagcttggctaaggaggacctgaagaaggataaggctgcccgagagaaagtagaaccctcgctgctcaaggcgcctgcagagggcagtgatgatgtactggcggagcagacaaatggatctgtgacgccccaagcaaccggaacggagagctcgccgtcgaactcatcccccattcaataatagctccagcatcataagttgtactagctaggagagttattacagcgagcagaaataattggtactccctccggttttttttatatatttggcgttggttagtgtaagggggtgtttggtttctagggactaatgtttagtccctagattttattccattttagttcc

SEQ ID NO: 147555 - DNA, 121 bp, Zea Mays
gtttggtggaaagatatgttacttcgattgccatagatgttttttgccagaggatcacccgttcaggttcgataggaacgcttttaaaaaggacacgattgtgacgaggggaccacccaag

SEQ ID NO: 147556 - DNA, 1567 bp, Zea Mays
ggaataccacaagaacatgtgagtgacatgtcacacttgtgatgtatgtaagggaagtacaaagcatatatattgttcaggcaatcatcagttcagatccgaagtacagatagatctaacccagtgtttattgcttacataatctagcctgcatgatctccggggacgacaatccggggacgacaaccacactctggctcataataattaagctacccgaaatacatatatatatatatatatatatatatatatatatatatatatatataatatacctacttacccatgcaggagtagaaattgaacaaccaaattattagcttgaagcagcggcacgtactctattctggagtaatagtacgtatgtaggtagcactactacgtcatgctcttcgccggtttgcctatatattggcctatacgtactctcgcagcatatctcaatcagaactcagaacacaggtcaagttcaccagaacgcggcgggttctcgatcaggcagcaggagcgcagtcgtagtcgtcgtcgtcatcgtcgccgtcggtctctgccatccttccccgtgcgctgcagcacccatcgcaaggcgcggcgtaaaccgcacccgaggaggaggtaatgctgccgccttggacgaggtagtagctagccgccgccaccgacactactgctggtgccatcctagttagtttaagactttaagtgtgcgagcgaattgcaagctgacagcgggaagaagcaaagctctcgcttggtcagttggtccaagatagctagctctagaggagtctagctaggtagtggaagctgctatactgtggctgatggaagctgtggacgcggtatgctggtgcaagctacctgtgtgggtgttcctggtgtctggtgtctggtccgatttgcacggagagggagtggccgcgtgtggtccgggctttatagcgcaccgccggcgcgggcagcgtggctgcacgcggcgcggcgccgctgggagcgtgcgtcggctagggcgttgcgtgcatggcgccccgcggcacggggctccgccgctccgggcgagcacagtcagcaatcggcagccgcgcggcccccgctcccccagccacgcgccgctggcgggtgggcgccgggggccctatggcagtgcccgcagcagcctcgcgctcttgtgccgccgagcgtgcgccgcgacgtggacatgctggaatcgcagtcctcgcgcctccgcggtacggtggggtcttggactcttgggagcgaggccggaccacagcccttctttgcgacgctgatgcagcagaaaagcagagggaaggtagtggcggcccagaggccagagggccggtctctttccggtggcatcttgacgaggaagatgatatctggtgatcttcttgagatttattcgacagcaaagtgggattcgcgacgctgcaggttatctgggcgaggcgtaatgggcgcatgcgccaccagagcagtggagtggcatggtttaggagaggcggagtctgggagaactatgctatacattgacctatattttttttaaaaaaaaagctat

SEQ ID NO: 147557 - DNA, 2664 bp, Zea Mays
atggcagggtgcgcaccctccagggtggcgtcgtgcgggccgtggggcggcagagcggcgctagagagtgagctgtcgtgggacggcagccactacagcatctccagcggcatcctgccgtcgctcggcgcgcggagcaaccgccgcgtcaagctcaggcccttcatcgtgtcgccctacgaccgccgatacagatgctgggagacttttctcataatccttgtggtatactctgcatgggtttccccatttgagtttggcttcattcagaaaccaacgggcgccctagctgcagtggacaatgtcgtgaatgcgttcttcgcagtggacatcatcctgaccttctttgtagcttacttggatagaatgacatacttgcttgaagatgatccaaaaagaatagcttggaggtatactaccagttggtttgttcttgacgtggcctccaccatcccgagtgaatttgctcggaagatactaccaccagacctcaggtcatatggatttttcaacatgcttcgtctatggcgtctccgtagagtcagctctctctttgctagattggagaaagatagacatttcaattacttctgggttcgatgcgcaaagctcatatgtgtcacactttttgcggtccactgttcggcatgcttctactatcttctcgctgatatgtatcctaccccaacagatacgtggattggtaattcaatgccagattttcatcagcggggtttgtggattcgctatgtagtgtcagtatattggtcaatcactacgcttaccactgtgggttatggtgatttgcacgcggagaacacaagggaaatgatattcaacattttctacatgttattcaaccttggattgactgcctatttgattggtaacatgaccaatctggttgtccatggcaccagccgtactcgaaaatatagagatacaattcaggcagcgaccagctttgcactaaggaatcaattaccaagtcggctccaagatcagatgatctcacatctttgcttgaagttcaggacagattcagaaggtcttcaacaacaagaaacgctcgatgtcctccctaaggctataagatccagcatttctcagtatctatttttcaatcttgtccaaaaggtttacttgtttgaaggggtgtccaatgacctcatttttcaactggtttctgagatgaaagctgaatattttccacctagggaagacgtgattttgcagaatgaagcacccacagacttttatattttagttactggtagcgcggagttgatagagttgcaaaatggcggagaacagatggttggagtggctaaggcaggagatgttgttggagaaattggggttctttgctataggcctcaactattcacagttcgaacaaaatcattatgccaacttctgcgtatgaatcgcactgcctttctcagccttgttcaatccaatgttgcagatggaacaataataatgaacaaccttattcggttattaaagcagcagaatgacaacagtgtaatgatgggtgttctgaaggagatcgagaacatgctagctcggggtcgtctggatttgccagttactctctgttttgcagtaaacaaaggagatgattttatgctacaccaacttttgaagcgtggtttggatccaaatgaatcggataacaatgggcatacagcactgcatatagctgcttccaaaggagacgaacaatgtgtcaagcttcttctagagcacggagctgatccaaatgctagagactccgaaggaaaggtgcctctttgggaggctttatgtgaaaagcagaatccagtggtagagctgctagtacagagcggtgcggggctatcatccggagacgtggccttgtacgcttgcgtcgctgtagaggaaaatgaccctgagctgcttgagaacattatccgttacggcggcaacgtaaacagctcaatgaaagacggaaccacgccgctgcaccgcgcggtctgtgacgggaacgtccagatggttgagttgttgctggaacacggagctgacatcgacaagcaggacaacaatggctggtcggcgagagctctagctgaccagcaaggccatgacgacatccagtctctctttcgatcgcggaaagcacataggcagcagcatgcctcgaagggcagagtggcacctgtgccgatatggaggttcaacagcgaacccacgatgccaaagatgaaacatgaagaagacgctgagctacgcggcaaagttgttccgcagaagctcctcagaaagagggtcagcttccagaattctcttttcggtgtcatctcttcgtcccacgcccgccaggacactggtcgtctgctctcgaaaggccttgctggaacaggtagtccaggttgcagccacggctccctcgtcagggtgacaatcggctgtcctgagaaggggaacgctgcagggaagctcgtgctcttaccacggtcgatgactgagcttctcgaactaggcgcgaggaagtttggcttcaagcctaccaaggtcctgacgactgggggtgctgagattgatgaggtggagcttatcagagacggtgatcatgttgttctcgtcagtgatgactgggcgccagatgttgcacaattaagaccgaacgacaagtga

SEQ ID NO: 147558 - DNA, 364 bp, Zea Mays
tgagtggtatcaaaaagatctattactaaaaggagattgggatcatcctgtggttaccggatgatgggaataactaagcagaaattaggaaatgagcacgaaatgtctataaatgaattttctcattatttgttattttcgggtcttttcgttgcattcacttacaacaagaaacaaccaccagtgtttggtgcagcacctgcattttggtgcattcttctttctttccttggtctttcgttcctgcaaatagcggatcaactctcttcgaaggatagatccgatgagtatgtgaattggttcgtggatcgtagtcaaacaagtctttatgccaatgggaaaacggaattgtccataagaaagg

SEQ ID NO: 147559 - DNA, 1182 bp, Zea Mays
acccctcaacagaaagcaaaagagaaacgtcacttctcctcgtataaaagcatccgcctcaacccacctcagcggactgctccaccagttgcagagtccagagtccagacgccagacgccctctacttctcttctctctagttatacatttcaaactcttggccgccgcagcggtctctgttcgccgcgccccgccgcagaaatggcgctgccgaatcagcaggttgtggattaccccagcttcaagctcgtcatcgttggcgacggtggaactggcaaaaccacatttgtgaagaggcatcttactggcgagtttgagaagaaatatgagcccaccattggtgttgaagttcaccctctggattttagcactaactgtggcaaaattcgcttctattgctgggacactgctgggcaagaaaagttcggtggcctcagggatggctactacattcatggtcagtgtgccatcattatgtttgatgtcacttcgaggctgacatacaagaatgttccaacatggcacagggacctgtgcagggtgtgtgagaacatccccatcgttctctgcggaaacaaggttgatgtaaagaacaggcaggtcaaagccaagcaagttacattccacaggaagaagaacttgcagtactatgagatttctgccaagagcaattacaactttgagaagcccttcctttacctcgcaaggaagctggcaggggatcagaaccttcactttgtcgaagccgttgctctgaagccaccggaagtgcagattgatatggccatgcagcagcagcatgaagctgagcttgcagctgccgctgcgcaacccctccctgatgacgatgatgacctgatcgaatagatgttccatggcccttgttgatgcgagggggagagcttttattacaaatccgtggtggttcagttcttgtcaggcctagccgtacgtgatttttctgttatgtaacctgctgttgacgagggtttttggtgatccttgattttggtaatacatcgctattgtcaggcagcatgtttcagagcttgattgtgcatgtttattggtttaattgctatcgattgatttgaagcggggcttgttttaatggggacgattaattccccgttggcgggttgaaccagttgaacgaaatcatgaaagcatgcttccactcc

SEQ ID NO: 147560 - DNA, 1010 bp, Zea Mays
gaaacgtcacttctcctcgtataaaagcatccgcctcaacccacctcagcggactgctccaccagttgcagagtccagagtccagacgccagacgccctctacttctcttctctctagttatacatttcaaactcttggccgccgcagcggtctctgttcgccgcgccccgccgcagaaatggcgctgccgaatcagcaggttgtggattaccccagcttcaagctcgtcatcgttggcgacggtggaactggcaaaaccacatttgtgaagaggcatcttactggcgagtttgagaagaaatatgagcccaccattggtgttgaagttcaccctctggattttagcactaactgtggcaaaattcgcttctattgctgggacactgctgggcaagaaaagttcggtggcctcagggatggctactacattcatggtcagtgtgccatcattatgtttgatgtcacttcgaggctgacatacaagaatgttccaacatggcacagggacctgtgcagggtgtgtgagaacatccccatcgttctctgcggaaacaaggttgatgtaaagaacaggcaggtcaaagccaagcaagttacattccacaggaagaagaacttgcagtactatgagatttctgccaagagcaattacaactttgagaagcccttcctttacctcgcaaggaagctggcaggggatcagaaccttcactttgtcgaagccgttgctctgaagccaccggaagtgcagattgatatggccatgcagcagcatgaagctgagcttgcagctgccgctgcgcaacccctccctgatgacgatgatgacctgatcgaatagatgttccatggcccttgttgatgcgagggggagagcttttattacaaatccgtggtggttcagttcttgtcaggcctagccgtacgtgatttttctgttatgtaacctgctgttgacgagggtttttggtgatccttgattttggtaatacatcgctattgtcaggca

SEQ ID NO: 147561 - DNA, 1644 bp, Zea Mays
cgaatcgccttctcccagatctccagactccagatctctgctcctgcccccgcctgcctcttgccagcgacaaccccgccgcagcacgcggcggccgcggggagatgctccgcctacgggcgttccggccgacgagcgacaaagtcgtgaagatccagctccaccccactcacccctggctcgtcaccgcggacgccaacgaccgcgtctctgtctggaactgggagcaccgccaggtgatctatgagctgaaggcaggtggcgttgatgagcgtcgcttggttggagcgaagcttgagaaactcgctgagggagatgattcaaaaggaaagcccaccgaggctattcgagggggaagtgtaaagcaggtttccttttatgatgatgatgttcgcttttggcaacattggcgcaattgttctgctgctgctgaggccccaactgcagtcaatcagcaatcttccatgttcagtgcacctgcaccttcgacacgaggaagacactttgttgtcatttgttgtgagaacaaagtcatatttttggatttggtgactatgcggggccgcgatgttcctaagcaggagcttgacaataggtcacttctttgtatggagttcctatctagatcatcttctagcgatgctcctcttgttgcctttgggtcatctgatggcgtcatcagagttctttcgatgttgacatggaagcttgtgcggaggtatacaggtggacataaaggagcaatagcttgcttaatgacatacatgtctgcagctggtgaggtacatttagtttctggtggcaatgatggcctgctgatattatggagtgctgatcatatccatgactcacgcgagcttgtgcctaagattagcatgaaggcccatgatggaggtgtagttgcagttgaactttcaagggtgatggggagtgctccacagctcattacaataggggctgataaaactttagccatatgggatactgttactttcaaggaaataaggcgcattaagccagtgcctaaacttgcttgtcatagtgttgcatcgtggtgtcatccccgtgcaccaaaccttgatattctaacttgtgtcaaggactcccatatttgggccatagaacacccaacttattctgctttaacaagaccgctctgcgaactgtcatcacttgttcctccacaggttcttgcacagcataagaaactgagggtttactgcatggtggcacaccccttgcagccacatcttgttgctactggaactaatattggtgtcatattaagcgagtttgatccaagagcacttccagctattgctcctttaccaacaccaacaggcagcaaggaacattctgctgtttacatagttgaaagagaacttaagttactgaatttccaattgtcgaacacagcaaatccatcccttgggaatgctggtgttgcatctgatgcaggaagatcaaggaatgattcattggaacaactgatagtaaaccagagcaagaagcatatcagcactcctgctcctcacgattcctattcggtcctttctgtcagcagttctgggaagtaagtgatatgcatgctgtcttgtactctacgccctccgatcacaaatataagtccagtagaacatcgac

SEQ ID NO: 147562 - DNA, 549 bp, Zea Mays
aggtatgttgcaattgtatggccagatattccctcttttgctgtgtgcaaagcaagtgattggtcagttgttgattcaggcacagggaagctttttgcctgggacacctgtcgagacagatatgctttagtagagagtgcattggccccaagaatgccacttgttgtgaaaggtggttcttctaaaaaggcaaaagaagcagcagcagctgcagctcaagcagcagctgctgcagctagtgctgcttctgccgccacagtgcaagtgcgtatcttattagatgatggaacagcacatgttctgcagagatcgattgatggtcgtagtgaaccggttattggactgcatggtggtgctttacttggtgtcacataccgcacatctcgtagaatcagtcctttgacagcaacagctatatcaactgttcaatcgatgcccttatcaggttttggtggaagtggatcatcttttgcatccgatgatccgttttcttctaaggaagggcctccacaaaatttccaattgtacagctgggagacctatcagcct

SEQ ID NO: 147563 - DNA, 174 bp, Zea Mays
gagttagactcgcgtcatcatcattcttaccatgggtgtcgacatcaatcgcctcgacaacaaccacattcacgactccgccgttccaataattttgccgcatcgcccttcaaatctgagtcctcgtttgtaggatcatcgttgacctcgcaacttcagctcgagttaattatg

SEQ ID NO: 147564 - DNA, 1696 bp, Zea Mays
atggagacaataacgagtggtcagaagtacagagattgcagacaaggtcattatatgagccatcaaattgcgatgacagttgccacaaatccagtttcatatgaaggttgcatccaaggttattcaattggatcagttaaggttgatgatactgaagtcatcagttttttgctgcaaactgaaataattcctctgtgcttacgaaccatggagatgggtagtgagctatccaaaactgagtttggggatcaaggagaggactccaatatcttgtcatcgcggctgaaggagattagtactcctgaccgccccgctaccctccgtttcctaggtacacgcataacagccattgatatgtacacactcaaacaggaagttgatgtcataaggggtgttcttggaactcaaacatacttgcatcaaatgttatcttttgaagtacaagatacaggtatagaaccagttgtatcaggttggcatggaataaccactaacgccagtgtatttgcccagggtttggtaagcaatttgatcacagctggccatggacgcgaagcagcctttgctgctgcagttttgggagataatgctctaatggagaaagcatggcaggacacaggaatgttggctgaggctgttttacatgctcaagcccatggtcgtccatcattaaggaacttggttataacgtggaacaagatgctacagaaggaactggatcacacaccaactgtaaaaaccgatgcggccgcagcattcttggcttctcttgaggatccaaagctcacaagcttgggggaaactgagaaaaagcctcccattgaaatacttcctcccgggatgcctcccctatctgcacctccaatcgtgattaaaaagtctggaacaaaacctggcctccccaatgcagtaaaagcctcaaatgggcctataggtgctccgatggttcagggtgctcccatggctcaaggtactcctggggcacaaggaatccccatgaatcaagttactccatcacagggcagcgacgaggcaaagccattagaagctacagtggttgatgcagctcccaccacttcagaaggcactgcagctcccgcagctgcagaaggcacagcagctcccagcagtgaggaagctaaagcagcacctgggagtgagggaggcacatcgcatccaatcaacgaggaagccacagcagttgcagtttcagatgcaccaggcagccctgatgctgcggctgcggctgctcttgctcctgcagctgataccagtagctcggatgcacctgctgttactcccagtgaagtaaccgtctctcccccttcaaccgacgcacccgagttgaccgataagccatcaccaacagaggcatcgttgccgcctccacctagtgtttctggtgtatagaacatttcagattatttttgcagtgtgccatttttttttgtatgctgccgcgttcgttccactgtaatttttaacccatacatactggtataggcatttgctgccccatggttcaggtatcgcagacgccaggcagtatgtgagtagccctgtacatctgctgtctgcgtctcgcgagaacttgctgccattgtgtcagttgtgtgggcatagcttatgttgtttgtgatcaatccgtaggaccacagtttaattttttgcttgatcagctgcatcaccgatatca

SEQ ID NO: 147565 - DNA, 105 bp, Zea Mays
gtatgcccgcctctttccttcccctcctgctctacaaaaccttggaagtgggggaggcgagggatgtggtctctgatttgctgcctatggtacccgtgcgttcat

SEQ ID NO: 147566 - DNA, 1027 bp, Zea Mays
agcctaaaaacttgcccagagcgcctgaacctgcctccgctccactcttgccccccccctggcaccacactagcctagtgagtagtgcagcagtcttgctcggttgctcctacctgtcctgcacagcacaggagcagagcccaggaccgtcggcaaaaggggagcggccatgaagtacgtgctggtgaccggaggggtggtgagcggcctcggcaagggcgtgacggccagcagcatcggcgtcgtgctcaaggcctgcggcctccgcgtcaccaccatcaagatcgatccatacctcaacactgatgctggaaccatgtctccattcgagcatggagaggtgtttgttttggacgatggtggagaggtggatttggaccttggaaattatgagcgttttctggatatcaaattgacccgtgacaataatataaccacaggaaagatctatcaggctgtcattaacaaagaaaggagaggtgactacctaggaaaaaccgtccaggtagtgccacatattacagacgaaatacaagattggattgaacgcgtcgcagtgattccagtcgacggcaaagaaggacctcctgatgtttgtgtcattgaacttgggggcactataggggatatcgagtcaatgcctttcattgaagcattaggtcaattttcataccgtgttggacctggaaacttctgtctcgttcatgtcagtcttgttccggttataaatgtagtcggtgaacagaaaactaagcctacacaacatagtgttcgagggcttagaggacttgggctagcaccggatgttttagcatgtcgcagtactgagccactggaggaacatgtgaagatcaagctttcacaattttgtcatgttccgatctcaaatatagtgaacctccatgacgtgacaaacatttggcacatccccttgctgctaagggtagggtatttcttttcccatggagtgttcaccataaattcgaaactcaacttatttaaccatccacaatggaacttttttata

SEQ ID NO: 147567 - DNA, 2543 bp, Zea Mays
agcctaaaaacttgcccagagcgcctgaacctgcctccgctccactcttgccccccccctggcaccacactagcctagtgagtagtgcagcagtcttgctcggttgctcctacctgtcctgcacagcacaggagcagagcccaggaccgtcggcaaaaggggagcggccatgaagtacgtgctggtgaccggaggggtggtgagcggcctcggcaagggcgtgacggccagcagcatcggcgtcgtgctcaaggcctgcggcctccgcgtcaccaccatcaagatcgatccatacctcaacactgatgctggaaccatgtctccattcgagcatggagaggtgtttgttttggacgatggtggagaggtggatttggaccttggaaattatgagcgttttctggatatcaaattgacccgtgacaataatataaccacaggaaagatctatcaggctgtcattaacaaagaaaggagaggtgactacctaggaaaaaccgtccaggtagtgccacatattacagacgaaatacaagattggattgaacgcgtcgcagtgattccagtcgacggcaaagaaggacctcctgatgtttgtgtcattgaacttgggggcactatagggggcaaaatcttttcgccgaataacgccagtggcattcttggtgcaggggatatcgagtcaatgcctttcattgaagcattaggtcaattttcataccgtgttggacctggaaacttctgtctcgttcatgtcagtcttgttccggttataaatgtagtcggtgaacagaaaactaagcctacacaacatagtgttcgagggcttagaggacttgggctagcaccggatgttttagcatgtcgcagtactgagccactggaggaacatgtgaagatcaagctttcacaattttgtcatgttccgatctcaaatatagtgaacctccatgacgtgacaaacatttggcacatccccttgctgctaagggaccagaagacccatgaagctattctgaaagttttagatcttcagtatgatggaaaagtacctcgggaacctgagttagggatgtggactaaaagagccaccaagttggacaaattgaagacttcggtcaagattgccatggttggtaaatacactggcctgtcggactcctacctgtctgtcataaaggctcttttgcatgcatcagttgctatggaaagaaaacttgtagtcgagtgggttccttcctgcgatctggaagattcttcagctaaagagacccctgaagcccataaaaaagcatggaaattgctgaagggtgcagatggtgtactcgttcctggaggattcggagataggggagtccagggcaaaattcttgccgcaaaatatgcacgcgagaacaatgttccttatcttggcatttgcttgggaatgcaaattgcagtgattgagtttgcccgttcggtgatgaaactacgaggtgccaatagcacggaattcgatccagctacaacatcaccctgtgtcatcttcatgccagagggctcaaaaacccagatgggagctacaatgaggcttggatcgaggagaacctatttccatgtcagtggctgcaaatctgcaaagctgtatgccaatgccagctctgtagatgaaagacatcgccacagatacgaggtgaaccctgatatggtcccagacttcgagagggccgggcttcaattcgtgggcaaagatgaaagtggaaaacgcatgggggtaggcttggaaattttctcagatgttgtagacttagatgtactttctaggaacttaataagaaacgttcacaatcacctggtggtgttctgttggatgcagatcattgagcttccctctcacaagttcttcatcggtgcacaattccatcctgaattcaagtcgagaccaggaaaaccatctccgcttttcttagggctgatagccgcggcatctggacagctagagcctttgcttcaacgcagcaatccgacaacaaaagcatgtcctatgagtaaagtcccgaaactgaaactgtacccaactggacctgtgaataatccactgaacagcttggtaaatgggtactacccaaatggcactggcatccacacctagaagcataatgcttagcgatggtctatttgatgtttgttcctatggttttgcttgtacccctttttatgtttgtttttcagtttgtatttgtctctgatcaactgggaaggctaagattcagcaagccccagctccagcaacacatggttccgacattttaacgaggaacgtcctccggtccgttggagcaaactagctatagagtggtgaggtctagtgtgatttttttgagccctggaattaagcgcgggaagtgttttggtagcgttagtagagcctggaatctcaactatttgtacattatggaagaacttatctaaggactgaatacacaaatgcttggccatgatttgctttgttgccacaatattaacaaccacaatcagatgtagaaaaaaaaacctctaacaaa

SEQ ID NO: 147568 - DNA, 2393 bp, Zea Mays
agcctaaaaacttgcccagagcgcctgaacctgcctccgctccactcttgccccccccctggcaccacactagcctagtgagtagtgcagcagtcttgctcggttgctcctacctgtcctgcacagcacaggagcagagcccaggaccgtcggcaaaaggggagcggccatgaagtacgtgctggtgaccggaggggtggtgagcggcctcggcaagggcgtgacggccagcagcatcggcgtcgtgctcaaggcctgcggcctccgcgtcaccaccatcaagatcgatccatacctcaacactgatgctggaaccatgtctccattcgagcatggagaggtgtttgttttggacgatggtggagaggtggatttggaccttggaaattatgagcgttttctggatatcaaattgacccgtgacaataatataaccacaggaaagatctatcaggctgtcattaacaaagaaaggagaggtgactacctaggaaaaaccgtccaggtagtgccacatattacagacgaaatacaagattggattgaacgcgtcgcagtgattccagtcgacggcaaagaaggacctcctgatgtttgtgtcattgaacttgggggcactataggggatatcgagtcaatgcctttcattgaagcattaggtcaattttcataccgtgttggacctggaaacttctgtctcgttcatgtcagtcttgttccggttataaatgtagtcggtgaacagaaaactaagcctacacaacatagtgttcgagggcttagaggacttgggctagcaccggatgttttagcatgtcgcagtactgagccactggaggaacatgtgaagatcaagctttcacaattttgtcatgttccgatctcaaatatagtgaacctccatgacgtgacaaacatttggcacatccccttgctgctaagggaccagaagacccatgaagctattctgaaagttttagatcttcagtatgatggaaaagtacctcgggaacctgagttagggatgtggactaaaagagccaccaagttggacaaattgaagacttcggtcaagattgccatggttggtaaatacactggcctgtcggactcctacctgtctgtcataaaggctcttttgcatgcatcagttgctatggaaagaaaacttgtagtcgagtgggttccttcctgcgatctggaagattcttcagctaaagagacccctgaagcccataaaaaagcatggaaattgctgaagggtgcagatggtgtactcgttcctggaggattcggagataggggagtccagggcaaaattcttgccgcaaaatatgcacgcgagaacaatgttccttatcttggcatttgcttgggaatgcaaattgcagtgattgagtttgcccgttcggtgatgaaactacgaggtgccaatagcacggaattcgatccagctacaacatcaccctgtgtcatcttcatgccagagggctcaaaaacccagatgggagctacaatgaggcttggatcgaggagaacctatttccatgtcagtggctgcaaatctgcaaagctgtatgccaatgccagctctgtagatgaaagacatcgccacagatacgaggtgaaccctgatatggtcccagacttcgagagggccgggcttcaattcgtgggcaaagatgaaagtggaaaacgcatggggatcattgagcttccctctcacaagttcttcatcggtgcacaattccatcctgaattcaagtcgagaccaggaaaaccatctccgcttttcttagggctgatagccgcggcatctggacagctagagcctttgcttcaacgcagcaatccgacaacaaaagcatgtcctatgagtaaagtcccgaaactgaaactgtacccaactggacctgtgaataatccactgaacagcttggtaaatgggtactacccaaatggcactggcatccacacctagaagcataatgcttagcgatggtctatttgatgtttgttcctatggttttgcttgtacccctttttatgtttgtttttcagtttgtatttgtctctgatcaactgggaaggctaagattcagcaagccccagctccagcaacacatggttccgacattttaacgaggaacgtcctccggtccgttggagcaaactagctatagagtggtgaggtctagtgtgatttttttgagccctggaattaagcgcgggaagtgttttggtagcgttagtagagcctggaatctcaactatttgtacattatggaagaacttatctaaggactgaatacacaaatgcttggccatgatttgctttgttgccacaatattaacaaccacaatcagatgtagaaaaaaaaacctctaacaaa

SEQ ID NO: 147569 - DNA, 2499 bp, Zea Mays
agcctaaaaacttgcccagagcgcctgaacctgcctccgctccactcttgccccccccctggcaccacactagcctagtgagtagtgcagcagtcttgctcggttgctcctacctgtcctgcacagcacaggagcagagcccaggaccgtcggcaaaaggggagcggccatgaagtacgtgctggtgaccggaggggtggtgagcggcctcggcaagggcgtgacggccagcagcatcggcgtcgtgctcaaggcctgcggcctccgcgtcaccaccatcaagatcgatccatacctcaacactgatgctggaaccatgtctccattcgagcatggagaggtgtttgttttggacgatggtggagaggtggatttggaccttggaaattatgagcgttttctggatatcaaattgacccgtgacaataatataaccacaggaaagatctatcaggctgtcattaacaaagaaaggagaggtgactacctaggaaaaaccgtccaggtagtgccacatattacagacgaaatacaagattggattgaacgcgtcgcagtgattccagtcgacggcaaagaaggacctcctgatgtttgtgtcattgaacttgggggcactataggggatatcgagtcaatgcctttcattgaagcattaggtcaattttcataccgtgttggacctggaaacttctgtctcgttcatgtcagtcttgttccggttataaatgtagtcggtgaacagaaaactaagcctacacaacatagtgttcgagggcttagaggacttgggctagcaccggatgttttagcatgtcgcagtactgagccactggaggaacatgtgaagatcaagctttcacaattttgtcatgttccgatctcaaatatagtgaacctccatgacgtgacaaacatttggcacatccccttgctgctaagggaccagaagacccatgaagctattctgaaagttttagatcttcagtatgatggaaaagtacctcgggaacctgagttagggatgtggactaaaagagccaccaagttggacaaattgaagacttcggtcaagattgccatggttggtaaatacactggcctgtcggactcctacctgtctgtcataaaggctcttttgcatgcatcagttgctatggaaagaaaacttgtagtcgagtgggttccttcctgcgatctggaagattcttcagctaaagagacccctgaagcccataaaaaagcatggaaattgctgaagggtgcagatggtgtactcgttcctggaggattcggagataggggagtccagggcaaaattcttgccgcaaaatatgcacgcgagaacaatgttccttatcttggcatttgcttgggaatgcaaattgcagtgattgagtttgcccgttcggtgatgaaactacgaggtgccaatagcacggaattcgatccagctacaacatcaccctgtgtcatcttcatgccagagggctcaaaaacccagatgggagctacaatgaggcttggatcgaggagaacctatttccatgtcagtggctgcaaatctgcaaagctgtatgccaatgccagctctgtagatgaaagacatcgccacagatacgaggttccctgattgaattgtctattagccatatcgaataatgtatgccactgttaatctttttgcatagtgacgtttttgttgttgttgttgttgttttccctttcaggtgaaccctgatatggtcccagacttcgagagggccgggcttcaattcgtgggcaaagatgaaagtggaaaacgcatggggatcattgagcttccctctcacaagttcttcatcggtgcacaattccatcctgaattcaagtcgagaccaggaaaaccatctccgcttttcttagggctgatagccgcggcatctggacagctagagcctttgcttcaacgcagcaatccgacaacaaaagcatgtcctatgagtaaagtcccgaaactgaaactgtacccaactggacctgtgaataatccactgaacagcttggtaaatgggtactacccaaatggcactggcatccacacctagaagcataatgcttagcgatggtctatttgatgtttgttcctatggttttgcttgtacccctttttatgtttgtttttcagtttgtatttgtctctgatcaactgggaaggctaagattcagcaagccccagctccagcaacacatggttccgacattttaacgaggaacgtcctccggtccgttggagcaaactagctatagagtggtgaggtctagtgtgatttttttgagccctggaattaagcgcgggaagtgttttggtagcgttagtagagcctggaatctcaactatttgtacattatggaagaacttatctaaggactgaatacacaaatgcttggccatgatttgctttgttgccacaatattaacaaccacaatcagatgtagaaaaaaaaacctctaacaaa

SEQ ID NO: 147570 - DNA, 595 bp, Zea Mays
ttttccttgccaccagccctggttgaattgagtggacacatacatgatcagcaagcagcttaataacgatccaggcgttggtactactgccttttttctgtcgtccgtaaaacaagaaacatgtaaaaagaagtaaccaactaaccatagttctgaccttaagactgacaaaaaaaaaaagagatgtctggttgcagcatggcggcgccacccagccgccacgatcttgcatcacatggctgtatctgtatcacacctggttacgaaggaggagagcgcaagcaagcaagcaagcaaaaccagacatccacatgaaactgaatcgggagcagatcagccagccggtcacgtacggagagtgcttggacaccagaagcagggacgggaggcggaggcacgggacatcaagcaggcacgagagtgcttcacccgtgttccatatcttgcccacgtcgcggcggtccagctcgccgtcgcaggccgcgtcgacttccgcgacgtccttgtcgccggggggaaaacacatgcggtcatgtggctgcactgcagcctgaaatcagactccgcaactcgacgcgcgcacggaatgtctccg

SEQ ID NO: 147571 - DNA, 103 bp, Zea Mays
ccgctctcaaaagccgaatttctcaagcaacagctcgttccaatcgcttcgaaacctaaatccactgctcaaatcatacacacattgaacgacacctcccacc

SEQ ID NO: 147572 - DNA, 2613 bp, Zea Mays
atgatcttcaagcggagtcagcggtcggagatccttgcgccgcggcgctgcaatgccgcggacagcggaggcgaggacgaggggggaggcggcccccgcccgaggaagaggcggaggggcgacgagttcttccccgtcgacctgctcggcgacgtcccagcctccagcatcccgtacgctgccttcgggctccggtggagcgaggcgcccgaggcaccgccagaggccgcgcaaccgccgcccgcggcgaggccgccggtggtgcgctcgtcgcggggccgcaccctggtgctgccctctaggttcaatgactcggtacttaccgacccctggaagaaggagaagccggccaggccgccgcctcctgtcaagacagagcacttggcgcgcagaaacgagctgctgcacaagaaaggtgcaaattttgacagcagcgttgcattgtccgaggtagatgacgacgatgaggaggaggccatggtggaacgttaccgagcacgccgcagtttcggtgcctccaggaagcacttagcctcttggagcacgcttacctcggtacatgatgaaccatacagcaatcaccacaggaaggaagtaaagcttaggcattactatgaggaagacgaggaggaggaagaggagaaagaagatatttttcactgtaccgaagaattggtgtatggggacattgtgtgggcaaagcttggcaaacgccagccaatgtggccaggagtggtggtcgacccaactcagcaggccgctgccgatgcaatgccaccacaacctcgcggtgtcgctgtgctttgtgtgatgctatttggctggcgcacagagttcagtggcgagaagaagtacgtgtgggtgaggcaggggttgatatttccattttcagactacatgaaccgatttcaagggcagacagaactaagcagttgcaaacctgctgatttccggagggcagtagaagaggcctttttggctgatcagggattctcagaagtagtggtacattgcagcaccaagggccaatctgtggtgtgtcattctttcccagatgatttacatgaagtgactggttcaaatgaattggagtaccagccacagattaagcagtgcagaagagtgctgcagtgtgagagttgtggaaactgctttcccaacaaggatacaaacaagatggtgtatgtgatggagcaacttgcttgcagactttgtgccaggatcttagcattaaaaaagtactgtgggatttgtttaaaaaatttgcaacataaatatggcggaagaagggtttgctgtcatggctgtgaaagttgggttcatgcagaatgcgatgaaaactgcagcaacctcaaggatctacaagacaagaaatatcactgtccttactgtagagttaaaatgaattcaactctccccgggaagaacacaaaaatttctgatgtgagaaaagatagttctgcacagaaaggaagcaagcctgacaaagttgcactggtctgttttgacatggaaggaacatacgaaccagatctcgaattaatttcttgccattgtggcccttgcaagggacagaaatttttgttcaatgaatgggagcggcatgctggctgtagaagtaaaaattggagatccagtattaagcttaagggctcgttgatgccatttgggaaatggatagatcgacatcagccaggcgtgtgccctactaatcctccaaaacgctcatctcagaaaatgaagaaacagaagttaattgatttactgaatgacccatatgatcctgtaaatgtaaaatggacgacagaaagatgtgcagtctgtagatgggttgaagattgggattacaacaaaattgtgatttgtaatagatgtcagatagcagttcatcaggaatgttatggtgtgaggggtaagcaagactttacttcatgggtttgtcgggcttgtgaaaaacctgagcaaaagagggagtgctgtctttgccctgtaaaaggtggtgctttgaagccaacaaatgttgataacttgtgggttcacgtgacatgtgcatggtttcagtcacaggttgcttttgctagtgatgagctcatggaacctgctattgggatattgaacattcaacctttgttatttatgaagatgtgtgtgatttgtaagcaaatacatggttcatgtactcaatgctacaggtgctctacttactaccatgccatttgtgcatcaagggcaggctatcgaatggagcttcactgcttggaaaaaaatggcagacagacaacaaagaagatttcttactgtgcccaacatcggagccctaaccctgataatgttttgataattcaaactcctgctgggactttctcatcaaaaaagcttgttcatagcaatggcaaggtagctgcatcgaggctgatcaggaaagatattcccttggatttgccatcagaagttaaaatttcagagaacttatcagcggcgagatgtcgggtttatgttaggaaagatctaaaggatactaatgtttggtctttcagcaagtttcacttaagtatgcatggttcactgaacgataggaataatcctctcatatttggtcctcgtatgagatga

SEQ ID NO: 147573 - DNA, 644 bp, Zea Mays
tttttttaatatattttcaggtccttgagtatcgtggtgagcaggtcagacgaagtgtagctgatttacgtgaagaaaaatatcgtgtgcagggcaaagattgctatcttttcaaaatcagcgaggaagtggttgttgatgccacagacaaaggaaacgtggcacgactgatcaatcattcttgcacaccaaactgctatgcaaggattatgagtgttggacatgatgaaagtcgtattgttctaatagcgaagaaaaaagtttgcgctggtgatgagctaacgtatgactacctgttcgatccagacgaggccgatgaacgcaaagtgccatgcctttgtcagactgctaactgccggaaattcatgaattagttcgcttagatgtcagaggatcactgatataatttcccccccttcttatttacccccgggttttctccctctcgatgattcatttcctggtatatgttagagctcaatttttgcttacattcgtttttagaataagtatagttagagctctcaaaatgtggagcttccattcctgtaaataccacagctgtaatcactagggacagttcatttttcaaataaaacattttttgtgctatgctgagctcgatcatgcacattggcagacat

SEQ ID NO: 147574 - DNA, 592 bp, Zea Mays
gtctagcaaattgataattacatttttcttgatttctttcctttgtgccctacagcttttcaaaatcagcgaggaagtggttgttgatgccacagacaaaggaaacgtggcacgactgatcaatcattcttgcacaccaaactgctatgcaaggattatgagtgttggacatgatgaaagtcgtattgttctaatagcgaagaaaaaagtttgcgctggtgatgagctaacgtatgactacctgttcgatccagacgaggccgatgaacgcaaagtgccatgcctttgtcagactgctaactgccggaaattcatgaattagttcgcttagatgtcagaggatcactgatataatttcccccccttcttatttacccccgggttttctccctctcgatgattcatttcctggtatatgttagagctcaatttttgcttacattcgtttttagaataagtatagttagagctctcaaaatgtggagcttccattcctgtaaataccacagctgtaatcactagggacagttcatttttcaaataaaacattttttgtgctatgctgagctcgatcatgcacattggcagacat

SEQ ID NO: 147575 - DNA, 648 bp, Zea Mays
ttcaatgtgtactttctggggaattaggtatccgacttaaatttaccctactttccaccaacaaagcttcagaatccccatcaattgcagcaaaatcaagtttggtgccgagtatagagctcaccctaccatccccaggattatcatcgataaccttaacctcaacctccatacctgtctcagaatcaagcatgaagggcttctcttgactgtcaggactagcaacaggagcaggctccttgcctagttgaggttctgccatagcagagggtatgatctccatgtcatcacctgattctccaacagcagaaggtgcaacatccagcaagacatcagcgggtgtaacttccggtatgccaacagcatgttcgagggttgcttgtagtgcaccatcctcaattgctggaggcaacacatcctccatgtgcttgttcggctgtgtgattactgttgttgccaccaccacctcaggttggggaagtgaaatttctggaggtgcatccagaaccccagatcctatagttgcagcaatagttctccctatgccatcaccaagttcatgttttgatactgatccttcctccatgacatcagtgtgacgttgtggagcaggattgctcaccactggttcaagcaattccatgtcat

SEQ ID NO: 147576 - DNA, 1808 bp, Zea Mays
acgagcgccgcgcgcaccagggggtttcctcgagccccgagatcgaaagccacccatcgcgagcgccacgcgacggcgcgtcggatgatccacgccgtccacgtccaggcccgcgggatccacgtccggatacatcgcccgcccgcgctgtcgcgcatccgggccagacaaacaccgatccgacggccgttcgccgcgtattaaaaccggtctcacccccgacgccctcgcttctttcgccctcctgccttccgcttgtagttgtagtagtggggggagagtgggagaaccggagaagagatgaacagtagtgaggctagcacgcaagaccgtgttgcgcccgcgctcgaggctacggagaagatactggccgccgtggcgcggctgccgggacgtcggatgctggagctaaggcggctgggacgcgctgcgccctccgcgggtgcggagaccgaggcggcgaagcggggccgctctgtgtcggacgacacctccgcgggctcgtcccgcgagtcgtctgcgaaggtggcgcccgagcccgagccgcagggtggtggggctcctgcggtggcaccggggtggcccaggcccgtgtcgcacggcgcgatgtcggtgatcgggcggcgccgggagatggaggacgcggtcgccgtcgccgcgccgttcccggcgggggtggagttcttcgcggtgtacgacgggcacggcgggtcgcgggtggcggacgcgtgccgggagcggctgcacgtggtgctcgcggaggaggtggcggcgcgtctgcaccttgttaggaacggcggcgaggacgaggagggggacggggcgcgctggagggaggccatggaggcctgcttcgcgcgcgtggacggcgaggtggccgtcgtggagagcgagtcgaacaacgtcggccacgcggtgacggtgggctccaccgccgtcgtggtggtcgtggggccccgccacatcgtggtcgccaactgcggcgactcccgcgccgtgctgtcccgcggcggtgtccccgtgccgctttcctccgaccacaagccagatcggcctgatgagttggaaagggtagaatcagccggtggcagggtcattaactggatggggtaccgtgtccttggtgtgcttgcgacgtcaaggtcaattggtgactattacatgaagccattcatatcagcggaaccagaggtgactgtcacagagcgcacgcacagggacgagttcatcatcctggcgagcgacgggctgtgggacgtcatgtccaacgaggtggcctgcagggtcgcgaagagctgtctgtgcgggcgcgcggcttccaagtgccctgacaccatccacgggagctcggccagcgatgccgccgcggtgctggtggagttcgccatgtcgcggggcagcactgacaacatcagcgtcgtggtggtggagctgaaacgtctcaagaggtggaagggtggtagtagacagaacggtcggacgtagcctggccctgtaggagtctccggctcgtcgcgaaatatatgcatggcgacggagctctagggaagcagccgagcatatgacggaatggtgtaaagaagaagaagaagaagagagggttctgactcttgagagctatacctatgctgtgaccaggtgagtgtagccgtgtaggagctgctcgtagctttgccgttgtattgcgttggttacttggttctttctttagttcaatcaatactaacaaaacggcattccggccgatggaagcagcaggaaataatgtaaaaaagccaaaacaaatatggaaaaaaataagaggaaaa

SEQ ID NO: 147577 - DNA, 741 bp, Zea Mays
cctgtgcatcgccggacggaaccaaacgccaaacgctgctgcgctctctccttctcgtcctgaccccccagagcgagagggaggggcacccagaggagcctgtcgttttgatcggtgtctctgcccccgttcccgcgaggagagaacaacctggagaaaatggcgccgatctccggagccacggcagtccttgtgatggccgtcgtcgccacgctcgccgccgcggctaacgccctggcccccgccccagcacctgctaccagtgacggaacaagtgtagaccagggaatcgcctacgtcctcatgctggtggcgcttgtcctcacctacctcatccacccattggacgcctcctccgcctacaagcagctcttttaaaaccatccgctttgtaatttggcgccaattgagggtgtcattaacggtgttcgattattaatcgatccagtttggccccacaactagaaaaggaaaaaaatgcacacatcttatccttgctacttctaggatcttttcatatgtcttaatttcaatcgagggcgaggccagaagaagccaaattattgcaaatactcgttaagccttgtttagttattttcatttcatttggattaaatgggattgaaagaagttagcaggaattttgacttgctatagatttaaagctacctaatcttgttcaatccacatggattgagattaaatcgaaaaggcctttaggggaccattttttttagttca

SEQ ID NO: 147578 - DNA, 414 bp, Zea Mays
atggcctcgtctgcagcagcatccaacgcaaaatggttccaatcaccagttttttggcattcagaattacagcctccaagcggcacaatacagcattcagcaccacacggcgcactgcactgcaaacccaatctgatgcatcattatacagcacaggatcgaatacacggagacacgtccagtctccagtccaggtccaggtccaggaacacaacgcagcagcggcaattccggcggacccccaaagggccaggtagggtaccccctccctacatggcgtacctctgggtccaggtcctcgcggtgttctcgtacttgttccggtccgtcttgtacatgtgcgctatctcggggaccagaggatcgtcggggttcggatcggtcagcagggagcagatggacagcagcacctga

SEQ ID NO: 147579 - DNA, 1270 bp, Zea Mays
atcacatacagacaggcagcggcaaccaacccgatcacgttgcccccgcgcggctagacgcctagactagccccacgacctccacctcgaccagtctcgatcccgtggactcccgattgcctcctcagcaacttccatacccccagcgcggcggtgccggagcgagcagagcagccggagggcctgtcggatccgccgccgtcaagatgaatgacgccgatgtatccaagcagatccagcagatggtgcggttcatccgccaggaggccgacgagaaggccaacgagatctccgtctccgccgaggaggaattcaacattgagaagttgcagcttgttgaagctgagaaaaagaagatcaggcaagagtatgaacgcaaagagaagcaggttgaagtacgcaagaaaattgagtactctatgcagttgaatgcttctcgcatcaaagttcttcaagctcaggatgatctagttaacaaaatgaaagacgatgccatgaaggaacttctccttgtcagccacaaccaccatgaatacaagaaccttttgaaagacctaatcattcagggtttgctccgtttgaaagagccagcagtattgctccgttgccgcaaggatgatcaccatcatgtggaatcagtgctgcattcagcaaagcatgagtatgcatcaaaagcagatgtccatgaaccagagatatttgttgatcatgatgtatacctgccacctgccccaagccatcatgatgctcatggccagttttgctctggaggtattgtattggcttctcgagatggaaagattgtgtttgagagtacacttgacgcaagactagaagttgttttccgcaagaaattgccagagatccggaagcttctttttggccagactgcagcctaatcgactcatctgccgatggtacggctgcttctatgtaatggttgccggctgcacgcctgcactgcagccataaggaactccgcctgtttttgtcaaattgattgtttaaggtattcatcccctatgtacaaactacctattggttcattattgtcgccgagagcaccgactgtttgtactctgtttgctccgaggaataagaataaagcaccgccagactttccatcgcgaagctgaataaacgttgtaaatgcatttgttgcgctgaacattccgtttatggtttctccatgtgtatatttagttaatgtcggatgtggttcttatggaaaatagtttgtttgggctgtcagttcgcctcctgtcatgct

SEQ ID NO: 147580 - DNA, 1054 bp, Zea Mays
agtaaaaggtaattatatttaaaaagaagtttacagaactaatacattgtattgtatccaaatacgtaaaaacaatttcatgtcaagtagtgttggtgtatcctgaaacatggattgcaaagagaaataaagtatatcttaaacacaaaatcacaaataacataatgcctcttcactcttcagttgtccttcgctttagagaatgtgaaaaattgcgacggctccctgtgagactcctgtcacatcaacaacactatagcatatgagctataccagtaaagctagctttttttaagtcccagagcaatttttattgtggtataatctagcagcttaccgatgctgcatacacatattcaaactcaaaacagtgcagtatacagtatacaatcagtgtttttttgaagtactggacatgatctaagcaacaatacattatgttttacagacaaatccatgacacatttgagatgtggtaaagccaatgcgcccatcatttgagaagcggagaagacgaagatctcagtactgtcctggacaagaaagaaagtacgtacactgtgcctgcaagtactacgctgcgcatgtaataccacaaaaatgaaccagaaatacttgtagaactattttcaaacaataacaaactaaatttagcaaaaaaaaaaggaggacgagaagggcattgtacgaatcaagcttaattaatttgtttctgcttagaaagaactgatgagcatacggcaattaattgcgacggggcatctaatcaagattattattggtgctgaggtagatgatttcatgcacgaggagtgtttgggcaaattgaagggagcacccttcagtccaaccgtaaacagcgtagagtttgattttagctcccgcgccacccactcggctaccaagaccagacctaccgcttgcccatggttcttggcaggtgaatggatgagtcggcagctaatgaaaccctacagccattttagagtggactgaagagagctctcttccacagaagccataaacccaaaaggccaaaccagatgaacaaaca

SEQ ID NO: 147581 - DNA, 138 bp, Zea Mays
tgggagaacatgcaatatgttttagatgaagttgaacctctgtatgtgttcctaagatttgctgatcaggagaaaagttcaacacttggtgaggtgcacatgcaacgcacaaacaccaagcacatatatcaaagttag

SEQ ID NO: 147582 - DNA, 887 bp, Zea Mays
tctcaaatgctcaatgcgactctgtacgccaaaagcagcgacaaaccaggaacgcagtacatgactgtctgaataattctcctcgatcacagaaacccctacaaccttgtagcccgaaatgcagcaacaaccaaatctgaagtctgagcacactagcacaaattgtctggaagcaaagcgcaacgaactaagataggataggctaaggattaagcaacgggagtccacggcaaagtacaacaaactaagacaggatagagtaaggattaaacaacacagcacctcaccgcgtcgatcagtacgcgccgccaagcagcctgcgggcgacctcgaaagagacgaaggcgtcgatgcaggcgtacttgatctgctcgtagctgaggcaggacgcgtcccagcggctcatggtgaccctctgcggcttcacgaggttgacgcccatgacgacttgcacgagcgcacgcagccccgcctggcggaggtccgggcggttcatccgctccgcggcgcggccccgcaggtcctccgcgttggccaccaccagaccgtggtcgtcgctgagccgctccgcgtccgcctccacgccgacgccgacgaagcggatcccgcggtcgccgaggaactccgccagcgcgccggggacgtagtcggcgtagaggagctggaagatgaggcagctgtgtccgacgcagagctgcagtgtggccaccgggttctggtgcgggccgaagcttgggcgccactcaacgtcaagcccgacgatgatgctgtagccgttgctgccggggcggtgcaacgcgaggatctccgcgatccagcgctccacagcctggccggaggatgtgacggtggtgttaatcacgtcgttgccgaaggtcacttcgatc

SEQ ID NO: 147583 - DNA, 1162 bp, Zea Mays
actcctctcgcattcgccgtgacgagacgagcgtacgtccgtcgtccagagtgcagacggcaatgcagacccccgcgcgcctctccgctccatcctcgccgctcgtctcctccgcgccaccgatacctgtacggccacaacgcgtcgctttcccctccctccgccgccgtgatctcctcctcctgccggcggcgctgaccctcccgacggcgcccgccccgttgcctgcctcggcgcgagggctgttccgcatgcccccgccgcggctggtgaaccgttactttctggtgcgcgcgggcgagtccgtgtacgaggggcagggcctcctccgcaccaacccggtcgccaagacctccgtcgacagcggcctctcccccgtggggctccgccagacggcgcgcgccgcgctcgagctccagcgcctcggcgcctgcgaggacgactgctggatatggccgtccatcactcagagagcttaccaggcggccgagatcattgccgcggccaacggcgtcaaccgcagtcgcatcgtgccggagtacagcttcttggatgcacgcggattgggtgcatttgagtggaagagcttagacaccttacccgaggtgtacgcgtcagataatatttctccagacttgaagcctcctcctatcagggatggtactccaaatgagagcgttgcagatgtatttgtgcgggtgacacagctcatgtcaatactagagacccagtactcaggggaaactgtcgtcattgtttcgccggattctgacaacttgtcaattcttcaagctggattgatcgggcttgaccttcggaggcatagcagcttgttttttcagcctggtgaggtccggccggttgatccatcgagcatacctgaatacaagcaacctccttctactgtttttaagtgtgcaaatccaccgagttgtaaagagtagttcacttccttaccttacagttcatattttctgtccgtgtatgagtataatcatgacaaacgtcttggaccttggtgataattgtatatagctgaaagtattgtttatgtgccacatctaaattattgagccaccttgtgttggacgaactccagatattcacggttcgttccaagttcctttgcggttttgcctggtttcgaacaggtttttgttat

SEQ ID NO: 147584 - DNA, 667 bp, Zea Mays
gcacccggttacgtcgtccttgacctctgcgagatgaacaactaggccattaagctcggtgcgggcctgtttcaggagtgtggtaccatctaggcgaccagtgctgggaagctgcggctgttgaaacgaacaagtattggattgagaactcccataagaggtatataccttatgtagaagatacagttcttggtactgtcatactgtggttggaaccaaacaactttttggtagacataaagggtcctaatttgcccttcctaccggtgcttgcatttgaaggtggtacaaggagaaacataccaaagtttgagattggtacattaatatatgctcgagtggtgaaagcaaatagtatcatgaatcccgggctttcatgcagagatgctactgggaaagctgctgaatttggtcagctgaaagatggttatatgtttgacacatcaactggcatgtcaagaatgttgttaagtacgccaacatgtccagttctggaggcccttgggaaaaaaaactgtcgtttgagattgctgttggaatcaatggtcgagtctgggtgaatgctcctgcggcaagtactgtcattcttgtatcaaatgcaattatgaggtcagaatctttgagtggcataaaacaaagagctatggtagaaaatctcttggagaga

SEQ ID NO: 147585 - DNA, 884 bp, Zea Mays
caggctgaaattttggtgtccttgctcagccatgggtagtaggagatatgacattgatacgaggagatgtgggatccactcaagaccaaccaaatcaatgtatctggatgctcaacaaatcgtcagctgccaaactagagtgggagaccacgatgttggttcctgtgctgtgaagcatcacttcccgtctccaatcgtatcttggatagaagatctttccagctttggcaatgcttcttttaatcctgtctctgaatatgtggatgagcaagccagagcttcagtgggacagtcttcagcatcaagtaatttgcatgacatgcaaatatcagtgagattgacagccgaattcatggagcttgcaaaggagaatacaagcaataatctagagacttgtggaattcttggtgcttcatttagggatggaacttattttgtcacgatgttgattataccaaagcaagaaggaactgctcactcagtatgtcagtaactgagtggtttctaacattattcttaatatatttttgttagtttattatatgtcatgacaactatctagctatcccattctgaagtcttcctttcttttccaaatagtgtcaggctgttagtgaggaggagatacatgccgtgttatcagagcagtcactttatcctgcagggtggattcatgtatatattctagcatttccctacttcatgaaatttctcttaaatgcacgtacaagttacatgcttcgtataatctgaaaagataaataagctgatacatgtgcaagatgatttccttgttgcagcatgtactgtgttagatgttttccttgttgcagcatgtaatctcattcatcatttacacttagttttctttcttttttattgca

SEQ ID NO: 147586 - DNA, 1261 bp, Zea Mays
caggctgaaattttggtgtccttgctcagccatgggtagtaggagatatgacattgatacgaggagatgtgggatccactcaagaccaaccaaatcaatgtatctggatgctcaacaaatcgtcagctgccaaactagagtgggagaccacgatgttggttcctgtgctgtgaagcatcacttcccgtctccaatcgtatcttggatagaagatctttccagctttggcaatgcttcttttaatcctgtctctgaatatgtggatgagcaagccagagcttcagtgggacagtcttcagcatcaagtaatttgcatgacatgcaaatatcagtgagattgacagccgaattcatggagcttgcaaaggagaatacaagcaataatctagagacttgtggaattcttggtgcttcatttagggatggaacttattttgtcacgatgttgattataccaaagcaagaaggaactgctcactcatgtcaggctgttagtgaggaggagatacatgccgtgttatcagagcagtcactttatcctgcagggtggattcatactcatccttcacaaacatgctttctatcatcgatcgacttgcatactcaatactcttaccaggttatgttaccagaggctgttgcaattgtggtcgcacccacagatccaaccaggcaagtgttctttgctaataaatactacacttgtgttacttgtacataaaatggctggcatacatctgcagttcctttgttcttaatttcttttgctcctacattctggttctgggtaaacttatataacgtaatctgaaaatgccctatttgtttctcaaatttttcaggagttacggaatattcaggctgactgaacctggagggatggatgttcttagggagtgtgacgaaagtgggttccacactcaccgagagacaaccaacggcagcccaatctatgaaacctgctcgaaagtgcacttcaatcccaacttgcggtttgagattgtcgacctgcgctcggctcaatgatcaatgggactaaagctatggcagcacgtgctcccttgtgctccctcttggcagaagtatataccatagagcttgctgacgatgcgtgataggtatagtgacagcgccaagccggaaccaagatgctcatgttacttatctgacatctgcgctggtatttgtcaaagaaaaggagtaactgaaaactagcactggttatcttgtctgttcggccagcctttgagttggtatttta

SEQ ID NO: 147587 - DNA, 1283 bp, Zea Mays
caggctgaaattttggtgtccttgctcagccatgggtagtaggagatatgacattgatacgaggagatgtgggatccactcaagaccaaccaaatcaatgtatctggatgctcaacaaatcgtcagctgccaaactagagtgggagaccacgatgttggttcctgtgctgtgaagcatcacttcccgtctccaatcgtatcttggatagaagatctttccagctttggcaatgcttcttttaatcctgtctctgaatatgtggatgagcaagccagagcttcagtgggacagtcttcagcatcaagtaatttgcatgacatgcaaatatcagtgagattgacagccgaattcatggagcttgcaaaggagaatacaagcaataatctagagacttgtggaattcttggtgcttcatttagggatggaacttattttgtcacgatgttgattataccaaagcaagaaggaactgctcactcagtattgtcaggctgttagtgaggaggagatacatgccgtgttatcagagcagtcactttatcctgcagggtggattcatactcatccttcacaaacatgctttctatcatcgatcgacttgcatactcaatactcttaccaggttatgttaccagaggctgttgcaattgtggtcgcacccacagatccaaccaggagttacggaatattcaggctgactgaacctggagggatggatgttcttagggagtgtgacgaaagtgggttccacactcaccgagagacaaccaacggcagcccaatctatgaaacctgctcgaaagtgcacttcaatcccaacttgcggtttgagattgtcgacctgcgctcggctcaatgatcaatgggactaaagctatggcagcacgtgctcccttgtgctccctcttggcagaagtatataccatagagcttgctgacgatgcgtgataggtatagtgacagcgccaagccggaaccaagatgctcatgttacttatctgacatctgcgctggtatttgtcaaagaaaaggagtaactgaaaactagcactggttatcttgtctgttcggccagcctttgagttggtattttaagtaatactgtatataacatacaactggggcaaaacacacacacacactattaacttggtctgggatgtgattgtaacgtagcgcaatagcgcttgactgtttctgtggcactgccaatttacttactaattgtcagtgactggagtatgaagaaatacattaatttggcagttccttactaaaccaa

SEQ ID NO: 147588 - DNA, 1279 bp, Zea Mays
caggctgaaattttggtgtccttgctcagccatgggtagtaggagatatgacattgatacgaggagatgtgggatccactcaagaccaaccaaatcaatgtatctggatgctcaacaaatcgtcagctgccaaactagagtgggagaccacgatgttggttcctgtgctgtgaagcatcacttcccgtctccaatcgtatcttggatagaagatctttccagctttggcaatgcttcttttaatcctgtctctgaatatgtggatgagcaagccagagcttcagtgggacagtcttcagcatcaagtaatttgcatgacatgcaaatatcagtgagattgacagccgaattcatggagcttgcaaaggagaatacaagcaataatctagagacttgtggaattcttggtgcttcatttagggatggaacttattttgtcacgatgttgattataccaaagcaagaaggaactgctcactcatgtcaggctgttagtgaggaggagatacatgccgtgttatcagagcagtcactttatcctgcagggtggattcatactcatccttcacaaacatgctttctatcatcgatcgacttgcatactcaatactcttaccaggttatgttaccagaggctgttgcaattgtggtcgcacccacagatccaaccaggagttacggaatattcaggctgactgaacctggagggatggatgttcttagggagtgtgacgaaagtgggttccacactcaccgagagacaaccaacggcagcccaatctatgaaacctgctcgaaagtgcacttcaatcccaacttgcggtttgagattgtcgacctgcgctcggctcaatgatcaatgggactaaagctatggcagcacgtgctcccttgtgctccctcttggcagaagtatataccatagagcttgctgacgatgcgtgataggtatagtgacagcgccaagccggaaccaagatgctcatgttacttatctgacatctgcgctggtatttgtcaaagaaaaggagtaactgaaaactagcactggttatcttgtctgttcggccagcctttgagttggtattttaagtaatactgtatataacatacaactggggcaaaacacacacacacactattaacttggtctgggatgtgattgtaacgtagcgcaatagcgcttgactgtttctgtggcactgccaatttacttactaattgtcagtgactggagtatgaagaaatacattaatttggcagttccttactaaaccaa

SEQ ID NO: 147589 - DNA, 985 bp, Zea Mays
aacggcactccatcgcctcatcttatccgccggcctcctcacgccgtcgctgctgcctgctcactccccactcccgactccccgacgcacgagctcccaggagttagccatggcctccaccaccctctcctccgccttcagcctcctctcccgcccctccacctccccgtgccccgccgtctcgctcccgaggtcctccttccccgtgcctgacagccgccggagacgccgcgccgtcaccgtcgcgtccaccgccaccgagtcccccaaggtcttggagctcggggacaccattgccgggctcactctcgaggaggcccgcaaccttgttgaccacctccaggagcggctcggcgtcacagctgcggccttcgcgccggccgccgtcgtcgcagcgcctggggcgggcggcggggccgcggccgaggaggaggcccccgttgagaagacggagttcgacgtagtaattgaagaggtgcccagcagcgcgcgtatcgccactatcaaggtggtgcgcgtgctcaccagcctcgcgctcaaggaggccaaggaccttatcgagggccttcccaagaagcttaaggaggccgtcagcaaggacgaggccgaggatgccaagaagcagctcgaggaggtcggcgccaaggtgtctatcgtgtgacactaggtatactgactccttttttttttcttcttttttttttaaatttctttctttgatctttgcctcccaatcttttgtgtatccccattgtcgtttataaggaattgctgtttgatgatatgaattcagtgtgaatgtgacatgcttaaaactggtaatgtagatttgccttgttggcactatcattacttcatgacggtgaacaatagggcattttgctttccttattctgttgcttgcaattgctagtagcctttgtagtgggttgcattgtattcgttattattcgttacaaatgtcatctaaaaaattgtctgtaag

SEQ ID NO: 147590 - DNA, 1477 bp, Zea Mays
cgccgtcgctgctgcctgctcactccccactcccgactccccgacgcacgagctcccaggagttagccatggcctccaccaccctctcctccgccttcagcctcctctcccgcccctccacctccccgtgccccgccgtctcgctcccgaggtcctccttccccgtgcctgacagccgccggagacgccgcgccgtcaccgtcgcgtccaccgccaccgagtcccccaaggtcttggagctcggggacaccattgccgggctcactctcgaggaggcccgcaaccttgttgaccacctccaggagcggctcggcgtcacagctgcggccttcgcgccggccgccgtcgtcgcagcgcctggggcgggcggcggggccgcggccgaggaggaggcccccgttgagaagacggagttcgacgtagtaattgaagaggtgcccagcagcgcgcgtatcgccactatcaaggtggtgcgcgtgctcaccagcctcgcgctcaaggaggccaaggaccttatcgagggccttcccaagaagcttaaggaggccgtcagcaaggacgaggccgaggatgccaagaagcagctcgaggaggtcggcgccaaggtgtctatcgtgtgacactagctagctggctctcgacaagacaaggtgatcaagggacgacgactacagcgcgcgcaagccgtccgtgtcctctcctccctgccggcgccggcgcaatgacgttcgcgtacgacacggacgtcgtcatggacgacggcaccatcatcaaaactaccgtcaccaactccggcgacgccaccaagctcttcctccgcgaggtgcgccagaccagaaagcccctgatcgtgggtctggacaccgagtggcgcgtcattcgccgacagggccggcgcccgcgcaaccggatggccgtgctgcagctctgcgtgggccaccgctgtctggtcttccagatagtcgcggccgactatgtcccggccgcgctgaaagccttcctcgccagcccgcagcaccgcttcgtcggcgtcgtggtcgacgtcgacgtagagcgcttgcgctgcgactgcaacattgtggtcaataacactgtagacctgaggtatgccgcggccgacgtgctcggccggccgcacctcaggacggcggggctcaagatcctcgcccgcgaggtgatgggagtggaaatagagaagccgaagcacctgacctgtagcgagtgggacagacctctgtcgcaggcgcaggtccgctacgctgccattgacgccttcgtgtcatacgaggttggccggctggtgctcaccagggagcacgcgcaagatgcggccttcaccggtgcaatgacgatattgccgtcgcagttgccgtaaatgtgcatagttttacttagttagtgtagggattgtttacatggtgtatctcgcacatttattcattggtttaaagaaaatttggattcttatgtttttttt

SEQ ID NO: 147591 - DNA, 448 bp, Zea Mays
atggagccttggccggcgccccgtccttggctcgtccttgccggcgccctgttcggcggatcgtcgggcgccgtgtggagatcggtgccatactgccatggaacccaaggtgttcaaaaatacgctggtccacttcatgtacaccaacacgctggcacccatggagaaagaacagcagggcgtcgtcgcaatgatctaggatctgctcgcagcggcgcatcagtacaagctcaagatgctgaagttcttgagatgctgtgttagcacatcgagttggacatggttgccaggaccatggcgccatgagaagaatacacaaggagctatttttgccaaacgatttagaaaaagcaccggctcctatggataagctgctcttgtaaaggagtaggagcgagagccatatttccagaagccggagccctcccaaacgggccctaaagtgcat

SEQ ID NO: 147592 - DNA, 1419 bp, Zea Mays
atccactccaaagtccaaacccccaccgagccacgcgacgagccgcgccgccatgtggccactctcctacctgccgccggcaccggcgcagcagttgcgagcgcaccccggtcccggctccggccgcgggcccaggccgcagccgtgcgggctgccgttccccgacgccctccgcacggctgcggctgcggccgccgtctccctttctctcatctatggcaacggcgtgggcgcggccttcgcggcatcagcggcgcaacccacggaggtgtgccggaacgggggcgcggagatggtagaggaggtgagggccgaggcggtgactaacgagcagctcgtggaggaggcgtgggaggtggtcaacgagagcttcctccccgacgccgccagccgtccgtggtcgccagagatgtggatgcaaaggaagcaggatgttctccaaggcacaattaaatctcgtgctagagcccatgatatcattcgcaagatgctagcgagcctcggtgacccttacactcggtttctatctccctccgaattctcaaagatgtcaaaatatgacatgacgggaattggattaaatctgcgggagattcctgatgaaaatggttcttttaagttgatggtattagggctgttgttagatgggcctgcttactctgctggtgttagacagggtgatgagcttttatcagtcaacggcattgatgtaaagggtaaatctgcatttgatgcttcatccatgctgcaaggtccaaaggagacgttcgttacgattaaggttaagcatggcgactgtggtcctgttgagtcaatgaaggtgcagaggcaactggttactcgaactccagttttctatcgtttggagaaaagagaaaacaatgattcatctgttgggtatattcacattacagagttcaatgcagtggccaaaaaagatttgcgctaaaacgtctacagaaatcaggcgcctcctattttgttctggatttgagggacaatcttggtggactagtgcaagctggaatcgagacagcaaagctctttctgaataaaggagacacggtcatttatactgctggccgggatcgcctagtccaaaaggcaattgttgctgaaagtggacctatgattgctactcccctcatggtatgtttgtgttgttgtggtacagctatttcaagcttcaagaagccgtaactcttaagaaatagagaaagcaaatgctagtttacactgttctgttaaactactcaatggaaagtgtgaagagtttcatttgcacattctcctagtgacaataaaattgttgcaagtccactttgatggatttttgacacttactactcaatttgacggtgaaacgacaagatttagagcatttgtaaatgtccgtggaccatggttcttctgatttta

SEQ ID NO: 147593 - DNA, 2161 bp, Zea Mays
gggccttcgggttcggcttccatggcgcgggcgcgaggccggctacgccgttgctgctttgttcgtgagtcgtgaatctggatcaaggcgattcgaaaaaaaaaagaatctggatcaaggcatcaagctcaggttctcccgttcttgctgtccagaccagagatattgctcactgacttcggcctcggcgtttgaagccgccaccggtggggtgacgccgatggcttggaggatacctacggcggcggcggcggcgtgcagcaggtagatataatttgatgggaagatgaatggtgcagaggaggaggagccgcctcacgtcagcagcatgcccaagacacaagacggtgttaccaagcccagtctagggaaagagcccatcccagggagcgagctctggacggatgggctcatctgtgcttttgagctggtcaagagtcacaggaagcctgttcagcacaaatcatggctggcaactgagcagatacaggagaagggccccactatgtgcacgaggaagcactcaagaaggaatgggcaccagatcactgagccgaaagtggatgagagcattgtgttggaaaacccccagcagactgatttcagtaacgatccttcagtgctcaaagataggccattgtatgctggggagattttggatcataaatgggtgcctattggatggaataggatcgccgagctggtcctgagggttcagtcagactccagctgggagaatgagttgatggagatgagtgatagcgaggatgattacaccgtggctgatcttgcagctccatactggcagcgccctgtgggacctacttggtggtgtcatgtcaccgcaggccatccttcaatagatgcatggttgaatagcgctcactggatgcatcctgccatcagaattgcactgagagatgagagcaaactgataagcgaccggatgaagtacctgctctacgaggtcccagttagagttgcaggagggctgttatttgagcttcttggccagtcaataggagacccaaatcatgaagaggaagatatacctattgtgcttaggtcttggcaagcacaaaattttcttgttacaacaatgcatgtcaaaggcccttcatccaatataaatgtgttaggagtgactgaagtgcaggagttgcttcttgctggtggaagccaaacacctagatcagtgcatgaagtaattgcacatttggtcagccgtctttcacgttgggatgacagattattccggaaatatgtatttggggaagcagatgaaattgaattgaaatttgtgaataggagaaatcatgaagatcttaatcttgttagcatcatactgaatcaggaaatcagaaggttagcaacacaggtaatcagggttaaatggtcacttcatgcaagggaagagatattaattgagcttctcagacatttgaggggtaatgccacaagagctattctagagagtattagaaagtgtacgagggacatgttggaagagcaggaagctgtgcgcgggcgcttgttcactattcaggatgttatgcagagcactgtccgtgcatggctacaagatagaagcctcagagttacacataatctggcaatttttggcggcggtggcatggttttatccataatcactggccttttcggaatcaacgtcgatggcatacctggagcgcagaacaccccctacgcttttggtttgttcgcgggacttctcttctttgtagggatcgtcctaatcggcatggggatgctgtatcttgggttacagaatccagttaacagtgagaaggtgaaggtgaggaagctggagctccagcacctggtttcgatgttccagcacgaagcggagcagcatggcaaggtcagggaaggtgttagccggcatggcgcctcgccgagttcatccacggcctctgatgaagggtacattcttatctcctgagatgggagatttatttgctgacgtgcaaggtcttgttttgaaaggctggaactgaagagaagtcgggtaaatggtatacttacacgtgtcttaagaattgtaattgggggatttgacatcgaaacgttggatatgataattgtagcagcagattggctttcctctgttgcttgagatcgcggctgtgatcgtttctta

SEQ ID NO: 147594 - DNA, 2095 bp, Zea Mays
cacgggagggagtttgggttggggaccggatccaccaatttttcttccggcgatgggaaaacgaaagagacctgcatctgattccattctggaagcaccccactccaatccactctacatgtcccacgctcagacccgggtccctcaccgccgtctctcgcgctccggtaaccgcctccacctccgcacctgacccctccgcctccgcctccttgaaaattccttttgctgctccaacctgcgaagctagttcactgtactcttgcttgcttataacgtagcgtgcggtggacggggtttgccagcgacttcaagaaaggtagatataatttgatgggaagatgaatggtgcagaggaggaggagccgcctcacgtcagcagcatgcccaagacacaagacggtgttaccaagcccagtctagggaaagagcccatcccagggagcgagctctggacggatgggctcatctgtgcttttgagctggtcaagagtcacaggaagcctgttcagcacaaatcatggctggcaactgagcagatacaggagaagggccccactatgtgcacgaggaagcactcaagaaggaatgggcaccagatcactgagccgaaagtggatgagagcattgtgttggaaaacccccagcagactgatttcagtaacgatccttcagtgctcaaagataggccattgtatgctggggagattttggatcataaatgggtgcctattggatggaataggatcgccgagctggtcctgagggttcagtcagactccagctgggagaatgagttgatggagatgagtgatagcgaggatgattacaccgtggctgatcttgcagctccatactggcagcgccctgtgggacctacttggtggtgtcatgtcaccgcaggccatccttcaatagatgcatggttgaatagcgctcactggatgcatcctgccatcagaattgcactgagagatgagagcaaactgataagcgaccggatgaagtacctgctctacgaggtcccagttagagttgcaggagggctgttatttgagcttcttggccagtcaataggagacccaaatcatgaagaggaagatatacctattgtgcttaggtcttggcaagcacaaaattttcttgttacaacaatgcatgtcaaaggcccttcatccaatataaatgtgttaggagtgactgaagtgcaggagttgcttcttgctggtggaagccaaacacctagatcagtgcatgaagtaattgcacatttggtcagccgtctttcacgttgggatgacagattattccggaaatatgtatttggggaagcagatgaaattgaattgaaatttgtgaataggagaaatcatgaagatcttaatcttgttagcatcatactgaatcaggaaatcagaaggttagcaacacaggtaatcagggttaaatggtcacttcatgcaagggaagagatattaattgagcttctcagacatttgaggggtaatgccacaagagctattctagagagtattagaaagtgtacgagggacatgttggaagagcaggaagctgtgcgcgggcgcttgttcactattcaggatgttatgcagagcactgtccgtgcatggctacaagatagaagcctcagagttacacataatctggcaatttttggcggcggtggcatggttttatccataatcactggccttttcggaatcaacgtcgatggcatacctggagcgcagaacaccccctacgcttttggtttgttcgcgggacttctcttctttgtagggatcgtcctaatcggcatggggatgctgtatcttgggttacagaatccagttaacagtgagaaggtgaaggtgaggaagctggagctccagcacctggtttcgatgttccagcacgaagcggagcagcatggcaaggtcagggaaggtgttagccggcatggcgcctcgccgagttcatccacggcctctgatgaagggtacattcttatctcctgagatgggagatttatttgctgacgtgcaaggtcttgttttgaaaggctggaactgaagagaagtcgggtaaatggtat

SEQ ID NO: 147595 - DNA, 1943 bp, Zea Mays
cacgggagggagtttgggttggggaccggatccaccaatttttcttccggcgatgggaaaacgaaagagacctgcatctgattccattctggaagcaccccactccaatccactctacatgtcccacgctcagacccgggtccctcaccgccgtctctcgcgctccggtagatataatttgatgggaagatgaatggtgcagaggaggaggagccgcctcacgtcagcagcatgcccaagacacaagacggtgttaccaagcccagtctagggaaagagcccatcccagggagcgagctctggacggatgggctcatctgtgcttttgagctggtcaagagtcacaggaagcctgttcagcacaaatcatggctggcaactgagcagatacaggagaagggccccactatgtgcacgaggaagcactcaagaaggaatgggcaccagatcactgagccgaaagtggatgagagcattgtgttggaaaacccccagcagactgatttcagtaacgatccttcagtgctcaaagataggccattgtatgctggggagattttggatcataaatgggtgcctattggatggaataggatcgccgagctggtcctgagggttcagtcagactccagctgggagaatgagttgatggagatgagtgatagcgaggatgattacaccgtggctgatcttgcagctccatactggcagcgccctgtgggacctacttggtggtgtcatgtcaccgcaggccatccttcaatagatgcatggttgaatagcgctcactggatgcatcctgccatcagaattgcactgagagatgagagcaaactgataagcgaccggatgaagtacctgctctacgaggtcccagttagagttgcaggagggctgttatttgagcttcttggccagtcaataggagacccaaatcatgaagaggaagatatacctattgtgcttaggtcttggcaagcacaaaattttcttgttacaacaatgcatgtcaaaggcccttcatccaatataaatgtgttaggagtgactgaagtgcaggagttgcttcttgctggtggaagccaaacacctagatcagtgcatgaagtaattgcacatttggtcagccgtctttcacgttgggatgacagattattccggaaatatgtatttggggaagcagatgaaattgaattgaaatttgtgaataggagaaatcatgaagatcttaatcttgttagcatcatactgaatcaggaaatcagaaggttagcaacacaggtaatcagggttaaatggtcacttcatgcaagggaagagatattaattgagcttctcagacatttgaggggtaatgccacaagagctattctagagagtattagaaagtgtacgagggacatgttggaagagcaggaagctgtgcgcgggcgcttgttcactattcaggatgttatgcagagcactgtccgtgcatggctacaagatagaagcctcagagttacacataatctggcaatttttggcggcggtggcatggttttatccataatcactggccttttcggaatcaacgtcgatggcatacctggagcgcagaacaccccctacgcttttggtttgttcgcgggacttctcttctttgtagggatcgtcctaatcggcatggggatgctgtatcttgggttacagaatccagttaacagtgagaaggtgaaggtgaggaagctggagctccagcacctggtttcgatgttccagcacgaagcggagcagcatggcaaggtcagggaaggtgttagccggcatggcgcctcgccgagttcatccacggcctctgatgaagggtacattcttatctcctgagatgggagatttatttgctgacgtgcaaggtcttgttttgaaaggctggaactgaagagaagtcgggtaaatggtat

SEQ ID NO: 147596 - DNA, 1775 bp, Zea Mays
aaccccaagtccccaccgctgctgtgcggcaccatcaccattcaccacaccatcaggaatcgggcgccacaccacccacaactctccaccccaccctcgccgcgcgttgctcagtcgcagcgagcgaggcggggccacaggccacagcgcgagcggggcggggcggggcggggcggggcggggcgggagggagggccagggatctctactctcgtccgtgcgggggcgtgggcgtcgcatgcggcggcgcgccggggcaaatgcgggtaacctcacggtcggaggagcgctgacgcggcggcggcagccagggagcgatgcaggcgccggagcagcagcagcagcaccagcagcggcagaggaagggttcatcagagatggacttcttcagtgaatacggtgatgctaacagatacaaaatccaagaggtcattggcaaaggaagttatggcgttgtttgctcagctgttgaccaacatactggcgacaaagtggcaatcaagaaaatacacaatatcttcgagcacttatctgatgctgcacggatcctacgtgagatcaaactacttcggctattacgccatcctgatatagttgagatcaagcatataatgctgcctccatcaaggagggacttcaaagatatctatgttgtatttgagctgatggatacagatctccaccaagtcatcaaggcaaatgatgatttaaccagagagcatcatcagttctttctctatcagatgctccgtgcactgaaatacattcatactgctaatgtttatcatcgtgatttgaagccaaagaatatattggccaatgctaactgtaaacttaaaatatgtgattttggattggcaagagtggcattcaatgacactcctacaacagtattctggacggattatgttgctacaagatggtatagggcccctgaactgtgtggatctttcttttctaagtattcaccagctattgacatatggagtatcggttgcatttttgcggaagtcttaactgggaagcctttgtttcctggaaaaaatgtggtccaccagttggatttgatgactgatctcttgggtactccatcacttgatacagtttctcgaattcggaatgagaaggcaaggaggtatttgaatagcatgaggaaaaaacagccagtatcatttcccggaaggttccctaaagcagatcctgccgcgctcaaacttttgcagaggcttttggcatttgatcccaaggataggccaactcctgaagaggcattggctgatccgtattttaaaggcctcgcgaaagtagagagagaaccatcatgccagccaataacaaaaatggagttcgagtttgagcgaagaaaggtgaccaaagaggatgtcaaggaacttatattcagggagatattagagtatcatcctcaacttctcaaggattacatgaatggaactgagaaaacaaactttatatatcctagtgctgttgacaatttccgaaggcaatttgctaacttggaggaaaatggaggaaagagtgtggcgcacaccgcttcatcagacaggaagcatgtttcgctcccaaggtgacagattttcagggttctcattctatgatttaggctgctatgttctgcttttcgttaaaaaacctttttttgcctgaataaattatattggattccacagtttcctagttttttgggattaaaatgaattagcttacgtttgcatggccgagttggttaggtggtttgagtagcactcctcaagtct

SEQ ID NO: 147597 - DNA, 2678 bp, Zea Mays
aaccccaagtccccaccgctgctgtgcggcaccatcaccattcaccacaccatcaggaatcgggcgccacaccacccacaactctccaccccaccctcgccgcgcgttgctcagtcgcagcgagcgaggcggggccacaggccacagcgcgagcggggcggggcggggcggggcggggcggggcgggagggagggccagggatctctactctcgtccgtgcgggggcgtgggcgtcgcatgcggcggcgcgccggggcaaatgcgggtaacctcacggtcggaggagcgctgacgcggcggcggcagccagggagcgatgcaggcgccggagcagcagcagcagcaccagcagcggcagaggaagggttcatcagagatggacttcttcagtgaatacggtgatgctaacagatacaaaatccaagaggtcattggcaaaggaagttatggcgttgtttgctcagctgttgaccaacatactggcgacaaagtggcaatcaagaaaatacacaatatcttcgagcacttatctgatgctgcacggatcctacgtgagatcaaactacttcggctattacgccatcctgatatagttgagatcaagcatataatgctgcctccatcaaggagggacttcaaagatatctatgttgtatttgagctgatggatacagatctccaccaagtcatcaaggcaaatgatgatttaaccagagagcatcatcagttctttctctatcagatgctccgtgcactgaaatacattcatactgctaatgtttatcatcgtgatttgaagccaaagaatatattggccaatgctaactgtaaacttaaaatatgtgattttggattggcaagagtggcattcaatgacactcctacaacagtattctggacggattatgttgctacaagatggtatagggcccctgaactgtgtggatctttcttttctaagtattcaccagctattgacatatggagtatcggttgcatttttgcggaagtcttaactgggaagcctttgtttcctggaaaaaatgtggtccaccagttggatttgatgactgatctcttgggtactccatcacttgatacagtttctcgaattcggaatgagaaggcaaggaggtatttgaatagcatgaggaaaaaacagccagtatcatttcccggaaggttccctaaagcagatcctgccgcgctcaaacttttgcagaggcttttggcatttgatcccaaggataggccaactcctgaagaggcattggctgatccgtattttaaaggcctcgcgaaagtagagagagaaccatcatgccagccaataacaaaaatggagttcgagtttgagcgaagaaaggtgaccaaagaggatgtcaaggaacttatattcagggagatattagagtatcatcctcaacttctcaaggattacatgaatggaactgagaaaacaaactttatatatcctagtgctgttgacaatttccgaaggcaatttgctaacttggaggaaaatggaggaaagagtgtggcgcacaccgcttcatcagacaggaagcatgtttcgctcccaaggacaaccacagttcattctaatccaatccctccaaatggaacctcccaagttccccgaaagattcccacaggtagaccaggaagagtggttggttcagtaataccatttgagaacgcaactgctgttgatccatacagccaacgcagggtggtgaggaatccagtgcttcctccagccacctcaaacctgtcagcatacacctatcaccggaagtcagacaactcagatggagaactccaacaggagctggaaaaggaccgcatgaagtaccagccagcacagcgattcatggacagcaagctagtatcacacatgtcccctgacctgaggtcttcctactacataccaaaagctttcccaaaagccgacgcggcagatagagctgctttgcattcaaacatgattcatggaatcgccccttttagtggcatcgctgctgcaggtggaggtggctacaacaaggttaatggggttcagtatggagtttctaggatttactagttctagttgcattgaccatctccagaacacctgatctgagttgaagtaataacatggcgaacagtgaaaagatttaggtgccaaagaactgccatgttgactccgagccgaagatacggagcatgaagagtatggtctccgatctcggatcaaggaggaagtgtgacgtcagattgaaaaacagataatattgggcaacagtcatggttctgttcattggacatagcttttcggaaagcaatgccatcaccccgcggcaacggtaaaataaaaggagagaaaaaaaggcagtgccgtcagttggttgctgcttataagagtcaaaggggagcagagacaattattacatggaaaattatgtactttgcaagaacggaaacattggggaataaaaaatagttagtctacgtttacctctctgtatataaaaaaagtgacttgattttatgtattacggctggtgagacccgcttctttaattcaaagctgtgaagttttggcctatattttgctctataataaagttcagattggtacattgagcctgtttggtatccgggactaaagattagtcactctattttagttcta

SEQ ID NO: 147598 - DNA, 706 bp, Zea Mays
ctccttgactctatcgttctgcctaccccaacaggccaacactcactcgagtactcgacaccgcccctctgatatggctcaggcacgcgtgcgccttactccggccggccgcacgccggccgccacgttcctctcgggctccaaccccagacccgcccacctcaccttcttcccgaagcttacccctacctccctctccgccgccgcagctgccaatgcgccgccgccccacatcgtcgtcgtgggctccgccaacgccgacatctacgtcgaggtcgaccgtctcccgctcatcggcgagaccgtggcggcccgcgcgggacgcagcctcgcgggcggcaagggcgccaaccaggccgcctgcggtggccgcctcgcgctgggccctacctacctcgtggcgcgcgtgggggatgacgccaacggccgactcctcgagggtgccctagccgacgctggtggtgtccgcaccgaccgcgtcgcccgcgcggccgatgcgccatcgggacacgccgtcgtcatgctcatgcccgacgggcagaactccattatcatcgtgggcggggcgaacatggagggctgggcggcggggatcggttcggaggacctggaattgatccgaaaggcaggcgtgctgctgctgcagagggagatacccgattgggtcaacgcgcaggctgcccagatcaccatgcagcgggactag

SEQ ID NO: 147599 - DNA, 744 bp, Zea Mays
aagaagattaagacgccccttaacctttcccttgtgcagggtgtgcaagaagtactagttaaacttggatcacaaggatctgctttgttcgtcgagggagaggagccaatcaggcagccgatagttcccgccacagaagtcattgacaccacgggggctggtgacacattcacctcagcgttcgctgtagccctggtcgaggggaagcctaagagggagtgcatgagatttgctgctgctgccgcctctctgtgtgttcgagtaaagggggctatacccagcatgcctgacagaaaatcggtgatgaagcttctggaatctgtgggagtcgaatagccgcaaaaatggcgttggtcgtgcgaatttacagagcctcgttttggcggcgatagagtgagcaccttgggtgtctccggtacgcggaattcgtgggatccatcgactgccgcgacgccttcacgtgctccccgaataatgcgacggtctccatcctcgccgatcccggatgaaacaaacgcattttccggtgccgcccggatggaacccccggcccccacacaaaataagaaacggcatcttgtgcgtttattatggccacacgtcgcccgttgtagacgcactccctcccccggttccgtgaacgcaataaacagtttcacactgggccggagctatcgcacggtaactcaggccttgcccttgtgcaagccaatgtgtttatctgaactgactccgtccgaggcc

SEQ ID NO: 147600 - DNA, 732 bp, Zea Mays
aagaagattaagacgccccttaacctttcccttgtgcagggtgtgcaagaagtactagttaaacttggatcacaaggatctgctttgttcgtcgagggagaggagccaatcaggcagccgatagttcccgccacagaagtcattgacaccacgggggctggtgacacattcacctcagcgttcgctgtagccctggtcgaggggaagcctaagagggagtgcatgagatttgctgctgctgccgcctctctgtgtgttcgagtaaagggggctatacccagcatgcctgacagaaaatcggtgatgaagcttctggaatctgtgggagtcgaatagccgcaaaaatggcgttggtcgtgcgaatttacagagcctcgttttggcggcgatagaggtgtctccggtacgcggaattcgtgggatccatcgactgccgcgacgccttcacgtgctccccgaataatgcgacggtctccatcctcgccgatcccggatgaaacaaacgcattttccggtgccgcccggatggaacccccggcccccacacaaaataagaaacggcatcttgtgcgtttattatggccacacgtcgcccgttgtagacgcactccctcccccggttccgtgaacgcaataaacagtttcacactgggccggagctatcgcacggtaactcaggccttgcccttgtgcaagccaatgtgtttatctgaactgactccgtccgaggcc

SEQ ID NO: 147601 - DNA, 348 bp, Zea Mays
atgaaggcgaggtcgcagattgcgccgaagcctctcaaggcggtggcgatggcccccagaccgagcggccctaagcggaagccgaggccgaagccggcggggaagggcgacccccgcgcacccaagaagccacccaccaccttcttctacttcatggaggattttcggaaggtttataagcaagaaaaaacaagtgtaaaatcaatgcaggaaatagggaaggcatgcggcgaaaaatggaatacgatggcatttgaggtcagtattttctctttgcagcgtgatagttgttttgcattagttatttactcccttattctgcctgctgatgtaaattggtcgattcca

SEQ ID NO: 147602 - DNA, 2389 bp, Zea Mays
tggcactaggcctggtcagtggtcacgcccggttcccacatgtcagcgccaaacccgtcgtaactcgaggcccgccccgaccccgagtccacctctttcacccagcccggcgaccccgccgcgctcctgcctcgcctcgcctcgccgtcggcgaccgaccccacgtctgcccggcgatgtcctcctccgtatccattgcggcagagtgggatctcctctccgatcgcttctaccgccggctcacactctactcacctctcccatggtccaccccagccgcggccggcgcgacctcgtcctcctccggcgtcagcggtgctgtgatcggtcgccttgacctgtccacccacatcgtcgccgccgcgccctttggaggcccgatcgccgccgtccgcgacgactctaagatcgtgcagctccactccgagccatcccgccgccgcgtcctcctcttctcctcctccggccacccaattgcctccgcgccctggccaccccttctcccacgcctccactcgctcggtttctccagctccctcagcctcctcgcacttctctccgacggctcgctcctccgcttccgcctccccgatctgcaacccagcccttgctccagtcccgttcccctgctcccgccggcctccggcggcgtcgccgacgctctattctggggcggcggtgtagccatcctcacggaagacaaccgcgtcgtggtggccactgacatcgaggtcgacgatcctcacccccgtcacctcgccgacccaggcatcggtgatgaggaacatgttctgtgtatggccgtggtggaggcacagtttgtcatgtcagggagcccagaagtgctgcttgctgttggcgaccgggtcattgcggttgacgaggatggcgtacaagtgcttggggaagagctggagattggacccgtgcagaagatggcagtttcacccaatggcaagctcctcgcagcatttgcacatgatggtcgccttctcgttattcccaccgatttctctaggatcatattcgagtatgagtgcgaatctgcattgccaccagagcaaatagcttggtgtggactagacagtgtactcgtctactggcctgaagtgcttttgatggttggtccaaatggagatcctgtccaatacaattatgatgaacccataaaactgattcctgagtgcgatggtgtaaggatcctatctaactcaagtatggaatttctacaccgagtctcagactctaccacgtcaatttttggcattggaagcatgtccccagcggcattactgtatgatgctcgtgatcactatgacaggcaaagtgcaaaggcttatgacaactatcaattaatatcatcttcattgcctgaggcaattgaggcttgcatcgacgctgctggccatgagtttgatgtttcacgccagcgcacattgctgagagctgctacatatggcctagctttctgcagtcgatttccacatgaacgctttcaagaaatgtgcaaaatgttgagagttctaaatgctgttcgtgatcctgagattgggatgccactgaccattcatcagtacaagctgcttactacatcggtgctcattggacgtctcattaatgctaatcagcaccttttggcccttcgcatctctgagtaccttaacctgaacccggaggttgtgataatgcattgggcatgtgagaagataacagcatcaacaactcttccagatacagtccttcttgatggtctgcttgataagctcaggctatgtaaagggatatcatatgctgcagtggcagctcatgcagataacagtggtcgacgaaggttggctgcaatgctcgttgatcatgagtcacagtcctctaagcagatccccttgttgctcagcatcgatgaacaagacaaagcattatcaaaggcaattgaaagtggcgataccgatcttgtgtaccttgtgctattccatatttggcagaaggtagctgtagagaagaaagctcctttggatttttttggtgttataaatgcaaggcctgtggctagagatttgtttatggcatatgcaagacattctaagcatgaagaattgaaggacttctttttatcgactgggagacttcaagatgccgcctttcttttgttgaaggaatcatgggaattggagaagaaccccatggcaagcaaggggtctcctctccatggtccacaagtgaggctcattgagcaggcccatagactttttgctgaaaccaaggaacatgtttttgagtccaaagcttctgaagagcatgccaaattgctaaggtatttgatgctttattatgattatgatgccaaatttgtcatgtgagtattgtagaaagagggaagaatggattgaat

SEQ ID NO: 147603 - DNA, 488 bp, Zea Mays
cttcacggaagcatatgttgttggagttgccttgtgatgaagaaggtgcaaatgtgagccaaaatgttggtgtgtccgcatcatcagccacgacccacacctgccgctgccagagcttctcatgaacaaggtgaaaatctagaaggtggaagtaatgttgatggggatgattcttcaaaggaaaagcaatcaaagaagtccacttcagatgtttagcagtaattttaagaatattagagcatttgtgctagctgttaaggggtatccattgcaatgggaggagtttcaaaaatgtgctactgaatgtggtgtggacacaaaggttggactctctattgatgttgctactaggtgtaattcaacatattgcatgttgagggatgcactacataacagggctgcctttgaaaggcttatgtcatatgaacgtcacaggtatgagaaaattgcaccttcctttgaagaatgggatttggcaaagactctta

SEQ ID NO: 147604 - DNA, 545 bp, Zea Mays
cttcacggaagcatatgttgttggagttgccttgtgatgaagaaggtgcaaatgtgagccaaaatgttggtgtgtccgcatcatcagccacgacccacacctgccgctgccagagcttctcatgaacaaggtgaaaatctagaaggtggaagtaatgttgatggggatgattcttcaaaggaaaagcaatcaaagaagtccacttcagatgtttagcagtaattttaagaatattagagcatttgtgctagctgttaaggggtatccattgcaatgggaggagtttcaaaaatgtgctactgaatgtggtgtggacacaaaggttggactctctattgatgttgctactaggtgtaattcaacatattgcatgttgagggatgcactacataacagggctgcctttgaaaggcttatgtcatatgaacgtcacaggatgaagacctagatgatgatcatgatgatggacgtgaggcatcgttgtaagcttgttgatgatgacctagatgatgataatgcgacatgaatgctttgaatgtttctta

SEQ ID NO: 147605 - DNA, 782 bp, Zea Mays
cacatgaacaggttgggcctcgaagccttgaacgtggtcctcagcttcctggtcggcggcctgaccttgcggtgcacgagcgggaacttgatctcactgttgtggaactgcttagtgttgtccctcttgcagagcttgaagtgcaccgtcgcagtcttgatgatctggatgcagggggacctcacgcggtggcgagaggccatctcgttgtacatctgctccacagcgccattcagggttgtgtcgcggtactccttgtacatgttgtggtagccggttctgctctggtagcgcagccagatgccacgtacctcgttgatggccaggacctggccgttgctcttcttaaccttcttcaacttcctcaagaagtacctgcgcactcacaacaacagtacgttaatcgacgacccgcatcgaaaatggggggaaaataatccttcaacaaggaaacctgaaggaatcgcacatatagatggcggcgctcaccagaacttgctcttggcgcggacctcgttggtggcccagagcttcatgcggtagatcttggggtgctcatcgccgggcgtcggcagcgcgcgccccaccacctggtactgatggaactgcacacgtgcgagagcaggcagcgaatcaaacccatggatcaaattctaatcaccgaagtccgagagacgaagcgagagaagactcaccctgaaggccaccatttccgctagctggtcgaaccctagcctaacttagacgacggtggcgagcggaggcggcggcggggcgtgaga

SEQ ID NO: 147606 - DNA, 940 bp, Zea Mays
catggtggcattccagtaaattttacatcaaatgattaatgagggtgtgcattcatgctactccgtttgtcaaatgtatatgtccaactacaaataggagcatacatcattttcgttacaccctatcctttgtacgcacaacacatgtacaacacaggtaacaaagtagccgagcaacggacatttacattaaccggactgctggtaattgaaggcataatgctcaccacacctccgctccttttgtggcgccaagcagcacagcaattgcagcaagcgaggcctcaatagtgcaagcaacatatcctggtttctccctgtaatcacgtactcggacacaaatcagcacaaaagctccaagataccatggaatggcagcaaagaagaacccaattataaacctaaaccaccccatgccaaggccacaacatggaagaggacggattctaacaggccttccttcaacaacaggaatataaccttgagcgatctggtagccttgggcgtagtacggcgcggcggccgagtagggttgctgcgggggtgggtagacggcatacgacgccggaggaggctgcgggtagtgctgcatcccaggcggcgccgccggctgggggaacccgaccgccggctgcggaaactccccggaggctccggatgggggaccaaaggtgccgtactggtgctgcggcggcgccgacggcgggtacccgtaagaggacgaggagtccgccgagcgggccttcccgtcggcgtccggcatctggccacccatggtggctcccgcggtggcaaaggttagttaggtttggggaattgcccagttgggacgcaggagaggagggaaggcggtcacgagagaactagggaattgcgcgttgtttgtttgtttgttgatgaagacgattaacgtgtgcctccagcctggacggcggtgttg

SEQ ID NO: 147607 - DNA, 1931 bp, Zea Mays
gtgtagtgtagcgacaaggtgcgacagcagggcagctagggagctcactgatcttcctactgttaattcctccgatcttctcagccgctgttctagagtgtcgtcgtgagctcactctcacaataaggagaagatctggtgctgagaaaggggggcaacgagaggagagaagaaagataatcggctcggcatggcctcctccttcaacaacaaaaccagtcactggccgagcatgtttaggtccaagcacgccgctgagccgtggcaggcgcagcctgacatcagcagctcgccgccgtcgctcctctcaggtggcggctctagcagcaccaccaccatcggccgctgcctcaagcaccccctctcaggttactcaggtggcgaggagcggaccccggatccgaagccccggtggaaccccaggccggagcagatccggattctggaggccatcttcaactccggcatggtcaacccgccgcgcgacgagatcccccgcatccgcatgcgcctgcaggagtacggccaggtcggcgacgccaacgtcttctactggttccagaaccgcaagtcccgctccaagaacaagcagcgcaccggacagctggggctgggccttgcgcgcgcgccgggttgcggggccgctgcgccgcccgtcacgccgcagcccttgatccagaaccaattccaggtgctcgcctcgcccgcgcaggcgccagcttcctcgtcctcgtcctcctccgaccgctcctctgggtccagcaagccggcgccgcagccgatgtccgcgacggcagcggccatgaactttccagggccgctcggcgcggcgtgtgcgcagatgtactaccaagcccaccccgtggcgccggtctcggcgttgccagcgcacaaggtgcaggaccctgtagcctccgacgagcccgtcttccagccgtggccacaaggctacttcctgtcggctgccgaggtcgccagcattctcgggggccagtacaggcacgacgtgcccgtgcagcagcagccaccggcgacgttgcctgcgggagcgttcttggggctgtacaacgaggtgacagagccgactgtcactggtcacaggacatgcgcctggggcccggcggggctcgggcagttctggcccgtgggcggcgctgatcaccatcagcaccacaagcacaataccaccgcggcgaccaacaccgtagcaagggacgcggcgcacgagcacgccacgacgctggggttgctgcagtacggcttcgaagctagcgcggccatggagacggcttccgcggcggtgccccttgctgcgtcgccgggaaccgctgcgagcgtggcgacggctgggctcacatctttgcctgcaagtactaatgctgttgtcgtcaactatgatctgctgcaaggactggcagtgcccgggtccgggtccggggccgtcggtgtcagcaccggcggtgcaccgcctgtcgccgttgccgcggcgcccacggcagcgcaggagggcgtcgtcgtagcactgtgcatcacggacagcgtcacgggcaagagcgtggcacacaacgtcgcggctgccaggctcgacgtgagggcgcagttcggcgaggcggccgttctgctccgcgccgtcggcgaccgcggcgggctcgacctcgtgcccgtccccgtcgacgcgttgggctgcacagtggagccgctccagcacggtgccttttactacgtgctggtataacaaattgagcgtacgtgacgcgtgaagaaagctagagttcccggtgtgctgcgcgaaagcgcggatggcgtacgtaggtgttgtgtgccgatttattaagtcctggtttaatttgtctcgtatattatgtatgcttgattgcttgcacagttgcactgaagtgcactaagaacgtaagaactatatcgtattgcaa

SEQ ID NO: 147608 - DNA, 2004 bp, Zea Mays
gtgtagtgtagcgacaaggtgcgacagcagggcagctagggagctcactgatcttcctactgttaattcctccgatcttctcagccgctgttctagagtgtcgtcgtgagctcactctcacaataaggagaagatctggtgctgagaaaggggggcaacgagaggagagaagaaagataatcggctcggcatggcctcctccttcaacaacaaaaccagtcactggccgagcatgtttaggtccaagcacgccgctgagccgtggcaggcgcagcctgacatcagcagctcgccgccgtcgctcctctcaggtggcggctctagcagcaccaccaccatcggccgctgcctcaagcaccccctctcaggttactcaggtacgccaccgtcgtccctactccttcctagatgtggcgaggagcggaccccggatccgaagccccggtggaaccccaggccggagcagatccggattctggaggccatcttcaactccggcatggtcaacccgccgcgcgacgagatcccccgcatccgcatgcgcctgcaggagtacggccaggtcggcgacgccaacgtcttctactggttccagaaccgcaagtcccgctccaagaacaagcagcgcaccggacagctggggctgggccttgcgcgcgcgccgggttgcggggccgctgcgccgcccgtcacgccgcagcccttgatccagaaccaattccaggtgctcgcctcgcccgcgcaggcgccagcttcctcgtcctcgtcctcctccgaccgctcctctgggtccagcaagccggcgccgcagccgatgtccgcgacggcagcggccatgaactttccagggccgctcggcgcggcgtgtgcgcagatgtactaccaagcccaccccgtggcgccggtctcggcgttgccagcgcacaaggtgcaggaccctgtagcctccgacgagcccgtcttccagccgtggccacaaggctacttcctgtcggctgccgaggtcgccagcattctcgggggccagtacaggcacgacgtgcccgtgcagcagcagccaccggcgacgttgcctgcgggagcgttcttggggctgtacaacgaggtgacagagccgactgtcactggtcacaggacatgcgcctggggcccggcggggctcgggcagttctggcccgtgggcggcgctgatcaccatcagcaccacaagcacaataccaccgcggcgaccaacaccgtagcaagggacgcggcgcacgagcacgccacgacgctggggttgctgcagtacggcttcgaagctagcgcggccatggagacggcttccgcggcggtgccccttgctgcgtcgccgggaaccgctgcgagcgtggcgacggctgggctcacatctttgcctgcaagtactaatgctgttgtcgtcaactatgatctgctgcaaggactggcagtgcccgggtccgggtccggggccgtcggtgtcagcaccggcggtgcaccgcctgtcgccgttgccgcggcgcccacggcagcgcaggagggcgtcgtcgtagcactgtgcatcacggacagcgtcacgggcaagagcgtggcacacaacgtcgcggctgccaggctcgacgtgagggcgcagttcggcgaggcggccgttctgctccgcgccgtcggcgaccgcggcgggctcgacctcgtgcccgtccccgtcgacgcgttgggctgcacagtggagccgctccagcacggtgccttttactacgtgctggtataacaaattgagcgtacgtgacgcgtgaagaaagctagagttcccggtgtgctgcgcgaaagcgcggatggcgtacgtaggtgttgtgtgccgatttattaagtcctggtttaatttgtctcgtatattatgtatgcttgattgcttgcacagttgcactgaagtgcactaagaacgtaagaactatatcgtattgcaatccctgtgtatcctgaaagatagtagtatggcttaaccgt

SEQ ID NO: 147609 - DNA, 86 bp, Zea Mays
tccaggtaccgcgccatcacgagcgcgtactaccgcgggcccgcgacgcggtgggcggcgctggtggtgtacgacgtgccccgcag

SEQ ID NO: 147610 - DNA, 459 bp, Zea Mays
gtgccccgccgcgtcaccttcgacaacgcggagcgctggctgcgggaccacacggacgccaacatcgtggtcatgctggtgggcaacaaggccgacctgcgccacctgcgcgccgtgtcacccgaggacgccgcggccttcgcccagcgccacggcaccttctccatggagacgtcggcgctggacgccaccaacgtagagcgcgccttcgccgaggtgctccgccagatctaccacgtcgtgagccggaacgcgctcgacatcggggacgaccccgccgcgccgtccagaggcaagaccatcgacgtcgacgccgccaaggacgagaggtctcgcctgttagggatgaaaacgggacgggaaattctcgtaccgtcccgtttcgaatactgtttttttctgaccgttttccaattgttcggtaaccgattagaaacgcttttggctgtgttcaagtga

SEQ ID NO: 147611 - DNA, 258 bp, Zea Mays
atgctgagggaagattattgtcatggctacccagactggatcaattccctctttgacgatgacaagtattacaacggtgaggacgatcacgatgagcttcatgcccttgataatcccgaggagccatcggtcatcgagatcataaggaccaatagggaggttgaaggtctggagttcaacgtggaggatgacatcgatgaggcttgtgacatgttcattaggagggtccgtagccagatgaacctgcagatattttag

SEQ ID NO: 147612 - DNA, 2628 bp, Zea Mays
tccatgccagcaaaccattgtagaatgctgcgaatactcccccgtctgaccttcctggtttctctactctctcttctgctgcactcatcggcgtcggcgccgcacacgctgggcgccggttcctcactgtccgtggaagaccacgcgcggccgttcctggtgtcccccgacggcaccttctcctgcggcttcctggaggccggcgacaacgccttctccttctccgtctggtacagcgacgcagtgaacaagaccgccgtctggacggcaaaccccgacgcggccgtgaacggccggggttccaggatctcgttccgtgacgacgggggcctggttctcacgggcgccaacgggacgacggtgtggaagagcaaaaccagcggcgcgggtctctccgtctccctcctcaactccggcaacctcgtcatctcggatgatccgtcgtcgaccggtggcggccgcaccctgtggcaaagcttcgactggccggtggacacactggtcccgtcgcagcggcttaccaaggacaccacgctggtgtccaggtacttcatcctatactacgacaacgacaacgtgctgcggctccgctacgacggccccgacatatcgagcatctactggccgaacccggaggacggcgtcttcccgaacggccggacatcctacaacagctcgagggtcgccgtcctagacgacgccggcgtcttcctgtccagcgacaacctgcgagtcgtcgcctccgacctgggcgtccccggagtcaagagacggctgaccatcgatccggacggcgacgtgagaatctacagtctggatccgtcgacagggggctggacggtgacgtgggcggcgatggcgcaggcgtgctccgtgcacgggcagtgcggccggaacgccatctgcgtatatcggccgagcctcagctgtctgtgcgcgccggggcacgagatggtcgaccggcacgactggcggcaaggctgcaagcccatgttcagcgacaccaccaactgcagccaagcggcgctgccgccggagcagcggtttaagttcgtcgaggtgccgcacaccgacttcttcggctacgatgtggcgtacaacacctcggttacgtttgagcactgcaagaaactgtgcttggagatgtgctcgtgcgccgccttctcctaccggccgttcgaagggcttggcaaatgcttcccaaaaggcttcctctacaacggctacacgtctccaaacttcaacggcaacatctacctcaaagtgccgatcggtttcgatccctcggctcggtcagtgtctgcacgtagctcccaaggccttgcttgcgatcctgacggccccgagatcgtgcaaggaactccggacacgttccggacatccagaggcaacgacaaatggtcgtacctgttcgcgttcgccggagtgctgggagttctcgaccttatcttcattgctacgggctggtggtttctctccagccagcagagcatacccagttcgctagaagaggcagggtacaggatggtcaggggccagttcaggaggttcacgtaccgggaactcaaggacgcgacagggaacttcaaggaagagctcggccggggcggctccggcgtcgtctaccgcggcgtgctcgacaaagggaaggtggtggccgtgaagaagctggcgaacgtggcggggggcgacgacgagttctgggcggaaatgacgttgatcggacggatcaaccacatgaacctcgtcaggatctgggggttctgctcccagggcaagcacaagctgctggtgtacgagtacgtggagaacgagtcgctggacaggcacctgttcggcacggaggacaggacgacgctaccgtggcgcgagcggtacaggatcgcgcttggcacggccaggggcctagcctaccttcaccacgagtgcctcgagtgggtcatccactgcgacgtgaagccggagaacatcctgctgacgcgggagttcgaccccaaggtcgccgacttcgggctggccaagctgtgcaagagggacgccggcgccggcgacggcgacagcatgcggctgtcgcgcatgagagggacggcggggtacatggcgccggagtgggcgctgaacgtccccatcaacgccaaggtggacgtgtacagctatggcattgtgctgctggagattgtcatggggtgcagggtgtgtgaccagatcacggcgggcggggagcgcctggagatgtcgcagatcgcccaggccttgagacaggtggtggcttccggcgacgtcgtgccattagtggacggtaggttgcaggggcagtttaatccccggcaggccctgcaaatggtgcgggtttccttatcgtgtatagaggacagggccaaccggccgacaatggacgacgttgccaaggctctcacagcctgcgacgacgaggacgagcatcccgcgtacaagtagagccgtactattaggatcaggacatataataagcttttcccttgtctgatacgctagaattggagggtatcctgtcaaattttacaaattaatattttacatataataagccgtctggtaacttggtaagcttctggtcttctgtcatgagtcatgaccacttgaaaaaaa

SEQ ID NO: 147613 - DNA, 635 bp, Zea Mays
tgtgcgatccagccaccagaaaattgtccccatgctcgcttgagcagcagcgctcggccacgccgtctgctactcccctgctcagccacggcaagtcgtcgacctagtgctgcaccctccctgctcgtcggccaccaggacgacatctccacgcgccgagttcctcccatggctatcccaaaccctagccgagatcccctcctgtgtcggccactatctccttcaccaggcgctctcctccacctacagctcgcccccgaccacagccgcacgccaacctcgcccttggtcatggagcagcaacaaccatggaaccccttcgtgtcgcgccctcgatgtgctcgatgaaataccgcagcgagctccacctcgatctgtgcagccctagtgtgacctcgccgaaccccaatgagaacccgttgttttccttgtgtttattcctctccggtacatgtattcgacgccgattaattaaatgctaaccatgtgtatatgtgtatgcttatgtgtgggatgtgaggaaaaatctcatatgtgtgaagcgagacaagccgtgcgatgattgtttggtgttcagtgttatgcttaaactggaaatcattatctactcggtgaggtcctgctattgttgtttt

SEQ ID NO: 147614 - DNA, 627 bp, Zea Mays
atggttgctacacacctcgacgctgagttgcagcacaacgagagacgtcctctcttgacgaacagagctgatggaaacaacaacatgagccccatgcaaaaggcaataggccaaacataccagagcactgcccacctcgccaaactccttccttctggcactgtcctttctttccagatcctggctcccaccctggcaaagcaaggccactgcagtgacatgaaccggatgatgacaggaggccttgtggtgctctgtgcgttgtcctgctgcgttctcagcttcacagacagtttcagggatgaggaagggaaggtccgatttgggttcgccacacccaggggattgtgggtcattgatggtggggctcctcttgatccacttggggcagcaggattcaggatgcggtttctagactttgtgcatgccattgtttcagctatgatttttgtagcaatcgcactgtttgaccaacacgtggtgtcttgcttctatccaacaccatccgaggatacaaagcaactactcacagcattgccagtaggaattggaatcattggaagcatgctgtttgttagcttccctaccactcgtcacagcattggctccacactctcttcacaataa

SEQ ID NO: 147615 - DNA, 1567 bp, Zea Mays
cgcaagtccgcaaagatcaaacccaagaaatctgagcaccagctacgctgctaattattccatcccatccatctctctccatctatccaaatattccatttaatttcttttcctcgctgctcagcagcagctgccgccgcacaaacacaaaacacactccactctgccacggaagaaaacaaaagaaatacaaagcctgagcgaaaagggaaggcggggtttggtttttattagctgcacacaatggcagcagcgatccaaacccaatccccagcgccgcagcgcgtgggtaataatcgtcccagttcgagcagttgcccttcccgttgctgttcctggcttgcggcttccccaatctctcctccacatccctatccttgccctcttcttcttcgtcgccttttacccacccatccgtcgcggcggtgttcgtggtgttcaagttattgtttgtgtcagtgttcctttcctcctcccggttcggtcatcggtgctggtattcttcgccacggagatccggccacacatcgattcgccttctttttcctcgctccgcgacgcggggtacaatatcgactggactgcgaggcatttggtgcgggcaggcgctacgaggtggggcgacaaaagttgtgaagtttatgcgccttgctttgcagaaggtgctcggatctaggtttccaggccgtcgatcgccgccatggacgccggcagggacggggacggtgccgggaaggcgccgccgaagggccccgccgatgccacgaccgtgcctccggcgccagtggcggcttctgcgcctgggtcgagcgcggggacctcagggtcgggggagaagccggtgaagcgggtgatgaaaaccccctaccagctcgaggttctggagtacacctatgcggtggagcattatccgtccgaagctaagcggctggagctgtcagcgaagatagggctttcggacaggcagctgcaaatgtggttctgccaccgccgcctcaaggaccgcaagccaccatcgaagcggcaacggcgggatgaagagtccgcactagcaccagtgatgcctccaccgccggtgttaccagcacctgtgatgccagtggcaagcagtgaccttatggtgggcgctcctgggccgtatgataagctgctgcagccggttcacttgcgaaggggtgctgggcggtcctcagcagtccctaggatttccatgccggatctcgggaggaggtattatgagccaccaccagttatgataacgccgttgatgcagctcacacaatatgagctccgtgtgattaattctgtggagtcacagctcggggaaccgttgagggaggatggtccagcacttggcattaattttgatccccttcctcctggcgcctttggtgcaccgattggtatgcatattgaaatctgaagtcgttgtgttttatgaaaaagttttaagctagtgaatgctcaaggtggcctgtatgtggatatgttcaagcttctcatatgccatggctgaatgattgttgattttggacacgtcgttttaaagtatttgacttaagtcact

SEQ ID NO: 147616 - DNA, 101 bp, Zea Mays
gagacccatcaagttacagtatgtgtgctgactgcctggagttatgttcagttggtattgggtctatggcgaggcccaaattagttttagggcagagtgga

SEQ ID NO: 147617 - DNA, 1173 bp, Zea Mays
atggccctcatccaaagcctcctgaaccataccacattagaaactgataccgtcctattcaaacttgttaccgctgttccagagcaacaaaagcagcctgtgcaatcttatgatacagatatattttctaggcatgatcaaaagctcttaaaggcttcagcatttttacctactatagaatccccatttgttccaaattcgtttaccgggaagagaaaatcaactgttggtaattctcccgtagtccaacctcatgttggatcacgggctgtccatgagtaccagttccttcctgagcaaccaagtgatacatatgagagggcaagtcctcactactatgacactccagtggaagcttcaaattccaggataccttctctcacatcaggatcacaacttctccatggatctgaggaggctgcgcctagttatgcttttcaaggtcacacatctggttctagcctgttgcctccttccagcaggccccaggtgtttccagtagcaccaacagattatgagatgacccagtttaatagcaaccttagttctgttcctgttgaaggccagtttgatacgtctcaggttgctgcatttgaagacccacctgtatcgtctgaaagaagagcttatcatgatgaagatacttctcgagtggaaagaaaacgaaaacataatgaagaagcaaagattgcaaaagaagttgaagctcacgaaagacgaattaggaaggagcttgagaaacaagattttttgaatagaaagagagaggagcaaaggcacaaggaaatggagagacttgagcgtgagagaagaaaagaagaggagagattactgcgtgagaggcagagagaagaagagaggttccaaagagagcaaagacgtgaaaatgagcgcatggagaagtttttgcagaagcaatctagacgagaagagaaacaaagacaaaaggagcaactccgaaaagagaaagaggcagcaaggcaaaaggctgccaatgaaagggctgctgcacgtagaattgcacgggactatatggaactggtggaagatgagcgtttggaattaatggaattagctgcacaaaacaaagggttgccctcaatgctgtatcttgacagcgacacattacagcagcttgattcttttcgagaagtaatatttcatttcaaatga

SEQ ID NO: 147618 - DNA, 2100 bp, Zea Mays
atggagcagagtgtgagagggggcagaggcggaggcttaggcatggtaagtcaatttcctcctgcaacagtgaaaatgaagttgccattttctataaagccttggactggatctgaggataacattggaaagcttttgatggtgtggaaattcttaattactttcactgatgttctgggtctttgtccagttacacttgatgagtttgttcagtctcttcatgattatgattcaaggcttttgggagaactgcatgttgctctgttgaaatccattatcaaggatattgaggatgttgctagaactccatcaattgcactaggggtgaatccaggaggtggtcatccacaaattgttgaaggggcatattcctggggattcgatatacgtagctggcaacgtcatcttaatcttcttacatggcctgagatattaagacagtttgctttatctgctggttctggaccccaattaaagaaaaggactgtggaagattctcactatcattatgataatgagggtcatgatggtgagaatgttatattggcacttcgaaatggtacagcagcagtgaatgctgttgctaagatgaaggaaagaggttacaccaatcgccgtagatcccgccaccgtctgactcctggaactgtgaaatttgccgctttccatgtgctctcgcttgaaggaagtaatggtctcacaatattggatgtagcagaaaaaattcagaaatctggattgagagacctcacaacaagcaagacacctgaggcatccatagctgctgctttgtctagggatgcaaaactttttgagagaactgctccttcaacatattgtttgaagtcgccttatagaaaagatccagctgattctgaggccgtgttgtcagcagcgcgtgaaaaaattagggcctttcagaatgtgctttctgactctgaagctgaaaaggaggcagatgaagctgagagggatgatgattctgactgtgatgatgctgatgatgaccctgatggtgatgatgtgaatattgaggtggaagaagacaaggatcctcttcttgccgtcaaggcacaagacgaagtaccgagtacaactacagttattggcataaagaccaagttagatagtgtaggtaatgcattgaactcatcaagtagttttactaaatcagcaaaaggtgctcctctcccttatttaggcaggtccagtgcagcagatacttctaatgattcacctcttggaggcccatcagctaatcatgaagtaacccctggcgattctgaaaatactcaaattgatgaaagcaatcaaattgagccttgggtatgtgcactagcagaaggagactactgcgatcttagtgttgaagaacgccttaacgcactggttgctcttgttggtgttgccactgaagggaactctattcgtggtgtacttgaggaacgtttggaattagcaaatgccttaaagaagcaaatgtgggcagaagtgcaacttgacaagaggcgtttcaaggaagaatttgctagcagagtacaatataactctggcatgagttttaagcctgatatatatcaagaaaacaacatgacagagattacttcaactcgagcctgtgatgcttacaaagaaaacgatggacatgttgggacaatcaacaattgtgagatgcttgatcagcatagtcagggtaatgctggtggtataacttatgatagaaatgtcgtaggccaggaaatccatgcaaccccagatacttcgtatgttcagcagtatgcttatgctgataaaacacgatctcagttgaaatcgtacattggtcaccgggcagagcagctctatgtttacagatccctgcccctaggtcaggatcggaggcgaaacaggtattggcagtttacaacttcagcatcaccaaatgaccctggctcaggaagaatcttttttgaatcggaagatggatgttggagagttatcgactcagaggatattagggatcccaaggcccccaagattaataggccttgtaaccatgtcctaagaaaccagacagctgccaccattaacctccttcctacccttctcacccccttctaa

SEQ ID NO: 147619 - DNA, 2170 bp, Zea Mays
tcctttgattctttagtggctgcccttgatacacgtggcacccgggaagcacagctgcgttcaatgttgcaaatgatcgagacaacctttaaggaagctattaaaaggagaagtgcaagtatagaattatctgctacagtgtatccaaagaatggagctactgacatgataagggcaaattatcatagagaggttggaagctcaagcagtactccttttaatgatacatctgatagtgtaacagcatattctgattcttttaaagtagagcttgggcgtaatgattttgagaaggcagctatatcaaaaagggcagatatatttttaaaatggatgtggagggaatgctacaatcaggaagagacatgtgccatgagatacggcaagaaaagatgctctgaattgttgcattcttgtaattgctgctatcagatttacctagccgaagaaagacactgttcttcttgccataagactttcaaatccatttacaatttttctgatcatacaacacaatgcgaagagaaatggagaactgacccttactggaagatgcaaatcgctgattattctgttccaataggaatggtattactcaagcttcagttagttttgattgaggcatatataccatcagaagcacttcaaccattttggactgatgtgtatcggaaatcttggagtgtgaagctttatgctaccaaatctattgctgagacattccagcttttgactgttctggaaggtgcaataataccagatcgcctctcttctgattttgaaacaacaagcgaatgtctaaactcacaggttatcgcaccccaaaatcctgtgttaccagctggatttgcttctgtccttccatgggttcctgacactacttctgctgttatgctccgagtgttagaccttgactcagctattttgtatgtgcaaaatcaaaagatggagagggatgatggaggttttatgaaatttccatcaaggtatacagttgttaagagcaaacaagaaacaattccactcgaaccaactggtatggatttgtatgatggaaggtggcttcctggtagtggccgtaggggacgtggccgtggaagtagaggaggtagcaggggaggcaggggccgaagtcgaggtggaaggatcccaagaggtgttagcagctcatcaaggatcgagttcaaggatggcattgctgcttctggtagagcgccaaggaagaatgcacgtcgaggtcgaggtcgaggtcgaggtcgtgggcgtcgaactgtcagacctcggcagccatctgtgggcagaggcagatcaattccaaaggaaaatttgatgggaagctttagcatgcttaccagctcaaaggctgccgacattgaggagtctccacgaagctctggcgcagatgagtggggcttggagaccagaatgacatacactgagcgtgacgagaacagttctggatcacgctatgaagataacgaggaaaacggccagcccatggacgaggattatgaagagcaggttccagattactcaatagactattctagtgggtcgaggcaccatgaaatgatgtccatgatggatcacgagactgacgaggaagatgaagatgctgaaggtgatgagaatgtggaagaagatgatgcagaccacgcagttgacgatgccgatgttgagatggacgaaggtgatgatgaaattggtgatgacggagaggatggcggcgttggcggggagatgactccggatgaggatccagatgctacttcatattcatctgactacagcgaataagaaagcagaaataagtgaccttatcctagagatcctccctcagcgtccctttgtgaaccaaaaggaaaagctaaggagcgatagatgtgcatactgtttttttaggcaccgcaggttctaatagatttcctgacgtatgcctactcattcgatgagtggttgtatcttgctaggtatgtgcatgtcactgtagaattccccgagctatacagtgtctaaggagagatgatatcatatcgcaatttgctaatttggttcccatgcgtcatcccgatcctaatctgatccttaaatagagcccattgtccccttaagtagaagtgatcttttatcatgagttttaccatctcttaaaagtaaatatgaaattgga

SEQ ID NO: 147620 - DNA, 1688 bp, Zea Mays
aaaatgatattttatagtggttgtggggtatagggggagtatttagggggaaccgctgcgggagatgaaaaaatagggggaaaaataggggggaaaagtgatataggggaaaaaatttagtagtaacggttgcggatagcctcacccgcttcctcccctttcggccctctctctcgctctaggcccctacccataagaaacttcgtcacggtctactctttctccgtcctagcaaaatcctccccgtactgagagccaaagaaacaacaaaggcaggaggccggcgaactacgcgaggaaaatttcgtttcccgggaggaagtcgggagtcgagacacgcgcgggtcaaaatcgcctccgtcgctgctgttgctgtcggaggcgagcaggaaggggaaagaacgagcttggagccttggacagctcaagaagaggggacggggaggcggcagcctgtgagaaggcacgtgacacgtgaaggagcccaagcgagggtagggaggaaccgaatcgagacatggactcggagcactggatctcgcgcctggccgccgccaagcgttactacgcggcgcagctcggccacgtcgacgatgtgcccgggatagggacggaggaggtggagatggagattgaggacgacgggggcttggagatggagatggagatggcgctggggctcggggacgcgacgtggccggatgtcgcctgcccctactgctacgaggaccatgacgtcgcgtccctctgcgtccacctcgaggaggaccacccctatgagccccactccgcgccctgccccatttgctcccaaagggttacaagagatatgcttaaccatatgaccatgcagcatggttacctgttcaagaacggtcacaggtctcgcagatacattattcccgagagccatgcaatttctgcattgagccgagatctacggggtactcatttacgggctcttctagggggtggtcatggccacagatcaagcaatgcagtgactacaaacatttccagcgatcctcttctttcgtcgtttggcctgggcttctcaccatcagatgcaccagaaccatcaaaatcggcgtcttctattccagatggcgcctcaatacgtaaggagacaccggttcagccttgggagtcgagtattgattcatctctcacaagcgaggaaagggagcaaaagcggaaacaggccaccggcagagcaacctttgtgcaaggcctagtgctctccactctatttggagactgattgttcgaaacagctctaggttcttgcacatgctagttcggcgcttactcctgcctggtccgcatagtcagatagtgctccgcccggtttggtgcatctaactctgatggcggggaaagttcgcctcaggaaacttagccgcgttcttctttgtttcagaaaagtgcgcagttgattctatcgtgatatagcttgatttaagctagctgttgtaccgttgtttttaccaatttaccagccagtaattcttatctgttagctcactggcagatcgtgtttgcaccaacatacataataacctgtaacatgtacttacacaaagcaagaaaggcgcttgttcgagcgcacattcttcttgttgtaagaccagttaagtattctcaggtatgcataatggagacgaatggtgcggttggactgaggttgt

SEQ ID NO: 147621 - DNA, 192 bp, Zea Mays
taacttcttatgatatcgcttccctttcgtctattgtttgcttatgatatttctattcacattttacgcaaacgtttattgattttatgtattatctcgttacctaacccagtgtgtatattgggttccttccatttatgccatatgtataatatatttatgacacacatatttacgccatgaaacaaaaaa

SEQ ID NO: 147622 - DNA, 102 bp, Zea Mays
gatctctaagttgtcaacatattgctggatctactcgagctgctaaggctgcgccctataccgccggtggggacgacgaccgctcctcggtgccggcctggg

SEQ ID NO: 147623 - DNA, 1540 bp, Zea Mays
tgaaacaattatagtatacgagctttggataggaaacattttgatgcatcttatgagcactcaattttaaagcaacttgcaaatattataaagaaggttaaacaaaaaaccaacacacatgtaccaatgtacatcctgcatctctgatgtcggtgcagggtgctcacagagctctccctcgacgacaactatttcaccgggatcccgacgacctgtacacgttgcccaacctgaggagagtgagcttacatgaaaatcagttcactggcaacctcggcagtgaccttggtaacctctctcagatcatgcaacttgacttgtcctataacaagttcacaggctccatccctgatgtctttggagagatgaggagactagagtccgtaaacctggccaccaataggatggatggtgagttgcccgcttccctgtaaagttctccactgctgagggtaatcagcttgaggaacaactcgctctctggtgagattgctatcgactccagcttgctgccgaagcttaatacttttgatgttggaaccaactatctgagtggcgctatagctcctggcatcagtgtgtgcaccaagttgaggacactgaatcttacaaggaacatgctcgtggggggataccggagagcttcaaggagttgagatccctgtcgtacctctcgctgaccaggaatagtttcacaacctggcatagacattgcaggtcttgcaacacctgcgcaacctgacaagcttggtgctgaccaggaatttccgcggcggtgagacaatgcaggtgctcatcctgacaaactgtctactcatcggcgtaaatcccacgtggctgcagagcttgggaagcctcaatgtgctggaaatttcatgtaacaagttagatgggaatatcccgccatggctggggaagctagacaactgcttcaacattgacctctcaaacaattctttcagcggtaagctatctgtcagcttcacacagatgaggagcttgaattcaaataatggctcgagcaagcggtcacccacagagggttcccattgttcagcaataaaagcaaatccgccatcgtcgcccttggactgggaactgtggtcggggttctcctcttgttgtgcttatgtgaccgtgtcaaggattgtccattgaagaatacaggagcaatccgaaggccgtagcgacagccgaagactcctagttctccaactcttgcctggtgctgctattccaaaacaacaaagagttcagtaactcgaattaccggtttctccatcccattttttcatatatatatttgtactaaagtttttttcatatatatttgactaaaggttctgtaggtttttatttcatagtctagtaacctgtaatttttaattagtctgtaaattcacgtatatacaaattggcacaagtaaaaaaattaacagctagaaaattttctatcattctctgtaaatctaatccctatcatgtacatatggtatactatttgcaattagtaatctgggacaatcataatcacatgacc

SEQ ID NO: 147624 - DNA, 3043 bp, Zea Mays
gtctagttttgcaaagctgaataggttaaacaaacggttttgaaagtgagggttacatagacttattctgcttataaatggctcctgtatctccctcgacaccaccggagcatctcaccaccgccacggccaacgagagcaagttgggcacctacttgtacctctctgtcctatatgttgctggcatctccaactccaccactgaaggtcgtcgagctagtcgtcaggagacaactagcggttcagcatcacgatggcgatgacataccatttgttgcaggggaggtgtcgtcgacgctgcatgtggaggcgtcatcaaccatcacaacagagtcctcgtaaacgggctcaccaagtgtttcgttactggagactccagcgtcttcgtcttttccgtcgtattgctctagagctgaaaaccgtttcgtactgcgcccgctgtgcggtggaggatgaccgaaggttgaaggagaagctgacttgtgagacccatatgtcagcgagtgggaagagtagcagcaggggcattttgggccatacggaaggtgcgtacgcgtacgatgacctgatagtgggaccaggcaataggagacagaaaatagcaaaaatcggatagacggtagcaagtttcaaaatagattaattgcagtgtgaaaaaaaaactagttttttttattactctgctcatagcgggcggaccgtgggtagtcacgcaaaagaagtcaggcgcacgaagcaaaaagcgacaagagctgggaggcgatgaccatctccacttcctcgacctcgagtccttgacccgtgtataaaagccggagccggccggcgtcccccctacccacccggagccccgcctccgcctcccgctcctccactccacccccacccatggccaacctcccagacgccgacgccgcggggttcaagctcttcggcaaggtcatccagccccccgacgcgcagcgcgccgcgggcgatggcgatggcgctggcgcccctccgccgtcgccgccggtccttcctcctcctcctcctcctcccccgcccccgccgcagcctctgcccctgcagcaggcggccggggccgggggcaccggcggcgagccgctgccgtgcccgcggtcaggtggcagatttcagccatggtttgttggaaaggaaggaaatcaatcatcctcttggttcacgtgatctcacaccctctgcggaccagtcagtttatcacgagtggtatgtgcagtcagctcactggatggatcatgtgaaatccgtgacagcttccgcagatctggaaactcgaacggaacggaacggaacgggaaggcgtaactaggggctgctgtagcagcctcttggtaacagtgctactacagctcaggtgtccgtcccttcctcgctgcttcagtgacagctagtacgttttagtaagacagcgaaccaaactgtggcaaactttattactgtcattgcttgccctcgtcaacgttaagcatcgcccttacgtttagtaccacgtgctctctcagatttccgaaacacagccatcgaagtttatggtagtaccaaacataaacaactttgctctcgcgcaagtcaagtctagatatggaccatcgtcctcagtgctatgttttattgcactactatttctaagagaggcactccctctacacacaaaaaaataaacgtaattctagtttttttggataaaacaaaatcttataagtttggctagtttttagagagagaaatcaacatctccaattaaatttatcgtaaaaatatattctataatcaatctaacagtatttattcggtaccataaatgcttgtaactttttgtatagatttggtcaaacttggacttgtttgactcctcggaaagtaagagttgtatcttttagggggagggagggaatacaggtgacgaaatcaaaccagactccacatttcacagtgcctacgtcataagagtaactacaataattatcttatagtcaggctagtcaatatttttcgaatatggagaagaaaagagaggatggagaggaaagattggctctcatcctacaaggctacaagcaagcatgagttgagagcctatacatcggtggacctagataacgagttggatctgaggagtacaaaagagaatatgagacatataaagacagtgatatagaataaaaataatcagacaaatgaatgtttcccacttaagactggctagagatagttcgctgctaataattagcttatttggatccaaacaaggctagctagtaaaaagtctagctagctaattgttagctgattacctaactaataattatcttactggttggaccaaaccagctactaccagttagacccgttgaggttacgtaactaataaccgtcttacaggttggaccaaatcagctaacagttacacctgttcggtaaagtttagccagtaaactttggcttttgatactctaaatagtgatctaaagtgctgtttaaagtttagtcaacctcagaaaaaaaaatcttagttcagtagactatgaaaagtggtctagacaaaagactacaaaatatgttgagtttgtgatccaaactgcatatggaggccgtgttggctagcgcgcggagcggaggcccgtcgccggtatatattagtgacccgaattagagtttgttgtgcgtcgtcatttactccttttgtaagtcgccgtctacggacagcgttttataaacactgcacatatgttgcccatggtttttccttcgcattgaaatgttttccacttaaatctgtgtgttgtgctctgtgatttgttggttgatgtactttgttttccggccgtttctgctaacagaatataagcagggtcttatctagctaatattagctatgagctactaccactggcagatcgggggggggggggtcccagctcccccactgcatccatgaaactccattggagatagcaggagaaagaagagagaaaaaaaaacccgtctgttagcttgtgttgtctcggccactagtcag

SEQ ID NO: 147625 - DNA, 363 bp, Zea Mays
atggcgatgacataccatttgttgcaggggaggtgtcgtcgacgctgcatgtggaggcgtcatcaaccatcacaacagagtcctcgtaaacgggctcaccaagtgtttcgttactggagactccagcgtcttcgtcttttccgtcgtattgctctagagctgaaaaccgtttcgtactgcgcccgctgtgcggtggaggatgaccgaaggttgaaggagaagctgacttgtgagacccatatgtcagcgagtgggaagagtagcagcaggggcattttgggccatacggaaggtgcgtacgcgtacgatgacctgatagtgggaccaggcaataggagacagaaaatagcaaaaatcggatag

SEQ ID NO: 147626 - DNA, 357 bp, Zea Mays
atggcgatggcgctggcgcccctccgccgtcgccgccggtccttcctcctcctcctcctcctcccccgcccccgccgcagcctctgcccctgcagcaggcggccggggccgggggcaccggcggcgagccgctgccgtgcccgcggtcaggtggcagatttcagccatggtttgttggaaaggaaggaaatcaatcatcctcttggttcacgtgatctcacaccctctgcggaccagtcagtttatcacgagtggtatgtgcagtcagctcactggatggatcatgtgaaatccgtgacagcttccgcagatctggaaactcgaacggaacggaacggaacgggaaggcgtaactag

SEQ ID NO: 147627 - DNA, 3214 bp, Zea Mays
aataagcaagaaccttttctgcagtaagccaataagcaatgcagtagtgggcgcagctccggaggagtggaatgacggcgccaccgaatgctagcatgggaccgctcagtttgggtggctgcggggctctcctctccactcctcagcctaattcgtggcattgccgcgggttctcgattcctgagaggagcgtctttatgttgccactgcgccggggtttgtcaaggaagaggggctgggttcttgattcaagaagtaacggtgctgtggctcgtgatgaggtcggtgccgggtcgtcagagcttcggcacatcgagaaggagctgacgttcagcccgactttcactgactatgttaaaatcatggagtcggtgaagttggacaggagcaagaatttacatggcgccgatggccagagtttgaggagaaggttcgcgggtgatggccgacaaaggaataggaggtctggtgatgcaaggaataaatcatttgaaaggaatcaggggcctcagagggacttggcgaaggatgagaatcagaaggatgttacaggctttgtggataaaagagcaactggtcatgtaaaaagtagcaatcgcaggcaaggggaggttgaagactatgcacagagaagaataattcgtggtggtacaagaggaaatggagacaatgggcagttctcatcacctgtgaaggctaaagatactaggggtagtatgtctgttcataggttggtgacgaacaaacagactcagtcagttgcagggaacgatttacaagggcgagcaacttatactccatctcggacttctgcccttccaaatagcagtattccatcaaagaatgctaaggttcaaatgagaaaatacgactatactatgacaagtagcagaatagacttaaaatatcctagagagacatttcccaatactgaggtcaacgctgacagtaatgttcaaagaaatcagcaaagagtggagaccttagggagaaactttgtagtacgtaggtttggggagattggcaccgactctaagaagtctaccgtaagcaaaatttatgggagtacacaggcaatgcctgagcatgatagccattcaagtgataatttggagagtgatgaacgtaggacagttcaattgcatagaggagcaaatgttaaaatggggaaatttgttagtagggatgctgaaactacagattttgatgatagagctgctttcaaaacttttgaggtatttactgatgtcaggaataggccacggatccttcgaatggaaatggaagagagaatccagaagttagctagtcggctcaatgctacagatgtaaatactccagagtggaaattctccaaaatgattcatgatgcaaaaattaaattctctgatcattctatcctaaggattgttcaaatgttgggtcgatatggaaattggaaatgtgttttgcaagtggttgaatggctccagtcacatgaaaggttcaaatcctacaagagcaggtatatttacacaacagttctcgatgttctagggaaggcaaagagaccattcgaggcgttgaatgtattttataccatgcagaaccaattgtcatcttatcctgacatggcagcttatcattgtattgctgttactcttgggcaagctggtcttataaaagaattatttgatgtgattgattgcatgtgttctcctcctaggaagaagttcaaattgagccctcttcagaattgggatcctcgcttggaaccagaccttattgtatacaatgcagttttgaatgcttgtgtgcaacaaaagcaatgggaaggggcattttgggtactgcaacagttgaaagagaagaacatttgtccaacaaattcaacatatggtcttgttatggaggtaatgcttgtctgtggaaagtacaatttggtttatgagttcttcaataaggtggataaatcatcaatacctggtgctctgaactataaagttcttgtaaatgcactttggagagaaggaaagattgatgaagcagtgatggctgtgaaggatatggaaagtcgtggaattgttggttctgctagtctgtattatgacctagctcgatgcctttgcagtggtggacggtgcaaagaagcacttctccaggttgaaaagatatgcaaggttgccaacaaaccgctggttgttacctacacaggactcattcagacttgcatagacaatggtggcatggaagatgctaaatacatattcaaccacatgtgcaactactgttcacctaattctgttacttgcaacatcatgatgaagtcatatattaaacatggaatgcttgaagacgcgaaagacctgctccatgatattctgaattgcaggataaggagtaaagcggattctaatcaagtggcaaccgctgacaagtttactttcaatactttcatggaggcctgtgctgcagcaaaaaggtggaatgacttcgagtatgcgtttcgtgagatgttattgaatgggtaccatttcgatgagcgaagacaccttcggatggtacttgacgcttttaggcatgggaaggaacagctgttggatgatctatggcactacctgtgccgtcacagccgtgtcccgccctcccctgtcataatggaaagattctgcctaaaactgatgcagggagatacactggcggcgatctcctgcgtcagcagcttccatgagggcaagatatgcaacgtctcctccatgtcatggctcaatctgctgagccgcaatgcagataggctgaaggaggagcatgttaccaagttagctcatgaactcaacagcctcattagcttgaggagttcctctgatagcattagtcttagcctgtaccaaaaaattattagtagctgtacggcattcctctctggagccacagttgtagaaaaggcaccttctggccaataggtggtgttacagaaattataataaccacagttagtaaattctagtactccaaatcataattaccacgactgatggagtgtattgcattcaacgtttggttatcggtacaaagttagaaatggaaaattttcacgtaaggaattagttctttttttagtataatacaaaggctgatttgggagcataagcgataaagcttgctttgtttgattaattttatactggttactttcaaattcacaagtcataataccatgagcatcatttattga

SEQ ID NO: 147628 - DNA, 2635 bp, Zea Mays
agccaaccaggcaaccagccgtgagcccgtgattcgcctcggctcgccgccggccgccggccaccggcccccacaccacgacagatcgcaagcttgtgaggagctccgcgcgactaaagcgatctaatcacctagccgccggccgccaggccgcggcgctgaaccacgggcgcgaagcgtacgcgaggctgccgcgcctgggtctgggtggagctcgcgtcgtccctgcagctaccgcgggcgcaatgcctgccccccgcgcctgaccatgcatcccaggcggctcaagaggctggcgaagaggatcacgtgacgacgcctcgccgtcgtctaggtcgtcgctcgcgcgcctgcggaacggaaaaaaggacgcgcaggatggatggctccatttcatcggcgctggcgcttctcgtgctggcgcttcacctcgccgtggacggctgctcggcggtcaacttcgaagggtcggtactgctcaagttccagtcaagggtggaggaggatctgtatggcgccatggtgagctggagcccgggcgacggcgacccctgcagttggaacggcgtgcgctgcgccgatggcagagtcgtgatgctaaacctgaaggatctctcgttaaaaggcaccctaggtcctgagctaggaactctaagccatctaagggctctagaactctccaataactttttcagtggagcaatacctaaggaattgagtgctcttgcaatgttggagatactggatttaagcaacaacaacttgagtggggaagttccacaagagattgcagaaatgccatcacttaggcagttatcgctttccaataactgctttcagtggcctctgatccaacattcctatgggaactttgatcaggaaaatggtttcaatatttatgataatctcgggagaggtaatatgaatcaaagagctgagaatgggttggaatcaggttcttcttcacatgagaacaaaaaggacactagcaacctttctgctcgacttcattcacaatacgaagcaataaatccagcagcacatcttagccagcgcagattacttcaagatagcaatcttgctgcaccttcttctgcaaatgatcttgttccagctgctgttcctgttccttccactggaactggttcgttttcagcatttagtcccaacaatgcacctgcaccagctgtaaatcccccaagtaggccaccaacggtccccagtactaccgctggagaagttcaggaaaggaggtcaatgaaatggctttatttcattgtgctgccactggtcgtgcttcttattggcatcgcatgcatgcttttgctatgccgcaccaagtcagggacaacaataggtccatggaagacagggctcagtggtcagctccaaaaggcatttgtaacaggagtaccaaagttgcaacgctctgagctggaaggtgcgtgtgaagacttcagtaacattgtgtcaagctatccacagtacactgtctacaaggggaccttatcaagtggtgttgagatagctgttgtatcaaccatggttatctctagcaaagattggtcaaaacattcagaagggcgattcaggaagaagatagactcactctcgcgaatcaatcataagaactacatcaacctgcttggatactgtgaggaggaagaacctttcactaggatgatggtgatggaatatgctcccaatggaacactatatgaacacctccatgtcgagggatttgatcctattgattggaatggtaggatgaggataattatgggggtagcatactgcaccctacacatgcatgagcttagccctcctgtaacacacccagacataaagtcaagtgctatattgctatctgaggatggagctgcaaagatagtagacatgagcgtttggcatgaagtatatttcagaggaaacatgcccaaggatggcgacctagttgatcaccaggaacgagtagctgcagatccagctgggaatgtctacagttttggtctactcatgctggagatcatctcagggaagcctccgtactccgaagaaaagggttccctttcagacttggctttggagtgcattagggataaccggagcatgtcttgtttgcttgatcctagcttgaaggatcacaaggaaaaggacctagaaaccatatgtgatctggtccaggactgcatccaaagcgatccaaagaagagaccagccatgagggaggtcaccactagactgcgagaagtactgtcaatttcgcctgaggctgcgacgccccggttatctccactctggtgggcagagcttgagatcctttcagttgaagcaagctagcgaaaatgtgctttgtttgcagcaacaccgaggtacttgtgcatactgtaatgcaaccctgtacatccctgttgtatttttccatcctgtgttgtaactttggtggtgtctgcgtgctacatttccccctccccggtgaattcagctgcctggtttgtttttctcatctgtatactaaacatacatggtgtgagagcagaatgctttataccatcctaggactgattgtaatcaggaaatgtgtagtgttccatggttttacagaaatatacattctttgattgttgatgtgaaa

SEQ ID NO: 147629 - DNA, 1682 bp, Zea Mays
gtgatttgggtgccgataaaaagcaaaaccctacctgtagcgaatcgcaaaaccaactctgccgcaattggtgatcttcttgttagagaaacgacatcaccggattccgctacgtgtagtccaaatacgaaaccctagcagaactgtgatgaaatcccatcctcccatacggcgattccgggcggtagttgcgagcactatgaaatggatttcaaaatcacggggtgcagcggaaaacctagcgctgtaaaaaggcattcaacttttgttgggtccgtgcgggctgatgtggctcggtgcggtctaaccaggtcgggcgcggttggtgcggtcagaccttttggtgcatcgactagctagggtgaggtttcatctaaggtgatatataggacgggtgggggaaaccgaatcagagaagcgacgacagttgttggcgtgggccagcaaacaagcagagggagggagtggcaatggggtttcaagggagaggaaactgctagattagattgataggaaaagagaactcgtcggcctctgccttacctgggcagcatttgccgagttgtttctattatgatactcataagagatggcttctccacaacaatacttagattggacttctctatatcgatattcataagtgaggaacttctccaaaacaatattgcaccattattttgtagcaccccgaaaattcaaatcttgaaattttctcaaactcgctctaaattcaaatgaattttaaatttcatttcaaaatgtttgtttgcaacttgatctcaacaaataaaatatagtggtctatatcctcctcaaaatatcctacaaatatttccctagtgatccccctcaagttctttccagaaatactgcccaaatattccaccgataattctccaaatattttcctcctaagaaataccttcagaatcatttttaaagtccctacaaatattttcttcataattttcctcatgctcatatgtatagatacgcatctggtgtcatacagtgagctctacaagctaatttcacttatacatgactaatacatgcttatctcacactaatcctcgcatcctcccactaatcctcgcctcctccccctaatcccccaccttacctaaaaatagaggggcaagggcctcccctcaagccacaccaagccatttcatggcaactctctccccccactcccactcccactcccacaaaagcacaacacaagcacaaggatcgtccggtcgttctttcgatcgttcgttcacctgttcatagtttgtttgttcgttcgtccgatcgttcatggttcgttcgttcgttcgtccgatcgttcgtccgttcgttcgtccaaataatctttgttcagtcattatgctaccgaaatttcgatcgttcgttcatccgatcactcgatcgttcgttcatttgtccatagtccctattcatcgttcatcgttcgtgcatagttgaaagggaaatgtgcccttgggccatttctaagtattttggtgattaagtgtccaacacaaatggttatgtgttaaactatgccaaatggtggacaaagtgcaaatcaatacaaaggtatgattctagacttagtacattggtttttgtgtactaacatatttgtctaagtgctagaatcagagaaaagtcaaatggaaaagacttgg

SEQ ID NO: 147630 - DNA, 1077 bp, Zea Mays
gaaattaagaaaaaagggaagaaaggttatcttctccggttctccctcccctccctgtccggctgtcccctcgctgtacacagggtgtctgtcaccgagcagcgggcagccggcaggcaatgcgatgatagtagctgctgctgcccctgcgccgccagttccagcaccgccgggcaaaccgcccttttctctctcctcctccagctcctccttctccctccgccgccgctccttcagcttgtggttctcaaacggcaacgcgcatggaagagacagcgccaccgccaccacgagcagcagggcgacgaggaggtggtggtggtccgatcccggcggcagccgagaagactacggctcctcttctctagaggaggaggacgtttacgattacgaggatgaggctgcgttccccagatttggaggggccgcggaactgttcgatgagccctggttctccaagggccaaaggcctttctaatggccatggtgatcccactcagtcagtcggccatatcgtttctgcttgacgctgtatggggaaggaggaaaggcaaccgcgacgacaggaggagaccattccaagaggaagattaccctgaggacgccgctggctttgcggcaggtggtcgaggcaatggataccgcagccgcagcagcagcagcagcaactattatgaggggagaaggaggacgagcaactaccagtcaagtgtttctaacaattttgctggtgctgcctcaactggtgttggagctgacgataacaccaagagcagcagcagtggatatggaggatgggatgagcttctggacaacgacactgctgctcaggagacaaagaggaggagctcattctcagctggcaccactgatcgaagcacaaaatcgcagccttcagcgactggggaggaagatgcagattatactgccactccttcaacaagaacgagaatgagacgacggcggacgccaggaacgatggggttgggcagtaccatgtacaagcaggcaccactcgtgatgcgcttgttggtggcagtcttcccgttcctgggatcatggttcaggctgctctga

SEQ ID NO: 147631 - DNA, 1553 bp, Zea Mays
gaaattaagaaaaaagggaagaaaggttatcttctccggttctccctcccctccctgtccggctgtcccctcgctgtacacagggtgtctgtcaccgagcagcgggcagccggcaggcaatgcgatgatagtagctgctgctgcccctgcgccgccagttccagcaccgccgggcaaaccgcccttttctctctcctcctccagctcctccttctccctccgccgccgctccttcagcttgtggttctcaaacggcaacgcgcatggaagagacagcgccaccgccaccacgagcagcagggcgacgaggaggtggtggtggtccgatcccggcggcagccgagaagactacggctcctcttctctagaggaggaggacgtttacgattacgaggatgaggctgcgttccccagatttggaggggccgcggaactgttcgatgagccctggttctccaaggtatataagacttacggaatcctgctaccgttgatgcttgcgtccatgcttgctgcgacagggccaaaggcctttctaatggccatggtgatcccactcagtcagtcggccatatcgtttctgcttgacgctgtatggggaaggaggaaaggcaaccgcgacgacaggaggagaccattccaagaggaagattaccctgaggacgccgctggctttgcggcaggtggtcgaggcaatggataccgcagccgcagcagcagcagcagcaactattatgaggggagaaggaggacgagcaactaccagtcaagtgtttctaacaattttgctggtgctgcctcaactggtgttggagctgacgataacaccaagagcagcagcagtggatatggaggatgggatgagcttctggacaacgacactgctgctcaggagacaaagaggaggagctcattctcagctggcaccactgatcgaagcacaaaatcgcagccttcagcgactggggaggaagatgcagattatactgccactccttcaacaagaacgagaatgagacgacggcggacgccaggaacgatggggttgggcagtaccatgtacaagcaggcaccactcgtgatgcgcttgttggtggcagtcttcccgttcctgggatcatggttcaggctgctctgaattgattgttatatattcgtccacggtggttcgtttatgatttcagaaaaaaaaagatatatatatataagtggccagtggcattaagcaaaggattatgattgtgaaaaatatataagcgtagtgaagaagatcgattggttcaggcagtgtgcctgcagcatcagctctgtactgctgcatccgccattgcgaagggaaagaatcacagcatctgacttgctggtgcatgtgtgaacctttgcttcctcgcgcttgtgcagctgataatatgtttgtggtctcggtgaacattaactaattgtgtaagtggccagcgtagtgttgtgttgcttgtgtgtgtggtgtaagtgatgttgggttcttgcacccattcttcctttttaatataatgatgatacagatatctttcttt

SEQ ID NO: 147632 - DNA, 1689 bp, Zea Mays
ggtcgatgaacgatgaccatggccgatcagctgagagctgactcggcgtcgtccacctggaagcggacgcagcaccgaccccgcagagcagactcccaacccacacatcgagaccacagaccagtggcagcgacccaagccaagcacaaaagtaccgcgcgacaagacggcaagcggacaagttccccggaaatttttttaaaaaagcgtgagaaattcgttaaaaatcctcccggtcggccacttttattaccaccagcagcagcggcaagtcgtcgctcccccctcatcacctccactccaaacaaacaagggacggtgagcgaggaaccccaccccacgtcgccctccccccacctttctctctagtctctagtttctagtctctacccccaggccccagactcctgcctcttctctctctcgcccacccgccccggccccaatgtcgccgcccctcgagccccacgactacatcggcctctccgccgccgccgccgcggcgccgccgacaccgacctcctcctcgtcgtcctcgtcctcgccggcgccccgcctcaccctccgcctcggcctgccgggctccgagtcccccgaccgcgaccgcgaccgggaccgctgcgaggacgtcgccgccgcgctctccctcggcccgctgcctgctacccccaaggcgcccgctgccgtctccgccaagcgcgccttcccggaccccgcccagcgccccggcgctgccaaggctagcgacgacaagcaggcgtcccccgccgccccgccggccgccaaggcgcaggtggtgggatggccgcccgtgcggaactaccggaagaacaccctcgccgcgagcgcctccaggagcaaggcgccggcggcggaggacgccgcgtctgcggcccggcccatgtacgtgaaggtgagcatggatggcgcgccctacctcaggaaggtggacatcaagatgtactccagctacgaggacctctccgtggcgctccagaagatgttcagctgcttcatcgctggtcaaagtggcctgcataaatcatcgagcaaagacaggctgactaatggctcgaaggtggatgccctcaaagaccaggagtatgtacttacatatgaggataaggatgcagactggatgcttgtcggtgatcttccctgggactatggtgacatgcaaataacagaaggatgaaaagaaaaaaaatgtacttgtggcgcagttattttacctctatctgccggaagctcaaaatcatgaggggctctgatgctgttggaatagctccaagaaccatagagcagacaggtcagaacaaataagcttggtctttgcctgcacccacgcaagaaatctgagctagctggaaggccatgttgaaggcttaaatagttgctcggaattatcaaaagtcgtcaaatgttagtgtagtttccacgtgttcttgagacgtgtgtatttgtatgtctgtgatgtgatccgtcagatctgttcttgtgcccttcaaaggccaaatcagggagctctctgcttcctgtgtatgcttgctttttccagtattccctgttattctactatgaaatcatccatcgtgccacaaagaactgatggttcctgatgtcaagaaagctgtccgaattgtcttctttttacaggagaaattggtgctgcactcagcttcctgccag

SEQ ID NO: 147633 - DNA, 1503 bp, Zea Mays
caccagcagcagcggcaagtcgtcgctcccccctcatcacctccactccaaacaaacaagggacggtgagcgaggaaccccaccccacgtcgccctccccccacctttctctctagtctctagtttctagtctctacccccaggccccagactcctgcctcttctctctctcgcccacccgccccggccccaatgtcgccgcccctcgagccccacgactacatcggcctctccgccgccgccgccgcggcgccgccgacaccgacctcctcctcgtcgtcctcgtcctcgccggcgccccgcctcaccctccgcctcggcctgccgggctccgagtcccccgaccgcgaccgcgaccgggaccgctgcgaggacgtcgccgccgcgctctccctcggcccgctgcctgctacccccaaggcgcccgctgccgtctccgccaagcgcgccttcccggaccccgcccagcgccccggcgctgccaaggctagcgacgacaagcaggcgtcccccgccgccccgccggccgccaaggcgcaggtggtgggatggccgcccgtgcggaactaccggaagaacaccctcgccgcgagcgcctccaggagcaaggcgccggcggcggaggacgccgcgtctgcggcccggcccatgtacgtgaaggtgagcatggatggcgcgccctacctcaggaaggtggacatcaagatgtactccagctacgaggacctctccgtggcgctccagaagatgttcagctgcttcatcgctggtcaaagtggcctgcataaatcatcgagcaaagacaggctgactaatggctcgaaggtggatgccctcaaagaccaggagtatgtacttacatatgaggataaggatgcagactggatgcttgtcggtgatcttccctgggactatggtgacatgcaaataacagaaggatgaaaagaaaaaaaatgtacttgtggcgcaggtactaaacgcatttgttatataattcggtaaactgattaccccgtataagtttcatatacaattcgttattttacctctatctgccggaagctcaaaatcatgaggggctctgatgctgttggaatagctccaagaaccatagagcagacaggtcagaacaaataagcttggtctttgcctgcacccacgcaagaaatctgagctagctggaaggccatgttgaaggcttaaatagttgctcggaattatcaaaagtcgtcaaatgttagtgtagtttccacgtgttcttgagacgtgtgtatttgtatgtctgtgatgtgatccgtcagatctgttcttgtgcccttcaaaggccaaatcagggagctctctgcttcctgtgtatgcttgctttttccagtattccctgttattctactatgaaatcatccatcgtgccacaaagaactgatggttcctgatgtcaagaaagctgtccgaattgtcttctttttacaggagaaattggtgctgcactcagcttcctgccag

SEQ ID NO: 147634 - DNA, 1377 bp, Zea Mays
caccagcagcagcggcaagtcgtcgctcccccctcatcacctccactccaaacaaacaagggacggtgagcgaggaaccccaccccacgtcgccctccccccacctttctctctagtctctagtttctagtctctacccccaggccccagactcctgcctcttctctctctcgcccacccgccccggccccaatgtcgccgcccctcgagccccacgactacatcggcctctccgccgccgccgccgcggcgccgccgacaccgacctcctcctcgtcgtcctcgtcctcgccggcgccccgcctcaccctccgcctcggcctgccgggctccgagtcccccgaccgcgaccgcgaccgggaccgctgcgaggacgtcgccgccgcgctctccctcggcccgctgcctgctacccccaaggcgcccgctgccgtctccgccaagcgcgccttcccggaccccgcccagcgccccggcgctgccaaggctagcgacgacaagcaggcgtcccccgccgccccgccggccgccaaggcgcaggtggtgggatggccgcccgtgcggaactaccggaagaacaccctcgccgcgagcgcctccaggagcaaggcgccggcggcggaggacgccgcgtctgcggcccggcccatgtacgtgaaggtgagcatggatggcgcgccctacctcaggaaggtggacatcaagatgtactccagctacgaggacctctccgtggcgctccagaagatgttcagctgcttcatcgctggtcaaagtggcctgcataaatcatcgagcaaagacaggctgactaatggctcgaaggtggatgccctcaaagaccaggagtatgtacttacatatgaggataaggatgcagactggatgcttgtcggtgatcttccctgggattattttacctctatctgccggaagctcaaaatcatgaggggctctgatgctgttggaatagctccaagaaccatagagcagacaggtcagaacaaataagcttggtctttgcctgcacccacgcaagaaatctgagctagctggaaggccatgttgaaggcttaaatagttgctcggaattatcaaaagtcgtcaaatgttagtgtagtttccacgtgttcttgagacgtgtgtatttgtatgtctgtgatgtgatccgtcagatctgttcttgtgcccttcaaaggccaaatcagggagctctctgcttcctgtgtatgcttgctttttccagtattccctgttattctactatgaaatcatccatcgtgccacaaagaactgatggttcctgatgtcaagaaagctgtccgaattgtcttctttttacaggagaaattggtgctgcactcagcttcctgccag

SEQ ID NO: 147635 - DNA, 1796 bp, Zea Mays
ccccacctttctctctagtctctagtttctagtctctacccccaggccccagactcctgcctcttctctctctcgcccacccgccccggccccaatgtcgccgcccctcgagccccacgactacatcggcctctccgccgccgccgccgcggcgccgccgacaccgacctcctcctcgtcgtcctcgtcctcgccggcgccccgcctcaccctccgcctcggcctgccgggctccgagtcccccgaccgcgaccgcgaccgggaccgctgcgaggacgtcgccgccgcgctctccctcggcccgctgcctgctacccccaaggcgcccgctgccgtctccgccaagcgcgccttcccggaccccgcccagcgccccggcgctgccaaggctagcgacgacaagcaggcgtcccccgccgccccgccggccgccaaggcgcaggtggtgggatggccgcccgtgcggaactaccggaagaacaccctcgccgcgagcgcctccaggagcaaggcgccggcggcggaggacgccgcgtctgcggcccggcccatgtacgtgaaggtgagcatggatggcgcgccctacctcaggaaggtggacatcaagatgtactccagctacgaggacctctccgtggcgctccagaagatgttcagctgcttcatcgctggtcaaagtggcctgcataaatcatcgagcaaagacaggctgactaatggctcgaaggtggatgccctcaaagaccaggagtatgtacttacatatgaggataaggatgcagactggatgcttgtcggtgatcttccctgggagtaagtaccttacaatgtcatatattacttttaatgttgtgagcgtagaatatagttggatgttgtttggttcatctgttgtttttttatcagcagttattaagaagatattacatgattatgaaaagaatatcatatgcattattttcccctttgcgaatgcattacctcattaccttagctcactatctcaatagtgttggatttttgtcaaccagctatggtgacatgcaaataacagaaggatgaaaagaaaaaaaatgtacttgtggcgcaggtattaaacatatttgttatattgttatataattcggtaaactgattaccccgtaagaaaaaaaatgtaaaatgtacttgtggtgcaggtactaaacgcatttgttatataattcggtaaactgattaccccgtataagtttcatatacaattcggtaaactgattaccccgtatcagttttatatctgtacaagttaccactcaagatgcaagtgctgatcttatttgttccttttcagttattttacctctatctgccggaagctcaaaatcatgaggggctctgatgctgttggaatagctccaagaaccatagagcagacaggtcagaacaaataagcttggtctttgcctgcacccacgcaagaaatctgagctagctggaaggccatgttgaaggcttaaatagttgctcggaattatcaaaagtcgtcaaatgttagtgtagtttccacgtgttcttgagacgtgtgtatttgtatgtctgtgatgtgatccgtcagatctgttcttgtgcccttcaaaggccaaatcagggagctctctgcttcctgtgtatgcttgctttttccagtattccctgttattctactatgaaatcatccatcgtgccacaaagaactgatggttcctgatgtcaagaaagctgtccgaattgtcttctttttacaggagaaattggtgctgcactcagcttcctgccag

SEQ ID NO: 147636 - DNA, 1885 bp, Zea Mays
cacctttctctctagtctctagtttctagtctctacccccaggccccagactcctgcctcttctctctctcgcccacccgccccggccccaatgtcgccgcccctcgagccccacgactacatcggcctctccgccgccgccgccgcggcgccgccgacaccgacctcctcctcgtcgtcctcgtcctcgccggcgccccgcctcaccctccgcctcggcctgccgggctccgagtcccccgaccgcgaccgcgaccgggaccgctgcgaggacgtcgccgccgcgctctccctcggcccgctgcctgctacccccaaggcgcccgctgccgtctccgccaagcgcgccttcccggaccccgcccagcgccccggcgctgccaaggctagcgacgacaagcaggcgtcccccgccgccccgccggccgccaaggcgcaggtggtgggatggccgcccgtgcggaactaccggaagaacaccctcgccgcgagcgcctccaggagcaaggcgccggcggcggaggacgccgcgtctgcggcccggcccatgtacgtgaaggtgagcatggatggcgcgccctacctcaggaaggtggacatcaagatgtactccagctacgaggacctctccgtggcgctccagaagatgttcagctgcttcatcgctggtcaaagtggcctgcataaatcatcgagcaaagacaggctgactaatggctcgaaggtggatgccctcaaagaccaggagtatgtacttacatatgaggataaggatgcagactggatgcttgtcggtgatcttccctgggactatggtgacatgcaaataacagaaggatgaaaagaaaaaaaatgtacttgtggcgcaggtactaaacgcatttgttatataattcggtaaactgattaccccgtataagtttcatatacaattcggtaaactgattaccccgtatcagttttatatctgtacaagttaccactcaagatgcaagtgctgatcttatttgttccttttcagttattttacctctatctgccggaagctcaaaatcatgaggggctctgatgctgttggaataggtatgtaccatgtgtaacaatagatctagaaattctgcatctattctgtgcatatgttacagcctcacaggatatgaatttattaattcccaagcactaatatttgctgttaacttatactatacagagggtatgtttctcattgtttgcataaggttgtcttgcctgcgctttgtaaataagttaggcaaagtattgaagcattagctgcaactctatcctggctgtgaacggattgtagcttacatgcatagaccatttctcgtgactgataacagaacacaaacctaagggaatgataagatgactaaaatattggttggaagaaacagttgctgttttgctgctcgaatctgaaacttgattttggaaggtgcctttccttgttgtgtgcaactaagacccacagactatcgcattggatcctttattttgaaatttggtgcactgtttaatttagctataatatttattgtatgattctgaaccatgtccatctgcgtgcagctccaagaaccatagagcagacaggtcagaacaaataagcttggtctttgcctgcacccacgcaagaaatctgagctagctggaaggccatgttgaaggcttaaatagttgctcggaattatcaaaagtcgtcaaatgttagtgtagtttccacgtgttcttgagacgtgtgtatttgtatgtctgtgatgtgatccgtcagatctgttcttgtgcccttcaaaggccaaatcagggagctctctgcttcctgtgtatgcttgctttttccagtattccctgttattctactatg

SEQ ID NO: 147637 - DNA, 673 bp, Zea Mays
atgagcgggagcaactttggagacagcatggggtggagcagtagtgggagatcgtctggtccgagaaggggcaagagaggcggcggcggcggcggcggcacggacaagcccaagcaaccgcagcgagggctcggcgtggcgcagcttgagaagattaggttacagagcgaaatggcggagtatttccatcctctcggcggccaggcccccagcttgatccacagaacgggcagcctcagcttgatgccatacggagagacagacgtacgatacagtgaattccaagctcatcccatcataagatcaccggtgagcagcagtgctgtctatggcaccccacattacgggcagcatcctaacatcacattgcctctctttgaatcgcaggtatcttcccggttgaagggacgacatcatgatcgaagtcagtcagcggactcaacaagcttgaactccgacgatccacaagacgtggaccttgagctcaagctatgattctaaaatgtccctagctccctttctcccctctcctcccttcgttgtgacgcgatagatttgttagtctgcttcatgggcattttcacttgtggtgcaataagtttctgaattggtgccactagcgctagtcgtcagaaccagtgcaatgcaagaggattatatttgccgccttttc

SEQ ID NO: 147638 - DNA, 537 bp, Zea Mays
aggaggatgcgcgggcgtcgacgtcctcgctgtcgtcgtcgccatcttcctccttccatgctgccgccgccatctcgtcggcgttcccaatccatccaaatttcgcgatgccatacggagagacagacgtacgatacagtgaattccaagctcatcccatcataagatcaccggtgagcagcagtgctgtctatggcaccccacattacgggcagcatcctaacatcacattgcctctctttgaatcgcaggtatcttcccggttgaagggacgacatcatgatcgaagtcagtcagcggactcaacaagcttgaactccgacgatccacaagacgtggaccttgagctcaagctatgattctaaaatgtccctagctccctttctcccctctcctcccttcgttgtgacgcgatagatttgttagtctgcttcatgggcattttcacttgtggtgcaataagtttctgaattggtgccactagcgctagtcgtcagaaccagtgcaatgcaagaggattatatttgccgccttttc

SEQ ID NO: 147639 - DNA, 1120 bp, Zea Mays
cctcggtgatgagcggcgcctccacttccgtcatcgctccaccttgagggctcctttggttgcccgggatcccgggagtatccaggtcgattccctgggtctgaaatccacaggccgaatcgtcccagggaaaaataaaaagttgtttggtgacccacgctccccgatctgatccgcgggggaggacagtgctttggtccccggcctcccagggtcgggaagggcttccccgcgtcccctcccgtgcaagccgtcgcctcctcctctcgctcgtgaagcctcctctccctcgcgcacggtaccgccacccaccgcctccacctctccctcgcactcgcgcacccaccgtcgcccgccacccccgctcttcctcactccctcctctgcctcgcgcaaagcgcaccgctaccacaggcggtaggaccgcacaacttgccccagatccagaacagtctcctatctcctcaactcacgcatgacgacctcctcagctcccccatccgcatctcgcgaagagaacagaagctggtgagcgatccagaattcggtcgtgaactgaagtgtgatgttggccatgagtattcctttttgtactagtgttcaagcaaaacaatcacttagatgtctgtgaatttgtatcttgaaatcatgtcagacagcatgaattgacatttggagagcccttttctatgatgcagcttgacatcgttcattgtcattgcattttgtacttttctgaagatcatgaaaacaatgaagtgttcatggttcctcagttctgttcttgatttatatgtatcttctatagaaaactggttcagagctggtgtttatggcctccctctgaaatcaaatctctctctctctctatctctctctctctctatatatatatatatatcttctatagaaaactggttcagagctggtgtttatgcattttggttgaaacagatgaagagaatactatcatgaatgcatctccaatacattttgttaagctatctctggcacaaaagaatgataacatgatttcttcatggaaatgtctaggtggtggagagtagtttacttaagataagttgaattatggcttacaactcgttagagttctagaata

SEQ ID NO: 147640 - DNA, 161 bp, Zea Mays
ctgaaggggacaaacgccaacggagatctggaacggcgagccaaatctgggattaaagtgctagacttccactcatcaaagcggaagtggaagcgggagcgggggtggggttaaattaatccgaggcgaacgagaacgtgttcagttagcagcccgccacg

SEQ ID NO: 147641 - DNA, 210 bp, Zea Mays
atagattctgttggcacagttcagcagcgacactataaaagcaagtgttatcctaagtcattagaaaccttaagcggacattcaaactgtgagagtggttcagtatcatcagtggtgtttgagaaggcattgcaggtattggctctcgaaaagaatccactgggtagtgaaagatgccatgcagtgaagctaaccaagacactgcatcta

SEQ ID NO: 147642 - DNA, 1043 bp, Zea Mays
ctcgagtattttctgattgagcaatgcaccccgttccgccttcataccttgctcgtcagcccggataagataacgcccatctgcacgggccacgcgaagcgttcgagctcctcccacggcagccatggtcaccgccaccacctccccgctcttctccctctcctccctccgcgcctccctcccttcccccacccgatttcacacgtctctctcgctccgagccctctccccacgtgctcgtctctctgccgccctccctttcgcctccccactcgtttcaggcgggtacgggacctgggcggcgacttcaatctcgtccgcgggaaggttgagacggcgggggctggaggtggtgtgcgaggccacgaccgggcggcggccggactcggttaagaagagggagcgccagaacgacaagcaccgcatccgcaatcacgcgcgcaaggccgagatgcgcactaggatgaaaaaggtcttaagagctcttgaaaagcttaggaagaaacctgacgcgcagcctgaagaaataattgagatagagaagctgatcgctgaggcatacaaagccatcgacaagacggtgaaggttggcgccatgcataggaacacggcgaaccatcggaagtctcgactggcaaggaggaagaaggccatcgagatactccgtggttggtatgtcccaaacgctgaacctgtcgctgccacctaggattcttgagaaatcgctatcatgtgtcagcttttcatttttgggcgactatgctattcacgggtctcaacagcttgccaggttctctattgaaatggtctgttcataccttttctgctatgcgtttgctctgtactagcagtttgactactggctagaatgggcagctcttctcccctgtttctgttgttattcgcctcaacgttgtaaaactgaattcagaaaattttaaatatagctgtcatctggtaagtcttgatttgttcagctgaacaaattgtatcagtagtcagtatgcatagtgaaaacagagtgcagatgatgttttcgattg

SEQ ID NO: 147643 - DNA, 1746 bp, Zea Mays
agtcttttaccgtctcgcttagtattagaatagagcaatgatacgatagtaaaatactcaaaggatatacagcatacttctcttcatacgatgttaaatttatttaagggatctagatcaatcagacaatcatcatcaccacctcataagcaagatagttcaaaacttaagacacacagacttcggccaaagttggtgtttctaacttggtagttggtaccccggagcttgcgagtcgagtttaccatcataccccggaccttctcgagccgccgatccgcagcatgtcaaacttgagtagattctccactccgtccagctcgatggaggccttgattatggcgcatgcgaggtcctggtcgtccttggcgtccaagaaacagcccctctccttgcgtcgtccacgatctgccgccatatcgttttgccgctcgccagcgtcttcacgttgcccaggatccacaggcaatgtctgcaaaacataccaaacaaaaacatcatcgtcgagagcactattgcagacacacaaacacaaaccaaaagctcacttggcccgcgtcagcgcgacattggtgcggttggtgtcggcgaggaagccaatcttgccggcggtgttactccgcacggtggagaagatgatcacgtcctcctccgcgccctggaacccgtccacggtccgcaccttcaccgagaacgacccatcgtgcatcgagtacacctgcttgccaagcttctcctcgatggccggacctggcccttgtagggcgacaccactcccaggcggatcgccttcctcgtgtcaatcgactctgcgcacaagttcagcagatcagctcgacgtatgtactgtgtgctcccggtccagggagatcttggaaccgcgtcagatatgttagctactggatgctattgggattcgagggagagaagatcagagaagagagtagcgtgtgggagagaatgacaggaaggcagcgatagatgtattcctttacccaaattcttcctgtcctgattattacatactcatacgcatcccacactcatttggcccactcgcctaaagctagaactcatttggcacactctggcccatgaacacgcttgttcggaagacacatacgactgaacgcaccttttcttctcccgcgtctgcagtatcagtagcttcactcgccggactgctaacattccccaccgcttgaaatgcggcttgcccccaagccgctgatagtgtagacaatgattgatgactctacttcagctttcaggggttagcactgattaccccatagtttgggtgagtgagagacaagggcagtactgatgctggcttacaggagaactcagcagccttgagctgttggttgggtacctttagaagctatgtctcccaatctgagaagatgacctggtgtgaaatgagcaaagattgtgtgagtaacactgaattggtgcccttttgtcaagaccgtagccaatatcatcaacagcagtggccttctccttctcgttagccaagagcaggctattgacactcatgagccatgaatttcaaatcaagagaaggttagcaccgtcttgaccaccattttctttagatgaacaaaaggaatgctccacggctaaatcactcaagtctgctcctgcaatgatattcttttcaagatcaaccaaaagcatgacatccttttctttagcacaatcatgggcatttgaggagtattcatcagtaaggcgcagaga

SEQ ID NO: 147644 - DNA, 406 bp, Zea Mays
tccacgtcatgccgcgccgccccttttgcagtcacggagacatggcgcggccatcacgcgttcagcgccccctgctcacccaaaagctgagcgccccgggcaaacgacaacgacaccggcgcttgccccccgacgccgaccgatctccctgccgttcggcctcggtggcgtggcgtcggtgtcccgataagcatcatgttacgtgcacgcgcgcgcgcatgtgcgctggatcctacctagctccagaaaaggacgcccatggagagtaggcgggcacgagggcatccatcgatgccgacggcgtgtcagcagcatgctcctcggtcctctgttcgtcgtcgttcgtgccttgggtcgacgcggggtgtggtgtcgctgaatgctgaattgctgagcaagtgagcca

SEQ ID NO: 147645 - DNA, 1839 bp, Zea Mays
gtgccaagagagccacgagagaagggatgcatggatggcggcgcccaagcaagtttggcaacggtagagagcgcttcgggattccacgggtggaactggccctggagttcgtgtcgagtgcagcgacatgtctctcaacatggccaaaaggacatgcggcccggtctcatcatgttcttttgcttggcaacttgatcatcgaaggcccggccacctgtctggaaaaaaaaacatttcccccgcattttactgataatattgtatttaggagtattgccttatcttcatactactagtagtacctacaagttgggggtatatcgatcgtctgatacgcacatggacatggtgccctgtatacatggatggatctaggggaacggccaacgacgtggagggcgccaagcgtcacagatacaatcatacaatccattctcgtggaccgtaccagcaccaccatgccccgagccatgttctctccggtcaaagctcctcctggctggattagaatagctaatcctccagtccaaatgcacgccactagtgaacaaaaatagcttggcattcagtgagctgcatcggcgatgattgccatcgctgtccctgtgacgagtgacgaggcaggtaacgtaaaggctgccaggtcaggtcggcactgcactgccatgctaggccgatgtccttttgcacacagtctccgtgctcgtgacgttcaatggttctgctcaatagggcctctgcatctgctgcatgcgagccacttgcaggccagccatggtacaaggacgggtcggcggcgcgcggcacggtgggcaccgactcggcgaccatcgcgctgtcggggcggcgggccggcaagaagcagcggcgagccaagctgcggggcgtcgtgctgggctgcaccacgtcctacaccggcgaaagcttcctggcctccgacggggtgctcagcctcggctacagcaacgtctccttcgcgtcccgcgccgcggcgcgcttcggcggccggttctcctactgcctcgtcgaccacctggccccgcgcaacgccaccagctacctcaccttcggccccaacccggccgtgtcctcggcctcggcctcgaggaccgcctgcgcgggctcggccgcggcgcccggcgcgcggcagacgccgctgctgctcgaccaccggatgcgcccgttctacgcggtggccgtcaacggcgtctccgtcgacggggagctcctcaggatcccgcgcctcgtctgggacgtccagaagggcggcggcgccatcctcgattccgggacgagcctgacggtgctcgtgagcccggcgtaccgcgccgtggtggcggcgctgggcaagaagctggtcgggctgcccagggtggccatggacccgttcgactactgctacaactggacgtcgccgctgacgggcgaggacctcgccgtggctgtgccggcgctggccgtgcacttcgcggggtccgcgcggctacagccgccgcccaagagctacgtgattgacgcggcgcccggcgtgaagtgcatcggcctgcaggagggcgactggcccggggtgtccgtcatcggcaacatcctgcagcaggagcacctgtgggagttcgatctcaagaaccgacggctaaggttcaagcggtcgcggtgcatgcaatgattggacttggacggccgtcatggcgtcatccaatcgttcctccctccacttcattttttacccctcggcggtggtgatctttgctgattctttttttttacccatgttcagatactgatgcaatgagaaagtgtaccttcttgcaatgcaaagagagctgtaatcagttttcc

SEQ ID NO: 147646 - DNA, 2255 bp, Zea Mays
gtgccaagagagccacgagagaagggatgcatggatggcggcgcccaagcaagtttggcaacggtagagagcgcttcgggattccacgggtggaactggccctggagttcgtgtcgagtgcagcgacatgtctctcaacatggccaaaaggacatgcggcccggtctcatcatgttcttttgcttggcaacttgatcatcgaaggcccggccacctgtctggaaaaaaaaacatttcccccgcattttactgataatattgtatttaggagtattgccttatcttcatactactagtagtacctacaagttgggggtatatcgatcgtctgatacgcacatggacatggtgccctgtatacatggatggatctaggggaacggccaacgacgtggagggcgccaagcgtcacagatacaatcatacaatccattctcgtggaccgtaccagcaccaccatgccccgagccatgttctctccggtcaaagctcctcctggctggattagaatagctaatcctccagtccaaatgcacgccactagtgaacaaaaatagcttggcattcagtgagctgcatcggcgatgattgccatcgctgtccctgtgacgagtgacgaggcaggtaacgtaaaggctgccaggtcaggtcggcactgcactgccatgctaggccgatgtccttttgcacacagtctccgtgctcgtgacgttcaatggttctgctcaatagggcctctgcatctgctgcatgcgagccacttgcaggccagccatggcgcgatcgacacttctgttgcctgcaagctgaaagcgcgcaacgccagtattctgtttctgctgctacagaaaattgttgtttcttggtcaaacggaacctggtagtcgcactcgggagaattttcggttagcgtaccgtacatgcagctaaaaccgagtactaactgtttgacttcaatttgcgaatgagatgccttgtttagtcggagtagacgaggattcaccatgctatggtactagcggcggccggcggcccgcagtcggtgagacttgagagatagaggatccctgaaatccgccgcgccgccgccatgtgccatgcccatgcatgcggtgactaaccgccacgtattttttttcctcgcgggatccgcgggcacgcatgcaggtacaaggacgggtcggcggcgcgcggcacggtgggcaccgactcggcgaccatcgcgctgtcggggcggcgggccggcaagaagcagcggcgagccaagctgcggggcgtcgtgctgggctgcaccacgtcctacaccggcgaaagcttcctggcctccgacggggtgctcagcctcggctacagcaacgtctccttcgcgtcccgcgccgcggcgcgcttcggcggccggttctcctactgcctcgtcgaccacctggccccgcgcaacgccaccagctacctcaccttcggccccaacccggccgtgtcctcggcctcggcctcgaggaccgcctgcgcgggctcggccgcggcgcccggcgcgcggcagacgccgctgctgctcgaccaccggatgcgcccgttctacgcggtggccgtcaacggcgtctccgtcgacggggagctcctcaggatcccgcgcctcgtctgggacgtccagaagggcggcggcgccatcctcgattccgggacgagcctgacggtgctcgtgagcccggcgtaccgcgccgtggtggcggcgctgggcaagaagctggtcgggctgcccagggtggccatggacccgttcgactactgctacaactggacgtcgccgctgacgggcgaggacctcgccgtggctgtgccggcgctggccgtgcacttcgcggggtccgcgcggctacagccgccgcccaagagctacgtgattgacgcggcgcccggcgtgaagtgcatcggcctgcaggagggcgactggcccggggtgtccgtcatcggcaacatcctgcagcaggagcacctgtgggagttcgatctcaagaaccgacggctaaggttcaagcggtcgcggtgcatgcaatgattggacttggacggccgtcatggcgtcatccaatcgttcctccctccacttcattttttacccctcggcggtggtgatctttgctgattctttttttttacccatgttcagatactgatgcaatgagaaagtgtaccttcttgcaatgcaaagagagctgtaatcagttttcctccggtccaaaaaaatataattaagt

SEQ ID NO: 147647 - DNA, 649 bp, Zea Mays
ccggcctcgcgcaatagccgtcgcacatgccagccccggcgccgtccccgccaccggcctcgcgcaacagccgccgcgccatcccgaccctgacccttgcccctgccgtccatgccaccggcctggcgtaagagccgccgcacattccgcacatgccagccccggcctcgcgcccgcggcattcgcgcccgactgttgtgggaggcaccgtcccatccgaatctcctcccctctccctcagatataagggttcgtcctcctcagcactatctcaagattgtgcgtagacgttcaacgacggtggggacacgccgctgcaggtgtgcgcccgccatctacgacgaggccatgtttcttcaatagatccgtcgtcgtgggctactacaagaaccgcgtcaaggtagagtatcccgcttgttgctttatgctaccgctgcatgcagtctaggtgttcagtgaaatgtcaatgcaattttgctattgttttgcgattgattgctatgtgctagcgtctgttgtatggtggtgagttacgaggccattgagttccttctgtcgcggaaggttacagtcaaagttttgtgattgactgctatgtgctagcttctgttgggtctgatcaaaatgaacaataactgattttgtcagt

SEQ ID NO: 147648 - DNA, 502 bp, Zea Mays
atgctcgagtcatctgcggttgtagctttaattgagtcactatggaatgacatcgagtcggaggaagctgctagtgctctagctctgctgatgaagtagtctagcagcatgcatcttgttgggagctctgaaacagtgatcactggccttgttgggttaatgaggcgtggaacttcaaagggcaaggagaatgcaagtgtcagctttatatgagatacgccagagaggtggatcaacattagcacagcgcgtggtaaggatacctgggttgaacaaagtaatgcagaacatcacgctcacaggaacaaagcgtgccaagaagaaggcaagcttgattgtcaagatgtgccagagaatccaaatgacatcagcactagcactaggatgtaccttgacagtggtggatcattcaatggtagggaacaacacattaaggtgcgctacaagctttggcagcggggagttgttgaagcctgtgtcaattttagtgcctatgccgtag

SEQ ID NO: 147649 - DNA, 603 bp, Zea Mays
atggcacccgcgtcctcatcgcgggccgccagggacccgctcctcttcgcccgcttcgacctccccgccggctgggggtgccgcaagcccttggccttttgccggagcccgggacacggacgacgcccccgtcgcgtccgagtccgccgccacagccgcccccaccgaggtgtcaaggatagcgacgggacccgatcgcgacgcgagcgccgcaacgtgcagcaggcgcccgcgacgggggaggtggcgcaggagctcctcgaacagttgactgcggacggacgtcgtgccggatatagtacagagcgacgactgcgtgcacgcagacagaggtcggcggcggacgcggcgcaccgccacgctttgctcggggagttcgctggtgcaggtgaccctcgaccggtacaaggtgaacgagaaaggaagattttgatttcttctgagtcgcgcgagcaagaaagggggaagaggaagaggaggagatggatttcacaacggaggagattgatcgagcaatgtctgcctcctcatctcgtgatgcatcaatgcttaccacaaggatggctggcgattcttctgacggggccaacattatttctttaa

SEQ ID NO: 147650 - DNA, 507 bp, Zea Mays
cctttgttgcagagacggaggtctaaatccctctattaaaccccagttagatggctcccatcacttgatgagcaggcactgaagcagactcctcttcagaaaccacttcttgaattttatcatcttcttctgggaattctaaactttggtgctcacaaggaatcgaccggagaaagcgtgagttgttcggtcaacgcagaggctgttcacggctccggtctgcggtggcacaactccgttctgagcagcacaagactctagaattaggaaacccagttcggtgagtttcactaatctagggagattaccgaacaaggttcacctgggtaacaaacttctcgagatactctgaccatggcgaggtggaaggatggttgctgtggcaccagagtaccagacaatggaatggcacttgatgaactgaacaaagccgacgcggaggctaaggagatgaactcaggcttgtacacaccttcacagagatgcccaaggatccaactaaagctt

SEQ ID NO: 147651 - DNA, 189 bp, Zea Mays
atggcgaggtggaaggatggttgctgtggcaccagagtaccagacaatggaatggcacttgatgaactgaacaaagccgacgcggaggctaaggagatgaactcaggcttgtacacaccttcacagagatgcccaaggatccaactaaagcttgagacaacagggctccctggacaaacacttaaataa

SEQ ID NO: 147652 - DNA, 861 bp, Zea Mays
atggattcaccaagcgggctctggtggcggccggcgccgtcgtcgtgtcctccattcccgtcaaccccctcgatgtcgccaaggtacgtcggtgaccctatcgttgcctctttcgcttcctcgcaactgccgccctcaaccatcgaggctcgcccgcaacggccgccactgcccgctcgccatggcgctcgcctcgcaacagctaccgctggcccagcaccaccaacagcaaccccgcttgttctccaccacccactcgcgaaggccccctcggtctcccttaaaccaccgtctcccaccgacttctgcggttcccctagggatgctgatgcgtgcggtagagcgcgccaggacctctccctcacagatgcacctccgcgtagtcgccggcgaggacgacgtgacacctactgtcgtggttcccccggggacgctgatgcgtgtggtggagcatggttggacctctccctcaccgatgaacgcctgcgcccgacacaccgcgtccccgttgttcacctcggcctgctgctgggcgccacctcgcctccctcgccgcgttgctgcacgtgcctctaccgtggcgacatgcccaagcacgtgaccgaggccaacctgctcgtcttgttctgtgaggtcgccactgtcgaggaggtcaccatcatcaaggacaaggccaccaaggtctcccgaggtgtagatctgcctggccccagatctgggctcgccgccctcccttccccacgcctgctcccgctcggttcgccgcaatgttgtgacctccactgctcgctccagagaagtttttctccgctcggggttgggtttgggagcaatgtcacccgcaggtcggaggaatcttag

SEQ ID NO: 147653 - DNA, 933 bp, Zea Mays
gctgttgttgaaaaagctgtatattatgctcttgtatggatcaataggctgttggctgtcggtcatgacatcgccatcaagacagataggaaagttatattttttcctaactatatatgctcttacctattcctgttctccatagtacaaaagatgatattgattttgtggctggtttcatttgttggaatgctcttcaactttcttacgctcatttacattgcttttctctgcggtaaattgctggcttaaatgcatgctgcttgaaccctataatcagatagaccatcccgaatgcaagtcaaggcctgatagtggtctttctgcaattacagagctggaccctggttatataacaggtttcaggtcctctctcttcagtatggaaagaatgggtcaaatggtgtgtagagtttggcattgaagctaatgcaattatcgctgttccgtatgattggagactgcccccatcaatgcttgaggagagagatctgtactttcacaaattaaagtttgtaacacttgcctcaacttgttatgaagcaaccaaatgctatacatctgttagcaggatcagtaagagttaatggcccagtgacggattcaaggtatcctgctcaccaacagatcccacaagcatacggttaccgccaaatgcctgcaaggttggacagtaccaacccatcacaggccatgggaggttacacgctgcagtcacagaaggaaacattatttgaagagttgccattttgaagagttactcgaatccaatattttgctcttttgaattccttggtgtacactggcaaatattagcatatttgaagagttgccatttcgatcatcatcttcatttgtactttttgggtcagatctaataaagcatcagcattaaatttacaatgatcacctaaatccatggtttttattgcc

SEQ ID NO: 147654 - DNA, 927 bp, Zea Mays
gctgttgttgaaaaagctgtatattatgctcttgtatggatcaataggctgttggctgtcggtcatgacatcgccatcaagacagataggaaagttatattttttcctaactatatatgctcttacctattcctgttctccatagtacaaaagatgatattgattttgtggctggtttcatttgttggaatgctcttcaactttcttacgctcatttacattgcttttctctgcggtaaattgctggcttaaatgcatgctgcttgaaccctataatcagatagaccatcccgaatgcaagtcaaggcctgatagtggtctttctgcaattacagagctggaccctggttatataacaggtcctctctcttcagtatggaaagaatgggtcaaatggtgtgtagagtttggcattgaagctaatgcaattatcgctgttccgtatgattggagactgcccccatcaatgcttgaggagagagatctgtactttcacaaattaaagtttgtaacacttgcctcaacttgttatgaagcaaccaaatgctatacatctgttagcaggatcagtaagagttaatggcccagtgacggattcaaggtatcctgctcaccaacagatcccacaagcatacggttaccgccaaatgcctgcaaggttggacagtaccaacccatcacaggccatgggaggttacacgctgcagtcacagaaggaaacattatttgaagagttgccattttgaagagttactcgaatccaatattttgctcttttgaattccttggtgtacactggcaaatattagcatatttgaagagttgccatttcgatcatcatcttcatttgtactttttgggtcagatctaataaagcatcagcattaaatttacaatgatcacctaaatccatggtttttattgcct

SEQ ID NO: 147655 - DNA, 2756 bp, Zea Mays
gtttaaaactgcagagaccaaaaatcgccatccacgccagggaaacaaaagcttccacccaaacaaactcccctcgctgaaactcgccgccgtctcctcgccttccgcctcagcacaggccccgtcgcggtctcctaggccacgcttccgcctctcctcgtcggctgcccgcctccgcccggcggccggagcaggctaggttaccagcgccccccacttcgcggtcgagctggaggacacgcgtagcaacgccgggttcttctgcggcgacctgtggtgtggcctcatggagcccaagggcgagtcaggccagaagcctattgaagaagcaatcgacagcttgaagactgatgctagcatgaaggcaaacaatgtcaacttgcctgctaagaaagacgcaagttcttctgatgcagtatcttgcatttcctccggcgatgcagctagtactgtgaaggatagagaaatgaaccaagaaacttcttttggcgaccaagggatgcattactatggatattattatcctggtgcatacggaggatgggatgagaatggctactttgttggatataatggcctagaggtgcacccagcagtggttcaagctgacaatggttcatatctgtgttatcctctggggtatgaaaatggatatgcttcttatattccggttgttcctggaggcattgccagtgtggatggtcagtatgtcagcaaagaaccatattactccagtgcacttccaattcaggatcctagcacacctggcatttttgctcagccaattgcatatggaactgaactagtacctgcctactcatgggacccttttgttcttctggatggggttcagggacatccagttggtgtgcatcatacaaattatgctccaagaccaaaatattcttctaataagcatgttgttccttctttgaaagcttcccacagtgcaaaatccacagcagatactgtcaaaggatcatcatcagctctagaaactgtaccaaatgctgccaatagcagcacatcatcaaagggtgcaaataaggcacctggtgcttccataacaaaaggatatcttccatctagcaagtttgtgatgcacagtaataaccaagcaaaaagcagtgtttatcaaagcaaaggcatcaatctgaaagaaagtggtagaagctggcacagcagtgagaagcttaaagcgagaagtaagctaaatggacatggcgattctgaatctaatgagaacaaccacactgataactcgaaatatagtttgagctctcaatctgatgttgttggattgtcaagtgtaggggatgctaacgccagcataccttcacctgtcgtaataagaaaaactgcatacaatctttcagattttgttacaaagtatgagcaagctctattctttgtaattaagtcctacagtgaagatgatattcacaagagtattaagtacaatgtttgggcaagtactcctaatggaaataaaaggcttgacaatgcctataggcttgcacaggaaaggatggcagaaaaaggaaccaaatgtcctgttttccttttcttctcagttaatgcaagtggtcagttctgtggcgtggctgagatggttggcccagtagatttcaacaggaacatgaacttctggcaacaggacaagtggaatggtttcttctctgtaaaatggcacattattaaggatgttcccaatccacaatttcgccatataattttggagaataatgagaataaacctgtgacaaacagcagggacacgcaagaggtcaaattttcacaaggtacagagatgttgaacattttcaagaacttcacgtgtaaagcatcaatactggatgactttgacttctacgaaaatcggcagaaagtaatgcaggatagaagaggcaagccacttacatcgtttggtcacccattgccaaaagctgaaaaaactgcagaagttaaaaggcaaacacaattgataagtgccacggaagttggtagagccgatacaaccaaggaaaatgaggagaagagcagcagtgttccagaaatactcaacgcagcatgtagtaacaaggagaaacccaacaaaatcgcaacagacggatgatgccttggctagttgactgggaaaatgagatagcttctggaacggacttcaacttgaattcctgaaatcataagttcgatgtgcgcaatgtcaagaaaccacaattggtcatgggttctcttgcattttctcatggaagtgaagaaacgaaaaaagtgaagcaacggaactgtcttcccacgagaaatgttcaatgactgggaaaaaggttctaggacgcatttaggttgaggcccctggtgctaaggcattagagcgccctccttgtctgtttttcccccatattggagggtcgtttcttttcttttgtcgtgcccctttttcccctcttcttttgcctattattctgcagctgagattttgggaagcagtttgcacttaggtccaaagaaagggaatgtctgttgctttgtgggttgtcctctaggatgtggtaggtgttgactgttttttagaatctgtgcacgttctagaaactgacagaaaaaaagagaaaaaaggattgtgagggattagaaataaaaaggatcttaaaaagatacatggtatcttatgtttactgcttcttccattatcaagaaaactaacaatgggtctagatgctttcaatagtaagactatatttatataaagttcaatt

SEQ ID NO: 147656 - DNA, 932 bp, Zea Mays
gaagcatttgaagacgcagaaattactcatgttgacgatacagtagatcctgttagagacatggaaactattagtgaagagctcagactaaagttttcgttggattttgttgatttacaagatcagctgtacaacacttaaaccttttttcgacactattctgtttctattttctgcaggatatagagttcatgaaaaagaaacttgaggaccttgataagccaatgaagaggaggaatgataagctgctcaaaattgagcatgaattatattgatccagcacaatgccgaggagactggagactaaacttggaggtgctactgaaggatgtgactttgagtcaaagggtagcacatggagagcttgaattgaattcaagcttggatatgattggaaaatatttgtattagatcacctagaagggtgattgatgcttgttattggccaagcagacaataggtagtcagatgaagattgtaaaaaacaagcatgcttaacccttcaagaatgcacagtttgagcttgaatttggaaaggggatatgccacagttcagagttttttgaacagaatttctggagcagttgttcctataaaataatattttaggtcttgaagccaccaccgtttggattgacatgatctgtggtattctggtgatctcattatagcagacttcatttcttattgtgcttatacagtagtgtagcgggaagagaattcacattgcatgaaatcatgttgatagctaagaggtggaagttgaagtaagccgggaagggtgaggtattgggaactgtggcatttaaagttcagtaggcagcagtaaactgtagtggtgtggtcgtgtacataagatgtgcacattttgaactcaggcattctttattgagtgctgctagaattacattgagctccctccacttctgata

SEQ ID NO: 147657 - DNA, 1047 bp, Zea Mays
gaagcatttgaagacgcagaaattactcatgttgacgatacagtagatcctgttagagacatggaaactattagtgaagagctcagactaaagttttcgttggattttgttgatttacaagatcagctgtacaacacttaaaccttttttcgacactattctgtttctattttctgcaggatatagagttcatgaaaaagaaacttgaggaccttgataagccaatgaagaggaggaatgataagctgctcaaaattgagcatgaattatattgatccagcacaatgccgaggagactggagactaaacttggaggtgctactgaaggatgtgactttgagtcaaagggtagcacatggagagcttgaattgaattcaagcttggatatgattggaaaatatttgtattagatcacctagaagggtgattgatgcttgttattggccaagcagccaaaatctatagtgggaactcctgcatacattgctcatgaggttcttctgaagaaggaatacaatggaaaggttgctgatgtgtggtcatgcggagtgatgccatacgtgatgctgaaaccatccatggttcttgaaaaacctcctagctgaccaaatggatgacaatacgatgagtaagcagtacgaggagcctgaacaaccgatgcagagcatgaatgagttcatgcagatcctggttgaggcgaccattccagcagttggttcacgtggactcaatcagtttctgaatgatgacattgacctcgacgatgacatggaggacctagactcagatgccggtcttgacctggaaagcagtggggagatcgtgtatgctatttgacaacattgaatactttgttgtgtcgtaggttaccaagataattagagacaaggggcaggttgttgtgcttgcaagtatctgttgcagctgttgttcatgcctgatgttgatgcctcttttcatactgttgtgtttggatggtgtaccaccagtgttttacaacagtttggcccttggaattgctattgctaaaacttggttcctctgag

SEQ ID NO: 147658 - DNA, 667 bp, Zea Mays
aacaacatgtttgtttgtcaaaacattttatacacgcacgatttgtagtcatgcataacagggaactatgttggaaggttcgaatgctaaattagtcactaactctttgttactgaactaaggttgctgatgtgtggtcatgcggagtgatgccatacgtgatgctgacgatcaccatccctgagataagaaaccatccatggttcttgaaaaacctcctagctgaccaaatggatgacaatacgatgagtaagcagtacgaggagcctgaacaaccgatgcagagcatgaatgagttcatgcagatcctggttgaggcgaccattccagcagttggttcacgtggactcaatcagtttctgaatgatgacattgacctcgacgatgacatggaggacctagactcagatgccggtcttgacctggaaagcagtggggagatcgtgtatgctatttgacaacattgaatactttgttgtgtcgtaggttaccaagataattagagacaaggggcaggttgttgtgcttgcaagtatctgttgcagctgttgttcatgcctgatgttgatgcctcttttcatactgttgtgtttggatggtgtaccaccagtgttttacaacagtttggcccttggaattgctattgctaaaacttggttcctctgag

SEQ ID NO: 147659 - DNA, 784 bp, Zea Mays
aaccaacttgccgaccgcaggaatccagccgacccagcacttccccggttcctcccagcagagtcttcttctctgcatccgttccgttccccggcctctcgcacatccaccgccaccgagccgcgtgcgtcttccatgaaggacccgttcgaggcggacgtcgaggagcaggactcgccgccggagtcgccggcgccgcccgaggatgaacccggcgccgcgggccctgcggaggaccccgaggactacgacggcggcccgcccccgcgccagccgtctgccccggcgtctcacgcagccggtgccaaggccaaggcccgtgtccatagggagcagcaggaggatgacgacgaggacgaggaccagattgaggtcgacctcgagaagcttcccagcagcactggcgacccagacaagctcgctaagatgaatgctatactgtcccaatttacacaacagcagatgaaccgttatgagtcattccgaagatctggatttcagaaatctaacatgaaaaggctgttggcaagcatcactggaagtcagaagatttctatccctacttcaattgtggtatcgggaatcgccaaaatatttgttggtgagctaattgaaacagcaagagtggtcatgagcgagaggaaggattcaggacccattaggccttgccacatcagggaggcatacagaagattgaagcttgaaagggatgatcccacggcgatctgttcctaggcttttccgtttgtttgaagcatgtatattacacatgtgtctggagtcc

SEQ ID NO: 147660 - DNA, 1669 bp, Zea Mays
tggtaaagttctctcttcccctctcgcttcgcttcgccaacgcctgcgagagctagggtttcgtgcgccactgccacttccggtcttccgcccgccatggccgaggcccccacgtatcagatcctggtgcgtctcctcgacgggcgcaccacatgtcttcgcttctccacgcccaccgtctccggcgccgtgctcctcgaagctgtcgcgtctatatctcgcgtccccgccgccgccctccgcatcgtcaccggccgcttcgacgtctcgccctccaacgtcctcacctcatcagctgatggccagttcccctccgcctccgcgctcctccgccttcgaggaggcaagggcgggttcggctccctcctcagaggggccgcctccaaggcggggcagaaaaagactagcaactttgacgcctgccgcgacatcaacggtcgccgcctccgccacgtcaacgctgagcgccgcctcgaggaatggaaggccgaggccggggaccgccatctagaaaagctcgccgagaacttcatcaagaagaaggccaaggaggcgggccgccgcggcggaccctcagctgctgaggtggacaagtacctggagaagtaccgcaaggatgctgagatctgcgtcaacgcggttgaggaatccgtacgtgcatctcttggaaagaggaagaccgcccctaagccgccctctggcgcagacgctaagaagcttaagatttggttgggaaagaacaaagtagaagaagatgaaagtgatagcgatagtgacagtgacatggatgatgaggacagtgaagatcaggagagcgcagatgcaaaatctctcgtagttgatgaaggcaattgctcaaatggatccataaaaaatgagaaacttgatctgggttctgtttctggatcacattcagaaggagagtcctcaggggaaaagtcccaaccgacaacaaaatcaggagctgaaggtggtgactttgaatctgatggcagtgcagagcctgaattaggaatggtggatcatcccattcctgtgaacaatgctgttgctgctgcttcagaagaagtgctgaaatcagatgaagtgacagcagatgaggataacactacttcagcaacttcaaaccaaaacaatccagtggtaccacaagttaaagaagcgctgaaagcagacgaggataacagtgcttcagctacttcgaaccaaaacaacccagaggtgcccaaagtagaagaatatgccgatgccagcaaatcttattcagagccattggaccttgcaaagtacagttcagctgtagaattggaggtgcttggtctggagaagctaaaaatagagctgcaatctcgtggattaaaatgtggtggaactttacaggagcgagctacccgactcttccttctgaagacaactccattggataagttaccaaagaagctgcttgctaaggccgctattggggggaagtgagaagctgtataaacaagtactgatggtgcaatgcttaagttttttctttgacgatgtatggaaatctgttgtggtgtaatcacgtgttacaagcccttggtgtggcattgacgattaatgatgtgtctgtatctacgtatatgctaatcgttacctttgaagccccaagtttggactagggttccatttcgttgta

SEQ ID NO: 147661 - DNA, 1826 bp, Zea Mays
tctctcttcccctctcgcttcgcttcgccaacgcctgcgagagctagggtttcgtgcgccactgccacttccggtcttccgcccgccatggccgaggcccccacgtatcagatcctggtgcgtctcctcgacgggcgcaccacatgtcttcgcttctccacgcccaccgtctccggcgccgtgctcctcgaagctgtcgcgtctatatctcgcgtccccgccgccgccctccgcatcgtcaccggccgcttcgacgtctcgccctccaacgtcctcacctcatcagctgatggccagttcccctccgcctccgcgctcctccgccttcgaggaggcaagggcgggttcggctccctcctcagaggggccgcctccaaggcggggcagaaaaagactagcaactttgacgcctgccgcgacatcaacggtcgccgcctccgccacgtcaacgctgagcgccgcctcgaggaatggaaggccgaggccggggaccgccatctagaaaagctcgccgagaacttcatcaagaagaaggccaaggaggcgggccgccgcggcggaccctcagctgctgaggtggacaagtacctggagaagtaccgcaaggatgctgagatctgcgtcaacgcggttgaggaatccgtacgtgcatctcttggaaagaggaagaccgcccctaagccgccctctggcgcagacgctaagaagcttaagatttgggcgtgctattctattacagggccatatgttctttggaggagcaacaactggtgaagctagtggcccgagtgtatgcgctggatgcgggcgacgaggcacgtggatccatttcagactatctgctcgagatcagggtgggatgcgagaaggacccatcatttgccaggggcaggaacctcatcacgtgcgctacgggcctgatgccgatagacatggttccgtcggcatcagcatcatctggcgatgttgtggcaaagaatctggtcaggtttatccgggccagggtgccggagtctgtgcaactcagagagtcagaggcatctcatcgtcaacacaaagaaacaagagtaactccgcacaggttgggaaagaacaaagtagaagaagatgaaagtgatagcgatagtgacagtgacatggatgatgaggacagtgaagatcaggagagcgcagatgcaaaatctctcgtagttgatgaaggcaattgctcaaatggatccataaaaaatgagaaacttgatctgggttctgtttctggatcacattcagaaggagagtcctcaggggaaaagtcccaaccgacaacaaaatcaggagctgaaggtggtgactttgaatctgatggcagtgcagagcctgaattaggaatggtggatcatcccattcctgtgaacaatgctgttgctgctgcttcagaagaagtgctgaaatcagatgaagtgacagcagatgaggataacactacttcagcaacttcaaaccaaaacaatccagtggtaccacaagttaaagaagcgctgaaagcagacgaggataacagtgcttcagctacttcgaaccaaaacaacccagaggtgcccaaagtagaagaatatgccgatgccagcaaatcttattcagagccattggaccttgcaaagtacagttcagctgtagaattggaggtgcttggtctggagaagctaaaaatagagctgcaatctcgtggattaaaatgtggtggaactttacaggagcgagctacccgactcttccttctgaagacaactccattggataagttaccaaagaagctgcttgctaaggccgctattggggggaagtga

SEQ ID NO: 147662 - DNA, 136 bp, Zea Mays
aaaaaaccaaagggatgaactttcaataacatatttacacaaaagcagcgtctatctagtctatttttccgcaacaatctttcacgtgctttttagactgagggtggtgagactttctaaaattacctaccatatt

SEQ ID NO: 147663 - DNA, 2078 bp, Zea Mays
atcagccacccgtccaccaccacccagcccatttctcgtccccaaaatttcgagtttcgaaaccaaaccaaacgaagcgacactgcacgtgtacgaacctacgacagctctctacttccctcgcgtcctctccatcgagagctgctcctgctcgtctcctcccacaccgcgcaattcgtcgggattcgggaaccctagcgccggatctccgcggcagcggcggaaatggcgaatcccctagcggggctgcaggaccacctcaagctcgcgcgggactacgcgctcgagggcctctacgacacctccatcatcttcttcgacggcgccatcgcccagatcaacaagcatctaactactttggacgatgctctgattcgtacgaaatggatgaactgcaagaaagcaatctctgaagaagtggaaattgtgaaacagttggatgctcaattaaagtcccttaaagaagctcctgggacaaggcggtcatcatcacctcctattcggtctaataaatcatttgttttccaaccgttggatgagtatccaacatcttcaccagcaccctttgatgatcctgatgtgtgggctccaccaagggatacaccaacccgaagaccaacaagaggtcaatctagtgcaaggaagtcctcccaagatggagcctgggcacgtggttcatcaaggactggaacacctagtcgaagcgcaaaacctaatgggattaaaggaggtgctgttaaatcaactgcctctaacagttctgtaaggaaagggaaacaaagttcaaacaaggctgattcaacgagtagtgatgctgaggaaggtaagtccaagaagggtcagtatgaagggccagatatggacttagctgcaatgcttgaaagggatgttctggattctactccaggagtaagatgggatgatgttgccggacttagtgaggccaaacgactcctcgaggaagcagttgtgcttcctctctggatgcctgaatattttcagggtattcgtcgaccttggaaaggagttcttatgtttggtccaccaggcacgggaaagactcttttggcaaaggcagtggccaccgaatgtggaacaacattctttaatgtttcctctgcaacactggcctctaaatggcgtggcgagagtgagcgcatggtccgttgcttatttgatcttgcgagggcctatgctccaagtacaattttcattgatgaaattgactccttatgcacgtcgcgcggtgcctccggcgaacatgagtcgtcaagaagggtgaagtctgaacttctagtgcaaattgatggtgtaaacaatagctccaccactgatgatggccagccaaaaattgttatggttctggctgctacaaattttccatgggatattgatgaggcactgaggcggaggctggagaagcgtatttatattccacttccagattttgaaagtagaaaggcacttatcaacattaatcttagaacagttcagatagccgcagatgttaacatcgacgaggttgctcggaggacagaaggctatagtggagatgatctgacaaacgtttgccgcgatgcctcaatgaatggcatgaggcgcaagatagcaggcaagacccgcgacgagatcaagaacatgtcaaaggacgagatagccaaggacccggtggccatgtgcgactttgtggaggctctggtgaaggttcagaagagtgtctcgccttcagacatagagaagcatgagaagtggatggctgagtttgggtctgcctgagacctcggccatctgcttgggtcctgttcaaacattcgttttgtgtgggttgacacggcattccgtagcaatgatacggtgttacccgccggtggtcttgcttcatatagaccagaggcacgagctatcttgtctgtttccagtgatgctaggaattgagttcacgatcgtttcagttcttggtatatgcactttctgctgtcaaacgtatctcatcaagtagccgtggccgcctctatttccagatgctccgtgtttggttgaaggaatatcacaggaaccaaagttttagcgtgtttcaa

SEQ ID NO: 147664 - DNA, 1218 bp, Zea Mays
cacccctacttgtatatgttttcttaattgccatactgatttggattatgctgttcttgaatgatcatgaacccaaccaatcttttctctcttgtagcctttttcatctggtctaaacttgatacatagtggctaattatgtccacttttccttatcagggtattcgtcgaccttggaaaggagttcttatgtttggtccaccaggcacgggaaagactcttttggcaaaggcagtggccaccgaatgtggaacaacattctttaatgtttcctctgcaacactggcctctaaatggcgtggcgagagtgagcgcatggtccgttgcttatttgatcttgcgagggcctatgctccaagtacaattttcattgatgaaattgactccttatgcacgtcgcgcggtgcctccggcgaacatgagtcgtcaagaagggtgaagtctgaacttctagtgcaaattgatggtgtaaacaatagctccaccactgatgatggccagccaaaaattgttatggttctggctgctacaaattttccatgggatattgatgaggcactgaggcggaggctggagaagcgtatttatattccacttccagattttgaaagtagaaaggcacttatcaacattaatcttagaacagttcagatagccgcagatgttaacatcgacgaggttgctcggaggacagaaggctatagtggagatgatctgacaaacgtttgccgcgatgcctcaatgaatggcatgaggcgcaagatagcaggcaagacccgcgacgagatcaagaacatgtcaaaggacgagatagccaaggacccggtggccatgtgcgactttgtggaggctctggtgaaggttcagaagagtgtctcgccttcagacatagagaagcatgagaagtggatggctgagtttgggtctgcctgagacctcggccatctgcttgggtcctgttcaaacattcgttttgtgtgggttgacacggcattccgtagcaatgatacggtgttacccgccggtggtcttgcttcatatagaccagaggcacgagctatcttgtctgtttccagtgatgctaggaattgagttcacgatcgtttcagttcttggtatatgcactttctgctgtcaaacgtatctcatcaagtagccgtggccgcctctatttccagatgctccgtgtttggttgaaggaatatcacaggaaccaaa

SEQ ID NO: 147665 - DNA, 1452 bp, Zea Mays
acctcggctcgggcgcagagcacgcggcaccggcgcgtcctctcctcctgctccgatctctctgcccagccccgcctgtgcgcttcgctactacgcttcctccatgcatcccctcagccatgtacgcctgtatttgagaagacattagcggagttgaatccagaagaagagccgaagagttatcttagccacagccaggtcgcccgttagttgttcgcggaaatgtccctccgccagctgcttcaccaaacgcgtccgtggcgcgcgcttgagcagcccacgaagatgtcttgtctcctctccatcttccgtgcgctctccattctccgttctgaaggctcggctgagccactgcgcagatcttcatctgtgccagccccgctgccaagaagcttgccttgctccagctctgacccccttggccccagattcagcatcgacgtggtcgactcggaccattggccctcgtcatttgacttgttgtccgacgctgcacggagcaatgaatgcccagatgtcttcgagcaacgtgaggatgatgaactgcacgactctgatgatgagatagatgacatgaggcatcgaaagaagctattctacaagctggatagggggtctagagagtttgaagagaacaatgtgctgttacgccgcaggaagagagacaaaaccagtgcaaagaacccaaaggagtgcaaggaggcgcagcctcccaagtctgtttctaccaacgttccaaaactgaaggaaaagcgttctatgcgtgtggacgacttggttgaggtgaagcgcgaacgggtgccgacattcaaccaaatgacggatccttaccaccaccctttctgtctagatatacatgtcacaaagggatcagtgcgtgcttgctttgtgcacagagtgaccagccgggtggtgactgttgcacactccatatcgaaggacatgaagtttgatcttggttcgaagaagggtaagggcatgaaggcgtgtgtggcagttggggcattgcttgcgaagcgtgcaatagaggatgatattcacaatgcaatctatacaccaaggaaaggggataggattgaagggaaaattgaggctgtgttgtgtgcaataaccgagaatggagttgatgtgaaggtgaaactgaagcaaagaaagccgataaagaacacacacagtatgagcagtccttccgacgattcagctgttggtcgacacaactcctaagcagcatgaccctgagtgcctttctggttcgaatgtcgtcttattttattgcatgcaaaactgacaggggtacaggcaactgaaggagacgtagaagtagccaagatggtcccagcattctttgtttcatgtgcttatccatcgtttgtgtgtatgggtagttcctgactgcctgtatcaagttctgaatagaccatctgtacgcactgccagtccgttgctgccgaa

SEQ ID NO: 147666 - DNA, 106 bp, Zea Mays
cataattctcatgtgaatttcctaaaaagcaaaaatgtagacgccactacaaataatgaaataaatcaaaatgactatgaaataagtttgaatatgaaattgtaaa

SEQ ID NO: 147667 - DNA, 1980 bp, Zea Mays
gctggccttgtcgcgagtaattgccagccatcttctgctagagaaaacacacgcccgcccccgtggtccgtctgctgccgcggccccgcacagaaactcacaccgcagctgcagctgcagccgcggcccgccagcaaccagtccgatccccgccgcggctacctgccggttcccctctcccttcccggcgtgcggccgcgcgcgtgtttgatcgatcggagccagacagagcgcggaaacggcctgagaattctgttggagcagcagcactgccacagctagcatgggtcgggcgccgtgctgcgacaagacgagtgtgaagcgggggccgtggtcgcccgaggaggacgacctgctgcggagctacgtccagaaccacggcaccggcggcaactggatcgcgctcccgcacaaagcagggctgaaccggtgcggcaagagctgccggctgcggtggctcaactacctgcgcccggacatcaagcacggcggctacacggagcaggaggaccggatcatctgctccctctacaactgcatcgggagcaggtggtccatcatcgcgtccaagctgccggggcggacggacaacgacgtcaagaactactggaacaccaagctcaagaagaaggcagtcgccatgcaggagcagcagaaggagaaggaggaggaggaggagtactaccagcagcagcagcagcacacctcaggcggccgcggcgccgctccccggagccagcaatgcgcctccatgcagccctcgcccgcgtccgcctcgtccgcggtcaccaccgcgagccccagcgacgcgtgcagcttcggggccatgtacccctccccgacgacgctgcaggctccggtgcacgcgcgctacgacgtcacggcgccagtgccgccggtgccgcaacagcaagcgtcgtcgtcttcgctcgccgagttctcccccgcgccggcgccggcgccggcggcgacaccacccgccgcctccatcatcggcggcacctgcacctgggccggcgggccgctactcgacgacatgttcctgcccgagctcctcggggacgtcagcgagttcccgcctggcgacttcttcggcaccggcgggttggccccgctgctgcaggacagggcggcggcggcgtccctccaggagctctccgcgttctactttcccaacgcgcaggccgagatgtgggctgcagcggatcatcacgttcatgccaataacaagcctgcggccggactctgccacagcctgacatgactgctctcgatcatgcgcagagccgcagagggctagcgtgtctctctcttgctagtcgttcttggctgatctctccctgtccatctgtatgatcgctctctaattctctatgcgaggtcatcacatgtacattactattatcttatcactctccatatgcatggtctgtgactagcaccataccatagagaagttattaggttcggatcgccattgcttcgttcgtatggcttatgtctgcaccttcacagaaaaagtgtgggacaagataataaactgggccaacctctcattcttacaaggaactcagaatttaggatcgctatatacatggtagaaaagtctgaggaatcacagtaaagatacaaggaaattttttgatggccttatgatatatttttggtggcacatttggttggagagaaatcgtcgagtgttccaagggcaacaaagagacattgagcaggttgccttctcaatcaagaaagtgtttgaaagcagagcatctctcccgcactcatttggaggctagtggtctgaacgcatcaatggatttaaataggacaaggggagtggagttagtttatgggggttgcatttagtcatagcttgtttttgtaaataatgaggtacagtggttttagggggctttgctgttatcttgtgtaatgcagagtttgtattttttttccctcttctaatatatttgcgtgaca

SEQ ID NO: 147668 - DNA, 1223 bp, Zea Mays
agaaaacacacgcccgcccccgtggtccgtctgctgccgcggccccgcacagaaactcacaccgcagctgcagctgcagccgcggcccgccagcaaccagtccgatccccgccgcggctacctgccggttcccctctcccttcccggcgtgcggccgcgcgcgtgtttgatcgatcggagccagacagagcgcggaaacggcctgagaattctgttggagcagcagcactgccacagctagcatgggtcgggcgccgtgctgcgacaagacgagtgtgaagcgggggccgtggtcgcccgaggaggacgacctgctgcggagctacgtccagaaccacggcaccggcggcaactggatcgcgctcccgcacaaagcagggctgaaccggtgcggcaagagctgccggctgcggtggctcaactacctgcgcccggacatcaagcacggcggctacacggagcaggaggaccggatcatctgctccctctacaactgcatcgggagcaggtggtccatcatcgcgtccaagctgccggggcggacggacaacgacgtcaagaactactggaacaccaagctcaagaagaaggcagtcgccatgcaggagcagcagaaggagaaggaggaggaggaggagtactaccagcagcagcagcagcacacctcaggcggccgcggcgccgctccccggagccagcaatgcgcctccatgcagccctcgcccgcgtccgcctcgtccgcggtcaccaccgcgagccccagcgacgcgtgcagcttcggggccatgtacccctccccgacgacgctgcaggctccggtgcacgcgcgctacgacgtcacggcgccagtgccgccggtgccgcaacagcaagcgtcgtcgtcttcgctcgccgagttctcccccgcgccggcgccggcgccggcggcgacaccacccgccgcctccatcatcggcggcacctgcacctgggccggcgggccgctactcgacgacatgttcctgcccgagctcctcggggacgtcagcgagttcccgcctggcgacttcttcggcaccggcgggttggccccgctgctgcaggacagggcggcggcggcgtccctccaggagctctccgcgttctactttcccaacgcgcaggccgagatgtgggctgcagcggatcatcacgttcatgccaataacaagcctgcggccggactctgccacagcctgacatga

SEQ ID NO: 147669 - DNA, 2683 bp, Zea Mays
aaccccaattcttctccgccattcttgcctctgccgacgccctctaccctatttcaaaacatttcaaaccactcttcgcccccttcctctcctctcatccccttcccccctccactctctcgtgtgtggtctcgcccctgaggttcctgatcgcaccatctccctccggcgacagtccgccgccccgccccgcgcgctcgacgaggccgctccgggtggtgaagagggtgctgctgcagtgtctcccctctcgctatgagtagtgctgtgaaggaccagctacagcagatgtcgacgacgtgcgattctctcctgttggagctcaacgtgatttgggatgaggtcggtgagcccgacatggcgagggaccggatgctgctggagctcgagcaggagtgcctcgacgtctacaagagaaaggtcgaccaggccaatcgatgcagggcccagttgcggcaggccattgcggaggcagaggccgagctcgctggcatatgctcggccatgggcgagccaccgatacatgttagacagtcaaatcagaagttacaaggtttaagggaagtattgaatgcgattgtcccatacttggaggagatgagaaagaagaaagttgaaagatgggaccaatttgttgatgtgatcgagcaaattaagaaggttgcatctgaaatcaggcctgcagattttgtaccctttagaattcctgtggatcagtctgatctgtcattaagaaagctggaggagctaacgaaagagctgcaatcccttcagaaggagaagagtgatcggctgaagcaagtcatggaacatcttaacactttgcattcgttatgcgaggtgcttggtgtagacttcaaacaaacagtaaatgaggtgcaccctagcctgggtgaggctgatggatcaaagaacctaagcaactgtacaattgaaagccttgcatcagctgcaagcagactgcgtgaattgaaagtccagaggatgcaaaagcttcaagatttggcctctagcatgcttgaactttggaatctcatggatacaccacttgaagaacagcagatgttccagaatgtaacgtgcaatattgctgcttctgaacatgaaataactgagcctaacacgctctctattgacttcctcagctacgtggaatctgaagttttaagactcgagcaacttaaagcgagcaagatgaaagaccttgttctaaaaaagaagacagaactggaagagcataggagacgtgctcatttgattggcgaggaaggctatgcagctgaatttagcgatgaggctattgaggcaggagctgttgatccttcgctggtgctggaacaaattgaggctcacattgccacagtgaaagaggaagcctttagcaggaaggatattctcgagaaggttgaaagatggttgaatgcatgtgaggaggaagcttggctggaagattacaacaaagatgacaatcgttataatgccgggaggggggcccacttgacactcaaaagggctgagaaagctcgtattttggttaacaagatcccaggactggtagatgttttaaccacaaaaattgtagcctgggaggcagaaagaggaaaggaattcacatacgacggtgtccgccttatgtcaatgcttgaagagtacatgatcgttcgccaggagaaagagctacagaagaagaggcaaagggatcagaagaaaatccaggatcaactcaaagctgagcaggaagcgctctatggatcaaaaccaagtccttctaagcctcaaagcacgaagaaggcgcctaggcactccatgggtggtgcgaaccgaagactgtctcttggtggagccactatgcaagcccccaaaacagatatactgcactccaagacagctcgtgccgccaagaaggctgaagatttgggcgctttatctcctagtagtagaggcttggacattgccggtcttcccatcaagaagttatctttcaacgcaagcactttgcgagaggcagaaacaccgcgcaagccttttgcccagatcatgccaggaaacaacgtctcaccgatgcctacgcggcccatctccagcgccacagaggaagagaacaaaacccccaggacatttgtaggagggctcaatgcgaaaacgccggcgacagtgacggctcctatgcagatggcgatgacaccagccgtggctaacaaggtcatagccactcctgcaacccttttccaggagaaggcagattcgccagcactgccagcggacatcgagtactcgttcgaagagaggcggctcgctgtttacctggccaggcaagtggcttaaactcggtcattcacgtagttgaaagctgaactgactgcgatttctcgtcagaggccaatgttacctgttggtcgatactcgatagtagtcggcctcgttcgtaccttgcagtactattctgattcatagccatatttgctacagctagtaaggatttatttgggtactctaatattgatctcaatccacatgtgttgaaatgaattggagtgtaaattaatttaagttacacttcaatctatctcaatacatgtggatttgggagttttagacccgtatcgtaagttgtatagcttcacctggttgcatcgtggatgacctgttattgtttattactgttatccaaatatcttgccgc

SEQ ID NO: 147670 - DNA, 2866 bp, Zea Mays
aaccccaattcttctccgccattcttgcctctgccgacgccctctaccctatttcaaaacatttcaaaccactcttcgcccccttcctctcctctcatccccttcccccctccactctctcgtgtgtggtctcgcccctgaggttcctgatcgcaccatctccctccggcgacagtccgccgccccgccccgcgcgctcgacgaggccgctccgggtggtgaagaggtgagtgtcctacttgtgattcgcccagagattggatccggtcgtccgctgcatagcatgaatcctccgctgaggggggaaccgttttgagagatgggtggggtgttgtctcagcttcctgtttagcgctgtggaaccgttgctctgggggtgctgctgcagtgtctcccctctcgctatgagtagtgctgtgaaggaccagctacagcagatgtcgacgacgtgcgattctctcctgttggagctcaacgtgatttgggatgaggtcggtgagcccgacatggcgagggaccggatgctgctggagctcgagcaggagtgcctcgacgtctacaagagaaaggtcgaccaggccaatcgatgcagggcccagttgcggcaggccattgcggaggcagaggccgagctcgctggcatatgctcggccatgggcgagccaccgatacatgttagacagtcaaatcagaagttacaaggtttaagggaagtattgaatgcgattgtcccatacttggaggagatgagaaagaagaaagttgaaagatgggaccaatttgttgatgtgatcgagcaaattaagaaggttgcatctgaaatcaggcctgcagattttgtaccctttagaattcctgtggatcagtctgatctgtcattaagaaagctggaggagctaacgaaagagctgcaatcccttcagaaggagaagagtgatcggctgaagcaagtcatggaacatcttaacactttgcattcgttatgcgaggtgcttggtgtagacttcaaacaaacagtaaatgaggtgcaccctagcctgggtgaggctgatggatcaaagaacctaagcaactgtacaattgaaagccttgcatcagctgcaagcagactgcgtgaattgaaagtccagaggatgcaaaagcttcaagatttggcctctagcatgcttgaactttggaatctcatggatacaccacttgaagaacagcagatgttccagaatgtaacgtgcaatattgctgcttctgaacatgaaataactgagcctaacacgctctctattgacttcctcagctacgtggaatctgaagttttaagactcgagcaacttaaagcgagcaagatgaaagaccttgttctaaaaaagaagacagaactggaagagcataggagacgtgctcatttgattggcgaggaaggctatgcagctgaatttagcgatgaggctattgaggcaggagctgttgatccttcgctggtgctggaacaaattgaggctcacattgccacagtgaaagaggaagcctttagcaggaaggatattctcgagaaggttgaaagatggttgaatgcatgtgaggaggaagcttggctggaagattacaacaaagatgacaatcgttataatgccgggaggggggcccacttgacactcaaaagggctgagaaagctcgtattttggttaacaagatcccaggactggtagatgttttaaccacaaaaattgtagcctgggaggcagaaagaggaaaggaattcacatacgacggtgtccgccttatgtcaatgcttgaagagtacatgatcgttcgccaggagaaagagctacagaagaagaggcaaagggatcagaagaaaatccaggatcaactcaaagctgagcaggaagcgctctatggatcaaaaccaagtccttctaagcctcaaagcacgaagaaggcgcctaggcactccatgggtggtgcgaaccgaagactgtctcttggtggagccactatgcaagcccccaaaacagatatactgcactccaagacagctcgtgccgccaagaaggctgaagatttgggcgctttatctcctagtagtagaggcttggacattgccggtcttcccatcaagaagttatctttcaacgcaagcactttgcgagaggcagaaacaccgcgcaagccttttgcccagatcatgccaggaaacaacgtctcaccgatgcctacgcggcccatctccagcgccacagaggaagagaacaaaacccccaggacatttgtaggagggctcaatgcgaaaacgccggcgacagtgacggctcctatgcagatggcgatgacaccagccgtggctaacaaggtcatagccactcctgcaacccttttccaggagaaggcagattcgccagcactgccagcggacatcgagtactcgttcgaagagaggcggctcgctgtttacctggccaggcaagtggcttaaactcggtcattcacgtagttgaaagctgaactgactgcgatttctcgtcagaggccaatgttacctgttggtcgatactcgatagtagtcggcctcgttcgtaccttgcagtactattctgattcatagccatatttgctacagctagtaaggatttatttgggtactctaatattgatctcaatccacatgtgttgaaatgaattggagtgtaaattaatttaagttacacttcaatctatctcaatacatgtggatttgggagttttagacccgtatcgtaagttgtatagcttcacctggttgcatcgtggatgacctgttattgtttattactgttatccaaatatcttgccgcatgttatgtttctgatctcaaatctttgggataa

SEQ ID NO: 147671 - DNA, 1819 bp, Zea Mays
gcctgaacgctactcatgcgcgtgcacggtgcacctgaagaaacgagccatttaccgcgcggacaagcaagcaaactgcccagaagaacggctctccacttcacacctgtttgctgtttttcatctcccgttcacctcgcgtgccgcatgcgcgacaactagagcgaccgccgccgctctacgcccagctgcccatgtcttcgtcgggcccttcgccggcgacgggaacccaccacaccaggtcaacaccgttgcaagtaattcatgttttgggaaacttcatgagaatttggtctgtttactccttgtatagctacctatccaacagtggagattcaatagttggctttatcttcagttgtcttgtacccacttcagtcatattcttggtcttacagaagccttggaaaggccgacctttgcccaactcacaggttgttcctacagttgtcaatggaggaatcctggcattctactttgtattatggggtaaaggacttcttgcttgtggtccactagttgctctactggcagagtatgcaggtgctgttcttggagttctctctgctgctttatatggaaggaaatctaacatctggaaaaagattggtggacttgctgctatgttggcagcatattatctcttgtcaaatggatggtctacaagaacccattctcctctatatagctttggaagtgaaccagtggagaaggcagcacaaactattggagtgaaagcaatgatggtgccaattactgctgggatcttgtctgctttaaggagagtattagctcggcgtgtttctctcaagaatcaacttaaaaggcggctccatgctataactattgcttctgctacttgtttcctttttccgtttgccatgtgggatacgatcctaggttcggcatctgacagcattgttaaattacaactaccaagttgggcatactttagtactgttttatttggaatggtgcttatattctatgttgacaatgttgctgaagaaaagttgcatctggtcttctcttctccaaggcacttaatggtctcaacaggttgcatcatcgtgttggaaacagtgtaccaaatggatttctcccttttaggatttctggtctgttctgttattttgggattcggtatttctgaagcaacctccttggaacgctcaaagaaaagccctttagagacccatgaactatcgaatggggtgttccacaatcaattgcctatttcagaacttccaagctgaagaatatatgacctaggtgagggagatgcattgaaaacaaaattctgtatttacttaagtatgaattttgaattacttatctgttaaggttgagatcggtgaaagttaatattacacaacacgtttcaagagtggactgttacggtttgagtagtaacgaagaatattaaagctacgacgttgtgaatggctgcggttgcacacctcaagctcaatggttcgattctttgcgtgaaggttttaacgagacagaaaacacggatgtttttgacctgccaatgcccaatgtgtctttgtaatcctccattattgttggccacctgcatcctgtacatgtgaacaactcaagtagatgtgtatccgtattccccttgcagatattgcaattgtcacagcatcctgtttaactgcttgggtagtttcgaaaatttgtttttctcacttggagacgcagatggttcaagctgttaacagaagtgcactgattgttctttttcagaggctgaaacctgtatgtaacccgtccatgatatgattaacaagctgactttatctttgaccta

SEQ ID NO: 147672 - DNA, 1693 bp, Zea Mays
gcctgaacgctactcatgcgcgtgcacggtgcacctgaagaaacgagccatttaccgcgcggacaagcaagcaaactgcccagaagaacggctctccacttcacacctgtttgctgtttttcatctcccgttcacctcgcgtgccgcatgcgcgacaactagagcgaccgccgccgctctacgcccagctgcccatgtcttcgtcgggcccttcgccggcgacgggaacccaccacaccaggtcaacaccgttgcaagtaattcatgttttgggaaacttcatgagaatttggtctgtttactccttgtatagctacctatccaacagtggagattcaatagttggctttatcttcagttgtcttgtacccacttcagtcatattcttggtcttacagaagccttggaaaggccgacctttgcccaactcacaggttgttcctacagttgtcaatggaggaatcctggcattctactttgtattatggggtaaaggacttcttgcttgtggtccactagttgctctactggcagagtatgcaggtgctgttcttggagttctctctgctgctttatatggaaggaaatctaacatctggaaaaagattggtggacttgctgctatgttggcagcatattatctcttgtcaaatggatggtctacaagaacccattctcctctatatagctttggaagtgaaccagtggagaaggcagcacaaactattggagtgaaagcaatgatggtgccaattactgctgggatcttgtctgctttaaggagagtattagctcggcgtgtttctctcaagaatcaacttaaaaggcggctccatgctataactattgcttctgctacttgtttcctttttccgtttgccatgtgggatacgatcctaggttcggcatctgacagcattgttaaattacaactaccaagttgggcatactttagtactgttttatttggaatggtgcttatattctatgttgacaatgttgctgaagaaaagttgcatctggtcttctcttctccaaggcacttaatggtctcaacaggttgcatcatcgtgttggaaacagtgtaccaaatggatttctcccttttaggatttctggtctgttctgttattttgggattcggtatttctgaagcaacctccttggaacgctcaaagaaaagccctttagagacccatgaactatcgaatggggtgttccacaatcaattgcctatttcagaacttccaagctgaagaatatatgacctagctacgacgttgtgaatggctgcggttgcacacctcaagctcaatggttcgattctttgcgtgaaggttttaacgagacagaaaacacggatgtttttgacctgccaatgcccaatgtgtctttgtaatcctccattattgttggccacctgcatcctgtacatgtgaacaactcaagtagatgtgtatccgtattccccttgcagatattgcaattgtcacagcatcctgtttaactgcttgggtagtttcgaaaatttgtttttctcacttggagacgcagatggttcaagctgttaacagaagtgcactgattgttctttttcagaggctgaaacctgtatgtaacccgtccatgatatgattaacaagctgactttatctttgacctattcgtgaatgcaatcagcgagtctcctgca

SEQ ID NO: 147673 - DNA, 1141 bp, Zea Mays
gaaacgagccatttaccgcgcggacaagcaagcaaactgcccagaagaacggctctccacttcacacctgtttgctgtttttcatctcccgttcacctcgcgtgccgcatgcgcgacaactagagcgaccgccgccgctctacgcccagctgcccatgtcttcgtcgggcccttcgccggcgacgggaacccaccacaccaggtcaacaccgttgcaagtaattcatgttttgggaaacttcatgagaatttggtctgtttactccttgtatagctacctatccaacagtggagattcaatagttggctttatcttcagttgtcttgtacccacttcagtcatattcttggtcttacagaagccttggaaaggccgacctttgcccaactcacaggttgttcctacagttgtcaatggaggaatcctggcattctactttgtattatggggtaaaggacttcttgcttgtggtccactagttgctctactggcagagtatgcaggtgctgttcttggagttctctctgctgctttatatggaaggaaatctaacatctggaaaaagattggtggacttgctgctatgttggcagcatattatctcttgtcaaatggatggtctacaagaacccattctcctctatgtatccgactacattgatatcttcctgaaatggtttactgagttaatgtgaataactctgcatttttggcagttaaagtatctctatctacaaattaatttgtaatggactcatctaaacccgtttgggaagaccttaacttcatacagatagctttggaagtgaaccagtggagaaggcagcacaaactattggagtgaaagcaatgatggtgccaattactgctgggatcttgtctgctttaaggagagtattagctcggcgtgtttctctcaagaatcaacttaaaaggcggctccatgctataactattgcttctgctacttgtttcctttttccgtttgccatgtgggatacgatcctaggttcggcatctgacagcattgttaaattacaactaccaagttgggcatactttagtactgttttatttggaatggtgcttatattctatgttgacaatgttgctgaagaaaaatcgcaaagtgaaccttga

SEQ ID NO: 147674 - DNA, 1277 bp, Zea Mays
agaagaacggctctccacttcacacctgtttgctgtttttcatctcccgttcacctcgcgtgccgcatgcgcgacaactagagcgaccgccgccgctctacgcccagctgcccatgtcttcgtcgggcccttcgccggcgacgggaacccaccacaccaggtcaacaccgttgcaagtaattcatgttttgggaaacttcatgagaatttggtctgtttactccttgtatagctacctatccaacagtggagattcaatagttggctttatcttcagttgtcttgtacccacttcagtcatattcttggtcttacagaagccttggaaaggccgacctttgcccaactcacaggttgttcctacagttgtcaatggaggaatcctggcattctactttgtattatggggtaaaggacttcttgcttgtggtccactagtagtatgcaggtgctgttcttggagttctctctgctgctttatatggaaggaaatctaacatctggaaaaagattggtggacttgctgctatgttggcagcatattatctcttgtcaaatggatggtctacaagaacccattctcctctatatagctttggaagtgaaccagtggagaaggcagcacaaactattggagtgaaagcaatgatggtgccaattactgctgggatcttgtctgctttaaggagagtattagctcggcgtgtttctctcaagaatcaacttaaaaggcggctccatgctataactattgcttctgctacttgtttcctttttccgtttgccatgtgggatacgatcctaggttcggcatctgacagcattgttaaattacaactaccaagttgggcatactttagtactgttttatttggaatggtgcttatattctatgttgacaatgttgctgaagaaaagttgcatctggtcttctcttctccaaggcacttaatggtctcaacaggttgcatcatcgtgttggaaacagtgtaccaaatggatttctcccttttaggatttctggtctgttctgttattttgggattcggtatttctgaagcaacctccttggaacgctcaaagaaaagccctttagagacccatgaactatcgaatggggtgttccacaatcaattgcctatttcagaacttccaagctgaagaatatatgacctaggtgagggagatgcattgaaaacaaaattctgtatttacttaagtatgaattttgaattacttatctgttaaggttgagatcggtgaaagttaatattaca

SEQ ID NO: 147675 - DNA, 1260 bp, Zea Mays
agaagaacggctctccacttcacacctgtttgctgtttttcatctcccgttcacctcgcgtgccgcatgcgcgacaactagagcgaccgccgccgctctacgcccagctgcccatgtcttcgtcgggcccttcgccggcgacgggaacccaccacaccaggtcaacaccgttgcaagtaattcatgttttgggaaacttcatgagaatttggtctgtttactccttgtatagctacctatccaacagtggagattcaatagttggctttatcttcagttgtcttgtacccacttcagtcatattcttggtcttacagaagccttggaaaggccgacctttgcccaactcacaggttgttcctacagttgtcaatggaggaatcctggcattctactttgtattatgggtgctctactggcagagtatgcaggtgctgttcttggagttctctctgctgctttatatggaaggaaatctaacatctggaaaaagattggtggacttgctgctatgttggcagcatattatctcttgtcaaatggatggtctacaagaacccattctcctctatatagctttggaagtgaaccagtggagaaggcagcacaaactattggagtgaaagcaatgatggtgccaattactgctgggatcttgtctgctttaaggagagtattagctcggcgtgtttctctcaagaatcaacttaaaaggcggctccatgctataactattgcttctgctacttgtttcctttttccgtttgccatgtgggatacgatcctaggttcggcatctgacagcattgttaaattacaactaccaagttgggcatactttagtactgttttatttggaatggtgcttatattctatgttgacaatgttgctgaagaaaagttgcatctggtcttctcttctccaaggcacttaatggtctcaacaggttgcatcatcgtgttggaaacagtgtaccaaatggatttctcccttttaggatttctggtctgttctgttattttgggattcggtatttctgaagcaacctccttggaacgctcaaagaaaagccctttagagacccatgaactatcgaatggggtgttccacaatcaattgcctatttcagaacttccaagctgaagaatatatgacctaggtgagggagatgcattgaaaacaaaattctgtatttacttaagtatgaattttgaattacttatctgttaaggttgagatcggtgaaagttaatattaca

SEQ ID NO: 147676 - DNA, 2140 bp, Zea Mays
agaagaacggctctccacttcacacctgtttgctgtttttcatctcccgttcacctcgcgtgccgcatgcgcgacaactagagcgaccgccgccgctctacgcccagctgcccatgtcttcgtcgggcccttcgccggcgacgggaacccaccacaccaggtcaacaccgttgcaagtaattcatgttttgggaaacttcatgagaatttggtctgtttactccttgtatagctacctatccaacagtggagattcaatagttggctttatcttcagttgtcttgtacccacttcagtcatattcttggtcttacagaagccttggaaaggccgacctttgcccaactcacaggttgttcctacagttgtcaatggaggaatcctggcattctactttgtattatggggtaaaggacttcttgcttgtggtccactagtgtaagtatcttgttctatcaggaccatggatttttcacatagctgcatggtctgtagtgtgtggtgcggtgcatttatgccagggaatatctagttcaatctccacctatgtgcaatgtttaaagaatgctgcgagccagtgatatcagatcattgtggaaacaaattacacttcatggacatcaaccgtaggacatttgtatgtcgtccttacctgttgatctaatgcatgatatgatgatagtcattctgacttgagagctgcacacatgaatttgcatgattgcatttggggatggggagttgcacttactctcctcgggttgtgcagtatgattctgaacacttcaacagaaaaacagcatttcattaccattaaccacatcattggtatattttgcactgctttgagcatactaaagaagcatttactggcacttctatctaaactcatttttgctgtctatcgagtctagtgctctactggcagagtatgcaggtgctgttcttggagttctctctgctgctttatatggaaggaaatctaacatctggaaaaagattggtggacttgctgctatgttggcagcatattatctcttgtcaaatggatggtctacaagaacccattctcctctatatagctttggaagtgaaccagtggagaaggcagcacaaactattggagtgaaagcaatgatggtgccaattactgctgggatcttgtctgctttaaggagagtattagctcggcgtgtttctctcaagaatcaacttaaaaggcggctccatgctataactattgcttctgctacttgtttcctttttccgtttgccatgtgggatacgatcctaggttcggcatctgacagcattgttaaattacaactaccaagttgggcatactttagtactgttttatttggaatggtgcttatattctatgttgacaatgttgctgaagaaaagttgcatctggtcttctcttctccaaggcacttaatggtctcaacaggttgcatcatcgtgttggaaacagtgtaccaaatggatttctcccttttaggatttctggtctgttctgttattttgggattcggtatttctgaagcaacctccttggaacgctcaaagaaaagccctttagagacccatgaactatcgaatggggtgttccacaatcaattgcctatttcagaacttccaagctgaagaatatatgacctaggttgagatcggtgaaagttaatattacacaacacgtttcaagagtggactgttacggtttgagtagtaacgaagaatattaaagctacgacgttgtgaatggctgcggttgcacacctcaagctcaatggttcgattctttgcgtgaaggttttaacgagacagaaaacacggatgtttttgacctgccaatgcccaatgtgtctttgtaatcctccattattgttggccacctgcatcctgtacatgtgaacaactcaagtagatgtgtatccgtattccccttgcagatattgcaattgtcacagcatcctgtttaactgcttgggtagtttcgaaaatttgtttttctcacttggagacgcagatggttcaagctgttaacagaagtgcactgattgttctttttcagaggctgaaacctgtatgtaacccgtccatgatatgattaacaagctgactttatctttgacc

SEQ ID NO: 147677 - DNA, 1078 bp, Zea Mays
tacagtctcgaggtttttttttgacagccttcttagcaagatgcctgggggctgtcttacctcccgtatatcaagtttttttttgcagtccgagccaaatcttcagtatattatagatttgaaattatttctcaaatatcttcatgtataacaatattagacaatacttttgggtgcttcttgaagtatttttattggcttttatactatgaaatatgaatcctaactcataagtcataagacatgaatggcctccctttagttaactgtcaattgtgcttcgtggttaaccttcgctccgtgtttgtaatgcgtttacttggttggcaggttgcatctggtcttctcttctccaaggcacttaatggtctcaacaggttgcatcatcgtgttggaaacagtgtaccaaatggatttctcccttttaggatttctggtctgttctgttattttgggattcggtatttctgaagcaacctccttggaacgctcaaagaaaagccctttagagacccatgaactatcgaatggggtgttccacaatcaattgcctatttcagaacttccaagctgaagaatatatgacctaggttgagatcggtgaaagttaatattacacaacacgtttcaagagtggactgttacggtttgagtagtaacgaagaatattaaagctacgacgttgtgaatggctgcggttgcacacctcaagctcaatggttcgattctttgcgtgaaggttttaacgagacagaaaacacggatgtttttgacctgccaatgcccaatgtgtctttgtaatcctccattattgttggccacctgcatcctgtacatgtgaacaactcaagtagatgtgtatccgtattccccttgcagatattgcaattgtcacagcatcctgtttaactgcttgggtagtttcgaaaatttgtttttctcacttggagacgcagatggttcaagctgttaacagaagtgcactgattgttctttttcagaggctgaaacctgtatgtaacccgtccatgatatgattaacaagctgactttatctttgacctattcgtgaatgcaa

SEQ ID NO: 147678 - DNA, 539 bp, Zea Mays
gtggaaaggagaggccggatgtagaaaatgttggcgcagagtatggctttgtgttagcgtcgggtgcaaaaaggccagatggctgggcctaccggttcctgagcaccaacacaacaattctataccactggtcatcaatgctctatgatttggagcccctgaacccatcagaccgagcgaccagttacaccatgcacctgtgccgcccgcctgcttttctgaagagcaacctccacaggctccacatcctggtcctcaacaccggccaccactggaaccaggggaagctgagggcgaacaggtgggagatgtatctcggcggagcgccgaacaacgacaggaacaccgccgtcatctggaaggccaagaacttcaccgtccacagcatcgtcaggtgggtggacgcgcagctcccccaccaccccaagctgaaggcattctacaggttgatattgccccgtcacttcttcaatggggactgggacaccagaggcagctgcaacaacaccaaccctctggccaagggatcatccatagct

SEQ ID NO: 147679 - DNA, 1250 bp, Zea Mays
aaaaagcagagcaacgcccaaattaaaaacagggcaggggaaaaaaaaagctcgcagaagtgagctccctcctcccccctctctctctatccgtctctccgctcggagctcgcaccaccgccgaaccctcctccgatccaaaccctcctcgcatcgtgccgcatgcctccacgcgccacgaggcggcggcgctgcagctgaccaccccacttgaccagccggggggcagaaagagagagagagacaaccggacgcggacggcaggcatgggcggcgtcacgtccaccatcgccgcgcgcttcgccttcttcccgccgacgccgccgtcctacaccgtcgtcgtcgccgacgccgccaccggtcgcctcgccatcccggagatctcccgggcaccctcgcgccgtcggaggcgggacggcgccggcgccgggggctcctcctcggcctcctccgtcgtcgcggccgccgaggaggaggacggcgcggaggtggtgcgcctccggacccgccgcgggaacgagatcgtgggggtctacgtgcgccacgcgcgggcctccgccaccgtgctctactcccacggcaacgccgccgacctcggccagatgtacgggctcttcgtcgagctcagccgccgcctccgcgtcaacctctttgggtaaatgctccggtccccgccactccgggtcgcgcgattgccagttttgcctgcgagctggagggctttttccgttgggggaaacttgcggggagggttttagggaaggcgcgcgcttgcaggaggtgttcgatttctggtgttcacttgcatttattgcttgatttgttgggcttcgtatctcctagttaggtgcttcgattatacaaagtggtggggtttgctctaattttgggaccctatagcggcaacagcctgttagcaaatggaattgataattgatgggatatattattggatcacacaaaccccatttaggttaagtgatgtggtacttaacctgtatttatagtcgcaaacactactagcttgccctaacattcataccagtaaaccttgatttacagatttctccccccaaattcgattgattatcttaacgagacacttgcatctagtgcatttgcttacagatcctgttcaacgaaagaaataggttgggctttggagtgctgaatgcaagattaattggtggggttccttacggttcatgcaagagtaatttctttaacacgaaaaggaaaaaatgacaggc

SEQ ID NO: 147680 - DNA, 2664 bp, Zea Mays
aaaaagcagagcaacgcccaaattaaaaacagggcaggggaaaaaaaaagctcgcagaagtgagctccctcctcccccctctctctctatccgtctctccgctcggagctcgcaccaccgccgaaccctcctccgatccaaaccctcctcgcatcgtgccgcatgcctccacgcgccacgaggcggcggcgctgcagctgaccaccccacttgaccagccggggggcagaaagagagagagagacaaccggacgcggacggcaggcatgggcggcgtcacgtccaccatcgccgcgcgcttcgccttcttcccgccgacgccgccgtcctacaccgtcgtcgtcgccgacgccgccaccggtcgcctcgccatcccggagatctcccgggcaccctcgcgccgtcggaggcgggacggcgccggcgccgggggctcctcctcggcctcctccgtcgtcgcggccgccgaggaggaggacggcgcggaggtggtgcgcctccggacccgccgcgggaacgagatcgtgggggtctacgtgcgccacgcgcgggcctccgccaccgtgctctactcccacggcaacgccgccgacctcggccagatgtacgggctcttcgtcgagctcagccgccgcctccgcgtcaacctctttgggtatgattattctggttatgggagatctacagggaagcccactgagtgtaatacatatgcagacattgaagcagcatataactgcctcaaggaaaaatatggtgtagcagatgaggatataatcttatatggtcagtctgttggaagtggtccaaccattgatcttgcttcgcggttgccagacttgcgagctgtggttttgcatagtcctattttatctggactaagagtaatatatccagtcaagcggacgttttggtttgacatttacaagaacatcgataaaattggcttggtaaattgtccggtgcttgtcattcatggtacatcagatgacgtggttgactgctcccacggaaaacagctatgggagcactgcaaagtaaaatattctccactgtggttaagtggtggtggccactgcaatctcgagctatatccagattacattaagcacttgaaaaagtttgtgtcaagcgttagcaaaaaagcatcatcgaaacctgacccaaaagaaacaacgacaaaggatgacactaccagtaaagaaacagaggaagcgtacccggagaaacctcaagaggccaagaagtgcccgcagatctcgcgaaagagcctggacagccgattcgggaaatccaaaacagtggatgttcctgataaaccacggatgagctcggacgacatcgacaagttccggaggagcagatgcttggtctggtgatgcctgtgttctgcacagattgtcgaacagtacctgagcgaggatactatagcatggaagtcaagcaactgtattacatcatgctgcgaggaacggcatcagcggttcctgcagcggagaggaaaggactgttaaataagaaaaaaaagaatcaggaagctaccgtcagcatccatcaaagacacagctacttgactgaaaactggtagttcctcagttaatttagcacttacaccgacaacatgttttgcagcatcggttagggtttccatattgtaaaagtgtaccgttattgtctgtaatcacgagggaccgatacaaacatttgcagagtctgaaagccttaacggaatcacgagcaccatagtctattctgggtgcaccagtattcgggctcacatgcgttgtggaaccatgtgagctttaccctgtatactgatctactcataccttattatagggaccatgctccacatatctatgggaaactgacgggtgaaacatgctgtacgtatcactaggaaacagactgacgcgtgaaacggcagcaagcttgtgcacattacagctgtgaaagatcaggttagtcacaagcgacatctatctatttattcagtaagtacccgtgtatatatatgtataataccattcgccactcttacacatgtatgtgcattccctctgtcctgacagcaccaacaaaacaaatatttacatcaccaggaactaactacgaagcctgaaaacagatggcatgcctagcagtcacacagcagcaatacagacacgaattaaacctcggccggtctcagtcctcaagcactaactatcctagtccctgctggtgttgggcgtcgtggacctgctgtcccacggagcgtgaaccgtggtgggagagaagggcccgtccttgctcttgtccccatccttccccgacgtcagacactcgccctggatgttcctgagcacctcgagcacctccttgatcggcgggcgcatctcgccgttctgctgcaggcagcggaaggccagctccgcgaccatcgtcatcatcttcctggtggccgggtcggtgtcgtagcccaggccgaggtcgacgagctcctccagctggcacttctggatcttgctgatggccatgctggccaggttgatctcgctgcggtgccgggtgatgtcgacggccggcttggacgagatgagctccaccaggaccaccccgaagctgtacacgtcgctcttgtccgtcagctggtagcactggtggtactctggatcaacatac

SEQ ID NO: 147681 - DNA, 800 bp, Zea Mays
ctacccaattgtggttgaagttaggaacaatctttttccctgaaagtgattttaacagacataaatgtggctgcaggtatgattattctggttatgggagatctacagggaaggtatattttgttcttttattttgatcgcttaactaataacttatgtagtaactataatcttctccctaaccatatcttaatagacagtttattcttccattgaacagcccactgagtgtaatacatatgcagacattgaagcagcatataactgcctcaaggaaaaatatggtgtagcagatgaggatataatcttatatggtcagtctgttggaagtggtccaaccattgatcttgcttcgcggttgccagacttgcgagctgtggttttgcatagtcctattttatctggactaagagtaatatatccagtcaagcggacgttttggtttgacatttacaagaacatcgataaaattggcttggtaaattgtccggtgcttgtcattcatgtgagttctaatattctatcccccaatccctttggtcctggtggaattacttctgatacaatacaatagattgagcatgaaaatgggtgattcctattctgtgataagggtatgtacagtagaatgagtaatacccactaatcactactcaccccaatccaagtatgttaaaaatgatcatttcagatttgtcaaagttgtagacagctatcaagtgccatcttaagaaaccaatgtttgttaattcagtatcatagttgctttggtagattattgctgctctgactaacatagc

SEQ ID NO: 147682 - DNA, 93 bp, Zea Mays
gttctttttttctctcttaactttttaaatataaattacgaattaatatgtacttatcattttagaatacgacaaatatatatgtagaaaaaa

SEQ ID NO: 147683 - DNA, 103 bp, Zea Mays
ctaccctagtatgcgacaggtcgactctgtttggtctgagcacccttttggcacggctctttgggtgactctaactcaggctcatggtagagctataccaaat

SEQ ID NO: 147684 - DNA, 1251 bp, Zea Mays
atggcaatgggcctcgatttctcacatgggaattcctctattaagggatggggaatgtggaagtttctcccacagggaaaaaattctcctccgacgggatcaaaaagaaaagaagcagcacctattgttggtgctgttgccgttgcattcctgtgtctagtcattctcacatccttcttggcttgtagatatggtttgcttcccttcaaatcgaagaacaaaccagggacaaggattgagtccttcctacagaagaacgagagcatacatccgaaaagatacacctacgcggacgtgaaaagaatgacaaaatccttcgctgtgaagctaggccaaggtgggtttggtgctgtatacaaaggcagcctccacgatggccgacaggtagcagtcaagatgctcaaggacacccaaggtgacggcgaggaattcatgaacgaggtggctagcatcagcaggacttctcatgtcaacgtcgtgacacttctagggttttgcttgcaagggtcgaaaagagcactgatctacgagtacatgcccaatggttcgctcgaaaggtatgccttcaccggtgacatgaacagtgagaatttgctaacctgggaaagactatttgacatagcaattggcacggccagagggctcgaatacctacaccggggatgcaacactcggatcgtgcattttgacatcaagccacacaacatcctgttagaccaggatttctgccctaagatctctgactttggactggccaagctatgtctgaacaaagagagcgctatctccattgttggcgcaagagggacgatagggtatatcgccccggaggtctactcaaagcaatttggaacaataagcagcaagtctgatgtctatagctatgggatgatggtccttgagatggttggagcaagggacaggaatacaagcgcagatagtgaccatagcagccaatatttccctcagtggctttatgagcatttggacgactattgtgttggtgcttccgagattaatggtgaaaccacagagctcgtgaggaagatgatagttgtaggtctgtggtgcatacaagtgattccgactgatcgaccaacaatgacgagagtcgtcgagatgttggaagggagcacaagtaatctagagttgccacccagagttcttttgagctgacaaagcgtagatatttttcctatcaaatgttgcttccaggtcacacaaatgcaaaatatttgtggagacgagtgc

SEQ ID NO: 147685 - DNA, 2277 bp, Zea Mays
gatgcgcatgacgtcggtatgttttctttagcgacgatggtgtggtgatttttatttcgcaatgcatggaaaattggcgacatgagttcgaacttcgaactaacgcaatccaacacaaacacactacctcccacgagctggttttttgtgcgagacagtgaagaagcgaacaaatctaaccagccaaatccttggccggacaccacagaccacggcgaacaattcccctctctcctccgtccatcttatttcttcgccgtgcgtggctgcttgcgccgacggccgacggatgagcttggaggactaggagtacggctagcaactcgggacgggcaccttgcacgcggtgaacaccctgcgcttgtgcctggcgtcgacgaggcgcttcaggctggcgtcgtccttgtaccggcacaggcagccgggcccgtgggacaggagcttggcgcagcaggcggccgtgggcgacgccttccccgcgaacgcgctcgcgcagggggtcagctgcgtcacatcgcacggcgccagggccgagaagtcgcccgcggcgcggccggcggcgaggaggaggacgacgctggccagcaccgcggcgaggaagagcgcggccggcctcatcgtccccgaccgacgatagatggtgtcactgggataggtcggaccggggaccggactagctgcgactgcgagtggactgggtgcagtgggaggccacgtacgagcgtcgtcaggaggtttttttgtaggcgccggttagttgtgtgctatggtatggattattagcccggcggaaggtgaggtgagtcacggcgtaagcatgtcgagcgagcccagcagtgtccgttaggttaggtgaagcacgctgcacgcccggtgaaagggctctccatttgatgctttctcatcagtcatcactatgattctaacagggaggtacgtgctcatcctgcgaacgtattgttgagtttttttttcagttcaacacatggttacgtcatgatcctgtactattcccgaataggaagccagagccagcagctcgatctttctgattttgaagatatcgacacggtagatattatggcaaacttctataagaaaaataagcatagcttcttgtccctaacaactagttccccccattcctgaggcaaagtatctgttggagcaacatacacttgccagccacggattcttcaattcctacacatgaagctatccttttcttcacggcctatgccccctgagcgagatatgatatcgacgattatgccacggcattttgggcgcatatatataaagacagtgctttctgcaacagaccgatcgatcaggtgaaccgagatatataacagcttatacgcccccgaactcacatagacatcatgcaccctaattttccaagcgatcatggcaacggacgaggggtgggcggcggcggcggccatagcaggcgcaagccgattcatcagcttctcggtggagggcgagccgcggacatcttgctgtggaaggacaggaatttgtctgcaggcctgctcgctggggccacgttggtatggtacctgttcgaggtagttgagtacagcattgtaccgctcgtttgccagatagccatcctggccatgctcgtcgtcttcatctggtcgaatgctgcgcccctcttgaacatagctcctccaaggatcccagaagtgatcatctctgagcatgccttccgacaaatagcacagatcatccattacaaactggcacacaccgtgtctgctctttatgacattgcatgcgggaaggatctgaagaaattcctcctggtggtcttgtcactgctaatagtgtcagaggttgtaagttcttacagcttcacaagtcttctatatcttggatttctctgcgcccacactttgccagcgttgtaccaaagatatgagacagaggttgaccacctagccgcaaggggtagtgaagacatcaagaggttctacaagaggattgattccaatttgctgaacaaaataccaaggggcccagtcaagacaaaagttaaataaaatattctccctgagaatacatcaacagttcctttgcaaggatgcatgaatggacctatcataatctgcaatagaatgcgtgaatacaaccccacaaatgtgaaaaaagtaagcttggagaattcagacttgactgctagcatccaaatgtacctagcaatgtgttacaagcatattttcaggatttcaacaatcaatatgaaatggacactaatgttgtaatctc

SEQ ID NO: 147686 - DNA, 553 bp, Zea Mays
aaggcgctcatcgactccagccagccgcccaaaaatccaggcgcaaatcacaacctcgcatcctcttctgtcccgtctccagctcttcgttcgttcccctctcgccgcccgtctcccccgcggtcgaggagccgccaatagcaaggagagggtttcctcctccctccacggctccaccgagctccccgatccctccgccccaaatcccacacacccggttggccaccgcctcgccatggatttggatctgtggatctccaaggtcaaggagggtcagcacctcgccgagcacgagcttcagtccctctgcgaatatgtgaaggagatcctcatcgaagagtcgaacgtgcaaccagtgaacagccccgtgacggtttgcggtgatatccatgggcagttccatgacctaatgaagctcttcgcgacgggtggccacgtcccagagacgaactatattttcatgggtgattttgtggaccgtggcttcaatagtctagaggttttcaccatcctattgctactaaaagcgaggtatgtagtccatttctcgttt

SEQ ID NO: 147687 - DNA, 916 bp, Zea Mays
aggtgtatggtttctatgatgagtgtcagagaaagtatggcaacgccaatgcatggaggtactgcactgatgtttttgattaccttacgctatcagcaatcattaatggccaagtcctctgtgttcatggtggtctttctcctgatgtacgcactattgaccagatacgaacgattgatcgcaattgtgaaattccccatgaaggccctttctgcgatcttatgtggagtgaccctgaggagatagagacatgggctgttagtccccgtggagcaggttggctgtttggatcgcgagtaacagcagagttcaactttgttaatggtatcgagctagtttgccgggctcaccagctggtccaggaaggcttaaagtacatgttccaggagaagggccttgtaactgtgtggtctgcacccaattattgctacagatgtggcaatgtagcttctatattaagcttcgatgagaagatggaaagagatgtcaagttcttcacagagacagaggaaaacaaccagatgcgaggcccaaggactgcagtcccatatttcctctgacttcaattgtacattttagaagtcaacatttaaatctgatactttcttgtacgcagctcctggcatatattcatttcgttggatgtcatcaggtatatgttctgtaaactaagcttgattctgcacgatggacactgttactgagttactcgcagttctttaccatgtgaggcgcatctaacatgtgacatgtccacatacgggtcttaagggacatgtataatgaatgtccaagaagataagtagataacaccataacattcgttgatagaaaagttgtttcctcccgtgtaaggcgccttgttcggttaatcctgttacttatggattggacgggattggaaaaaattgtgaag

SEQ ID NO: 147688 - DNA, 924 bp, Zea Mays
aggtgtatggtttctatgatgagtgtcagagaaagtatggcaacgccaatgcatggaggtactgcactgatgtttttgattaccttacgctatcagcaatcattaatggccaagtcctctgtgttcatggtggtctttctcctgatgtacgcactattgaccagatacgaacgattgatcgcaattgtgaaattccccatgaaggccctttctgcgatcttatgtggagtgaccctgaggagatagagacatgggctgttagtccccgtggagcaggttggctgtttggatcgcgagtaacagcagaggtgagtatacaatctataatttcatttattatccttgattgtttttatttgctacttgtgaatgtcaccttttgctatgcagttcaactttgttaatggtatcgagctagtttgccgggctcaccagctggtccaggaaggcttaaagtacatgttccaggagaagggccttgtaactgtgtggtctgcacccaattattgctacagatgtggcaatgtagcttctatattaagcttcgatgagaagatggaaagagatgtcaagttcttcacagagacagaggaaaacaaccagatgcgaggcccaaggactgcagtcccatatttcctctgacttcaattgtacattttagaagtcaacatttaaatctgtaagggctaaagatcagtcagatgtgtttattattgtaggttcagatcatagtgcaatcttatgcatttgatttctctttttcttttaaccacatgtacaatagaccatccggagtctcatgctcctgtattcgttcagtgacactgtcaaagttttgttgccgatttagttcgcgtgctatccattttgtaccgcgcttttgttatgcagcagatgagtcacgcatggtatgtcatttatctc

SEQ ID NO: 147689 - DNA, 842 bp, Zea Mays
aggtgtatggtttctatgatgagtgtcagagaaagtatggcaacgccaatgcatggaggtactgcactgatgtttttgattaccttacgctatcagcaatcattaatggccaagtcctctgtgttcatggtggtctttctcctgatgtacgcactattgaccagatacgaacgattgatcgcaattgtgaaattccccatgaaggccctttctgcgatcttatgtggagtgaccctgaggagatagagacatgggctgttagtccccgtggagcaggttggctgtttggatcgcgagtaacagcagagttcaactttgttaatggtatcgagctagtttgccgggctcaccagctggtccaggaaggcttaaagtacatgttccaggagaagggccttgtaactgtgtggtctgcacccaattattgctacagatgtggcaatgtagcttctatattaagcttcgatgagaagatggaaagagatgtcaagttcttcacagagacagaggaaaacaaccagatgcgaggcccaaggactgcagtcccatatttcctctgacttcaattgtacattttagaagtcaacatttaaatctgtaagggctaaagatcagtcagatgtgtttattattgtaggttcagatcatagtgcaatcttatgcatttgatttctctttttcttttaaccacatgtacaatagaccatccggagtctcatgctcctgtattcgttcagtgacactgtcaaagttttgttgccgatttagttcgcgtgctatccattttgtaccgcgcttttgttatgcagcagatgagtcacgcatggtatgtcatttatctc

SEQ ID NO: 147690 - DNA, 916 bp, Zea Mays; identical to SEQ ID NO: 147687

SEQ ID NO: 147691 - DNA, 100 bp, Zea Mays
ttttggtttcgccaaaaccagttcctggattagagcaaaacaaagccgagaaggagcaaatgagcgaggagagaccgccgaaacagcggcatacccatcc

SEQ ID NO: 147692 - DNA, 256 bp, Zea Mays
atggaaagcaaagcacctgcgagcggcgacaccaacaccgacaagccggatcccctggctctgaccctcggatccgtctacgccgccgccgccgctccagactcaccaccgcgcgccacccgccgccgccgccgcctcgacaatggctcggaacccatctacgccgctgctgcagcctcaccgccgccataccctccttacccgtcacctcctccgccggatgctccgaacgctactggccgtcgccgccgccgcc

SEQ ID NO: 147693 - DNA, 1659 bp, Zea Mays
ctcgatggggacgacggacgagacggtcatacttcaactgccgcgtccccgaatattggctattttccaaccggcggcgcagccggtgacgcgcaggcgggcgggttcatctgacccttcgtcgactcgtggcagatgtgactttctgaggccggtgtgcctggacggtttcgtccatggcgtgcgcagtgcgcactcgcatcgcatggtattaatagtcattgcaagccaagaggagactagaaaagagaaggtggaagaacagcaggagagtcggaggaagcaagcttgcccatacgctggtacttatgtgctgatactactgcagccgcgctgcgagagaagaggagtgggagcacgtggagccaaaggggcgattctttgcttggccttcatttctcgcctcttccgcatctcgagttgtcgtgattaacaagacagcaagacctcggcggcggcaaacagtcgagcacctgcgagcgtctctgccaccgggactcaagaggcaatgccagcaccagccccaccaattcgtctgggacctccgactccctatatatcctctcatggatccaaagttgcacgcctacacatgtatgactggattgtgctaattcttttagctgtattggatggagttcttaatataatagaacccttccatcgcttcgtcggatcagaaatgatgacagacctcagataccccatgaagggcaatacagtgccattttgggctgtgccgataattggtatcattgggcctatggttatcataacagtgatatactttaagaagagaaatgtatatgatctgcatcatgccatactaggtctcctattttcagtacttattactgctgttttaactgatgcgataaaggatggtgttgggcgaccacgtcctgatttcttctggcgttgcttccctgatggaaaacctgagtataacaactttactacaggcgccatatgccatggccaggcgagtgttattaaagaaggtcataaaagctttccaagtggtcatacttcatggtcttttgctggccttgggttcctttcatggtatttggctggtaaaatcaaagtattcgatcgtagaggacatgttgcaaaagtctgcattgtcctttcccctctgcttcttgcagccttagtggcagtttctcgagttgatgactattggcatcattggcaagacgtatgtactggcggattacttgggttcacggttgcttccatttgctacctgcagttttttccactaccatctgatgaaaatggactgtggccgcacgcatatttccgacacattcttgagccagagggtgacagccaagcgcaacccacgtacatgagccgtcgcagctcggttcagaacggttcctttcagtacagccctgacgcagtggaaatgaggagcacgagccaagcaatggattccatggaagctggccagagagcccaataatgatggaattaataggaacatcaatttagccacggaccgttgtaatgtaatataacgtcgttgtagcgcttagtacagcaagatcttgttcagatcccttattgtgtagtataacagttcctgaatgatggtcacgtttctgctggtcctccgaagactgaagcgcgactgattaccgcgttggcgtg

SEQ ID NO: 147694 - DNA, 355 bp, Zea Mays
ggtttaggccccaggtccatggaattcagggcagatggcttcgggtggccgccaccgcaaggcaatgtcgccgaatcattgccgccgccgatgggagaccgcggggaggtcgcctcgtcccacttcgattcgtctcgtgccctaagattgatgagagagcttgacacaaatgtcacagaagatttgactatgttgatgccaaatttgttgtcatgtttgaagcatgatgatcctgcgattgttaagcaagctatagccaatggaacaaatttatttgttgttgtattataagagatgaaactacatgtggttatttgcaaacagatatttattaatgaataaatccactattgtt

SEQ ID NO: 147695 - DNA, 3251 bp, Zea Mays
caagaattagtgctttgaagtcaagattggaacaagtgctaattatcttcaccagattccgatgccgagccattcgaagtgcactgcattctttgtcaaaactcttggaagctgattcgtgctgcatgtttagtaccttcactgctatcaaagatccattatctagctcgcctttgaagaccttaccaaagcttcctttccctagcaagttgtcatcagtgaagttgctggttgcacgaacaagttcatagtatgagatcagctgatagttctgcaagcctgtgtctgagggtactagtatctttcttcggttgttcaccttcattcttaccaacatatacaaggacacagataaagcaaaaaatgccaggagcgaaggcgaggaaggccacacagcgcattgttccccattaatgatttgagtgtgatatttgagaacactcctccttctggtatctgtccatccaatctgttaaaagaaaggttcaagttggcaaggtaagtgagattggtcaaggattttgggatggcaccggagagtgcattggaggataggtccaattcctggatattaagtatattgctgaatgaacctggtattgatccttggaataaatttctggacagattgagatatatcatcatgtggagttcaccaaaggagactgggatgtcacctgacagcttgtttcctgataaatccatcatggtaattgctgtcaattttccaacatcagcaggcaggaacccacttaaagagttctgtgacaagtcaagctcaataagtttctgaagatcccacagacttgttggtatggttgaagacaatgagttttgggataacgtcataatttgcagctggcttaggctactgatattgcttggaatgggaccggttagtttattgttgtcaagacgtaaacgaactaggtttgttaatccactgatttcttctgggatggtgccagacaagctgttgttggagaggtccaattcttggagactgttcatgtcagtgattggtgtagggatcttcccactcaggttgtttccactaagagacagtactgataagctggtaaggttagcaaatgtaccagggatgcttccattgatgttgttgttacctgcttgcaaaatttctaggagcgtgctatggtttccaattgaagttggtagcatccctgtgaactcattatttgaaatgacaatggtagtcaggcttctgcaattggataatgcagctaggaaatctagattcccagagagacggttcccatcaacaaagatgcgaccgagattcagcaagttgctaaatgacattggcactgatcctgtcaatctgcttctagatacgtctatttgggtaaggtccgatagattgcctatggattctggaatggcaccggttagttggttgtttgcaagacctagaaactggaggtttgtcaactgtcccagttctggtggaatccccccttgtagattgttttcactgaggtccaacacaacaagcatggtattgttgctcagctcaactgggatcattccagtcaggttattcattgacaaggctattgcagtaaggtttggaagtgttgccagccatgacggcacagggccagtgaaactgttcgcagcaacgtacagtgagtcaaggttcttgcatgcagagagtcctacagggattggcccgctgaaatggttttcttggagagacagcatttgcagcagagggaggtgaaagctcccatttccaggaatgggacctgagagattgttccgtccgacatacagtgcttggagctgcgaactattaaacaaagaaggcggcatggagcccgagaggaggtttttttctatggtgagcacctccagctttagcaatgagctgacgctatcaggaattgctcccgtcaagctattcgagccaagatatatttcactcagatcgggtgtgctgttgaacaggctctgtgggatcggtccgcttagatcattgtaagcaagatcgagaacctcgagcctagtgatgttgccaaggctgggagggatggtacctgacagtctgttgtgtgatagatcaagggtctgaagccagggcagactgccgagctcgtctggcaggggacccatgacgctggtgttgctgaggacaagggtcgagaggaaagagaggttaccgagctgtggcgtgatgctgccctggagcggcacgtcgctgaactcgaggccagtgacgcgttgcctgctgtcacaggagacccccgcccacgagcagaatgatgcagtagcagtccagttgctggcaaggatgccaagggggtccttgagcattgctttgaaggcgagcagcgcagcaaggtctgtggcactggatggtggtggggtgagtgcggtggcgctgcgtgctgcggcgacggcgagcaagatgagtaccatgcggacgcggacgaagaaggccattttggtgagagtctatgagtatgattgacagaatatggatgtggtgacgacttgactgctgctcttataagcagctttggacgtccagttggctcaagtggttggaaacgtagagcgatctgaagccgatttgtgttgaatatggtcagcaagctgtttccttttcttactcacagagtcacaggctgctgcttcttggaaataacgacttcgttcttcgaaggaactgctttcagacgtaccaactggcgagcaacttgtgctaaattaagctctttattctacccgcacattggatttgtgtggatttggtacaaagaagtccatgtatgggctttagtttggagggtttttttttttcatttagaaactacctgtgtggctcctctcctttgactactttcagcgctaaaaaatggatggaaaaaatcttctgcaaagcatattgatacccatctcctccgtaatgaagagaatatataatagaaactacctgtgagaacgaaatgaatttgtactgtgtattccattttttagataatggaaagtattaaaacgatccggcttttcccttttgcgaggttagggcgagtagtttacatcactcggaaaaacactcccaacagacaggaaggacacaaccttcagccaaaaccttaaagacaaactaattgctttaccttaaagagaaactaatttaaagcaattatattcgaaaaacgccaaccaaaatgagcaaagatatacatggccaccgtctctaacgagtttattggaaccaagat

SEQ ID NO: 147696 - DNA, 727 bp, Zea Mays
actcaacaaagaaatggtttcctaaggagccagctgaagcttcttcatcacagccagaactaggggaatctggtcaacaccaacttgtctccactaatgttccagaagaaatagttggtactaccccacagaggagagtgaggtgtgctgtcaaaaagaagattactccgaagaagaagatctgcttctgagtagctgcttaagtacgacagttgtgtctgtattttaagtatgaattatggcagttgtgtttgtatttgaagtatgaattatggcagttgtttctggcagctgtcaacaatagaattatggcagttgtgtctgtattttaagtatgaattatggcagttgtgtctgtattttaagtatgaattatggcagttgtgtttgtatttgaagtatgaattatggcagttgtgtttgtatttggagtatgaattatggcagttgttgctgtttctggcagctccaacaacgccttcagttgcttatctgcagttttcagaaactggccagttccatgtcacatattcaggctcattcggttctgctggttcactggttatcattcggttctgctggttcactggttatcatcgggcaacagtttggagatcaggctagacctatgtgtgataaaaaaaatgacaatatatcatgggaacaattcaggtggaccatgttctctgagaaatattcaggtggaagaagaacaggaatcagctaa

SEQ ID NO: 147697 - DNA, 108 bp, Zea Mays
aagtctgggctgcctaggcttattcagtacaatgtaagatttggtgacccagaatgccaggttagttacccatctccagtatccagtattcatttttgtagaggaacg

SEQ ID NO: 147698 - DNA, 1198 bp, Zea Mays
gcgggacctttctagatatttcccaaccccctcagaaaggagaaataatcctccctttctctcctctcctgcctttccccattactactccccagtcccactcccacccgcaggccgcgccgccccagcaaatctcacgcacagaaacaccaaagccccaaaggcccaaactcaccacctcccaatggagaacggcgacgaaaccctcgcctcccccacggccgccgccgagacggacgcgctcaacggcggcgtcgcggaggaggagcaggtccccatcacccaccccgcaaagtcctacgtcacgctcgccgacgacaaccccgctcctaacggcggcgtcgtgaaagaggaggagggcggtgcccacaccaccgcgaagtcctacgcagctgtcgccgcccaagccgagatcgaggacctccgcgccgccaagctcgacctggaggagaagctcgctgaggcccgccgtgagaacaagtccctcgccgaggagacgcaccgcagcgaggggatcttcacgcaggcccgggaggaggtcaccatcgccgagttcgccgccacctctgccgagaaggaggtcgcctcgctccgcgcggaggtcgaacgcctcgatgctgttctcaggatcgagaagggcgagcacgagctggacaagcagagacacgagaaggtcgccaaggaggtggatgccgtgcgccaggagaagctcaagctagaggaggagatcagagccctgaaggcttccgccaccgccgccgccaccaccaaggagagggaagctgcgccggcttctgaggccccgaaggaaggggaagtcgcgtggctggggatggcggtggctgcggctgccggcgccgccggcacggctgccatcatgctagtttatctccgccttaagaggtaggtgttctggtgctcggttgcgtagcagtaaagggagttttcgtcgtgatgctgctattactgaactgggaggtatgcgacttctatgagtagttgcttattagcctacagaaaatatagggatctggagactggttatgtttcatggctgttcttctttcaccggtaccattttatgacgaacgttgtatgactgattatcttcttgtttacgttactgctacggcatggcctcatgacccttttttgatctaataatggtccgtgttctgctgatgagtgtgctactttg

SEQ ID NO: 147699 - DNA, 2072 bp, Zea Mays
aagattaatatatgtggtgtatgtgtgtgttataaaaaaatatcaatagacacaggcagctggcaggctggcagccaatgaggcaaaccaaacgtggactcgtcactcgtccgcagaaaaggcctcgcgcgtgtagaataaaagcgtcactagggtgccttctcacagcactgattgtccacccaccactctacgcaagcaatccttcggacttcggtgggggaaatggaggccgccgccgccgccgagacggggctcgcccagaaaccggttgtgctgtacccttcgccggggatgggccacctggtctccatgatcgagcttggcaagatcctcggcgcgcggggactgtccgtaataattgtcgtcgtcgagcctcccttcaacacgggcgctacggcgcctttcctcgccggcgtctccgcggccaacccgtccatctccttccaccgcctgcccaaagtcgagcgcctcccgcccgtcaagaccaagcaccaggaggcgctcaccttcgaggtcacccgcgtctccaacccgcacctccgcgagttcctggccgccgcgtccccagccgtgctcgtcgtcgacttcttctgcagcatcgccctggacgtggcggaggagctccgcgtgcccgcctacttcttcttcacctcgggcgccgaggtcctggccttcttcctgcacctcccggcgatccacgagcggaccgccgcgagcttccaggacatggggaaggagctcgtgcacgtgccgggcatcccgtcgttcccggcgacgcactgcatcctgcccaccatggagcgcgacgacgtggcctacgacggcttcctaaagggctgtaccgacctctgccgctcccagggcatcatggtcaacacgttccgctcgctggagcagcgcgccgtcgagaccgtggccgcgggccactgcacgccccccggcctcccgaccccgcccatctactgcatcgggccactcatcaagtccgaggaggtgctgggcaagggcggcgaggagtgcctggcttggctggacgcgcagcccagggccagcgtggtgttcctctgcttcggcagcatcggccggttcagcgtggagcagatcagggaggtggcggccggcctggaagccagcgggcagcggttcttgtgggtggtccgagccccgcccagcgacgacccggccaagaagttcgagaggccgccggagccggaccttgacgcgctcctcccggaggggttcctggcccggaccaaggataggggtctcgtggtcaggtcgtgggcgccgcagcgggacgtgctggcgcacgcgtccgtgggcggcttcgtgacgcactgcggctggaactcggtcctggaggcggtgatggcgggcgtgccgatggtggcgtggccgctctacgcggagcagcggctcaaccgggtgttcctggagaaggagatgcagctggccgtggccgtggaagggtacgacagcgacgagggcatcgtggcggccgaggaggttgctgccaaggtgcgatggctcttggagtccgatggcgggaggatgctccggaagcgcacgctggcggccatgcggcaggccaaggacgcgctgcgtgagggcggtgagtcggaggccacactgaccggattggtggacgagtggaaacgcatttgacgcggtacgtggggattgggaacgggtgacgttacgcgacggatgaagtgccggtcatcatttcttttaaaaaaatatatattagtaatatattcatgtatttttcaataaaagatacaatttattgcattatactcgtgcgtgcggcgtgccaacaataataagatatctactctttattagatttaactgagtttggttcaattttcaaatcaaataaatgtgagaatcataacaaatataagtgtaataaaggattaatctcgaataaaaaactggtaataataaaatattcaatagtaatcatacttttataagctagccttaaatcatcgttacctatatggctatatgtacagttgtactacacgatcccgcataatcaatctactgcttttccattc

SEQ ID NO: 147700 - DNA, 80 bp, Zea Mays
gctcaatttttacgcactcgcgtgcagccaaggacaattcattatccacatctgtatgtcaatattgttgggatcgaaat

SEQ ID NO: 147701 - DNA, 1846 bp, Zea Mays
ccggcatcttcttccgcgcattcggcctatgtccggcagcccctccgcagtcggcgccggcacaagcccttcaggtcggacacggcggcgcgtagtcccgactacgtaggcaggttgccggcctccgcctccggcccttcccctgcgccccgactgagtcgctgctgcagccgccaacttcacccgcggcgagctcaccacagccctccggaagtttgttttaggggctatcaacttggaagatggccgatgaggaacaaaccccaggctctaggaagagggttgcaggtacccaaatcaataaggataatcctgagcctgatgatgacgaaccagagcaagagatgggtacatttaagaaagctactgaggaagttatggcaacccggatcattgtaaaggtccagccttcagatgttaaaggtgacgagggatgcaatggtactgggaaaaatactttgtctgtgccagacaagaatgcaggctctggtgtaaatactgactccggtgccacaactgaagcaccacctcaacctgttggaaccagtgacaaggcagaaggcacagaggctgaatctggtggagacaaagtggtagctggaaaacccaacgaaggtagctgcatgtcatctgaagttcagggcaaaacgaaagagggagatgctgaagaaaaggaaggggcagatgaagctggaaataatggtacagttagcaaggatgatactgagaagaaaggtggaggtgaatcggagaccaaggattgcttgtctgaggagcagagagatgctggcaaaattagcaaggataaatctgagcagaaagatggaggtgaatcacatcagaaagacgctgataacaaagggcagacatcatcagcaacatcccttttctcgtttacgaatctgtcaagtggccaaaatgctttcaccagtctgactggaactggattttcaagcacgtcattctcgtttggctcagcctctaaagatggcccaagtactggtcccctgttcgggctgaaagctgatggttcttcgttcccttcctttagtcttggtgctgccagcaacgggagttccgccacagtgcttgctacctcagcagaaacacccaagaaatttgctatggcagaaggccctgtcgaaaccggcgaagaaaacgagaaggctgtatttactgccgattctgccttgtatgagtacctagatggtggctggaaagaaagaggaaaaggtgaactgaagctgaacgtccctgtatcctcctccggcggcgagagagcccggctcgtcatgcgggcaaagggcaactaccgtctggtcctgaacgcgagcctctacaacgacatgtcgctcaaggacatggacaagaagggcgtgacgtttgcctgtatgaacagcattggggagtcgccgagcagccttgccacgtttgctctcaagttcaaggacacagccaccagggaggaattcaaggacgcggtggagtttcacagggcaagcaaagcaccggacgagccgctaaaggcgcccgagaactcttcgaaggcagcagaagcagaagcctgaagctgcactcgggtcacgcttactcgttttttgtacgtgtcgaggaaggagctgagagatactttctgtcattgccttcttaagaatgttacgtcatgacaatgacatgatgtcctgagcactggtgctgttgttggaacagtgggtagccttgacgaactttcattagctacagtcctaatctagagttctggagacgagactcgttagatttattcgcttgtcttgtgctccgttatgtttgttctatcggttaagctatgcgtcatgtgttatct

SEQ ID NO: 147702 - DNA, 1474 bp, Zea Mays
caggcccaggcgaggaatcatttcccagaaccgtttccttttcctacggattttaactaaaatcagtgactctgatgtcgttgttcaggggtgcacctccagcagcagcaggaggaatttcgtttttgtggactccaaagcacatgactgggctattattaccaagtataggaacaacagatatatgcacacttgtgattggattggatgataccccaggtatcgaaagaggactcgaatctccatcaacatggaagtctccttggtatatcgatatgcgcaagcactttcaggtaaggtccttcccaaaaaaaaccttatcaattgagccagtccatatgataggtttgagattgaacttttcaaggtatgtaaatctatacttgctaccttcttgacattgccaagcattacttaactctgaaacaaattatgttcccatttctgaataccttccctttctattccactgagcttatctgaagcctttggtccttgtgatctctccatctcttggacaacaaagtgcacgagggttgtcttcctatcagctccacacatatctgacagtttcagcagtgcgtcaagtctgaaaacatttgtccctcctcttatagttccagcattcattctagcttacaaggctgcaaattgtgttatctaagcatctgtgtacacaatatcttttgatgacccagaagtgtatcctattccatgactaactttgggttacaactttcttcatttagctaagtctggtgccacatcgacgaaatttgtttattcgctgatagcctttactatatgactctatcgtttacttttatctggagttatttctatacttgtgctagatgaaggttaacatatgagcgctatagcgcccgatagggcgctctccattatacgaagggggacggacgacggcagggcacgctgcgtcgggtctgggtacgggaaggtgtggcggaccaggcgctgtcgctgaaggctcgccaccaccggcccatagtcaccttcgtcgaggccagtggctccaccgtgcttccctctgatgccgcctccctccagatccgccgcttccctgcccctgctcgtcgattcggctctactacccaccacgtcgtccctgtgtcagtctaggtttacccctcctgctcctgtgtcagtctcagttcctagctctgcatctcaaggcagcaacattttcaagaccaggattgaagatgcaaacaacgttgatgcagatgttggcgctgcaacagcccaagcgaacaaaaagaaatcttcaacatcaagaactaaacatacggtggttgttccaaagtctagatcttagtttccttaatcaaagaaatgagcatgtttttgttttgtataggacaagtgttaatttctctttatcattgggcctttgtttttggcaaggcaagagcaagtccctatataacaagcatgacaccttttcatttct

SEQ ID NO: 147703 - DNA, 354 bp, Zea Mays
atggacgtgggcagggagcggcgggacgtcgacgcgccggtgctgggcgagggccccgccgtgatggccaacgtcgaggcagtggcggagctggcgttccgggtgagctggagtaagagcttgagcgaccttgccgccgcggagttcgtcgccctcgccgctgatgccggggtcttggccgccgcgggcgacgccgacgccgaggccttggtgctcgggctctgcgcggctgacgctctcctgagcccgagtagctcgcgccagcggctggagcagctgggtgccttgggcgagaacgcgtaagggtctgtgccgtcagccgccgcggcgcggagaggcttgatcggctccgtg

SEQ ID NO: 147704 - DNA, 748 bp, Zea Mays
tttcgtcgaatcccctcctctcttcttttataatggcaattgtctcctctctaccacattctccccattccgcggttccgccctctcgcgtgcctccaggtccctcctctgcgtaactgggcggccgctgatccgccgccaccgctctgtgccctgcgtctggtgttccggtgacaagcgtccacctgcaagatgttggaataccaaaacgtagttggggggagactgaagctgaagggtaaagcgctggacgtaaaggatggtggggtgaagaaaaagaagaagaagtaccagcgtgaggagtcgtctcagattgcgcacgatgagctccacaaaggggggagatctgaattaccaattgatcccaacaatgagcggattgaatctgacaagactggagatgaagggaacccacatcctgactatggccatctcacaccagcagagcgacgctacatggaacagaagcagaagatcgacatgcagaagatggccaaagtcgccaacaagtcgcatagagaccgcatccaagacttcaatcagtatctcgcaaacctaagcgagcactacgacatccccaaagttggccctggctaacatagccaaactggctgtgttacgcacaacaattgtgtgctgggtctatccatttatgttagcatgttacgtatcgtttaaaacgatttgttgccaccagaagttgatatttaatttcaaaagcatgttccaactattctgatcctgtgtt

SEQ ID NO: 147705 - DNA, 744 bp, Zea Mays
tttcgtcgaatcccctcctctcttcttttataatggcaattgtctcctctctaccacattctccccattccgcggttccgccctctcgcgtgcctccaggtccctcctctgcgtaactgggcggccgctgatccgccgccaccgctctgtgccctgcgtctggtgttccggtgacaagcgtccacctgatgttggaataccaaaacgtagttggggggagactgaagctgaagggtaaagcgctggacgtaaaggatggtggggtgaagaaaaagaagaagaagtaccagcgtgaggagtcgtctcagattgcgcacgatgagctccacaaaggggggagatctgaattaccaattgatcccaacaatgagcggattgaatctgacaagactggagatgaagggaacccacatcctgactatggccatctcacaccagcagagcgacgctacatggaacagaagcagaagatcgacatgcagaagatggccaaagtcgccaacaagtcgcatagagaccgcatccaagacttcaatcagtatctcgcaaacctaagcgagcactacgacatccccaaagttggccctggctaacatagccaaactggctgtgttacgcacaacaattgtgtgctgggtctatccatttatgttagcatgttacgtatcgtttaaaacgatttgttgccaccagaagttgatatttaatttcaaaagcatgttccaactattctgatcctgtgtt

SEQ ID NO: 147706 - DNA, 815 bp, Zea Mays
atcccctcctctcttcttttataatggcaattgtctcctctctaccacattctccccattccgcggttccgccctctcgcgtgcctccaggtccctcctctgcgtaactgggcggccgctgatccgccgccaccgctctgtgccctgcgtctggtgttccggtgacaagcgtccacctgcgcccggcctgggcggctgcactgcgcgccgcgggagccagcagccgctgctccaccaaggcggccgtgctgctttcaagatgttggaataccaaaacgtagttggggggagactgaagctgaagggtaaagcgctggacgtaaaggatggtggggtgaagaaaaagaagaagaagtaccagcgtgaggagtcgtctcagattgcgcacgatgagctccacaaaggggggagatctgaattaccaattgatcccaacaatgagcggattgaatctgacaagactggagatgaagggaacccacatcctgactatggccatctcacaccagcagagcgacgctacatggaacagaagcagaagatcgacatgcagaagatggccaaagtcgccaacaagtcgcatagagaccgcatccaagacttcaatcagtatctcgcaaacctaagcgagcactacgacatccccaaagttggccctggctaacatagccaaactggctgtgttacgcacaacaattgtgtgctgggtctatccatttatgttagcatgttacgtatcgtttaaaacgatttgttgccaccagaagttgatatttaatttcaaaagcatgttccaactattctgatcctgtgtt

SEQ ID NO: 147707 - DNA, 727 bp, Zea Mays
aacaaataaagaaccccagtcatattaccttctcggtcactcagttgttggttgcacctgcgatgacaatgtatttgtttggaaacctagataagtttagtattatgacatgataggatatgacagttttcttatgttattggtggatcagtctttactaaaatactctgtggagttcgactcaattttccaataacttgtttaattctatacattgtctcaccttttgttttttgtgtaactggacgccatgaatctaagcattttcggctggctacactggcctcatatccagttctatggttgtcttcttcaggggggagatctgaattaccaattgatcccaacaatgagcggattgaatctgacaagactggagatgaagggaacccacatcctgactatggccatctcacaccagcagagcgacgctacatggaacagaagcagaagatcgacatgcagaagatggccaaagtcgccaacaagtcgcatagagaccgcatccaagacttcaatcagtatctcgcaaacctaagcgagcactacgacatccccaaagttggccctggctaacatagccaaactggctgtgttacgcacaacaattgtgtgctgggtctatccatttatgttagcatgttacgtatcgtttaaaacgatttgttgccaccagaagttgatatttaatttcaaaagcatgttccaactattctgatcctgtgtt

SEQ ID NO: 147708 - DNA, 970 bp, Zea Mays
ataaagaaaattccattggtgatgcagaagaagaaaaataagcatgccaatgttaagagtaatcatgatacggcagatgctgtggtggaatttctgtcagacagtaaatatgatgctccactgaagctaaagaagaagagcaaaaagaagaaaatggaaagtagtggtcctgcagtcgtatatgaaagttcagttgttactgaagatgctggagcatctaagctgaagaaaaagaaaaggaaggtaaagggagggaaggtctctgctgggattactgatgcagaagaaattctgcatgaaaatcaaattgaagaaactagtgctgatgtcaaccaacttgcagcactgagtgaagatgtggataatgaagagcctcagaaattaaagaggggaaagaaaatggaagttaaaaaatctgggaaggccaagaagaaggacaagcatgcatcgcgtaaagataataacaacttggagagacatgttgatgttagtactgcaaacgctgatgagaatatgagattccattagttgatgaagactgctctagaggactgaaaaaatggatcttggagtgcaaacacaagagacctggcttgaaagccttgcaagaagcaatagatgaatttattgttgctcatgaggaacaacaagagaaggtgagtgtttcttctgtgacatatatatcctctgatgaaaccaaacagacaagttgtttgttcctaatacctacttggttatttcaggagaagagagagaggcccgtgcagcagaagatggatgggcagttgttcatcacaaggggaggaaaaagaccacagatgctgaaactggaatagctgttggctctgtatctcttgctgcaatgcaacataaaatggctaaaatgaaacccaaggaagttgatatgaacttctacagatttcagagaagagaagcccacctcagtggtatgtcatcattgcttaacgag

SEQ ID NO: 147709 - DNA, 87 bp, Zea Mays
ttcagtttggttggagtcacaagtccacagccattgtactatcttgattggacttcaaatgaaccatatgtgtgggaagtttctctt

SEQ ID NO: 147710 - DNA, 825 bp, Zea Mays
caagttcgtcgagccgaacagcgacctgcactcgtaggctcaggcgcggtttaccctgacccacatacgatagttgatgtgggtgaaatggactttttaagtccaaaataagcgtactaacaccggcagccgccccaaatctcagtcgggtcattccaatcgaaaccctagaagcgctccgccgagctccaggttcccgagctcgccgctttctcgcggagtaaaaaggccgaggccgggacaacctacttgtgctacctcaacggttcagccatggatctggagatcgttgggcggcatgccttactgttcgacgacgacgcgacggcggagctcgtcaactccggcgtctcccttgtcccctgggcggccgtcggcgcggcagacctcctcctcgaccgccacgacgtccgccacctccttgaccgcgtgccccctcgcccgcaccgcgcctactcgatggccctcctctccgcgccctcccctgacggcgtctctgagaccgagctcgatcgcgagcgctaccttgacctcccggctggcgacggcgaatacgagggttctggggatgcggctccttcaggaaatgggtcagatactggacagactgattataatgttgttcctttctcgtatggatatcccgctggttcagatgaaccaaattcttcgaacttgtgctatcgcccatcattttatgtgccagaaagcttgttgaataagctggttagtgtaagctttgaactctcacttttaactattttctctccagatatgttagaaatttatttcttctaccctgttattaatattcttcagttgatc

SEQ ID NO: 147711 - DNA, 3847 bp, Zea Mays
caagttcgtcgagccgaacagcgacctgcactcgtaggctcaggcgcggtttaccctgacccacatacgatagttgatgtgggtgaaatggactttttaagtccaaaataagcgtactaacaccggcagccgccccaaatctcagtcgggtcattccaatcgaaaccctagaagcgctccgccgagctccaggttcccgagctcgccgctttctcgcggagtaaaaaggccgaggccgggacaacctacttgtgctacctcaacggttcagccatggatctggagatcgttgggcggcatgccttactgttcgacgacgacgcgacggcggagctcgtcaactccggcgtctcccttgtcccctgggcggccgtcggcgcggcagacctcctcctcgaccgccacgacgtccgccacctccttgaccgcgtgccccctcgcccgcaccgcgcctactcgatggccctcctctccgcgccctcccctgacggcgtctctgagaccgagctcgatcgcgagcgctaccttgacctcccggctggcgacggcgaatacgagggttctggggatgcggctccttcaggagtcataatcctacattattcagactcatttcaatgaagcatcaagtacaaattcaaaataagtctattaattggttgggatttcagtggtatggtcgcagccctgttgagccaaactgtataaggaatttttcagatattactcccttgtatatgacctcacacgtactgatctcttctctgctgtttgatttttttggttagcagcagactaacgttgtagtaactgtttgtttcttgcaaacaaacaaggttcatagaatatccaatcgtatccaaataacagtatcactgccacatgtttaaatttagcagtgttcattgtacatatttttttccattgtatacttttaagtttgcaggaaggatgctttgactagttcatgagcatctttaatcatttcaagtaagggactttcttctgttgctcggcagatggaatttgtgcctgcatttttcttccctactcctatttctgttatttactatataacaatcctttagctgacatttttttgcttatctaggaaatgggtcagatactggacagactgattataatgttgttcctttctcgtatggatatcccgctggttcagatgaaccaaattcttcgaacttgtgctatcgcccatcattttatgtgccagaaagcttgttgaataagctgatggttggagcagagatgaagttcctactagtgatgcacattgtttccttgcaatgtatcttgacgtaaggaatataggcaggtgggattagaatgattcaagtgctacctataacaaaaatgatgggatggctgtcttacgatataccagttttcttatatagtaattcattcagtttgacataatttgtgtttgtgtgctctctagccattgctgagacatttttttgctcccatgttttaaatttacagcctccttctgagaaggtgcatcagataattgcaaggacagccttatttgtcagcgagcatgggggacaatcagagattgtattgagggtgaaacaaggagataatccaacatttggattcttgatgcctgatcatcatctccacagctacttccgctaccttgttgatcatcctcaactgctgaaggatggtgctgatgctgttggcacgaataaaggcaatactgagaatgagcatgcttcatctggcggggctttatcattgcttgggaccacatatgactcaggagacgagaatgaaggcacactcccgcgtagttcggaaggcatgaatcctgaaaatagcatgactcttgatgtgcagggccatgtaaaatctgcatcaattatgcctgacaaaaaagaaataggcaaaaatcagaatgctcctcctgcagttaaaagaaaaacaatattgatgaagaagaatcagattcttactggcaacagcatggttgctgttcagcatgaaaaggttaatgacgcaattatagcatcaagtacttccaaatcacataccaattcaggcttatcagaaataaaagaaatgatccttgaaccaccatctttcatgaaacgcacaatggagaaaataattgagttcattctgacaaatgggaaggagttcgagaaaaaactgattgagcaagacagaacaactgggaggtttccatttcttctgtcttctaatccataccactcatattatctaaagtttctccaggaaactgaagagtccaattcacatggtagaagtcctaataacaaggacagaagaggttcttctgaccggaggggcagaaactctcgtgagcgcgccgacagaagctcctgtgagcgcgctgacagaagctctcgtgaacgcgccgacagaaggtgctcaatggagcgcaaagacatcaattatagcatggaatccagtgcttctgatagaagctcatctgggccatcagagaagcagctgtatgacaaacaagggaagggtatattccatcctgtttgtggggtcaagactcggaaagttactgcagatgaagctgctgctatagtaatggcagctactcgaggactgggtgctgcaaatgactcacttaacaccatgaaaggaaccaaggacaatgttcgcacccatgttagtaatgatccttcttccagctttggaagtttctcatctttacaggaccgaaatgcactgtccaaacacatttcaaatagtgatgttgatgcttcacttacaagtagtggacagccccaaagggaaggttttggaatcattgatgatgattggattgcaaacactattgcaaaagctgctgctgcagcagcttccaaagaggcaggttctttggaagctaccatgacaaaggaacagaagctgaaagctgataggcttcgccgtgcgaagatgtttgctgcaatcattaagagtggagacaacaagatgaatgatttagctgcagcatcgaacccaactagtgaagctgccaaggccattcctgatatgaatgcctctggacttgatctgcaatctgtggctaaggaacgtgaaggtagtagctctgttctgtttgaccatgaggggccaaacttgacaaaacatagtaaagactctgatgatgaacagaacagagtgcggaagtatagaaagaaacaccaagaatccgacgaggaaaaagatgaatctgaggatagctataagcactcaaggaagaagcatcgcccagagcattcaagagaccagagcaaggatgttcacaaacataagaacaagagtcactccaaggacagggaatccagacatcatagacaccattgtagctcttcggaagatgagcatgagcatgaacgttggagttccaaatcaaggcataggcatagagatgatcaccgctactctgacgaggaacactctgatgaggaacacaggaggtcacacaagcatcggagggagcatcactccagttctaaaaggaagcacgaggaagactgataccaggttcgccggaagtgtctgtctagatcaggtgccaagtttgaatcagacaagctgtctgatgacactgcacaaatcaactcagggaacaactgaagcgccgagtaaactgagagcaaaaatcagagcaacatactgtaatattttgtatcacagcagtaacattatgtccttaggcctctgttttgtagccaattgctctttcgatttctgtatttgtttcgaacgttctaactaggtgtctgtccatcttatttgaaatcagtgacctgctcgccaagttctaactacatgctggcgtttctgatgc

SEQ ID NO: 147712 - DNA, 1439 bp, Zea Mays
ggctcacaattccagctcaggccaccagcaagcacatcgcaaaggagaacagaacagaacagagagccatggcggcggtcgccgtgagcgggaggctgcggacgctggggcgcggcgcgtcgggcgccgtggtgtcgctggcgtgggacgccgcgtcgggggagctggtcgcggtcaagtcggccggcgcgagcggcgcggcggcgctcaggcgggagcacgcggtgctggccgggctgcgctcgccgcacgtcgtgcgctgcttcggcggcggcgaggcggcggaggcggcggaggaggggtcgtcgtaccagctcttcctcgagtacgcccccggcgggtcgctcgccgacgaggtggcccggagcgggggctccctcggggagcgcgccgtccgcgcgttcgcagccgacgtgctgcgggggctggcgtacctccacgcccgctccgtcgtgcacggcgacgtcaaggcgcggaacgtgctggtcggcgccggaggccgcgccatgctcgccgacttcggctgcgccagggcgctgtccggctccggctccggctccgcgcgccggccgatcgtcggcgccacgccggcgttcatggcgcccgaggtggctcgcggggaggaccagggcccccccgccgacgtctgggcgctcggctgcaccgtcgtcgagatggccaccggccgcgccccgttcggcggcatgggtggcgctggcggcgccctcgcggcggtccaccggatcgcgtacacggacgccgtgccggaggtgccggcctggctgtcgccggaggccggggacttcctggcccgctgcttcgccagagacgccgccgaccggtggaccgccgcgcggctcctggagcacccgttcgtggcgttggcccgccacgacgacaaggccccgcggccgtctcccaagagcgctctggacgccgcgttctgggagtccgaaacagagtgcgaggacgaagcggacgatgcgtcagggagcgcgtcggagaggatcgagtcactggcgtgctccgccggggccttgcccgactgggacggcgagggcggatggatcgacgtgctcggcgagcactgcggcgcgccaggcaaagcgtccagcgtcctggtggcggtgccaggtggggagatggatgtcggcggcggcggtctacccagtgatgatgggctggaagcagaggacgtgccgttcggtggcggcggtgttccagttccagttccagcagctgatgcttcggctgggcgccatgagaaacactgttcgagttccgactgtcatgcgctctcctgtcagctagtaccttgtaatctagtctttaatgcaataaagttatgggttcccacaaattttcgctgtgatgcttgctctctctgttcgattcccctggtcacgaggacactctctgctctgcttatatgcctttga

SEQ ID NO: 147713 - DNA, 1440 bp, Zea Mays
atggcaacagcggcgccggtcagctgccggtggacgcgcgtcctcacgctcggccgcggcgcgtcgggcgcggtggtgtcgctcgcggccgacgccgcctcgggcgcgctcttcgcggtcaagtccgcccccgcggggacgcgggccgcggagagcctgcggcgcgaggggagcatcctgtccgcgctccggtccccgcacgtggtcccctgcctgggcctccgcgccgcggcggacggcgggtgcgagctgctcctcgagttcgcgccgggcggctcgctggcggacgtggcggcgaggaggagcgggcgcgacgagcgcgcggtcgccgcgtacgccgcggacgtggcgcggggcctggcgtacctccacgggcgctcggtcgtgcacggcgacgtcaaggcgcggaacgtcgtggtgggcgccgacggccgcgccatgctcgccgacttcggctgcgccagggccgcggcgggcggcgccgaccccgggcgccccgtcggcggcacgccggcgttcatggcgcccgaggtgctgcgcggcgaggggcagggccccgccgccgacgtctgggcgctgggctgcaccgtcgtcgagatggccacgggccgcgcgccgtggagcgacctggacggcctccccgcggccgtgctccgggtcgggtacaccgacgccgtgcccgaggcgccccgctggatgtcgccggaggccaaggacttcttggcccggtgcttcgcgagggacccgcgcgagcggtgcaccgcggcgcagctgttggagcacccgttcctggcgtcggctggctgcggcgccatggcggagtgggtgtctcccaaaagcacgctggacgccgcgctctgggaatccgacgccgacgatggctccgatgacgagggggacgtgtcagagagccccgcccagagaatcaaggcgttggcctgcccctgctgctcggccttgccggactgggattccgaagaaggcgactggattgaggtgctcggtgagcaatgtgaggccaacggtttggtaccaccgaccaaagaggtggccaaggagacggccagcgaagacgagtgccagctcctgatcctgagtggggtgttggaaacagaggttgacttcgtcgacgccgatgcagagggtgatcatcgtgctaggtgttctgtagatgtaggattagctactgttccgtcagttgagcagctgcaggaagagcagccaactgtttttcttacggaggcttgtcataacaatactgaaatgtcgaagtcatttttactgcaaaatcgtcccttcgttgctgtgtcttctgttctcctactattcgttctactattcgtccacaaaagaaaatctagaactgccaaactggtgcgatgcgacaattccagaaacgttgttctagttctagaccgaggcggcgacggcgaggcgtga

SEQ ID NO: 147714 - DNA, 1132 bp, Zea Mays
gaaaagaaagcattagtatatttgcatttgcttcgttctccaccgccagcgaggtgctcgtgcggtgtgtatatatatatgcacggggttgcattgcacccagctgcagatgatatataccttaagccagcagaaaattaggtataggcgtagagactagagagcgagcgagctcagtccgtgttcagtcgagagagctcgtttagcttggccatcgacgagctagcagagcaatagctaggatccatggcgaacgcgggcatgaagccggtggccggcctcctgctggtgctcaacttgtgcatgtacgtcatcgtggcggcggtgggcggctgggccatcaaccacgccatcaactacggcttcttcatcggcaccggcctgcacctcccggctcacttctccccgatcaacttccccatcgggaacgcggcgaccgggttcttcgtcatcttcgccgtgatcgccggggtggtcggcgcgggctcggcgctggcggggctcaaccacgtccgcgcctggagcaccgagagcctgccggcggcggcctccgccgggttcattgcgtggacgctcaccctgctcgccatggggttggcggtgaaggagattgaactgcacggcaggaatgccagactgatatgcatggagtccttcaccatcatcctgtcggcgacgcagctcttctacctgctcgccattcacggaggcttgagataaaatcgatcaccgtgttggccggaggcactgaggcagtgactgatgaatggagacttgtcgtcggttccgtacgtgtgtgtctgtcggattgagtgggcgtgcatcggattcacggggcagcgcgtgtactatatatgtgacttcattcggttcgctgtgtcgttgtgggctgggctgtcttccaagatgcatggagaggcagtacgtatgtacacgtacgtgtatctatctgttcgtgtgtgtgcgcccgctgctgcttgatttatcttgtgcgtccgattggttacgtcattccgtgtcattcattgattgtttcggagatggagagtcaatatgtctacacgtcatgatgacgtggtgattacttgcttccggcgtgcagatagtagtatcaacgtgagcactttcccct

SEQ ID NO: 147715 - DNA, 421 bp, Zea Mays
cacaatcaaaaagggtgattctggtagcggctgtcttctccgtcggcggcggcgacgaccctggtagcggtccccgccccgttggccctccttccccgaacgtccccgctcttctccacgccacgtgattcttccagtgagaggtcactgtcagcgagagcaacagtgctgacggtcgtcgcgtcgtgacccctcctgctccatgagttcgaagacccgttgttcgtctgctcacccaggtacgaaaagttttctaaccatgtctcctctaatcctcaagatctcaaggaggcagacaggtcgttggtagcctccaagtggactggaagggaaacggttggcagcctccaaatagactcatccagtcatcctcattctcatccggccatccgggagatcgtccagatattcagatgtgatc

SEQ ID NO: 147716 - DNA, 1391 bp, Zea Mays
aaccgatacccctccctccggctcaaaatccaaacaaatcggctcgcaattctccccgtcccttccccctctcatcgctcgccgctcgctcctctccctgtccacgccgccgtctgtcgaatcgaaatccctctccgccatgccgaagggcgccaagaagcgcgccaaactcaagaagcagcagcagcagggtcaccccgacgatggcggcaacacaaacgccagcagcggcaatggtaacggcagcgataacaacaacaacgcctcgagcggccgcgacggcgacccccacctgtgcatcccaccaaaagtttctcgcgtcgatgcgagcgaggactccatggagagctccgaagagatggtgacccccagggccgccgcgtcggagccggacgaggaggagaggaaggcccccgcggccgaggttcccgtggagcgtgccgtcgaggcggacgtcgccgggtctggggaggtcattgtggacgcgtttccaccggaaaccgctgggcatgtacgtgagggcgaggtggatgaagcagaggtggaggtgcacgccgtggtggcacaggaaccggaggtaaaggatgtgttggtggccgaggaatccgtggtacaggagtcagtggctgatgcgccggcggtgaaggaggtggccaaggtgcatccggtgcttgaacctaagctgaaggttgatgaagttgtggtggtcgagcaaacgcctgtagcaccagatgtgaagggcgccggggctactgttgtgttgaaaacaccagagctgattaggagaaatgtggttgtcaaggaccctgctgaggtgtcgagatctcaggacgctgctgatgtgcatactacagaggtggcccgtggacctgcagtggcagtggttgcttcagggcagcgggcaacatggtggaattgctgtggcctttttgatgcttttactggttcagggagatagatgaagcgttagaacttgaagtcaagaagacagaaaatgcggtgacgttcagttcaaagctgatgagcagctgtaactagactttgtcacatgaatgatgaagcagaaggattccggataacatcgagctgatgttttcacttccttcctccctgtgtctctgcatctgtgcaaagttacatcccctggtcgcggttaatattcttaatttccttagcacccccaacgcctagtcgtgtcgtctaggtactggtcttgtagcatagtaagtgttgaagtgggtcgaccgtaaagaatgttttggtgtttctgcttttttttttatacttattttttcttgtcacttgtaaggagtatatttattcaaacaagttgagatggttcttcgaaaagcttcactccgagattgctgactgtcagccaggttgatcat

SEQ ID NO: 147717 - DNA, 1127 bp, Zea Mays
atgtatgatggatgtgtgtggtttctgattctgtgcttgtgcgtgggttggcccagtcgatgcgagcgaggactccatggagagctccgaagagatggtgacccccagggccgccgcgtcggagccggacgaggaggagaggaaggcccccgcggccgaggttcccgtggagcgtgccgtcgaggcggacgtcgccgggtctggggaggtcattgtggacgcgtttccaccggaaaccgctgggcatgtacgtgagggcgaggtggatgaagcagaggtggaggtgcacgccgtggtggcacaggaaccggaggtaaaggatgtgttggtggccgaggaatccgtggtacaggagtcagtggctgatgcgccggcggtgaaggaggtggccaaggtgcatccggtgcttgaacctaagctgaaggttgatgaagttgtggtggtcgagcaaacgcctgtagcaccagatgtgaagggcgccggggctactgttgtgttgaaaacaccagagctgattaggagaaatgtggttgtcaaggaccctgctgaggtgtcgagatctcaggacgctgctgatgtgcatactacagaggtggcccgtggacctgcagtggcagtggttgcttcagggcagcgggcaacatggtggaattgctgtggcctttttgatgcttttactggttcagggagatagatgaagcgttagaacttgaagtcaagaagacagaaaatgcggtgacgttcagttcaaagctgatgagcagctgtaactagactttgtcacatgaatgatgaagcagaaggattccggataacatcgagctgatgttttcacttccttcctccctgtgtctctgcatctgtgcaaagttacatcccctggtcgcggttaatattcttaatttccttagcacccccaacgcctagtcgtgtcgtctaggtactggtcttgtagcatagtaagtgttgaagtgggtcgaccgtaaagaatgttttggtgtttctgcttttttttttatacttattttttcttgtcacttgtaaggagtatatttattcaaacaagttgagatggttcttcgaaaagcttcactccgagattgctgactgtcagccaggttgatcat

SEQ ID NO: 147718 - DNA, 3420 bp, Zea Mays
gtttgcagttgtggatgaaaagagctgacagtaggatgttgacttgtagctgtttagatgacaccggatgaaaatgcccttattactctaaagaaaggtagcaagcttatcaagtatagccggaaaggaaaacccaagatccgttctttcagactttctagtgacgaaacagcattaatttggtattctcacaaaaaggaaaagttcctcagactgtcctctgtctctaaagtcattcctgggcagagaactgctgtttttaggaggtttctacgccctgagaaggactatctatcattttcactcatatacaagaacggccaacgttcccttgatctggtttgcaaggatcaagttgaagttgaagtttggttttcagcactcgaggcattaataagttcgtgccatagaaattcttcagttgatgaacacaaggatagagtatcattttctgatgatgtatcatattatcgagatggacatccgtatgattcaacactagatattgcttcaagtatatcacgtagttttaacacagcagattattgccgaggcagttcttttagtttcagaagatcagatgctggatctgatcgtgcaaatatgataagaactagtggtgcagatagtactcgacttagtatttccagtgcccctagctcttccagtcagggttctggaacagatgacatagaatcccttggtgatgtctatgtatggggtgaagtttggactgatgcggccccatcagatggacacacaagctcgtcttgctcaaaagtagacgttttgatcccgaagcctttagaatcagatgtcgtcttagatgttaatcagatagtatgtggttcaaggcatgttgctcttactaccaggcaaggggaggtgtttacatggggcgaggaacttggtgggcgccttggtcatggaactgatacagatattagtcgtcccaagcttgttgagtcactatccgtgaccatagttgattttatttcatgcggagagttccatacctgtgctatatctgcttctggtgatctgttcaactggggggatggctcttaccgtgctggattgcttggatacgacactggggctagccattggcttccaaagcgtgtctcagggcccttggaggggcttcaggtactgtctgttgcatgtggctcgtggcattcagctctgatcacatcaactggaagactttacacatttggtgacggaaaattcggtgctcttgggcatggaaaccgtgaaagcgctgcgtacccaaaagaagtggaagccttgaatggatttagaactgtcaaagttgcatgcggagtctggcattctgcagcaattgtggaggcctctgttcagacaggcatgaatgtggtgtctaagaagctgtatacgtggggtgatggagataagaatcgtttaggccaaggggacaaagaagctaggctgattcctacctgtcttcaagctcttcttgagcacaattttcatcagctgggatgtggacagaacatgactgttgcccttgctacatccggtcatgtgtataccatgggtagttctgacaatggtcagctcggaaatccaaaatctgatggtaaacatccttgccttgtcaaagacaaactagctaacgagttggttgaggagatctcatgtggagccgcccatgttgcagttctaacgtcaagaagcgaagtatacacgtggggactgggtgccaatggaagacttggtcatggtgacctcaacgacaagaagacaccaactattgtcgaagcacttaaagatcggcatgtcaaaagtatatcatgcggctcaaacttcacaacatgtatctgcatacataggtgggtgtcaggtgcagatcagtctgtttgcacaggttgtaggcaggcatttggtttcacgaggaagagacataattgctacaactgtgggctagtacactgccatgcttgcagttcaagaaaagtgctcaaggctgctctggcaccaactcctggcaagccgcatcgtgtatgtgattcatgtttcctgaaactgaagaatgcagacaccagcagcagcaatgcgaacagaagaaatgccgctactcgtcgctctacggacagcagagaaaaaccagaaataaggcctcccaggcttgtggcaacaccgtcagcagagccaggcaagtacatggaggtaaaagcatctaagagcgatatgaaacctgcagattcgatcatgaaggcatcacaagcttcggctctactgcagttcaaagatcttggttttggtgcccaatttggtgggcttcagcctatgggaatgccaccggcattagctatgtcacctgcgataccggcattttctttggcacctccatctccatatacaaagaaaatgaaatcacctcctacttctgctatcccccagagctctaaagtcgatgttgatcacttgcagaagtcaaatgacttgctgaatcaggaagttctgaaattgcaatctcaggttgaggatttgaaacaaaagtgcgaagcacagcacgagcagcttcagaaatcagataaaaaagctaagtcagttgcctctatggccactgaagaatcctcgaaacgtaatgctgccgtggagtttgttaaatttcttgataatgagctcaagggtattgcagataaacttcctgttgacgttgccgacagcttgaaagctttgcaaatgcgaacacagtcactactgagggaacaatcaggtcaccccttagagctcgtgaatccaatggaacgtgatcatcttcacctgtccagtggtggaagtggaagatatgatttggtcactcataagtcaggaggtgtaggttacctgacaatgtctcaagatggcagttctgccagtggctcagccatgtccatcacgagtgaatccccatcccatcgtttcatggaaaacagttcaaaggcccatggtgattttgccccgaagcagggtacccatggagaggtccagttaattgagcagtttgaacctggcgtatatgtgacacttatccaactaaaggacggtaccaaagtattcaagcgggtccgattcagcaagaggagattcgcagagaatcaggctgaagaatggtggagggaaaaccaagagcgggtcttcaagaaatacagccacccaactcatgcaccacatggaaacacaacttctcacgaggaagagcatcattcatgatctccaaatcaggtccacacaggtcgtcatgtaggaggtttatcacgcgaaatagggtaacacaggacttattattgttttgttcattattttcttgtaaattgtagattactgttgccctttttttgttccttttaccctgttcaacccccttctgacaaaggtattcatttccaaagccaactaaattgaggttca

SEQ ID NO: 147719 - DNA, 1630 bp, Zea Mays
gcatgaacgactgggctgggcggtccgccatggtcacttcccagtctcgagtgacacggcatcatgatgcgtgccctactcagcggggatgcatgcgcgtgcgtggttaacaaactccattggtcgtctcgtcacctatataaagctcgcacgaggcacggccggtttcactacaccagggcacgacgtgcgttgcgtcgtgagtgtttgtgtttcagagctgagagtctgagactgagagagatagaggtgatgatggctctgcaggcgcaggggacgcgggtgccgctggtcctggcgctcttcctcctcctggccggttgcggcagcgaggcgcagccgctggtgccggcgctgtttacgttcggtgactcgtcggtggacgtcgggaacaacgactacctccacaccatcatcaaggccaacttcccgccatacggcagggacttcgccaaccacgtcgccaccgggaggttctgcaatggcaagctggcgaccgacatcaccgccgacacgctggggttcactacctaccctgccgcgtacctcagcccacaggcgtcggggcagaacctcctcatcggcgccaacttcgcgtccgcggggtctgggtactacgaccacacggcacttatgtatgtaagtatcatcagatcagttcgtcaccacctcatcgatcgatcgatcagtgtgacctaacggctagcaattcttacacaccaatgcaaacaaacaaacacacacacacagcacgcgatcccgctgtcccagcagctggagtacttcagggagtaccagacgaagctggcggcggtggccggcgccgggcaggcgcgctccatcctcagcggcgcgctgtacatcgtcagtgccggcgccagcgacttcgtgcagaactactacataaacccgctgctgttcaagacgcagacggccgaccagttctccgaccgcctcgtggccatcttcggccgcaccgtgcaggagctctacggcatgggggcgcgccgcgtcggcgtcacgtcgctgccgccgctgggctgcctgccggcgtccatcacgctgttcgggcacggcgccgccgggtgcgtgtccaggctcaacagcgacgcgcagagcttcaaccggaagatgaacggcaccgtggacgcgctggcgcggcggtacccggacctcaagatcgccgtcttcgacatctacacgccgctgtacgacctggccacggacccccagtcgcagggcttcgcggaggcccggcggggatgctgcgggacgggcacggtggagaccaccgtgctcctctgcaaccccaagtccgtcgggacgtgccccaacgccacgtcctacgtcttctgggacgccgtccacccgtccgaggcggccaaccaggtcatcgctgactcgctcatcaccgagggcctcatcctcgtcacgtaatcatgcttttgttttggcttcaaatcgatcagactacacaaaagtcgtcgttcctaaacgtatactatgcctgtaaatttattcctcttgtttttcttatttgcgttgattaatgttttcggaagtataagcaacaacatgaatgaatgaatgaatgaatgaatggactcctattgttgtcaagttcaacgtc

SEQ ID NO: 147720 - DNA, 1603 bp, Zea Mays
gcatgaacgactgggctgggcggtccgccatggtcacttcccagtctcgagtgacacggcatcatgatgcgtgccctactcagcggggatgcatgcgcgtgcgtggttaacaaactccattggtcgtctcgtcacctatataaagctcgcacgaggcacggccggtttcactacaccagggcacgacgtgcgttgcgtcgtgagtgtttgtgtttcagagctgagagtctgagactgagagagatagaggtgatgatggctctgcaggcgcaggggacgcgggtgccgctggtcctggcgctcttcctcctcctggccggttgcggcagcgaggcgcagccgctggtgccggcgctgtttacgttcggtgactcgtcggtggacgtcgggaacaacgactacctccacaccatcatcaaggccaacttcccgccatacggcagggacttcgccaaccacgtcgccaccgggaggttctgcaatggcaagctggcgaccgacatcaccgccgacacgctggggttcactacctaccctgccgcgtacctcagcccacaggcgtcggggcagaacctcctcatcggcgccaacttcgcgtccgcggggtctgggtactacgaccacacggcacttatcacgcgatcccgctgtcccagcagctggagtacttcagggagtaccagacgaagctggcggcggtggccggcgccgggcaggcgcgctccatcctcagcggcgcgctgtacatcgtcagtgccggcgccagcgacttcgtgcagaactactacataaacccgctgctgttcaagacgcagacggccgaccagttctccgaccgcctcgtggccatcttcggccgcaccgtgcaggagctctacggcatgggggcgcgccgcgtcggcgtcacgtcgctgccgccgctgggctgcctgccggcgtccatcacgctgttcgggcacggcgccgccgggtgcgtgtccaggctcaacagcgacgcgcagagcttcaaccggaagatgaacggcaccgtggacgcgctggcgcggcggtacccggacctcaagatcgccgtcttcgacatctacacgccgctgtacgacctggccacggacccccagtcgcagggcttcgcggaggcccggcggggatgctgcgggacgggcacggtggagaccaccgtgctcctctgcaaccccaagtccgtcgggacgtgccccaacgccacgtcctacgtcttctgggacgccgtccacccgtccgaggcggccaaccaggtcatcgctgactcgctcatcaccgagggcctcatcctcgtcacgtaatcatgcttttgttttggcttcaaatcgatcagactacacaaaagtcgtcgttcctaaacgtatactatgcctgtaaatttattcctcttgtttttcttatttgcgttgattaatgttttcggaagtataagcaacaacatgaatgaatgaatgaatgaatgaatggactcctattgttgtcaagttcaacgtcacattatttgtgtgtagaaagtagacgcaacacacgtacaagaggcagattttactcaagtcaaatgtagaaaaagttcatcgactga

SEQ ID NO: 147721 - DNA, 1667 bp, Zea Mays
gcatgaacgactgggctgggcggtccgccatggtcacttcccagtctcgagtgacacggcatcatgatgcgtgccctactcagcggggatgcatgcgcgtgcgtggttaacaaactccattggtcgtctcgtcacctatataaagctcgcacgaggcacggccggtttcactacaccagggcacgacgtgcgttgcgtcgtgagtgtttgtgtttcagagctgagagtctgagactgagagagatagaggtgatgatggctctgcaggcgcaggggacgcgggtgccgctggtcctggcgctcttcctcctcctggccggttgcggcagcgaggcgcagccgctggtgccggcgctgtttacgttcggtgactcgtcggtggacgtcgggaacaacgactacctccacaccatcatcaaggccaacttcccgccatacggcagggacttcgccaaccacgtcgccaccgggaggttctgcaatggcaagctggcgaccgacatcaccgccgacacgctggggttcactacctaccctgccgcgtacctcagcccacaggcgtcggggcagaacctcctcatcggcgccaacttcgcgtccgcggggtctgggtactacgaccacacggcacttatgtatcacgcgatcccgctgtcccagcagctggagtacttcagggagtaccagacgaagctggcggcggtggccggcgccgggcaggcgcgctccatcctcagcggcgcgctgtacatcgtcagtgccggcgccagcgacttcgtgcagaactactacataaacccgctgctgttcaagacgcagacggccgaccagttctccgaccgcctcgtggccatcttcggccgcaccgtgcaggagctctacggcatgggggcgcgccgcgtcggcgtcacgtcgctgccgccgctgggctgcctgccggcgtccatcacgctgttcgggcacggcgccgccgggtgcgtgtccaggctcaacagcgacgcgcagagcttcaaccggaagatgaacggcaccgtggacgcgctggcgcggcggtacccggacctcaagatcgccgtcttcgacatctacacgccgctgtacgacctggccacggacccccagtcgcagggcttcgcggaggcccggcggggatgctgcgggacgggcacggtggagaccaccgtgctcctctgcaaccccaagtccgtcgggacgtgccccaacgccacgtcctacgtcttctgggacgccgtccacccgtccgaggcggccaaccaggtcatcgctgactcgctcatcaccgagggcctcatcctcgtcacgtaatcatgcttttgttttggcttcaaatcgatcagactacacaaaagtcgtcgttcctaaacgtatactatgcctgtaaatttattcctcttgtttttcttatttgcgttgattaatgttttcggaagtataagcaacaacatgaatgaatgaatgaatgaatgaatggactcctattgttgtcaagttcaacgtcacattatttgtgtgtagaaagtagacgcaacacacgtacaagaggcagattttactcaagtcaaatgtagaaaaagttcatcgactgatgttttggtatcatccgagaaaagtaagacaggtttgtcgtggtcatctcaccacaccgt

SEQ ID NO: 147722 - DNA, 1163 bp, Zea Mays
cgtacgacgactttttcgtcgatcgtctgcgtacgtggtgcatgcattgtgccatggctgcagccgacacgctggggttcactacctaccctgccgcgtacctcagcccacaggcgtcggggcagaacctcctcatcggcgccaacttcgcgtccgcggggtctgggtactacgaccacacggcacttatgtatgtaagtatcatcagatcagttcgtcaccacctcatcgatcgatcgatcagtgtgacctaacggctagcaattcttacacaccaatgcaaacaaacaaacacacacacacagcacgcgatcccgctgtcccagcagctggagtacttcagggagtaccagacgaagctggcggcggtggccggcgccgggcaggcgcgctccatcctcagcggcgcgctgtacatcgtcagtgccggcgccagcgacttcgtgcagaactactacataaacccgctgctgttcaagacgcagacggccgaccagttctccgaccgcctcgtggccatcttcggccgcaccgtgcaggagctctacggcatgggggcgcgccgcgtcggcgtcacgtcgctgccgccgctgggctgcctgccggcgtccatcacgctgttcgggcacggcgccgccgggtgcgtgtccaggctcaacagcgacgcgcagagcttcaaccggaagatgaacggcaccgtggacgcgctggcgcggcggtacccggacctcaagatcgccgtcttcgacatctacacgccgctgtacgacctggccacggacccccagtcgcagggcttcgcggaggcccggcggggatgctgcgggacgggcacggtggagaccaccgtgctcctctgcaaccccaagtccgtcgggacgtgccccaacgccacgtcctacgtcttctgggacgccgtccacccgtccgaggcggccaaccaggtcatcgctgactcgctcatcaccgagggcctcatcctcgtcacgtaatcatgcttttgttttggcttcaaatcgatcagactacacaaaagtcgtcgttcctaaacgtatactatgcctgtaaatttattcctcttgtttttcttatttgcgttgattaatgttttcggaagtataagcaacaacatgaatgaatgaatgaatgaatgaatggactcc

SEQ ID NO: 147723 - DNA, 881 bp, Zea Mays
atgacgacgcagaccgcggaggagctcgccacccagatcgagcagcagaagctcgaggagcagaagactgagatggtctcgcttcatttctgtgatatgaacaaagtagtgtgtcaccatctacggccctcgaaagactacttgcccgttctgctgggactagcacaacaaggtagcgtcttgaggcacaaagtgcagttcacctggagtaaccaagaggataatgctgaggagacgaccatgtcagatgtctggtatgaggtgctgcacttgatggccatggtctgcttgcagtaggccaacaccctgcttctcccaaggtcatacggcaatggctacgccccaagagtttctgaagagagtagacatgccactgttgatgtcttcttgaaggcagctggataactagactgcgcaattcggcatgtacttccgaagatgacactagaactaaggagacaacttccagtcaacctggctgaaggaaatctcgaagctctaagcctgccagccttgggtcagggggttgacatgcaactgttgtcgccacttgcaccgcctcctctccagcagcaactgttgtcgccgccgcctcactgcgtgggaacgggagcaaaacctcacgctgacgatgtacctggcgcggtggtgcaaccgtacccgcacggccaccgccgcgcgtcgtcgaggcacgcggccccgttcctgtcgtgccggtccatggatcccaccgtcgtcgtgcacagcaagtaccaataccatcctcgtaaggtggagttcagctgcaagagcacgctagcgccatctgcacctacatcagagctcccaatggcgatatgagcctcgcactacctctctgccatcaggccttgccgtgcaag

SEQ ID NO: 147724 - DNA, 883 bp, Zea Mays
agaaattgaactagaaaaatcttaaacgcacatgaaaccgagcaggaaagtgttgtttttctctttctcttggtgacgatggttcaactttgtttcaagagaaaatatggtagggttgttcgcttctgatttcattgtgtcttttcttcaggagtttggggatcaaggagaggactccattatcttgtcaccgcggctgaaggagattagtactcctgaccgccccgctgccctccgtttcctaggtataatcatgtagtgatgcacagggatctcaaaccagaaaatttcttgtttgcaaacaagatagaatcagcgatacttaaggccattgattttggcctgtctgtatttttcattccaggcgaacggttttctgagatttttggaagtccttattacatggctccagaggtgctaaagagaaactatggcccagaggttgatgtttggagtgcaagagtgattctgtacattcttctttgtggtgtccccccattctgggcagaaacggaacagggtgttgctcaggcaatcattcgatctgtcattgatttcaaaagagatccatggccaagggtgtctgataacgccaaagaccttgtcagaggaatgctgaatccggaccaaaaacgacgattgacagctcaccaagtgcttggtcacccatggttgcagaacattaagaaggctccaaatgttaatttgggtgaaaccgttaaggccagactccaacaattctctgtgatgaacaagttcaagaagcatgcacttagggtacatttcaatctgacttgaccacaaatggtacccctttaattgtcatacttactcttgaattcctcacatatttgaaaataggttatagctgagcatctttggg

SEQ ID NO: 147725 - DNA, 1489 bp, Zea Mays
atgttgacctcaccatcgccctccggtctcgcggcctggtgggcctcggcctctccgactctgggttcattcgcctgcactgcaacccatctcggaaccctccctcgcctccctcgcgttcagtttgatccaggacgaagggaacggtgagccgccatggtgaaggacagcgcgtactacgacgtcctggagatcagcactgacgcctccatggccgagatcaagaaggcctattacctcaaggccaagctggtgcacccggacaagaatccgagcaatcctgatgctgcgcgcaagtttcaggaactaggcgaagcctatcaggtcctaagtgatccactgaaaaaggagtcttacgataagtatggaaaggaaggacttccacaagataatatgattgatccaactgctgtctttggaatgctttttgggagcgactattttgaagattatgttggccaacttgcgctagcatctgttgcctctgtagagattgaggaagaatcaaacacacctgaggcaaggacaaggattcaagagaagataaaggacgtgcaaaccgaaagagagcaaatacttactcaaagtctaagggatcggctgcaaccatatgttgatgggaagcaagatgagtttggtgattgggcaagtgcagaagctcagcgtttgtctcaagctgcttttggtgaggctatgcttcacacgattggctacatctatgttcggcaagcagcacgagaacttggaaaaagcaaactgtatatgggtgtaccttttattgctgagtgggtaagggacaagggccaccacgtaaaatcacaggttaatgctgccgcaggtgcaatttctctgatacagctacaagaagggataaaaaagattgaagagggtgacaaggaagagcagcttattaagagtatcgaagagaaaaaagatgcaatgctgaattctttatggaaaattaatgtggtcgatattgagtcaacgctttcacgggtctgccaagcagttttaagagaaaatgatattcccagagacgtactcaagttgcgagcaagaggactgaaaaagctagggacgatatttcaaggcgcaaaatcaaactaccgtcgtgaaaacagcctgcgtgttgaagatgacgcggcagaagccacaccgtcgcactgaggatggtggacaaatctggatatgatgtcatatactgcgtcaccggctcaccgagactgagcccgaaagccgaccactgtggaaggagacaaacgatgctgtttttccaaagatttttgtacggtataagcgcaaggtattgctaccatgccatactttatcgctgtccgcactgcatatagttctgttggacgaaaaatgtaatatttgaagtcaaaatgtgatgcgtaatgatttaagcgcatgatcataggctttgaatgtcatttgcgatcggactcagatccttggtggatctttaaaaaaaacgagaataagttct

SEQ ID NO: 147726 - DNA, 111 bp, Zea Mays
aggctataagaagagcgacagttacatttataataacaatgttcgccacaacacaacttgtacgtgtttatctaggcctatccccttctagttgctagcttcctttcgtac

SEQ ID NO: 147727 - DNA, 1551 bp, Zea Mays
agcgggcagcggcccagctcatcaccccagttcagttgtcgccgtcacggtcttcgtgcacctcccgtccatacccataaataaacgtgtgcccacacatctgctcacacaaccgcaccacagtactctctccagtgtccacagaaacagaattccgctccctccccgtgtcctcctcccgcgcccgcgcatcgtgaggtggagttcccaccccgaggccgcaatggcgacggtggaggtggtggtggccaacggcttgggtggcgccgacaccaagaccgtgtttaaggaaacatacagcaagctcaaggaggagatgctagacgaccccgccttcgagttcaccgacgagtcgctacagtggatcgaccgcatgttggactacaatgtgctcggaggaaagtgcaatcgcgggctctctgtcattgatagctacaggatattgaagggtgttgatgttctgagcaaggaggagacatttcttgcttgcacccttggctggtgcattgaatggcttcaagcttattttcttgtgcttgatgatattatggacaactcccagacacggcgtggccaaccttgctggtttagagtgccacaggttggcctcattgctgtaaatgatgggattatccttcgcaatcatatttcacgaatccttcaacgccacttcaaggggaagccatattatgttgatgtaattgacctattcaatgaggttgagttcaagacagcttcagggcaaatgttggatcttatcactacccacgagggtgaaaaggatctaactaaatataacttgacagttcgccgccacatcgttcagtacaagacagcttattattcattttaccttcctgttgcatgtgcattgctgctggctggtgagaacttggataactttggcgatgtaaagaacattcttgtcgaaatgggaacatactttcaagttcaggatgattatttagattgtttcggtgatcctgaattcattggcaagatcggaactgacattgaagactacaagtgttcctggctagtcgtgcaagctcttgaacacgctgatgagaagcaaaagaacattctgtttgaaagttatggaaagtctgatccagcgtgtgttgcaaaggtgaaggacttgtacaaagagcttaaactggaggaggttttccaggcgtacgagagggagagttacaacaagctgattgccgacatcgaggcccagcccagcaaggcagtccagagtgttttgaagtccttccttcacaagatctacaagagggacaagtaaaaacccagatcgtgaagaagctgctccgtcgacgcttgcatcaaattagtagacttgattgatgcagatgagtaatttgtactatgttgtttcatgttttcattctcctgttgcgtgtactcctgaattataataaaacagagtgctattagggttacgtaaccagcttgtgcgaatgctctacaaacgacagtgctgactgctgagtgttgttagagcaacttcagcgctatatcataaaggattttaagggttttctc

SEQ ID NO: 147728 - DNA, 2336 bp, Zea Mays
atggcgcccgtaaagatgttaatccgcccagttggagcccgacagagcgggcgagtagtcgccggatcccgtgctggtgctgagcacgaccacgacccagtcgccctcgctcgcgatcccggcgccggagaactggctgtcgttgaggaaccggttgtactgcgacttggtgtagttagcgaggacgacgacggggacgaggcccagcacgcacgccggcatcacctggccgtcctcggtcaccgacgcgttgaggtggcagcggtccagggctcaacctataaaccagcaaaaagaggagctccacatcggacagcatccaggtcccaccgttcagtggacgtaagaaagacacccggatcctgcgctctccttaccctctccacttccgtttccggatcccgtttccagctccgatccaacccagcatctgtaccgcgccgcgcgagcacgtccggcgccggtgcggcaggcgaaatccgagagcactcctcccccgctacgccgcaccgcccatggccgcagctagccgcagatagagagaggcgcaggcgagggcgtgcagatccagatccggtgggcgggaaggacttgatcgcccccaccaccatggccggcgcggtgtcggcgctcttcctgctggacatgaagggccgcgttctcgtctggcgcgactaccgcggcgatgtctccgcgctccaggccgagcgcttcttcaccaagctcctcgacaaggagggcgattcggaagtgcactcgcctgtggtctacgacgacgctggcgtcacttacatgttcatccagcacaacaatgtcttcctcctcaccgccgctcgccagaactgtaacgcggccagcatcctcctcttcctccaccgtgtaatagatgtgtttaagcactacttcgaggagctggaggaagagtcgctcagagataacttcgtcgttgtgtatgagttgctcgatgagatgatggattttgggtacccacaatacacggaggcgaagatattgagtgagttcatcaagacagatgcatacaggatggaggtcacacagcgtccacccatggccgtgacaaatgctgtgtcatggaggagcgaggggatccggtacaagaagaatgaagtcttcttggatgtagtggagagtgttaacattctagttaacagcaatggccagattgtgagatcagatgtggttggggcactgaagatgcgaacatatttgagtggaatgccggagtgcaaacttggcttgaatgatagggttcttttggaggctcaaggcagagcaactaaaggcaaagcgatagacctcgatgatatcaaatttcatcagtgtgtacgtttggctagatttgagaatgatagaactatatcgttcatacctcctgatggatcttttgatctaatgacatacaggcttagcactcaggtaaaacctcttatctgggtcgaagcacagattgagaaacattctagaagccgtatagaactcatggtgaaggcaaggagtcagtttaaagaaagaagcacagcaacgaatgttgaaattgaagtgcctgttccttcagatgccacaaacccaaatataagaacttcaatggggtctgctgcatatgctcctgagagagatgcaatggtttggaaaataaaatcattccctggtggcaaggaatacatgtgcagagcagaatttagtcttcctagcataacagcggaagaaggggccccagaaaagaaggcgccgatacgggtgaaatttgagataccatatttcaccgtatcaggtattcaggtccgttatctgaagataattgaaaagagtggttatcaggcactcccctgggttagatatatcacaatggctggtgaatatgagctgagacttatatgagttctctcttctctggctgccggacgacttttgaagctgcaggacactaaagatacatatttgctatcgacacagcgaacagttttcatttggatgttggcctggaagtcttctgccgaccatacccctccccgtggtggggcttgctgttcatcttgttaggctcaccttaccctggttattgtaagttaccaatcaagtacagttttggaggaaaggatattcagttttcagttcacttgtattgttattgatttattttgtgggtaccaaactagatttgtttcgttctgtattacacggaaaacatgggctgatttgagttcaacaaaacattgccacatctggcgatgattctggggtgcgggttgaaacaaatttgcccttttttttactgtaaatgtcgtgaacaattccctttcagttccatcacgttc

SEQ ID NO: 147729 - DNA, 1924 bp, Zea Mays
accgttcagtggacgtaagaaagacacccggatcctgcgctctccttaccctctccacttccgtttccggatcccgtttccagctccgatccaacccagcatctgtaccgcgccgcgcgagcacgtccggcgccgctagccgcagatagagagaggcgcaggcgagggcgtgcagatccagatccggtgggcgggaaggacttgatcgcccccaccaccatggccggcgcggtgtcggcgctcttcctgctggacatgaagggccgcgttctcgtctggcgcgactaccgcggcgatgtctccgcgctccaggccgagcgcttcttcaccaagctcctcgacaaggagggcgattcggaagtgcactcgcctgtggtctacgacgacgctggcgtcacttacatgttcatccagcacaacaatgtcttcctcctcaccgccgctcgccagaactgtaacgcggccagcatcctcctcttcctccaccgtgtaatagatgtgtttaagcactacttcgaggagctggaggaagagtcgctcagagataacttcgtcgttgtgtatgagttgctcgatgagatgatggattttgggtacccacaatacacggaggcgaagatattgagtgagttcatcaagacagatgcatacaggatggaggtcacacagcgtccacccatggccgtgacaaatgctgtgtcatggaggagcgaggggatccggtacaagaagaatgaagtcttcttggatgtagtggagagtgttaacattctagttaacagcaatggccagattgtgagatcagatgtggttggggcactgaagatgcgaacatatttgagtggaatgccggagtgcaaacttggcttgaatgatagggttcttttggaggctcaaggcagagcaactaaaggcaaagcgatagacctcgatgatatcaaatttcatcagtgtgtacgtttggctagatttgagaatgatagaactatatcgttcatacctcctgatggatcttttgatctaatgacatacaggcttagcactcaggtaaaacctcttatctgggtcgaagcacagattgagaaacattctagaagccgtatagaactcatggtgaaggcaaggagtcagtttaaagaaagaagcacagcaacgaatgttgaaattgaagtgcctgttccttcagatgccacaaacccaaatataagaacttcaatggggtctgctgcatatgctcctgagagagatgcaatggtttggaaaataaaatcattccctggtggcaaggaatacatgtgcagagcagaatttagtcttcctagcataacagcggaagaaggggccccagaaaagaaggcgccgatacgggtgaaatttgagataccatatttcaccgtatcaggtattcaggtccgttatctgaagataattgaaaagagtggttatcaggcactcccctgggttagatatatcacaatggctggtgaatatgagctgagacttatatgagttctctcttctctggctgccggacgacttttgaagctgcaggacactaaagatacatatttgctatcgacacagcgaacagttttcatttggatgttggcctggaagtcttctgccgaccatacccctccccgtggtggggcttgctgttcatcttgttaggctcaccttaccctggttattgtaagttaccaatcaagtacagttttggaggaaaggatattcagttttcagttcacttgtattgttattgatttattttgtgggtaccaaactagatttgtttcgttctgtattacacggaaaacatgggctgatttgagttcaacaaaacattgccacatctggcgatgattctggggtgcgggttgaaacaaatttgcccttttttttactgtaaatgtcgtgaacaatt

SEQ ID NO: 147730 - DNA, 1419 bp, Zea Mays
cgtttccagctccgatccaacccagcatctgtaccgcgccgcgcgagcacgtccggcgccggtgcggcaggcgaaatccgagagcgaggggatccggtacaagaagaatgaagtcttcttggatgtagtggagagtgttaacattctagttaacagcaatggccagattgtgagatcagatgtggttggggcactgaagatgcgaacatatttgagtggaatgccggagtgcaaacttggcttgaatgatagggttcttttggaggctcaaggcagagcaactaaaggcaaagcgatagacctcgatgatatcaaatttcatcagtgtgtacgtttggctagatttgagaatgatagaactatatcgttcatacctcctgatggatcttttgatctaatgacatacaggcttagcactcaggtaaaacctcttatctgggtcgaagcacagattgagaaacattctagaagccgtatagaactcatggtgaaggcaaggagtcagtttaaagaaagaagcacagcaacgaatgttgaaattgaagtgcctgttccttcagatgccacaaacccaaatataagaacttcaatggggtctgctgcatatgctcctgagagagatgcaatggtttggaaaataaaatcattccctggtggcaaggtaattactatccaattctaaattaattctttgttttctgttcgttgctattttgaggtgcactaaactgctaatgtgatgaagcaacctatcctataggaatacatgtgcagagcagaatttagtcttcctagcataacagcggaagaaggggccccagaaaagaaggcgccgatacgggtgaaatttgagataccatatttcaccgtatcaggtattcaggtccgttatctgaagataattgaaaagagtggttatcaggcactcccctgggttagatatatcacaatggctggtgaatatgagctgagacttatatgagttctctcttctctggctgccggacgacttttgaagctgcaggacactaaagatacatatttgctatcgacacagcgaacagttttcatttggatgttggcctggaagtcttctgccgaccatacccctccccgtggtggggcttgctgttcatcttgttaggctcaccttaccctggttattgtaagttaccaatcaagtacagttttggaggaaaggatattcagttttcagttcacttgtattgttattgatttattttgtgggtaccaaactagatttgtttcgttctgtattacacggaaaacatgggctgatttgagttcaacaaaacattgccacatctggcgatgattctggggtgcgggttgaaacaaatttgcccttttttttactgtaaatgtcgtgaacaattccctttcagttccatcacgttc

SEQ ID NO: 147731 - DNA, 1320 bp, Zea Mays
cgtttccagctccgatccaacccagcatctgtaccgcgccgcgcgagcacgtccggcgccggtgcggcaggcgaaatccgagagcgaggggatccggtacaagaagaatgaagtcttcttggatgtagtggagagtgttaacattctagttaacagcaatggccagattgtgagatcagatgtggttggggcactgaagatgcgaacatatttgagtggaatgccggagtgcaaacttggcttgaatgatagggttcttttggaggctcaaggcagagcaactaaaggcaaagcgatagacctcgatgatatcaaatttcatcagtgtgtacgtttggctagatttgagaatgatagaactatatcgttcatacctcctgatggatcttttgatctaatgacatacaggcttagcactcaggtaaaacctcttatctgggtcgaagcacagattgagaaacattctagaagccgtatagaactcatggtgaaggcaaggagtcagtttaaagaaagaagcacagcaacgaatgttgaaattgaagtgcctgttccttcagatgccacaaacccaaatataagaacttcaatggggtctgctgcatatgctcctgagagagatgcaatggtttggaaaataaaatcattccctggtggcaaggaatacatgtgcagagcagaatttagtcttcctagcataacagcggaagaaggggccccagaaaagaaggcgccgatacgggtgaaatttgagataccatatttcaccgtatcaggtattcaggtccgttatctgaagataattgaaaagagtggttatcaggcactcccctgggttagatatatcacaatggctggtgaatatgagctgagacttatatgagttctctcttctctggctgccggacgacttttgaagctgcaggacactaaagatacatatttgctatcgacacagcgaacagttttcatttggatgttggcctggaagtcttctgccgaccatacccctccccgtggtggggcttgctgttcatcttgttaggctcaccttaccctggttattgtaagttaccaatcaagtacagttttggaggaaaggatattcagttttcagttcacttgtattgttattgatttattttgtgggtaccaaactagatttgtttcgttctgtattacacggaaaacatgggctgatttgagttcaacaaaacattgccacatctggcgatgattctggggtgcgggttgaaacaaatttgcccttttttttactgtaaatgtcgtgaacaattccctttcagttccatcacgttc

SEQ ID NO: 147732 - DNA, 2000 bp, Zea Mays
agcaccggtgaagagcgctccgctgccgtgcgcgcccccgcgccggcctcccactggatcgctccacctcatgctccaaatctttattggtttccacgttgccccctcgccgtccccaaccatcgaccgcgccgcgcccgctgccgcctcccagctcgctctatataaacaccacgtacgcgccgaagcatcagcacagccacgtacgtacgaccggcttccggcaggtgagagaacagtgagaagcaggcgagcggtgacatggcggagggggagttcaagcccgcggcgatgcaggtggaggctcctgccgaggcggcggcggcgccgtccaagccgcggttcaggatgcccgtcgactccgacaacaaggccaccgagttctggctcttctccttcgcgaggccgcacatgagcgccttccacatgtcgtggttctccttcttctgctgcttcctctccaccttcgcggcgccgccgctgctcccgctcatccgggacacgctggggctcacggccacggacatcggcaacgccgggatcgcctccgtgtccggcgcggtcttcgcgcgcgtggccatgggcacggcgtgcgacctggtgggcccgcgcctggcgtccgcggccatcatactcctcaccacgcccgccgtctactactccgccgtcatcgactccgcctcgtcctacctgctcgtgcgcttcttcacgggcttctcgctcgcgtccttcgtgtccacgcagttctggatgagctccatgttctcgccgcccaaggtggggctggccaacggcgtcgccggggggtggggcaacctcggcggcggcgccgtgcagctcatcatgccgctcgtgttcgaggccatccgcaaggccggggccacgccgttcacggcgtggcgcgtcgccttcttcgtcccgggcctgctgcagacgctgtcggccgtcgccgtgctggcgttcggccaggacatgcccgacggcaactaccgcaagctgcacaggtccggcgacatgcacaaggacagcttcggcaacgtgctccgccacgccgtcaccaactaccgcgcctggatcctggcgctcacctacggatactgcttcggcgtggagctcgccgtggacaacatcgtcgcgcagtacttctacgaccgcttcggcgtcaagctcagcaccgccggcttcatcgccgccagcttcgggatggccaacatcgtctcccgccccggcggcggcctcctgtcggactggctctccagccgcttcggcatgcgcggcaggctgtggggcctgtgggtggtgcagaccatcgggggcgtcctctgcgtcgtgctcggcgccgtcgactactccttcgccgcgtccgtggccgtcatgatactcttctccatgttcgtgcaggcggcctgcgggctcacctttggcatcgtcccgttcgtctcccgaaggtcgctggggctcatctccggcatgaccggcggcggcggcaacgtgggcgccgtgctcacgcagctcatcttcttccacggatccaagtacaagacggagacggggatcaagtacatggggttcatgatcatcgcctgcacgttgcccatcacgctcatctacttcccgcagtggggcggcatgttcctggggccgcggcccggggcgacggcggaggactactacaaccgggagtggacagcgcacgagtgcgacaagggtttcaacaccgcgagcgtacgctttgcggagaacagcgtgcgggaagggggacgctcgggcagccagtccaagcacactactgtgcccgtcgagtcctcgccggccgacgtgtgaaacacacacaagcatacggtactgcccgtataatcagcggtccctcccgtgtcagcaaatcatatgtagtgttcctaagtcgtgatgactccgtacgtgtggtaatttctgtgtgaaggaaaaaccgggggtgaatttcagcgaggagtgacattataagcagggctcgtttgcat

SEQ ID NO: 147733 - DNA, 492 bp, Zea Mays
gatcgtaatgcacaagctgggaggcagcctcttttcagaaggaactcaaggaagtagtcctgtagagcttagtcgtgttgtatacactattcactctacaattgggaggaacaaaaaattctctgaaatatattgcgtaatcaaatgctcgaagaacttgaaatcatggtggcaggcgtcagaaatgttgcaataatatcttagtattaatgcaaagcgaagacaacgggcctttcaatttgggcggttgtatttgttgcttcagtgctaacaggtgaccatattccttaagcaagcattaaaacgacaatctgcagtgagaaccatatgaaagctgggccagtagccattcctcgtcaggattttttttgataaaccttacctgtcatttggtctttgttattgtttccatttggtaggaatctatgcgattaataagttcagaaaggtgactttattaaaagtttatatacaattttttttcaaaatata

SEQ ID NO: 147734 - DNA, 4191 bp, Zea Mays
aatttttatagatgtcatacatggttttacaagaatcgattttgtttttacagaaaataggacattttaccatgtagcaaagggagatttattacatggccggcgtcaacgcaaacgcaatttacgcaaatatgcaatcacgcaagccgtgtttgcaccgaagggtcacgtcccacaagccgagcgcctcgaacccgtcgtcgaaggccaccggtcaaggtcaatccaccaccatgccagcgggcagcggcccaaccgacaacgcgcaagcgaagcggcgaggaaggccgatcctcccgctgccctgcatcgcccgcacggattccaccccttccaaccaaaaagcgatacaattgcttccttcggcaaaaagtctcctcctgcttccttccccctgttctgttccccttggcagcaggcggcagcggcagcctgcgccctcccgcgtgcgtgagagcccgaatctttccatattccaatccaccgccgcagcgacaaaagggagtcccccctccccgcctaggtggaggttggcaggtatttggtgtcgcgcccggtttggatttggctggattcgaatcaggccggaagacacaggtccgtgccgcgcggcgggggcggagatgcacaagagcaaggggaaattctccggcgtcctgcacaagggcttcaagcctgacaagtgcaagacgtcgctgcggatggcggtggcccggatcaagctgctgcggaatcgcaaggaggtgcaggtacgccagatgcgtcgcgaggtcgcgcagctgctcgaggccaaccaggacatgaccgcgcgcatcagggttgaacatgtcataagggaagaaaagttcatgcaagcatatgacttgattgaagtatactgtgaacttatagtagcacgtctgtccattattgactcacagaagacttgcccgattgatctgaaggaggcagtagccagtgttatatttgcatcaatgcggtgttcagatgtcacagaactagcagatgttcggaagcatttcaaaagcaagtacggaaaagagtttgaagcagcagcccttgaagtgcgacctgacagtggtgtaaatcgtctgataattgagaagctgtcagcaggagcacctgatgtgcagactaaaatcaaaacattgagctcgatagcagaggagcacaacatcaaatgggagccaaaagcgtttgaggagaaactgcaacaaccaactgaaggtcatctgtatggttctgcaacatattctggaggaaatacttcaactatgggatcatctacttctagcatatcaacaccacagcctacatattcaggtgttagtgcggcacctgtggactcagccactatccatgtgccagcaaataaaactgcatatggcagtgccaattctaatactttttcgaaagaaagcattcataatagttccagtgcatcagtacctcctatctcccaacatgggccgtctgcttactcttcagcacaggttcctggttctaacaatatctcacatggaaatccaggaggtccaccttaccctcaatacagcgcaacagtcccagacgcagtatccaggaatgaagatagcaatcagaatagggaaagaaaacctttggtgactggtgccaattggaatgtggaattcaaggatgcaacatctgctgctcaggcagcagcagagtctgcagagatggctagcattgctgctagagctgctgctgaacttgctagtcgtggaaactattctggagataaaggcactggagcctatgattcagccgcatacagtagcaaaaacacagtgaggaagcaacgggcggaacatgtagtgaaggatgagagtttccatgaccagagttcaggtgttaatgatccaagcgagatgccaagtaactcaagaaatttttttggaggaacagaaacatcccatgttgatagtgagaatatatcgacagccccatatcaacagttccatgcctacaatccagacagccatccatatgtttatgaaatgccaactgaaccacctcgtgctcattcacctgacccacgttttgatgatttatatgagagggaaagtgacattggaagatctgaagttgatccgtttgattttcctagagaaaacttccaagatactgcatctgttgggcacaatttcaaggatgtggaaatcaggacacctagctacgatcaagaaagcacagatgactactatggtaattttaattcttcacatgatacattggcccatggcagcagcaccactgcttgggataagcaaaacgacaaagctcaagacaactcttcacctgttgtttttgatcaatatgattctgatgttgaacaagagaatttgttggacacattctcctcaaagcatactgaacaactacctgctcccggagatcatatgagattctcaactgcagattggagtgaacagcataccagtgaatctccatccaagcagagaacgtcagccctattttccagaacagaaacacaactatctgataatttaggaacaaacaaaagtgatattccttcacctcattcttatcataacatgcgtcctgcttttgattcagatggtggtagctctgatgaggaaatagccacaaccacgcatgcagtgcctttaaggtcacattcaggaggatctgcttcgtctgtcctgaacaaaggtggtggacctgatgcttcacccatatttgattattcaggagcacatgcagtgaggaacttgaaccgtgtgcaaagcagagattctgatctttcggaagaagagacagatttagataaatttaaaggttcatccttcgccagagcaaatgagcagcagctgttgccttctgccatacgtacttcagcaacttctgatgataaggaagatgacatcagcctgaactttggtaagttaacgcctggactaagaaacaaacccaggcaacccccaccatacaccaaagtttccagggagagcattctgcctaagcagtccttgcctaaggtttctgctggcactgaagagtcagtcgattctgaagagaatactacattcaaacaggatagaagtagtccccaaagctcattttcagccaggacttcttcaggtaaagactacgacagtggactttatgaaaggaaccgaagtgttggaacacactgggaagcaaaatcaaccatagcaagaaattcctctggtttagatgatgctgagaagttatctgatctacctactaatataagtcttccaacaactaagagttctgaacgctggaattcgagtaaagtgccttatcatgaaaaaccaggtattggaacacgccgagaagtgagatcaacactggctagaaattattttgattcagatgacagtgaagaagaactagagcaacagcagattcctcagtcgaagcaatctggagtgctgatacagtcacgcaggacacgggaggtgacatcagacacaaagagagatggtcgtttccaaaccggagctcagtatggtgatgaaactgagagtgtgacaagtaagacacaagtccatcaaggattcaacagctcaagtactgaacggagtgaaaggagggatccaagtgtgtaccccagggttgcagtacagcgctcttcgtctaaagctgagcagattgaatctccgatggagagagggaagccacaaggagctgaaatgagaagcaccttatttcgaggaaatgaagaggacacagaaacctcatctggaactccaaaagaaagcacccccaaaacaccccctgcacatgttcatcccaagcttccaacagactatgattctttcgccgcacattttaggtctcttcgaacaaaccggccttaggtttacacgacatatagagtttggagtttcagttgaattaagtcatatatacgatactatgatacgttttatggaggttgagttgagatttgtacattatagcaacactgttttctggacactatcgtgctgtgctagtttgggcgtacaattcttttgttctcttgtatcctcatatactcaatagaatcatattgtaaagactttaatttcctgttagtgattattaataagcacggcatgttggcatatgtatagaacatgcggggttctttcattccattgtaacgggatctgctacactcatgctatgagattgttt

SEQ ID NO: 147735 - DNA, 1414 bp, Zea Mays
ccctgctacgtggttggtacctctagcacaagtgcatatgaacatatacgtccagcaagaccagatagtagataggcctcccacgacagcaactcacctcccgggcctaccaagcagtctctagaaacaaacaaacagcggcaatgtgctaatctcttctgcatttgggcacggcaatcctgacccgaccctccagatttcccgtcgccgagccacgcggatcgagtacccgtcgaactcgccgctgtcggatcgagtacccgtcgaactcgccgctgtcggatcgttctcgcttggggcgatcaagctaacgggatttgaggagatctaggccagccgcgggcagcagccatcagccatgagcgaggtgttcgagggctacgagcggcagtactgcgaggcctccgcctcgctctcccgcaagtgcacggctgcatccgccctcgatggagagaggaagaagcagaagctctccgagatccagtccggcgttgaggaagctgaatcgctgattcggaagatggacctggaggcaaggagcctacagcctagcattaaggctggtttgcttgcaaagctgagggagtataaatctgacctcaacaacgtcaagagtgagctcaagaggatatctgcgcccaatgccaggcaggctacccgggaggagctcctggagtctggaatggctgatactctcgcggtgtctactgatcagaggggaagattgatgatgacaactgaaagactgaatcagtccactgacagaattaaagagagccgaagaactatgttggagacagaagaacttggtgtctcgattcttcaggaccttcaccaacagaggcagtcactactacatgctcatactactgttgaaagaactgtgccgcttgctaaccatccagacccaaacaacgccaaaagctgccatgctggctgctgggctaccggggtcggggccgcgctgcgggcagaaggcgaagcggtggtggaccgcggagcgtggagggcaggagcggagcacgtagggcaggggcggaccgactcgccgatgcctagagcggcagagcccccaaggggataggacggcggagctggtcttgggcggttctggcggcgctgaggagagcggagatgaacttgttcgtcagttcgtgggaggctgggattaataggattttctaaattttggtatgtttgttgggctgaatcgaggtattgcccaagcaacactgagcaatattgggccctccacccctgtaaacagataaacatcgcttagagaggtttcttgcccccatgaaccacctagtaagtttttggtgtgtttggtttgaggacaagggtggatgtgatatgtccatccatagatttcaggatatgaatagaatatccatgttgtctgtttggttgg

SEQ ID NO: 147736 - DNA, 1125 bp, Zea Mays
ccctgctacgtggttggtacctctagcacaagtgcatatgaacatatacgtccagcaagaccagatagtagataggcctcccacgacagcaactcacctcccgggcctaccaagcagtctctagaaacaaacaaacagcggcaatgtgctaatctcttctgcatttgggcacggcaatcctgacccgaccctccagatttcccgtcgccgagccacgcggatcgagtacccgtcgaactcgccgctgtcggatcgagtacccgtcgaactcgccgctgtcggatcgttctcgcttggggcgatcaagctaacgggatttgaggagatctaggccagccgcgggcagcagccatcagccatgagcgaggtgttcgagggctacgagcggcagtactgcgaggcctccgcctcgctctcccgcaagtgcacggctgcatccgccctcgatggagagaggaagaagcagaagctctccgagatccagtccggcgttgaggaagctgaatcgctgattcggaagatggacctggaggcaaggagcctacagcctagcattaaggctggtttgcttgcaaagctgagggagtataaatctgacctcaacaacgtcaagagtgagctcaagaggatatctgcgcccaatgccaggcaggctacccgggaggagctcctggagtctggaatggctgatactctcgcggtgtctactgatcagaggggaagattgatgatgacaactgaaagactgaatcagtccactgacagaattaaagagagccgaagaactatgttggagacagaagaacttggtgtctcgattcttcaggaccttcaccaacagaggcagtcactactacatgctcatactactttgcacggagttgatgataacattggcaagagcaagaagatcctggctgcaatgtcaaagaggatggataggaacaagtggatcattgggggaatcatcacggctctcgctctggccatccttttcatactctacttcaagctcgctcattaagcttgcctgcagtcagatacgtccaactatgtaaacctaacgcacgttgttctgtcgtgctaactaaactagagaggttagtaaagcagtacttcgtatgt

SEQ ID NO: 147737 - DNA, 1344 bp, Zea Mays
ccctgctacgtggttggtacctctagcacaagtgcatatgaacatatacgtccagcaagaccagatagtagataggcctcccacgacagcaactcacctcccgggcctaccaagcagtctctagaaacaaacaaacagcggcaatgtgctaatctcttctgcatttgggcacggcaatcctgacccgaccctccagatttcccgtcgccgagccacgcggatcgagtacccgtcgaactcgccgctgtcggatcgagtacccgtcgaactcgccgctgtcggatcgttctcgcttggggcgatcaagctaacgggatttgaggagatctaggccagccgcgggcagcagccatcagccatgagcgaggtgttcgagggctacgagcggcagtactgcgaggcctccgcctcgctctcccgcaagtgcacggctgcatccgccctcgatggagagaggaagaagcagaagctctccgagatccagtccggcgttgaggaagctgaatcgctgattcggaagatggacctggaggcaaggagcctacagcctagcattaaggctggtttgcttgcaaagctgagggagtataaatctgacctcaacaacgtcaagagtgagctcaagaggatatctgcgcccaatgccaggcaggctacccgggaggagctcctggagtctggaatggctgatactctcgcggtgtctactgatcagaggggaagattgatgatgacaactgaaagactgaatcagtccactgacagaattaaagagagccgaagaactatgttggagacagaagaacttggtgtctcgattcttcaggaccttcaccaacagaggcagtcactactacatgctcatactactttgcacggagttgatgataacattggcaagagcaagaagatcctggctgcaatgtcaaagaggatggataggaacaagtggatcattgggggaatcatcacggctctcgctctggccatccttttcatactctacttcaagctcgctcattaagcttgcctgcaggtaggttccttccacatatctgtgctcagtaattgtgtgataagagttgtctgaatgctgtgtattgagcgacacacggctcttgaagcatcatttattccctcccaaacctgtaaacttaacgtggttcatgttgtgtacagtcagatacgtccaactatgtaaacctaacgcacgttgttctgtcgtgctaactaaactagagaggttagtaaagcagtacttcgtatgtaactgttgtgtgtgcatcggtctattcgaactgctgtggctgtgggccttggaatttattgtgattaggcagctct

SEQ ID NO: 147738 - DNA, 1157 bp, Zea Mays
ccctgctacgtggttggtacctctagcacaagtgcatatgaacatatacgtccagcaagaccagatagtagataggcctcccacgacagcaactcacctcccgggcctaccaagcagtctctagaaacaaacaaacagcggcaatgtgctaatctcttctgcatttgggcacggcaatcctgacccgaccctccagatttcccgtcgccgagccacgcggatcgagtacccgtcgaactcgccgctgtcggatcgagtacccgtcgaactcgccgctgtcggatcgttctcgcttggggcgatcaagctaacgggatttgaggagatctaggccagccgcgggcagcagccatcagccatgagcgaggtgttcgagggctacgagcggcagtactgcgaggcctccgcctcgctctcccgcaagtgcacggctgcatccgccctcgatggagagaggaagaagcagaagctctccgagatccagtccggcgttgaggaagctgaatcgctgattcggaagatggacctggaggcaaggagcctacagcctagcattaaggctggtttgcttgcaaagctgagggagtataaatctgacctcaacaacgtcaagagtgagctcaagaggatatctgcgcccaatgccaggcaggctacccgggaggagctcctggagtctggaatggctgatactctcgcggtgtctactgatcagaggggaagattgatgatgacaactgaaagactgaatcagtccactgacagaattaaagagagccgaagaactatgttggagacagaagaacttggtgtctcgattcttcaggaccttcaccaacagaggcagtcactactacatgctcatactactttgcacggagttgatgataacattggcaagagcaagaagatcctggctgcaatgtcaaagaggatggataggaacaagtggatcattgggggaatcatcacggctctcgctctggccatccttttcatactctacttcaagctcgctcattaagcttgcctgcagatgcttcctgaatgaatgagtggtactagactgataggtgggccttggcatctagtgtgtatgcgcagaaggtgcaggtctatcagtactgcagtaacttcagttacagagcttggttggc

SEQ ID NO: 147739 - DNA, 3705 bp, Zea Mays
cgttaaataaaataaattagaaagctatctatccaggtggattagggtttttgcctcggctagcagtagtagctaatttggacgcaggagatacggagtagggcgaaccgcgaggagagcaagctatgggcgcgccgaagcagaagtggacgtcggaagaggaggatgcgctccgccgtggcgttcgcaagcacggcgccggcaaatggcggaccatccagaaggacccccagttcagcccgatcctctcctcccgctccaatatcgacctcaaggacaaatggaggaatttaagtttcagtgcaagtggactgggatcgagtaaagtacgggttccaaagataactggatcctcatcttcaccatcatctagctcacaggctctgcttctcccagcggcaaataatgttacagaagctatgctgcctgcagatgctgacaaaaagccacgggatgggaaaactccgccaaagtatggtgccatgattatggaagctctttcggaattgaatcagccgaatggttcagatattgatgcaatcttcgacttcataaagcaaaggcatgtggtgcaatcgacctttagaagatttctaccctcaaagttacggcgacttgcagactcaaacaaaattgaaaaggtcgataacttctataggctcccagattcatttgcaacaaggactccagctcaaataaaagtttcagatccaaaacagaaggatccatctaaggcgtcaaagaccataggcttgtttgctgcctccagccctgcactagaggcagcgatggcagctgctgtcaaggtgactgacgccgaggcaaaagcacatgatgcacatgatcagatgatggaggcagaaaggatgctgaagatggctgaggataccgagtctatcctcacaattgcagcagagatctatgatcgatgttcaaggggggagataaccacattagttccagtggcgcaaagggagttttgaaatctattggagactcttgtcttgtacatgggataggttttggaatccggaggcccttacttgggatatgccctagggttaataacaacagcgcaccgcctgtcttcagactttgtaatgatatgtaatcccatctttcccattcccagcctgtcactgcaagctgcggtcgtgaatcctgatggcagtaaagttttttttttgttgacatgacgaaagaatagagcaggaaaaagtggtttaaacagatgaggtagggtagtaggatggtaaagtgttactggtataagataatataatgtgccgcagttattttccaaatcgagaatgttgtgttctgtgagaactgttcctttgagagcactttcttgttactagtgcgacattgccgatagcctttccaacgacagagattcgaccataacagtcttctctgcatttctgttttagtaggatgatgtcaactttctagttacatagtgtttgactggtgcattgccatattataagtgtatctgaatcaagtatcgaaagtactatgttggccctgcttaaaatgttacttatgtttttatcgatcgatcgatcaccaccatggttacgagtaaacatcttatgcttacgattttataatcttggtgaaaaagaacttacagcagtaacgcatttgttttttctgctggagtgctgatgagggcgcttcgctaattgctacgcttacgaggagaggagcccacaagacgagatctacccgctgccccctcgcaacgcattcccctcccccgcgtcgtcatctccccaaatccccccaaaccctaccgccgatccgggcccagatcgccatggccgcgcccaacagcaatgacgccgccagcgccagcggcaccggcccggctggcgaggaggacatctccatcgaggcgttggcgcggcgcgtgcaagagcacatgaccctcaactcgaaccccgccgctcgccgccacaagttctgggagacacagcccgtcggccagttccgtgacgccgccgacgcatcgctaccgaacggccccatcgagccgcccacgccactctccgaggtgcgcgccgacccctacccgctgcccgccgccttcgagtggctcacctgcgacctcgatgacgacgcgctcctcgccgacctctactcgttgctcgcccacaactacgtcgaggatgacgagaacatgttccgcttcaactactccccggccttcctccgctgggcgctcaagccgccgtccttcttccgggcctggcacatcggcgttcgcgccaaggagtccaagaagctcgtcgccttcatctcgggcgtccccgcccgcatccgcgcccgcgacgacgtcgtccgcatggccgagatcaactttctctgcgtccacaagaagctccgatccaagcgcctggcacccgtgctcatccgggaggtcacccgccgcgtccaccaggagaacatctggcaggctgcatacaccgcggggatcgtcctcccaacccccatcaccacctgccgctactggcaccgatccctcaaccccaagaagcttatcgatgttggattctctcgccttggtccgcgcatgactatgagccgcacggtccggctatacaagctgcctgatgcgccgctcacccctgggtttcgcaggatggagctgcgggatgtcgctgcggtcacacggctgctgagggcataccttgcgaggtttgtggtagcaccggattttgatgaggtagatgtggagcactggttgctgccccaagaggatgtggtggacagctaccttgtggagagccctgagacgcatgaggtcacagatttctgcagcttttacacactgccctcatcagtgttgaacaatgctaactatgcgacgctcaaagcggcgtactcatattacaacgtttcaaccaaaactccattgcagcagctgatgaatgatgctcttattgttgccaaacggaacaattatgatgtgttcaatgctctcgatgtcatggagaatgagtcattcctcaaggagctcaagtttggtcctggagatgggcagctccactattacctctacaattaccgtattcgcaatggcatcaagccctctgagcttggtcttgtgctgttatagggcagtctaatcaggacagtcctgagtttacaccttccaggtaattcttgtgtcactgatttattatttgaattttatgattgttaaaggtgatgatttggctcccttgctgtaggtctcactgtgcaatcccagtggtttcctcattttgtctattgtggtagtggtttctttgatatgattgccatgcccattgatgggagtccaagatgatttgcaaacaaggagactggaattagaaatcctttccttaatttaaggttattattcccattagtgacattttgtgtgcgtggtccacaacttgtatgctggcattgattttactgagaaattttgatacaacttgtgttatcgaagttgtttgtgtgctgttgtgttatgtttgcccatgtatggctgtatggatgtcttgatgctaggacatttgccatagctctttctgccctacccaaatggtttcttttttattatgattatgagcaggttctattattagttttagtttttgtcattctttgtccacattccaaaataaccagaaatgtactgattgtggccttctgggatgtctcaac

SEQ ID NO: 147740 - DNA, 3304 bp, Zea Mays
tagtgtttgactggtgcattgccatattataagtgtatctgaatcaagtatcgaaagtactatgttggccctgcttaaaatgttacttatgtttttatcgatcgatcgatcaccaccatggttacgagtaaacatcttatgcttacgattttataatcttggtgaaaaagaacttacagcagtaacgcatttgttttttctgctggagtgctgatgagggcgcttcgctaattgctacgcttacgaggagaggagcccacaagacgagatctacccgctgccccctcgcaacgcattcccctcccccgcgtcgtcatctccccaaatccccccaaaccctaccgccgatccgggcccagatcgccatggccgcgcccaacagcaatgacgccgccagcgccagcggcaccggcccggctggcgaggaggacatctccatcgaggcgttggcgcggcgcgtgcaagagcacatgaccctcaactcgaaccccgccgctcgccgccacaagttctgggagacacagcccgtcggccagttccgtgacgccgccgacgcatcgctaccgaacggccccatcgagccgcccacgccactctccgaggtgcgcgccgacccctacccgctgcccgccgccttcgagtggctcacctgcgacctcgatgacgacgcgctcctcgccgacctctactcgttgctcgcccacaactacgtcgaggatgacgagaacatgttccgcttcaactactccccggccttcctccgctgggcgctcaagccgccgtccttcttccgggcctggcacatcggcgttcgcgccaaggagtccaagaagctcgtcgccttcatctcgggcgtccccgcccgcatccgcgcccgcgacgacgtcgtccgcatggccgagatcaactttctctgcgtccacaagaagctccgatccaagcgcctggcacccgtgctcatccgggaggtcacccgccgcgtccaccaggagaacatctggcaggctgcatacaccgcggggatcgtcctcccaacccccatcaccacctgccgctactggcaccgatccctcaaccccaagaagcttatcgatgttggattctctcgccttggtccgcgcatgactatgagccgcacggtccggctatacaagctgcctgatgcgccgctcacccctgggtttcgcaggatggagctgcgggatgtcgctgcggtcacacggctgctgagggcataccttgcgaggtttgtggtagcaccggattttgatgaggtagatgtggagcactggttgctgccccaagaggatgtggtggacagctaccttgtggagagccctgagacgcatgaggtcacagatttctgcagcttttacacactgccctcatcagtgttgaacaatgctaactatgcgacgctcaaagcggcgtactcatattacaacgtttcaaccaaaactccattgcagcagctgatgaatgatgctcttattgttgccaaacggaacaattatgatgtgttcaatgctctcgatgtcatggagaatgagtcattcctcaaggagctcaagtttggtcctggagatgggcagctccactattacctctacaattaccgtattcgcaatggcatcaagccctctgagcttggtcttgtgctgttatagggcagtctaatcaggacagtcctgagtttacaccttccaggtctcactgtgcaatcccagtggtttcctcattttgtctattgtggtagtggtttctttgatatgattgccatgcccattgatgggagtccaagatgatttgcaaacaaggagactggaattagaaatcctttccttaatttaaggttattattcccattagtgacattttgtgtgcgtggtccacaacttgtatgctggcattgattttactgagaaattttgatacaacttgtgttatcgaagttgtttgtgtgctgttgtgttatgtttgcccatgtatggctgtatggatgtcttgatgctaggacatttgccatagctctttctgccctacccaaatggtttcttttttattatgattatgagcaggttctattattagttttagtttttgtcattctttgtccacattccaaaataaccagaaatgtactgattgtggccttctgggatgtctcaactcatttgtccttttctaggttataacatcttctaaaaagtaataacccctgcttgatgtcttattgcttgcgcattactggaaatagattgattatcatgggctcatggctgtgtgggtgtcacaatcgttcgtccttttccaggttatgacatgtttctagcagtaataactcctaggtactctttggttcacatatttgtaatgtaatgaataactgataacgttaaaccatgtttgtttaagctaaactgtaatcagataccacactagaaattgataccggtctattcaaacttaatatcgctggtactcaagtgtgaatcattaccgttgccatttacgtaatatttcgtgaaccaaacagcaccctagttgacacttgtagcgcctaggcacttcaccaactcagtctgctgtattctcctctatataatgctgttataggattctagctttctctgtttggaatatgcatcattgacttgtggttaacatgaatcatttagattattctgagataatattagctgcttacaaatagtttaactggtggcttgcctaaataattcactacctaaaaatttgcatgcaacagccgtttaatcctttaaggttgtgcaattgtagctccattttgtagctgctggtgataattatacaaaataaatgtagaccaggcatgtaactttatttccagcatacttatggggtgtgatttgtgcttgccatttgttgcactgcagttccaagctgtgctgatggtctgttgaatataaatgtgaatcgatatctgcacatgtaaggaatctaaaagcaggcgtgcagtgcagcaaaccctgatgttcatccattcattatccaatttgtatgccggcatgttcaagagatagcttaagttattgcatccccagctgagcagagggcaagtcagttgttattgtgtgctcgctcagtcgctccgttccaaataaaatttgttttagttaattaataggttcatataatttttgatgtatatgttttatatatgtctagattcatcatcatctatttgaatatatacataaaaataagagctaaacgaggaagaaagtattattttgaggttgccaatttgggcttatattcttgg

SEQ ID NO: 147741 - DNA, 1284 bp, Zea Mays
gttgtccatctatttcaggctctatgccgtgggtatcctactgagtttgcatcatatttccattattgccgctcactgcggtttgatgacaagcctgactgttcatacctcaagcgattattccgtgaccttttcattcgcgaaggttttcagtttgactatgtgtttgactggacaatactgaagtaccaacagtctcaaattgccactgctccaccccgtgcagtagtgagcctctctaatcttccctcgttgagttacccaccaaacactgcagggataactttgatgacctacctttgttacagggccatggcgcggggccttctgggttggcacccgtgttacagaatgataggcaatcaggccctgaggaagcaaggactagtggttggtcatcaatggatcggcgtcgtgccccactaccaattacaagtgtggggacattatctaagcagaaagcaccgatagggaatgatgctactgtttctagagatgctgtgatatctggaccaaattttatgggaaggtcaagtggatcttctaggaggcctgttgtttcgagtagccgtgatatggtggccactgacagttccgagccttcacgagcacgtgcaaccgacgcaagcccaggggcgttccgcagagcctcaggtcctcagagaagctcacctgtccattccgcagaacagaagcgctcatcctcaggccggcatccgtctaacgtgaagaactacgattctgctctcaaaggcattgaaggtcttcattttgatggcgacgagagggttcagtactagagccgcaggaaattctacatgcactgtaaaaatcataatcaggtggtaagcatcgtgtttcctgttcgggttttggatcaacaggaaatgaaatgctggaaggaggatctggtcacgggttgtgcggtttcaggtggtcctctgagcaaggtaaataaacggtcctatctgaggcgcttcatgcctagctctcataacgttgtcgttgtgtacgtaaatgcctcttgtagcctgaatgtcaggcgcccggattcatgaatctattttattgttgtattccttacgatgttccatcttgggactacaatgctgcaactggtagggcttgatttggaacactggaattcgagcatgtagaatttttaaatcggttcattggacgaatttgtctgtaacacgtacctgacttgtaatgtgatctgtcaggacaactgatgttatttgccaatgtgataatcacgaaaaagaagggagacttagaaga

SEQ ID NO: 147742 - DNA, 1204 bp, Zea Mays
gttgtccatctatttcaggctctatgccgtgggtatcctactgagtttgcatcatatttccattattgccgctcactgcggtttgatgacaagcctgactgttcatacctcaagcgattattccgtgaccttttcattcgcgaaggttttcagtttgactatgtgtttgactggacaatactgaagtaccaacagtctcaaattgccactgctccaccccgtgcagtaggccatggcgcggggccttctgggttggcacccgtgttacagaatgataggcaatcaggccctgaggaagcaaggactagtggttggtcatcaatggatcggcgtcgtgccccactaccaattacaagtgtggggacattatctaagcagaaagcaccgatagggaatgatgctactgtttctagagatgctgtgatatctggaccaaattttatgggaaggtcaagtggatcttctaggaggcctgttgtttcgagtagccgtgatatggtggccactgacagttccgagccttcacgagcacgtgcaaccgacgcaagcccaggggcgttccgcagagcctcaggtcctcagagaagctcacctgtccattccgcagaacagaagcgctcatcctcaggccggcatccgtctaacgtgaagaactacgattctgctctcaaaggcattgaaggtcttcattttgatggcgacgagagggttcagtactagagccgcaggaaattctacatgcactgtaaaaatcataatcaggtggtaagcatcgtgtttcctgttcgggttttggatcaacaggaaatgaaatgctggaaggaggatctggtcacgggttgtgcggtttcaggtggtcctctgagcaaggtaaataaacggtcctatctgaggcgcttcatgcctagctctcataacgttgtcgttgtgtacgtaaatgcctcttgtagcctgaatgtcaggcgcccggattcatgaatctattttattgttgtattccttacgatgttccatcttgggactacaatgctgcaactggtagggcttgatttggaacactggaattcgagcatgtagaatttttaaatcggttcattggacgaatttgtctgtaacacgtacctgacttgtaatgtgatctgtcaggacaactgatgttatttgccaatgtgataatcacgaaaaagaagggagacttagaaga

SEQ ID NO: 147743 - DNA, 1450 bp, Zea Mays
gctctatgccgtgggtatcctactgagtttgcatcatatttccattattgccgctcactgcggtttgatgacaagcctgactgttcatacctcaagcgattattccgtgaccttttcattcgcgaaggttttcagtttgactatgtgtttgactggacaatactgaagtaccaacagtctcaaattgccactgctccaccccgtgcaggccatggcgcggggccttctgggttggcacccgtgttacagaatgataggcaatcaggtgatttggtgcactccttaatttgccttgtttgcatttcagcatttgattgagtaatgctcatttgtttatcttgcaggccctgaggaagcaaggactagtggttggtcatcaatggatcggcgtcgtgccccactaccaattacaagtgtggggacattatctaagcagaaagcaccgatagggaatgatgctactgtttctagagatgctgtgatatctggaccaaattttatgggaaggtcaagtggatcttctaggaggcctgttgtttcgagtagccgtgatatggtggccactgacagttccgagccttcacgagcacgtgcaaccgacgcaagcccaggggcgttccgcagagcctcaggtcctcagagaagctcacctgtccattccgcagaacagaagcgctcatcctcaggccggcatccgtctaacgtgaagaactacgattctgctctcaaaggcattgaaggtcttcattttgatggcgacgagagggttcagtactagagccgcaggaaattctacatgcactgtaaaaatcataatcaggtggtaagcatcgtgtttcctgttcgggttttggatcaacaggaaatgaaatgctggaaggaggatctggtcacgggttgtgcggtttcaggtggtcctctgagcaaggtaaataaacggtcctatctgaggcgcttcatgcctagctctcataacgttgtcgttgtgtacgtaaatgcctcttgtagcctgaatgtcaggcgcccggattcatgaatctattttattgttgtattccttacgatgttccatcttgggactacaatgctgcaactggtagggcttgatttggaacactggaattcgagcatgtagaatttttaaatcggttcattggacgaatttgtctgtaacacgtacctgacttgtaatgtgatctgtcaggacaactgatgttatttgccaatgtgataatcagttcatccatctcttcacgcacctgacaatattggttggcctgtttggttcggcttttttatgaatagcttttctgaaaagctggttgtggagaaaagctggtggttagaatttaggtgtttggttcgcctgatgtggagaaaagctgttggttagaatttaggtgtttggatacgcagattctcagattgcagattctgtttgaacaaacga

SEQ ID NO: 147744 - DNA, 916 bp, Zea Mays
cattgatttcatattttcttcggtacactttttctttgattcatgatactcataatttattgcctccattctgaaaataaacagcagaaaagacgctcaacctcggggcttaatttagttgctgcttctttttagatatctggaccaaattttatgggaaggtcaagtggatcttctaggaggcctgttgtttcgagtagccgtgatatggtggccactgacagttccgagccttcacgagcacgtgcaaccgacgcaagcccaggggcgttccgcagagcctcaggtcctcagagaagctcacctgtccattccgcagaacagaagcgctcatcctcaggccggcatccgtctaacgtgaagaactacgattctgctctcaaaggcattgaaggtcttcattttgatggcgacgagagggttcagtactagagccgcaggaaattctacatgcactgtaaaaatcataatcaggtggtaagcatcgtgtttcctgttcgggttttggatcaacaggaaatgaaatgctggaaggaggatctggtcacgggttgtgcggtttcaggtggtcctctgagcaaggtaaataaacggtcctatctgaggcgcttcatgcctagctctcataacgttgtcgttgtgtacgtaaatgcctcttgtagcctgaatgtcaggcgcccggattcatgaatctattttattgttgtattccttacgatgttccatcttgggactacaatgctgcaactggtagggcttgatttggaacactggaattcgagcatgtagaatttttaaatcggttcattggacgaatttgtctgtaacacgtacctgacttgtaatgtgatctgtcaggacaactgatgttatttgccaatgtgataatcacgaaaaagaagggagacttagaaga

SEQ ID NO: 147745 - DNA, 1133 bp, Zea Mays
gagacgacctagagttgagtcggttccagcagcgcgtgaaactgaaaaaggtttcccatctcatgcttctctggcaatttaggtctttgatattttaataataaattctcccgcatattactcgtccctctatgggctttgtggccgccctgtcggaaaacccgcgcaagaaaagagaaacccgcaagccgcccgcgcagaccatcgccccgttgccacggtcaaattcgtcggcgtttggtgccgcggcgtgactgtccgccggtcgcggcgcgcgtcctgcctggttggatcccttcggacttccgcagattcccgcgcgggggtgtttgatttggatgagaggagcgcggcggcgggatggggaccccttcgcagggctcggcggccgtgacggcggcccgggtcgacctctgcgcgctcgacctcatgcctgtctttgccaaggagatgatcgccggcggcgtcgccggcgccttctccaaaaccgccatcgcgccgctcgagcgcgtcaagatattgctgcagaccagaacaaatgagtttgggtctcttggagttctcaaatcattgaagaaactgagacaacttgatggagtcatggggttttacaaaggaaatggtgccagtgtgatgagaattgttccttatgctgcattacatttcatggcatatgagcggtaccggtgttggattttgaataactgtccctcactgggaacagggcctttagtagatcttttagccggttcagcatcagggggaactgctgtattgtgtacttatcccttggatttggcccggactaagcttgcctttcaggtcaatagttcagatgaactcagcagagctttgaaaaggggaagtccccagccagcatatggaggaatcattgatgtctttagatgtgtttactcagaaggtggagtgcgggctctttaccgaggtgtaggtatagttattcccttcatatgtcatattatcattaattagtcaagcacatggaaatctctagtcagttcactaggcgcatcatattttagttgtctggatgaattttttacttgttgatgtagttatactgttcagagtttagtcagcacactagacgctataaacagtttagattcagg

SEQ ID NO: 147746 - DNA, 1227 bp, Zea Mays
gagacgacctagagttgagtcggttccagcagcgcgtgaaactgaaaaaggtttcccatctcatgcttctctggcaatttaggtctttgatattttaataataaattctcccgcatattactcgtccctctatgggctttgtggccgccctgtcggaaaacccgcgcaagaaaagagaaacccgcaagccgcccgcgcagaccatcgccccgttgccacggtcaaattcgtcggcgtttggtgccgcggcgtgactgtccgccggtcgcggcgcgcgtcctgcctggttggatcccttcggacttccgcagattcccgcgcgggggtgtttgatttggatgagaggagcgcggcggcgggatggggaccccttcgcagggctcggcggccgtgacggcggcccgggtcgacctctgcgcgctcgacctcatgcctgtctttgccaaggagatgatcgccggcggcgtcgccggcgccttctccaaaaccgccatcgcgccgctcgagcgcgtcaagatattgctgcagaccagaacaaatgagtttgggtctcttggagttctcaaatcattgaagaaactgagacaacttgatggagtcatggggttttacaagtatgtagcaatttgaatattgcattatttgcactgaatcatcaagattaggatataatattgattactaaccttgtattgatgctaccttcagaggaaatggtgccagtgtgatgagaattgttccttatgctgcattacatttcatggcatatgagcggtaccggtgttggattttgaataactgtccctcactgggaacagggcctttagtagatcttttagccggttcagcatcagggggaactgctgtattgtgtacttatcccttggatttggcccggactaagcttgcctttcaggtcaatagttcagatgaactcagcagagctttgaaaaggggaagtccccagccagcatatggaggaatcattgatgtctttagatgtgtttactcagaaggtggagtgcgggctctttaccgaggtgtaggtatagttattcccttcatatgtcatattatcattaattagtcaagcacatggaaatctctagtcagttcactaggcgcatcatattttagttgtctggatgaattttttacttgttgatgtagttatactgttcagagtttagtcagcacactagacgctataaacagtttagattcagg

SEQ ID NO: 147747 - DNA, 547 bp, Zea Mays
acgcacgtcgtcgtcggaagttactgccgtcgtccgaggaaaaccgcgcgcggccgccgacgaacatggcgagggcagcggctatgatggtagtgctcgccgtggtggcgctggcgctagccgcagcgccgcgcgcggaggctgggcagaactgcatctgtgagtgcatgaagctgtgcgtgcggacgcggatcccgagcatgggccagtgcgcgggcaagtgccgggagatggcctgcaccaagagctgcgaggatgcctgcacgcgcaagggcttccccgggctgcccagcgagggcatccccacctgcgagctggagccgctcacccccgacgaaacgcacatgttgcactgaacgatgatgcacttatggggccatgtccaccggagcttttactgtttgcgtgtcgcgccggtcggcccagcggcggcggtctatgctcccgatgtgcatgaaaaattcccgctgttttctttggtgtttggtatgtacgttattatgtacgctgcctcttctcaaagcatagtatgcatagttctgttttc

SEQ ID NO: 147748 - DNA, 1851 bp, Zea Mays
cagaaaaggagcctcaccctacagcctatacgtaaaagcgggcccggtcttgaaatccataaagaacgcctatttcagtccatttgcacttcctcgccaccgccgcttcgttggtacatctctctcttccccacgccatccccgacaagcggcaaataacctctccggcggcgagacagatggagtcgacctccggcgaggatgctccgaagcgcaacccgctcccgtccgcgctcgtctccaacctacagtccgtgctcgccgcccgccgcccgtccgcggcagaggtcagcaccgccgccacagctagcgaggctgaggctgaggctcaggaagcggaggcgtccgatgcccccgcgggagatgggacgccggcgaggcccatcgtgctgctgacctgtgccggggggatccggtcggcgggtctcgcggcgctcgtcgacgccctcgttgccgccggccgctgcgacgtccacgtgtgtgcccccgaatcggacaagcaagcctgtggccattcaattaccatccgtgaaaccatcgctgcgtcatccgtggatttcacaggcgctaaagcttttgagacatcaggcacgccggttgactgtgtctcgttggccttatctgggaggctgtttccttggtcgtctcctgctttggtgatcagtggtatcaacacgggatcaaattgtggatatgagataactctgtaggttccactcttctgccattgctgctgcgagggaggccttagtgtatggggtgccttcaattgcaatctcattgaattggaagaaggacgaaaccaaagacagtgacttcaaggatgcagctcaggcctgtttaccattgataaatgctgctttggatgacattgagaaaggaactttcctcagaggttgcctattgaatattggagttccaagtgcaccatctgcaaataagggtttcaagttgaccaaacagagtggatacagtcctgctcaaagttgggaagctgtgtcaacaagcaggcccttatctgctactcacttcatgggcatgcatcaaagcctcggtattcagttggcacagcttgggaaggatgcatctgcagcaggagctgcacgtagagttagtgcccaacgaaaggcagtcgaggttgagtctgttgcagctgctggtaaacaagagattcgagaagtagtgaagaagttattccgtgctgagtttgtcgagaagcgatatgaaggtttagatgaggatatcgatttgagagctttggagaatggatttatatctgtcacccctctgaatgttcatggacaagtggagcttgaaatcggagccacagcttctgattggctctcagcagctgtatcactagacaaagaaaaggtagctgcttcagctacagctgaccaacaagatgttgcagctgaggaaaaggaagctccctcagcagcctaacaaacacgcagacatgtccacactccgtaggtgtctttagttcctgtggtgatgtcgatcttttattacctcttgtcagtttggtttgtctagtgttttgccctcaatatttgtttgttgcaatgtctattttttttgttcaccttctctgccgattaccggcttccttggccctacaaatgatttggtgcaggcagccctgcattttggatgtaacgatgtaggctacggcaactaccagatgaatactgcccagcccccactatttttttcagtgtggtttgttataggaaggtgttgtattcagcatggggtatgtgattgattttgtcttgctcccgtctgaaccatggcaaccaaatgtggccgtatggatcccttcactttacaagaattgaaatttac

SEQ ID NO: 147749 - DNA, 1890 bp, Zea Mays
cagaaaaggagcctcaccctacagcctatacgtaaaagcgggcccggtcttgaaatccataaagaacgcctatttcagtccatttgcacttcctcgccaccgccgcttcgttggtacatctctctcttccccacgccatccccgacaagcggcaaataacctctccggcggcgagacagatggagtcgacctccggcgaggatgctccgaagcgcaacccgctcccgtccgcgctcgtctccaacctacagtccgtgctcgccgcccgccgcccgtccgcggcagaggtcagcaccgccgccacagctagcgaggctgaggctgaggctcaggaagcggaggcgtccgatgcccccgcgggagatgggacgccggcgaggcccatcgtgctgctgacctgtgccggggggatccggtcggcgggtctcgcggcgctcgtcgacgccctcgttgccgccggccgctgcgacgtccacgtgtgtgcccccgaatcggacaagcaagcctgtggccattcaattaccatccgtgaaaccatcgctgcgtcatccgtggatttcacaggcgctaaagcttttgagacatcaggcacgccggttgactgtgtctcgttggccttatctgggaggctgtttccttggtcgtctcctgctttggtgatcagtggtatcaacacgggatcaaattgtggatatgagatgttccactcttctgccattgctgctgcgagggaggccttagtgtatggggtgccttcaattgcaatctcattgaattggaagaaggacgaaaccaaagacagtgacttcaaggatgcagctcaggcctgtttaccattgataaatgctgctttggatgacattgagaaaggaactttcctcagaggttgcctattgaatattggagttccaagtgcaccatctgcaaataagggtttcaagttgaccaaacagagtggatacagtcctgctcaaagttgggaagctgtgtcaacaagcaggcccttatctgctactcacttcatgggcatgcatcaaagcctcggtattcagttggcacagcttgggaaggatgcatctgcagcaggagctgcacgtagagttagtgcccaacgaaaggcagtcgaggttgagtctgttgcagctgctggtaaacaagagattcgagaagtagtgaagaagttattccgtgctgagtttgtcgagaagcgatatgaaggtttagatgaggatatcgatttgagagctttggagaatggatttatatctgtcacccctctgaatgttcatggacaagtggagcttgaaatcggagccacagcttctgattggctctcagcagctgtatcactagacaaagaaaaggtagctgcttcagctacagctgaccaacaagatgttgcagctgaggaaaaggaagctccctcagcagcctaacaaacacgcagacatgtccacactccgtaggtgtctttagttcctgtggtgatgtcgatcttttattacctcttgtcagtttggtttgtctagtgttttgccctcaatatttgtttgttgcaatgtctattttttttgttcaccttctctgccgattaccggcttccttggccctacaaatgatttggtgcaggcagccctgcattttggatgtaacgatgtaggctacggcaactaccagatgaatactgcccagcccccactatttttttcagtgtggtttgttataggaaggtgttgtattcagcatggggtatgtgattgattttgtcttgctcccgtctgaaccatggcaaccaaatgtggccgtatggatcccttcactttacaagaattgaaatttacggccccgtaggaattggaatcttactattgaaatagtatattttttttg

SEQ ID NO: 147750 - DNA, 1133 bp, Zea Mays
atggccatattcatctgcatagttgcctctctttttttctccttttttttgctgaagaaaaggctactgtatgctgtattcgttgtatcaagtgaaaatgccacggttgctgaactggctacaactttacaagccgacctttaccagctccaggcagctgcatcgtttgcttgccgactaggatgggctgtgaagcttctggataccgactctgttcttagggattcgagcactcctgcactgtccaacaacattctcagcgatgaagttgaaagctctcgtacgagtgtcgcctcagaaaagtctggtcatgagttgcttagcagtgattctgatggacacaagaactccgggatggcttatgtgggcttcattgtcgatgctaatgtaacttcatacttaatgatgggctcactatctccaggtttgaagtcgcatgctgtgacactatacgaggcaggaaagcttggcgattcttgtaaggctgatctatgcaatgatcttgccagtttagaggggaaacggtttgaaggtgttgtttctgttggtcgcttggccagcgaccgtgcaggtggtgccagagctgcttggggtcatggaattggtcagcgaggcgggggcgagaggatccctgggatgcgccttccatcgaccgagcgtcgacgcggggcgagaatggcggagcgaccaagagtggatttcccttgctggttttagagctcagctacctatgttaagtaaaaaaaaggaaacccaacgatcgtcaatctcgtcatgtctctgccgcacctcagtctccgccgcacagatcggcatgccacacgtgcgccctggactgcagcccctgcacctccctccatcgccctcgtcaatcccgtcatggaaggcccgtcctcgcctccccgcgcgcggcgcctccctggatcttccccaccatcctcgcctctcggcgcgtggggattccctggatcttcctcacctcccgtcaacaaaacaaaaggaaacacaacggcctcttaccatctttttcctcgcctcccgttcctcctcctaccttgtacggcgactccaaacagcaaaagtgaggaggaagatagtggcactgcagcgctcgtggaagaagaagcggtgaa

SEQ ID NO: 147751 - DNA, 2061 bp, Zea Mays
ctcttgattgaagaagcatactaggagtattgaatataacaggaaaataaagttaaaagaacaattgaacttgaaggaatatagacacgctaatagaagtggagggaaagaacgggaagaaaaatcggaaactaacttcttcacaagctaagtccatgatccagcccaacttacagaagcccacaaagtattcacttaacgtctgtaactaccggcccatcccaggaagaggccccgctcctctccctgctcgctgcacagggactcggcctccgggacggcagacccacaagcgccagcacgctcgagactgtgccgtgggagtgggaggttcctcaggtgctgagcagtcgccggcggcgaccgccggtgtcggagatgaaggagagaagcggctccagggcggcggtggacgagcgctacgcgcagtggaagtcgctcatccccgtcctctacgactggtttgccaaccacaacctcgtctggccatccctctcctgccggtgggggccacagtttgagaaagctacctacaagaatcgtcagcgcctgtacctatctgaacagacggatgggagtgtgcctaatactctggttatcgcaaattgtgaagttgtgaaacctagggttgcagctgctgaacatatctcacagttcaatgaggaagcacggtcaccttttgtaaagaagtacaaaactatagttcatcctggtgaggttaacagaatcagggaacttccacagaacagtaagatcatagccactcacactgacagtccagatgtacttatttgggatgttgaagcacaaccaaatagacatgctgtcctaggagcaagcgagtctcgccctgatctgatattaacaggacataaggaaaatgcggaatttgcgcttgccatgtgtccagcagaaccatatgtcctatcaggaggaaaggacaaatctgttgtcttgtggagcatccaagaccatatatctgcccttggggattcctcgtcttctcctggagcatctggcagcaagcagtctattaaaactgcaaatgaaaaggagagccctaaagttgatcctagaggtatatttcatggacatgacagcacggttgaagatgttcagttctgcccttccagtgcgcaggagttttgtagtgtgggtgatgatgcttgtcttattctgtgggatgctcgaactggcactgccccagctgttaaggttgagaaagctcacagtggagatgttcattgtgttgattggaatccccttgatgttaactatatcttaactgggtctgccgataactctgtccgaatgtgggatcgtcggaatctgggttcaggaggagctggttctccaattcacaaatttgaaggccataaagctgctgttctttgtgttcagtggtcacctgacagagcatctgtttttggaagttctgcagaagatggtttcttaaacgtgtgggatcatgagaaggtggggaagaagaaaaattctaatgtcccagccgggcttttctttcagcacgctggtcatagggataagattgtagacttccactggaattcgtcagatccttggacaattgtcagtgtctctgatgatggcgagagcactggtggaggtggaacactgcagatttggcgcatgagtgatttgatctaccgcccagaggatgaagttcttgcagagctggagaatttcaaggctcatttggccagctgtgcaccgaagaattgagtcatgtgggttacctgcggaatgcaatcctgtggaaactgagtaggtgatgtagtttcatggccataagtatgagccccagttgacattgaatctgtcctctgatgctcctagagctgtacccttgaggggcttgtgcttttgtgagcttgtgttaaacctgctgtacgagtaaactagtatgtccgcaaacgcgtcagagccggatgtctgtgggccagctattgggatactgccggatatcgtcaacaattgttccagattggtgtattggatctaatgagattgtcagcaattgcttgtttttatggcttcacgaat

SEQ ID NO: 147752 - DNA, 1876 bp, Zea Mays
cggtagccctcccaccgccgcgagcccgcaagaataaacagaagagtagagaaaaaaccaaaccaaaacccggagccctcctcgtctcccccgttcggcggcgcgacggtagagagattccgtcgaacacatggccgctctcgcctcagccgcccgctcgaggcgccggctccttccctatctgtaccgcctcctccactccgcgtccacaaccgctgtctccccgtcgccctccaccagccgcttcctccgccacgcctcgccggtgccccgcacccctgaccactccccttaccttcggttccccgccgcgcgcgtctctacgctcccctcaggcctccgcgtcgtcacgcaggcctacccggtcgccacacggattgcctccgtcggcgtctgggtcgatgcggggagccgcttcgagctccctggaaccaacggaaccgcacacttcctggagcacatggccttcaagggcacacggcgccggcccaacgcgcaggtgctcgaggtggagatcgaggacatgggcgcgcgcctcaacgcgtatacctcccgcgagcagaccaccttttttgccgacgtgcaggcgcgccacgttccggcggcactcgacgtcctcagcgacatcctacagcacccgcgattccccgaaagggctatccagcgggagcgcggcgtcatcctccgtgagatggaggaggtgcaaggtatgatggaagaggtgatatttgatcacttgcatgcagcagcattccaaggccatccactaggggacacaatattaggtcctgaagaaaatattaggtccatttctaagaaagatttggagcaatatatctcaactcactatacctgtcctcgaatggttgtatctgctgctggaagtgtcagtcacgatgaggttgttgatcaagtgaaagaattattcacagaattctccactgatccaactactgctgatcagcttgttcaggcgaacccagctatttttactggatctgaggttcgtgtagaaaatgcagagtttcctctagcacacatcgcaatagctttcaaaggttcatcatggactgaccctagctccattccccttatggtgatccaaagcatattgggatcctggaacaggagcattggggttgggaactgctcagggtcttctttagctcgtggtatcagcaatgctaatttagctgagagcctgatggcgttcaatactaactatcgggacacaggaatatttggcatttatactattgctccgcctgacaccctgcaagacttgtcacggttaataatggcggagtttagaagacttgcatcccaggtgtcagaaacagaggttgcccgtgcccgcaatcagctgaaatcttctctgttacttcacattgatggatccactgcagttactgagaataatggtcgccagatgctaacttatgggcgagtcatgccgttcctagagctttttgcacgcattgatgctgttgactgtgctacagtaatggaaactgccaaggagtacataattgataagtgggacagctcacggaattaccagaacttagttggtttcgctccgaaacatgttctgacgatgattttactcgaagaatattatttgggaatgcaaagtagttgaagctgtggctctgttttggtattgttgtaactctaggtcaatcattctaagaaactatcaattgatagatagcatcagctatttcagttatttgttagttttgcgcttgtactgtgtacttatttgacgcaaaatgtgcaaataatttactttgctgtggtgctctacttatgaattcatttcatctatgagttctaagaatatatattttttgctattaagcatattgaaatt

SEQ ID NO: 147753 - DNA, 1895 bp, Zea Mays
cggtagccctcccaccgccgcgagcccgcaagaataaacagaagagtagagaaaaaaccaaaccaaaacccggagccctcctcgtctcccccgttcggcggcgcgacggtagagagattccgtcgaacacatggccgctctcgcctcagccgcccgctcgaggcgccggctccttccctatctgtaccgcctcctccactccgcgtccacaaccgctgtctccccgtcgccctccaccagccgcttcctccgccacgcctcgccggtgccccgcacccctgaccactccccttaccttcggttccccgccgcgcgcgtctctacgctcccctcaggcctccgcgtcgtcacgcaggcctacccggtcgccacacggattgcctccgtcggcgtctgggtcgatgcggggagccgcttcgagctccctggaaccaacggaaccgcacacttcctggagcacatggccttcaagggcacacggcgccggcccaacgcgcaggtgctcgaggtggagatcgaggacatgggcgcgcgcctcaacgcgtatacctcccgcgagcagaccaccttttttgccgacgtgcaggcgcgccacgttccggcggcactcgacgtcctcagcgacatcctacagcacccgcgattccccgaaagggctatccagcgggagcgcggcgtcatcctccgtgagatggaggaggtgcaaggtatgatggaagaggtgatatttgatcacttgcatgcagcagcattccaaggccatccactaggggacacaatattaggtcctgaagaaaatattaggtccatttctaagaaagatttggagcaatatatctcaactcactatacctgtcctcgaatggttgtatctgctgctggaagtgtcagtcacgatgaggttgttgatcaagtgaaagaattattcacagaattctccactgatccaactactgctgatcagcttgttcaggcgaacccagctatttttactggatctgaggttcgtgtagaaaatgcagagtttcctctagcacacatcgcaatagctttcaaaggttcatcatggactgaccctagctccattccccttatggtgatccaaagcatattgggatcctggaacaggagcattggggttgggaactgctcagggtcttctttagctcgtggtatcagcaatgctaatttagctgagagcctgatggcgttcaatactaactatcgggacacaggaatatttggcatttatactattgctccgcctgacaccctgcaagacttgtcacggttaataatggcggagtttagaagacttgcatcccaggtgtcagaaacagaggttgcccgtgcccgcaatcagctgaaatcttctctgttacttcacattgatggatccactgcagttactgagaataatggtcgccagatgctaacttatgggcgagtcatgccgttcctagagctttttgcacgcattgatgctgttgactgtgctacagtaatggaaactgccaaggagtacataattgataaggatattgctctggctgcagtgggacagctcacggaattaccagaacttagttggtttcgctccgaaacatgttctgacgatgattttactcgaagaatattatttgggaatgcaaagtagttgaagctgtggctctgttttggtattgttgtaactctaggtcaatcattctaagaaactatcaattgatagatagcatcagctatttcagttatttgttagttttgcgcttgtactgtgtacttatttgacgcaaaatgtgcaaataatttactttgctgtggtgctctacttatgaattcatttcatctatgagttctaagaatatatattttttgctattaagcatattgaaatt

SEQ ID NO: 147754 - DNA, 2090 bp, Zea Mays
actaacaaactttaaatcttttttgaaaaaaatcatacatattccttccaccctactctaattatatacataatttcaaatttaaattcattatactttagctataataaaaaaataaaattgtagacgattttctaatttaaacttgttagaaattttatttttttattactctttatgtatttcaaaatttaacttgaaattttgtatatgattagagtagggtggaaagtatatgtatgaattttttcaatttttttaaactttattagttcatgtgtacagatatgttctcaacaaataaagaaaactttaggcttcatgcaagctgaatttgaagtgtccaagttctgacattgtgccacctgatttgtcctcgactctccacgtcgcgcgctcccatttgagagtctgactggtaggccttggttggattcgaactcacaacgatacggcggagtcccgtgttcggtgttccctgatgggcaactccatcaaccgactcgccggcggcgcgcctctcccgccggagttcgctggaggcatgcctttttgtcgtcaccccatcccaaacatctaggcgttcctcttccccacctctacccgcggttctccctggcccctgggcccgtttgcgtgctactaccggctacggctacggcctacggggaaagcaactgtggcaagtacggagaatgcaagtgcaaccgtccggcacggaggcacaaaagaaagccgccgacgaaacgaaagcgcctgccacctgcgggtgctccccatccggtccaggtgcatgcatctttccctcctcctccccacatcacaatcaccgtcctcctctataaccgcgcctcccctccactctttctctctcgagtcatcttcttcctgcccaatacggcgagcatcggcggcggcgacccaagcaggttgacctcgccccttcaccgaccagcgggtcgtacagcaagccgatccaattcctccgtaaataaaggttgataagctgtgaggttgaagctagagacgccgctgttttaagtttcttcaaggacaagggaacattaatgtcacctaaagtactttcctcgatggaggttgaagctggttttgctggcgatggcgtcggttcaaataatggaccacaagacatgtggtcacttggcgagatagatccaaaaagagcaaggttcccgtgctgcattgtctggactcctcttcctgtagtttcatggcttgctccttacatagggcatgtcggaatctgtcaggaggacggggctgtcttggattttgctggttcgaatttggtgagcgtggataattttgcttatggttcagttgccagatacctccagcttgacagaaagaagtgctgccttcccgttaatcttgcagaacacgtatgcaagcagtcttacaaccattcagaattaggagcagcgatatcatgggacgatgctctgcgatcgagcatgagacgcttccagcacaagtactacaacctgttcacctgcaactgccactcgtttgtggcgagctgcctgaaccggcttgcctacaatggctccctggagtggaatgtcttgaacgtggctgcccttgtctggtttcatggccgatgggtggacagaatgtcttccgttcggtcgttcttacctgtcctacccgtgacatgcatcggcatcttaatggctggctggtctttcctgctagggatggcagcgttctctgctctttctgattggatggtttgttttcacagtgtactgcgttaagggtttggtatgttgactggaaaaagaattactgaaagcactccattagtgcattgcagtctaggaattatggatgtaatcgctgtgctggagtcaggtaaatcactcgtgtcctcagcctcagtgattcagacctgtgcaagttcgtcaaacaaaaaaattgacctatggaggtggtctggagataatttggttcatggcaagttcgtcaatttatttagtgctgttccaaggaaaaaagaaattcttttgattcaagcatctctttctgaacttaacaacttgatgtattagttttatatttaatattcc

SEQ ID NO: 147755 - DNA, 718 bp, Zea Mays
ctctttcctctcgctccctctgcttctggatacttccgatgcctctcctcgctccctcggtcgctgctgatgcgccacgccgccgccggcgcctcatcggcaggaatcatatggacagcccagaggtggtggcctccgcgtccccggctgcggcggcgagcgagcgccaggagaggcccgcgaggctgcggcggaagatctcgtccgcgttctgcgcctgcatgggccatcccccggcgtcgcacgcgcagcagtaggcatgctacggtgcgtactcaaatctaccagctgcgtgcggtccgtcgtggggtatggctgacgagcggcctggggttctcgctctctttcttgctatgcaacaaacatttgtgatttgtgcttacacgtgagaccgtgcttgctgtaagatttttctcccctcttttttgtggaggtcataggaatccctccacatcgccctctccccgttgtccctctcccgtcacttcatcatctcttccagtcgtttcatctttctcggcagctttggcttcagtcatcggcttcgcaagttcgcatcgacatggggttctaattggacaacctaaggcttacaacgagccgtggtctaaccacccaaactgactgctcagtgacagaaatcagacaggttggtatctaatgtttaaatataatggcataaattctagcaccttgaaaaagacaaactcggcacgcc

SEQ ID NO: 147756 - DNA, 1163 bp, Zea Mays
cttccttccttctccgctcgtcgtcgttctaccggcatggccggcattaccaagcgccgcacctccccggcctccacctcctcttcgtccggcgacgtcttgccgcagcgggtcacccggaagcgtcggtccgcccgccgcgggccccggagcaccgcccgtaggccgtcggcgcctccacctatgaatgaactggacttgaatacagctgctcttgatccggatcattatgctacaggattgagagttcttcttcagaaggagctccgaaatagcgatgtaagccagcttgggagaattgttctcccaaagaaggaggcggagtcttacctccctattctgatggcaaaggatggaaagagtttatgcatgcatgacttgctaaattcacaactgtggaccttcaagtatagatattggttcaacaacaaaagcaggatgtatgtgcttgaaaataccggagattatgtaaaagctcatgaccttcagcaaggagacttcatcgtgatctacaaggacgacgagaacaaccgctttgtcataggagcaaagaaggcaggagatgagcagaccgccactgtacctcaagtccatgaacacatgcacatctctgccgcactgccagctccacaagcgttccatgactatgcaggccccgtcgcagcagaagctggtatgctcgcgatcgtgccacagggtgacgagatattcgacggcatactgaactccctgccggagataccagtggcgaacgtgaggtactccgacttcttcgacccgttcggtgactccatggacatggcgaatccgctgagctcctccaataacccctcggtcaacctggctacgcatttccatgacgagaggatcgggagctgctcgtttccctacccaaaatccgggcctcagatgtgagatccgggcagaaaaactgccgcggtcaaaaccatcatcccctgcgtggaactcagagatcccctggttgacgccattgctgtacatccaaataaatggcgtcctcattttgtatgtttagtagtatatgattgggtacgcgtgttgtttatgtgtaaaagggtaactctgcaaaactgaactgagcgttacatcagatgcaacgctgtgacgactgacgaggaggcaggctctggtgtttcctgtcc

SEQ ID NO: 147757 - DNA, 987 bp, Zea Mays
atggaagaaaatagaaggataaacagccttgagatcgcaaaggtggagttggctgtggaggtcggcggctgtaatcggcggacgaagcagattttgactttgcaaatacccattggtcaatacttcgctcagatcttgtcttggggaaagcactaccatccgaagattggtatccttcttggttgcttttcacactttctatctcacagacaatttggcacgctccggatatcttcctgcactgctgcgggcggccgctgccgcgaggaccgtcccggccaccgcgccggagagggcggcagcggggctggagggcgacgagatcgccgccaggaggagaggggcgaggagcgcggatgccaccgcgtagcgcttggaccaccggtgtgccgcgatgtccgggatcgtgaggtgacacggcaggtacagcagccactgcagcgcgtggagggcgcgacgcgcaaggctgctcctcccccgccgcggcggtgcggcggcctcggcgttcttggacgagatgggaagcgcgggaggttcgtcgaggtcctcggcgaggagaggggcggcgaggtcgggatcgggacccgcggccgcgacttcgtcgacgacgggcttcgtcgtgccgtcctccgcgtagcagtgggacgtccagacgaggaggacgtacgcggcgtagagggagaggaaggaggcggcgacccagacggtgacggaaccgatgagcagcacggcgaggaggtagcagaacgcgacgaggaggaagcagacgtcgcacacgaacccggtgcgctcgatctcgacgaggcctcctcgggtcccggacgacggggcctcctagggtactcgcacggttggacgaccgggtggggcggggcgatgcgtggcgtgggggagagagtgcgcgcatccgacaggagagactctagagcgtattgggcggttgagatcgtcaggaggcagaacaaaggagaggcaggctacccttag

SEQ ID NO: 147758 - DNA, 2291 bp, Zea Mays
ttatgattctaccagatatgtctttttgattccgtcgaaaatcgattttacggtataggcgcttatgacctcccctctatgccttgcggtaatgattcctctggcattacggcctttaccacaacggtgccgtccatggaccaatttatttcgtggattggatttcacttgcctgtctatggtttccttgcgtgtgctcaggataggtgttttgtataaatgtttcgccgtattattaagtattctcctttagttcgtttctctatctagaagtagaatagaataacccggttgaagggtaatgatcatacgtctgtaatacattgtatgtcccaaaataagtctcattcttctaccctttccgggtagtcgatggcagctaccttaacaccaaagaagagttcgactagttgaactcgaaagctcgaggcccaggcgacgcgacgcggccacgcccacgtccttccatggcgaccgctctccccgcctccgcctccgccgcttgccttctccagctctcccggcgcggtctccctggaacatcttctgtgctctccccgcttcgcaccgccactttccgctggcacggtgcctgtaacgtggcctgttcatgctctcccggcccccggccggcggttcccgcggagcgaagggacggcgtcgctggccatgccacttctccagagggaactgtacgaatcgtcgccgtggttggagaaggtagcatcagcccgattaaggacgcgccctgggaagaggtcatgcgccacacggctgataggctgaagtgggtcgatgaaggatttgaaatgcttgtcttcacggataatttggttggtcatgataacctcaggaaagagttactatcacactgtgatatgctagtcaatgttgcaataacaaatcaggatgctgttcagtggcttataaacaacagcaaacacatttctaatgtaatttgctttcagtcatctccgtctttagtaaacaaactaggtggcacatatgttcagtacactggagagcaggacatgtttgggaagctaacaagtattggaaaaccaagtggcatagaggaatcaactgaagttatgaagaccatatctaatgcttgggaaagacacaattcagatgacattagattttgcttgcttgttgttgtaaatgcatacataagaccggttgctatgctgaaaaatctaagggcaaaaggcctttctaccctaacttgcatgataaagaactgtggtcctcagatactcaattgtctgtttgaccctaactgtaggaaggcccttcagtgtttgaattcctgttctccaactgatcaagtctgcaactatcgttgcattgcatcatatgaaagtccatatctggaggctttttccctctgtgttttgcagaagaacaattgccttgacctcaatgctgagatacccagtaaaccgaatgtaatgccactaaccatgttcagagaacaaaaactaagccatgaaatagcggaagatctttttgttggttggttggacagcatggaatggagttggcgagtggcagctggacaaaatccagcatatgatcaattcccatgtcagtaccagttattttacagagggaaagctaaaggttcattttggtatgagccggtttttcaggtcaaaaccctggaaggggagctggtttggaggcgcaggaggtatcgtgtgagaagggctagcactcctggtacattttacttcagtgtgttggataatggtgtcatttccaaagaatattggacaattgttgacgttgcggaggatttcagctggggtctgttccattatcatggcgcagcacaagctgctgggctatcatacactggagcagtgcttgttactccagatgggtcttatcctgacctggaagacccaagattggcctctgctttagagaactgtgctataaagaaatgggagctctatacagtcgataactgctcctgcatgggtgcaccactgggaactcctgagggttcaaagctgcaccatcaaatttctccaggaaaagaaagtagtgttttgcagagaagatgataatctgtaatatgttaaagtgactcccaaatgattatgtcgtacgtacaaagatgtacagccaagtggacatgtattgctgaagagagctcatatgtaacctgcaggtatattttcttcttttgaatatacgtgtaacctaattcctaccttttgtggctgccatcagggtttgatgattaagaaataaaaagtttgaatacaagatcgtcactt

SEQ ID NO: 147759 - DNA, 2584 bp, Zea Mays
ttatgattctaccagatatgtctttttgattccgtcgaaaatcgattttacggtataggcgcttatgacctcccctctatgccttgcggtaatgattcctctggcattacggcctttaccacaacggtgccgtccatggaccaatttatttcgtggattggatttcacttgcctgtctatggtttccttgcgtgtgctcaggataggtgttttgtataaatgtttcgccgtattattaagtattctcctttagttcgtttctctatctagaagtagaatagaataacccggttgaagggtaatgatcatacgtctgtaatacattgtatgtcccaaaataagtctcattcttctaccctttccgggtagtcgatggcagctaccttaacaccaaagaagagttcgactagttgaactcgaaagctcgaggcccaggcgacgcgacgcggccacgcccacgtccttccatggcgaccgctctccccgcctccgcctccgccgcttgccttctccagctctcccggcgcggtctccctggaacatcttctgtgctctccccgcttcgcaccgccactttccgctggcacggtgcctgtaacgtggcctgttcatgctctcccggcccccggccggcggttcccgcggagcgaagggacggcgtcgctggccatgccacttctccagagggaactgtacgaatcgtcgccgtggttggagaaggtagcatcagcccgattaaggacgcgccctgggaagaggtcatgcgccacacggctgataggctgaagtgggtcgatgaaggatttgaaatgcttgtcttcacggataatttggttggtcatgataacctcaggaaagagttactatcacactgtgatatgctagtcaatgttgcaataacaaatcaggatgctgttcagtggcttataaacaacagcaaacacatttctaatgtaatttgctttcagtcatctccgtctttagtaaacaaactaggtggcacatatgttcagtacactggagagcaggacatgtttgggaagctaacaagtattggaaaaccaagtggcatagaggaatcaactgaagttatgaagaccatatctaatgcttgggaaagacacaattcagatgacattagattttgcttgcttgttgttgtaaatgcatacataagaccggttgctatgctgaaaaatctaagggcaaaaggcctttctaccctaacttgcatgataaagaactgtggtcctcagatactcaattgtctgtttgaccctaactgtaggaaggcccttcagtgtttgaattcctgttctccaactgatcaagtctgcaactatcgttgcattgcatcatatgaaagtccatatctggaggctttttccctctgtgttttgcagaagaacaattgccttgacctcaatgctgagatacccagtaaaccgaatgtaatgccactaaccatgttcagagaacaaaaactaagccatgaaatagcggaagatctttttgttggttggttggacagcatggaatggagttggcgagtggcagctggacaaaatccagcatatgatcaattcccatgtcagtaccagttattttacagagggaaagctaaaggttcattttggtatgagccggtttttcaggtcaaaaccctggaaggggagctggtttggaggcgcaggaggtatcgtgtgagaagggctagcactcctggtacattttacttcagtgtgttggataatggtgtcatttccaaagaatattggacaattgttgacgttgcggaggatttcagctggggtctgttccattatcatggcgcagcacaagctgctgggctatcatacactggagcagtgcttgttactccagatgggtcttatcctgacctggaagacccaagattggcctctgctttagagaactgtgctataaagaaatgggagctctatacagtcgataactgctcctgcatgggtgcaccactgggaactcctgagggttcaaagctgcaccatcaaatttctccaggaaaagaaagtagtgttttgcagagaagatgataatctgtaatatgttaaagtgactcccaaatgattatgtcgtacgtacaaagatgtacagccaagtggacatgtattgctgaagagagctcatatgtaacctgcaggccttatttatatttacagcaacagatcacactggttgcagcaatgcagcctgcactggtgagcagatgtcttcaattctgcatcacctgtgtagagctgcattactgtttgcaagatcagagccgatttcctgccatgttgtgccagtattaaatccctcataacagaacccaggagttctgaacggctgcctgggttgcggctgcggctgcagcccaacagccaaattattatcagcccctctgatttttcttgtactaaattgccttgggatttagtaatctttgattgagtacttgtattagaaattacatctaatgtagtgatgtatttatggtcatcgatgagaccaagagttgactactcgttgtacatctggaataaagatgaagttgtcttgt

SEQ ID NO: 147760 - DNA, 3068 bp, Zea Mays
ttatgattctaccagatatgtctttttgattccgtcgaaaatcgattttacggtataggcgcttatgacctcccctctatgccttgcggtaatgattcctctggcattacggcctttaccacaacggtgccgtccatggaccaatttatttcgtggattggatttcacttgcctgtctatggtttccttgcgtgtgctcaggataggtgttttgtataaatgtttcgccgtattattaagtattctcctttagttcgtttctctatctagaagtagaatagaataacccggttgaagggtaatgatcatacgtctgtaatacattgtatgtcccaaaataagtctcattcttctaccctttccgggtagtcgatggcagctaccttaacaccaaagaagagttcgactagttgaactcgaaagctcgaggcccaggcgacgcgacgcggccacgcccacgtccttccatggcgaccgctctccccgcctccgcctccgccgcttgccttctccagctctcccggcgcggtctccctggaacatcttctgtgctctccccgcttcgcaccgccactttccgctggcacggtgcctgtaacgtggcctgttcatgctctcccggcccccggccggcggttcccgcggagcgaagggacggcgtcgctggccatgccacttctccagagggaactgtacgaatcgtcgccgtggttggagaaggtagcatcagcccgattaaggacgcgccctgggaagaggtcatgcgccacacggctgataggctgaagtgggtcgatgaaggatttgaaatgcttgtcttcacggataatttggttggtcatgataacctcaggaaagagttactatcacactgtgatatgctagtcaatgttgcaataacaaatcaggatgctgttcagtggcttataaacaacagcaaacacatttctaatgtaatttgctttcagtcatctccgtctttagtaaacaaactaggtggcacatatgttcagtacactggagagcaggacatgtttgggaagctaacaagtattggaaaaccaagtggcatagaggaatcaactgaagttatgaagaccatatctaatgcttgggaaagacacaattcagatgacattagattttgcttgcttgttgttgtaaatgcatacataagaccggttgctatgctgaaaaatctaagggcaaaaggcctttctaccctaacttgcatgataaagaactgtggtcctcagatactcaattgtctgtttgaccctaactgtaggaaggcccttcagtgtttgaattcctgttctccaactgatcaagtctgcaactatcgttgcattgcatcatatgaaagtccatatctggaggctttttccctctgtgttttgcagaagaacaattgccttgacctcaatgctgagatacccagtaaaccgaatgtaatgccactaaccatgttcagagaacaaaaactaagccatgaaatagcggaagatctttttgttggttggttggacagcatggaatggagttggcgagtggcagctggacaaaatccagcatatgatcaattcccatgtcagtaccagttattttacagagggaaagctaaaggttcattttggtatgagccggtttttcaggtcaaaaccctggaaggggagctggtttggaggcgcaggaggtatcgtgtgagaagggctagcactcctggtacattttacttcagtgtgttggataatggtgtcatttccaaagaatattggacaattgttgacgttgcggaggatttcagctggggtctgttccattatcatggcgcagcacaagctgctgggctatcatacactggagcagtgcttgttactccagatgggtcttatcctgacctggaagacccaagattggcctctgctttagagaactgtgctataaagaaatgggagctctatacagtcgataactgctcctgcatgggtgcaccactgggaactcctgagggttcaaagctgcaccatcaaatttctccaggaaaagaaagtagtgttttgcaggccttatttatatttacagcaacagatcacactggttgcagcaatgcagcctgcactgagagttgaagctgagaaagaatggcggggctctacgagaagcagtcggagacgtacgccaagaagcgtccgcagtaccccaaggagtggttctccatgctggccagcctcaccgcggggcaccagcgcgcctgggacgccgggtgtggcaccggccaggccgccatcagcatggcggagcactacgagagcgtggtggcgacggacgtgagcgaggggcagctccggcacgccaccgcgcacccgaaggtgcggtacctccacaccccggagcacctctcggaggacgagctggtgtcgctggtcggcggcgagggctccctggacctggtcgtggtggccacctccatccactggttcgacgtcccgctcttctacgccgtcgtgagccgcgccctgcggaagcccggcggcatgctcgccgtgtggggctacaactacgagatccacccgttcgaggacgcgctgcacggccagctctacccggccctgcggccgtacctggacccgcgggcgggactggccatggagcggtacaggtccctgccgttcccgttcgagcccgtcggggtgggcgccgagggcgcgcccgccgacgtggacatcgaggtggagatgacgctggaggacctggtcgggttcctgaacaccggctctgtcgtgaccacggcgagggccaagggcgtggacctggaggcggtcacgagggccgcgctgaagcgtgtggaggagcagtggggcggcgcgcccaccgtgccgaggaagctcgtgttcaaggcgttcatgctcgccgggaggcccaagtgctgaagtgataatgccgaataagtgtttgcttgtcagtcagcgtgagattgagatgagatcacagactacaatacatcatatagccagccactggattatgtctggcgatctaatgacatctgaagccactacatccaa

SEQ ID NO: 147761 - DNA, 3236 bp, Zea Mays
ttatgattctaccagatatgtctttttgattccgtcgaaaatcgattttacggtataggcgcttatgacctcccctctatgccttgcggtaatgattcctctggcattacggcctttaccacaacggtgccgtccatggaccaatttatttcgtggattggatttcacttgcctgtctatggtttccttgcgtgtgctcaggataggtgttttgtataaatgtttcgccgtattattaagtattctcctttagttcgtttctctatctagaagtagaatagaataacccggttgaagggtaatgatcatacgtctgtaatacattgtatgtcccaaaataagtctcattcttctaccctttccgggtagtcgatggcagctaccttaacaccaaagaagagttcgactagttgaactcgaaagctcgaggcccaggcgacgcgacgcggccacgcccacgtccttccatggcgaccgctctccccgcctccgcctccgccgcttgccttctccagctctcccggcgcggtctccctggaacatcttctgtgctctccccgcttcgcaccgccactttccgctggcacggtgcctgtaacgtggcctgttcatgctctcccggcccccggccggcggttcccgcggagcgaagggacggcgtcgctggccatgccacttctccagagggaactgtacgaatcgtcgccgtggttggagaaggtagcatcagcccgattaaggacgcgccctgggaagaggtcatgcgccacacggctgataggctgaagtgggtcgatgaaggatttgaaatgcttgtcttcacggataatttggttggtcatgataacctcaggaaagagttactatcacactgtgatatgctagtcaatgttgcaataacaaatcaggatgctgttcagtggcttataaacaacagcaaacacatttctaatgtaatttgctttcagtcatctccgtctttagtaaacaaactaggtggcacatatgttcagtacactggagagcaggacatgtttgggaagctaacaagtattggaaaaccaagtggcatagaggaatcaactgaagttatgaagaccatatctaatgcttgggaaagacacaattcagatgacattagattttgcttgcttgttgttgtaaatgcatacataagaccggttgctatgctgaaaaatctaagggcaaaaggcctttctaccctaacttgcatgataaagaactgtggtcctcagatactcaattgtctgtttgaccctaactgtaggaaggcccttcagtgtttgaattcctgttctccaactgatcaagtctgcaactatcgttgcattgcatcatatgaaagtccatatctggaggctttttccctctgtgttttgcagaagaacaattgccttgacctcaatgctgagatacccagtaaaccgaatgtaatgccactaaccatgttcagagaacaaaaactaagccatgaaatagcggaagatctttttgttggttggttggacagcatggaatggagttggcgagtggcagctggacaaaatccagcatatgatcaattcccatgtcagtaccagttattttacagagggaaagctaaaggttcattttggtatgagccggtttttcaggtcaaaaccctggaaggggagctggtttggaggcgcaggaggtatcgtgtgagaagggctagcactcctggtacattttacttcagtgtgttggataatggtgtcatttccaaagaatattggacaattgttgacgttgcggaggatttcagctggggtctgttccattatcatggcgcagcacaagctgctgggctatcatacactggagcagtgcttgttactccagatgggtcttatcctgacctggaagacccaagattggcctctgctttagagaactgtgctataaagaaatgggagctctatacagtcgataactgctcctgcatgggtgcaccactgggaactcctgagggttcaaagctgcaccatcaaatttctccaggaaaagaaagtagtgttttgcaggccttatttatatttacagcaacagatcacactggttgcagcaatgcagcctgcactgagagttgaagctgagaaagaatggcggggctctacgagaagcagtcggagacgtacgccaagaagcgtccgcagtaccccaaggagtggttctccatgctggccagcctcaccgcggggcaccagcgcgcctgggacgccgggtgtggcaccggccaggccgccatcagcgtaagtttttttttttatcgaatggtcagcagcggcttcaccgttcgatctggttaattctgaaacgaacatgtggcttaaacaactcagatggcggagcactacgagagcgtggtggcgacggacgtgagcgaggggcagctccggcacgccaccgcgcacccgaaggtgcggtacctccacaccccggagcacctctcggaggacgagctggtgtcgctggtcggcggcgagggctccctggacctggtcgtggtggccacctccatccactggttcgacgtcccgctcttctacgccgtcgtgagccgcgccctgcggaagcccggcggcatgctcgccgtgtggggctacaactacgagatccacccgttcgaggacgcgctgcacggccagctctacccggccctgcggccgtacctggacccgcgggcgggactggccatggagcggtacaggtccctgccgttcccgttcgagcccgtcggggtgggcgccgagggcgcgcccgccgacgtggacatcgaggtggagatgacgctggaggacctggtcgggttcctgaacaccggctctgtcgtgaccacggcgagggccaagggcgtggacctggaggcggtcacgagggccgcgctgaagcgtgtggaggagcagtggggcggcgcgcccaccgtgccgaggaagctcgtgttcaaggcgttcatgctcgccgggaggcccaagtgctgaagtgataatgccgaataagtgtttgcttgtcagtcagcgtgagattgagatgagatcacagactacaatacatcatatagccagccactggattatgtctggcgatctaatgacatctgaagccactacatccaacccaggtagaggtagcaaactgcgtattcctttcatgctgtatgcagaatgaagaagaaatacctatttccattgcct

SEQ ID NO: 147762 - DNA, 1990 bp, Zea Mays
aagttgtgcccaagattcatgatcatgaggtagtacatgttcccaagctcctttgggatctccgagtcgagttgattaaatgacaaatccagaaatatcatggatccattcttattgaaggtatactctgtgctccccatgtacacccgagtgaagttgcacagcttcttgcttggcatccggctgagctcttcaggccgaatgctggtgaactctagcaagctccccttgccatggcactcgctgctcagctcgtcatttcgaagatacacatatggccgcccaaggacaaggccgacgttcatcttcccagactgttttgccagttccgccggtattgaccctttaagctggttactgttcaagtccagccagaccaagctctggcagttgccaagctcagccggtattggccccgagaaggaattgttgctcagcttcaagatggccaagttgctgagctgcccaagccaagccgggatcggaccagacagctggttgctcgccaaggatatccagttcagctccttgcacttggagagttcccgcgggatgccaccggtgagcccgttgtagtcgaggatgagatgctcgagcctgaccaaattttccagggacgccggaatctcgccctccaacaagttctgccacagaatgaggtcccggagctcccggagttttccgagggatgcgggaagggtgccgttgatgttgttgaggctgaggtcgagagattcgagcttggtgcagttggagattgactccgggatggcgccggagaggtagttgttctggaggtacagcatgcggaggctggagttggggccttggcagatggacgaagggatggtgccggagaaggtgttggagctgaggtccagcacgtcgagctccggcagcgctgccaaggagtccggaatggtgccgttgaagtggttgaaggagagggacagcaccttgagctgccgtagttcgttgtaagcgtcggcggggagctcgctggagaagttgttgtttgacaggtttagcgcggtgagagcggtgagggcggcgacgtccggcgggaacgggccgaccaggtggttgcctgagaggttgagcgttctcaggccacggcagtcagcgagaatcccgccggctacctcgcccgcgatgaggttgccggagaggtcgaggtactcaagcccagagcagttggtgagctctgggagccgagagatcttgttcccggagaggtccagacggcggaccgcgccgacgccggcgcccaccatccaccggaggtcgccatcgccggagatcttgttgtcggacaagtcgagagcgtctagccggccaaatccggaagaagcgacagcgccggcagacctcggcccaccgaccgaaccgccggagaggttcagagcgctaaggccggtgcaggaagcggccagcgcctcgacgtcggcgacggtgccccgcaggccggcattccctgacaggtcgagcgactgcagcttggccccgcacctcggcgcggcggccagcgcgccgctgacgttggtgccgcgcaggctgagcgtctcgaggctgctcagctgcagcagggtggccgcgacggcccggaagtcggcattgagcgggacggcggcgagcgacagcgacgtgaggcgaccgcccctgcagccggcgcctgggaacctgcaggcgccatcgctggcgctccacccgcgcaggtccggggcctggctaggcacggcctccttgaactgctccagcagctgggcatcgtcgccgtcggaggcggtggccgccacgacgacgacgaagagtgccactacagcgaccagcaccagccccggagattccatgagctagcgcgctaccttataaaaccattaaagaagcgggacggcgacgggggaggagccgacgagatggtacgggagggagggagaggtggggaggagatggtgagtgcaggagggaggtgggggagtgtggagaatgg

SEQ ID NO: 147763 - DNA, 525 bp, Zea Mays
caaggaacaactggacaccgacacgagatagtcagaagaggctggccacaacctcttgctctcgcgtccgtcctaggcgccgcgctgctgtgcctgggcgccgcggccgccgcctcgccgcccaccatgccggccgccggcaggttcgccatggaaggaatggccgtcgaccaagggatagcccacttcctcgtcctcgcggcggtcttcgccgtgtgcctcttccgctgatcgtcgtccgtcaaggaaccggtgcctgcatgcagctgaacgatttcatcagttcgtgtatcattctttgattatgttagagagtttgtcggccggccccgtgcgaatgctactaacaatgtcgcaaaataaggcggtctccgaaaaatgtgagcgtcccttagcattcgacggttcagggtttgaatcaaaacaacttatcacaaacgtcgtgctcgatctgtccattcccgtgttttgttcccctcagctctttgtaatttctgtgcaaattgcaaatcgcgtatatatata

SEQ ID NO: 147764 - DNA, 1496 bp, Zea Mays
attggcatctatctgtttctccgtatgcagttgcagtacattggctacagtgtcacggactcgcggtgagccccacggaggaacgggctacccaaactcgccggattcctacctgtcccggccaacccacctcgccgaaccactccaccaaccacgaacctgaaaccctagccacgcccatgagcgacgacgcgaccgccgccgcgccctcttcgccgtcgacctccccttccccatcctctgcttcctcatcaggcgcctccccgtcgccttcctccccgcgcaccaagcgccgccgcaccgaccggtacgctctcggtttcgagttcgccccgcgactcgcgccctacgaactccctgaggaaccgctccccgacaagcacaagcgctcctggcccaactggacggagcgctccaccttggctctcctcgacgcctggggcgacagcttcgtccgcgcggggcgcagcatcatccgcgccgacgagtggctcgaggtcgcccgcctcgtgtgcgccgccgtgggccgtcccgcggggtatttctctgatgcgcagtgccgcaaccgagtggacacgcttaggaagaagtttaagaaggagagggagagagcgcgccgtgccgcgcgccgctccggtccctccccttccaaatgggtttattacgacaagatggtggcaattctgtgcccgaccccgcctccgctgccgaccctgcctccgcctgcccgtccccctccgctgcctctccagttgctgcctctggtcgcaaagcgccgccgcgacaggcagccagcgcggcgctttcagtgggggatgaaagctcctgagcgtcttcttggtggtgccggagacgtcgtaggtcccagggtttcagggtcaggtgcgaagttgggtgaacttggaccgcagaaaaatagtgctgttcaagggaagcggaatggtttcatggccctcacagagtcaattcagaagtttgaggaggcttttgcgaggatggagagtagcaagaggcagcacatggtgaaggtggagcaaatgaggagggatttgcaaagggacctagatgcaaagtggagggagatattggagaaggcgcaagcggagattggtcgccttagtaatgaggatggggatgaacatgatgtggacgaagatggggatgttggcgatggtaagagattggagggtggtgatgagcaaaacaatggtgctatggatgcttctccttagcatatagcctagatgcttacaaaatgaggaacaaaattggggttatcatgtcgatagatgaatccacatgatagacatgtggttatgattaactccgtagctgctgatattagtattattgtataattctcatatgtgtttctttttttttactccgcaatgctaagcaaaagattactgctattttggttactgtacatagctatttgcttaccgacgtgtgttttcaagataataatatcatttggtcgctcttagttataa

SEQ ID NO: 147765 - DNA, 447 bp, Zea Mays
atggggaggaagctgggcggcctggacagggtcctgcactgcttctcgctctccctgtgctccagcgcctgcgcctgcgtacactccatggatgaagaagaggaggacgacgaaaggaaggccctgctgctgagcagccagctggtgcagctcaggggcttcgtcgatggagccgccgccaagactctcgctttccatctggagcctaagaccgtggagctgaaggtgtccatgcactgctacggatgcgccaagaaagtccagaagcacatctccaagatggacggcgtgacgtcgttcgaggtggatttggagaacaagaaggtggtggtggttggggacgtcacgccgtacgaggtgctggagagcgtctccaaggtgaagctcgcgcggctatgggtggccccggaccccaagcagcaagccgcacaaagcttgcaggcgtag

SEQ ID NO: 147766 - DNA, 1641 bp, Zea Mays
atggccctgcagacagggctaccagacaaattggagaaacaagcgatagcccgttccatggagacgctcgtgactgcggttctcgccgacctcgtctgccgagccatatccttcaccgtggataggtgctgccaccagcagcgcaagcgctgtgtagaggacaccacacaacggctgcaccacgtgcttctacgagtccagaccgtcgtcgaggaggccgaccggcgctgcgtcaccaaccgcgcgatgctccggcagcttcagctgatgagggaaggcgtctacagaggctactacctgctcagcgccttcaagcgccaaggccctgtgaacgacacggcgcaagatcgcgaggtcagtcatcatggtcactcgtcgttcgccctttcccaattcaatccggcgaagcgcttgtgtactatctccgcctggacgacgacgagggcgaacatggcgccgcaagacacgacacgcgagggggaggcggagctgcaagaggtgctcactgtcctagagcgcatggccagcgacatgaaggagctcgtcgtgttcttgagctcctaccctcccactcgccgcgaacctcgcagcgggcacctgtggttggagaaccgcatgttcggccgcgatgcggagcaggagaggatcataaacttcttgctggaaccagagcctgcacacgcagaatatttgggcgtgctcccagtgataggccgagcaagaatcggcaagagcaccctcgtcgaacacgtctgcttggacgagagggtgcgcaaccacttctccttgatcgtattcctcgccgaaagcgacaccaaggatggcgaacagtctcctcatctgggagacaacgccataattaaacatcaggatctcggttcggcagggaaatcactggttgtgattgagctggctggcgacgtggacgagagcacctggtggagaagaacgctgcctgcactgagagcacgacgcaccacgccggtgagtaaaataatcgttacaagccgatcggagaagattgcaggttttggaacgacgcaggcccttgagctcaaacctttgcctcgagaagcctactggtacttcttcaagacgatcgcgtttgggagcactgatgccatggatgagccagagctggaatccatatgcatggagatggcggacctgttgaacggatcattcgtagcggcaaatttgtttggtggctatctgagagccaacctctgtcctcagttttggcagaaggttctcaaaggctacagacattacgcaagtatgcacctgaatctctttggcgagcatcaatccgatagcctagcgaatggtcgcccaatatatatgtggagattacccaagactgatgctatgctaatagcttacggttgttaccaagcgtgctcagcccagcagcatgatctgcccatgacaaccatggaagaggtgcaaatcggaagcacgagacctcgaggggactttcaagccgtggcatggagatcaaacataccgccatactacagctatttgttgaattgtggggtgcaagcgtcgtcgtcgctgatccgcacgccacgcaggaacaagaaactccggcatcggtagtcatgacgactgaattccataatgaattttatattttta

SEQ ID NO: 147767 - DNA, 870 bp, Zea Mays
catcaaatcatcagtcattcaccttcccggctttccacaaactcaaaccctgctacccatgaccgccgccgccgccgccgcccgcgcggcgcgccggcacttctcttctcggctccagactaccacctcgcgccttctccatgcaagtgattctcaggcagcggcgcgggagacatccgggagcttcatccaccccgccgctgtcgtccacccggatgcagccatcgggcaggctgtctcaataggtcccttttgcactgttgggccttcagccagagttggtgatacctgtcagttacatgccgggagccatgtcatgggccatactgagctaggggagggatgcattgttcaaactggtgctattgttggtgcagatatccctggacggacaattattggggaaaacaatgtcatcggacactatgctgttgttggtgcaaaatgccaagatttgaaatataagactggagatgaatgctttctacatattggtagaaataatgagatcagagagtactgctctgttcaccgctcttctaaatcttgtgactgcacggttattggtgacaataatctcattatgggttcgtctcatattgctcatgattgcaagattggtaacaataacatctttgctaataatactctatttgctggtcacgtaattgttgaagattggactcacactgcaggggctgttgttgtccatcaattttgtcatattgggtcatactcatttcttggcggaggctccgtggtatgtttctatataaatttgatctgcattacttaccacagaactttatgctaaaaatgagacttcatgtagttttaccaaccatgcctgaaaactatgaaaaaatgtac

SEQ ID NO: 147768 - DNA, 243 bp, Zea Mays
aaaaggttttatcattaagaccatattcttttaacacctcaaatattctctcagatatgttttcaccactatgtgagccatcaattagccttagtcctattatccttttttccaattcccatgcagaattaacataatgtacaacaacactcaagtaatcctctttagcattcccagaccatatatcagatgtcacagcaacagaagaaacagaatttttaaatgtgttaacaagcttagcac

SEQ ID NO: 147769 - DNA, 1396 bp, Zea Mays
attgtcatcagtcatcgcggcctcagctatctgaatcacttgtcccgctcggtacgtagtagtagtagcatgggctgctgtggcgccgccatgtccgccaggccgcggggcatccacgaggagacgctgctgcgcgtcccgggcgcgtccgtgcacctcctggccggctcatccgacggcccggtcgagctcgcgcgcggggacctcgccgtcgtcaggctgaccaaggacgacgtggccgtggccaccgcggtgcgcgtcggcagggacctgggctggccgctggcgcgggacgagcccgtcgtcaggctcgacccactgcactacctcttcacgctgccggcggcggacaaggacgggacgttcctcaactacggcgtctccttcaacgccggcgccggcgccgacgcctccgcgctggcgtcgctcgacggcttgcttcgctccaacgcctgcttctccgcgccttcctccggggcggtggtcccgccgtccaagggctccagcagggcgcggccgcagccggggccggttgttgcgtcgggggacgggtactggaacgagttcgcgccgagggtggaaggctacaacggcgtgctggccaaggccatcgccgcgggcaccggccagctcgtgaagggcatcttcatgtgcagcgaggcctacgccagccaggttcagagaggagccgatctgtttcgcccacaggctgccggcagcgcacggagcagattcggcgacgccgctggtggcgccaacaggaacaccaagcctggagcagtcaacaagagtctcaagagggtcaggaagctgtcggagatgaccgagaagatgagccagtcgctgctcgacacggtcatctcggtgaccgggtccatggcggcgccgctgatccgctccaagcaagggcgagcattcctcgccaccgtgcccggcgaggtcatcctggcatctcttgacgccatcaacaaagtaatggatgcggtagagaacgccgagaagaagtcactcgctgcaacttcgaatgtcgtcgctggtgcagtgtccaggaggtacggcgagaacgcaggagaggcaacccaagacgcgttcgcgacggccggccacgccgtggggacggcgtggaacctcttcaagatccggaaggccgtcacgccatcgtcctccatgcccgggaacatggtcaagagcgccatcaagaacaggaactgacgtcggcaccagacagttgctcattgtgctcctcttgatgatcatatacccagaatgatcggacagtaattcaatgcgctcctcttactctggatgataatgtacccataatggcgtgtaactatcgtgtgtgcaccatcgacattaacaaatacttgttccaacaactgataacatcatgcca

SEQ ID NO: 147770 - DNA, 752 bp, Zea Mays
tttattgtttatacctcccgtacattatccttggtcttcacctccatctacacctacatctccacctaccgaacatcagatatgcaaattcatcatcatttacttgttgttagttatattatgatgtaactcagcaaatatcatttgtacatgtatattagacccctccagctatcttgccgacgcatcaacgagaagacgggttagactttgttgaaaccctcttcgctagtggaggtatcgaccatcactcgtcattgtaccccgatggtgatcggagatcgtgagcttccatgttatgtgttgtgatacttgagacttttattatgactatgtatgagatattgtttcttattataactggatgagatgtgtcttattatgactatggatgagacttttatgatgtaattgatgagactatggatttaaatattgttatgtgattgtatatgagatgttttatgtgaaaatatgttgtgctatatagctgttgatatatttgttatattatggaatgtggtgtaaaataaaaataaatagcatttgtaatgctggtcaaattaacttcgtagaggccaattgggtcgtaggaagttagccagcaaacttcctaggggctacagtcagttgtagtaagttagccagctaacttcctacgggctacagtcagtcgtcagaagttagtcgtaagaagttagtcagctgacggcgtgaagctactaacttctgagaacctactaacttccgag

SEQ ID NO: 147771 - DNA, 2554 bp, Zea Mays
atggagccgtcccgtggcggtgttggcggcggcgggcggcggtggggggaggcggagggtgatgcggcggaggaagggagacgaggggaggacgggggcgaggtgagcctgcgggagtggctggaccggccgggccgagcggtggaggcggcagagtgcgtgcacgtgttcaggcaggtggcggaggcggtggcagtcgcgcacgcgcagggggtggccgtgggcagcgcgcggccgtcgtgcttcgtcgtgtcgccgcccttcgcgcgcgtcgccttcatcgagtccgcctccggctccgacgcctcgggctcgtgctcgggctctgacgcctccgaggacgccgacggcgacccggacccggacccggacccggacgcctcgcctccgctgcggcgacgcgacagcgccgtccccggcgaggagcgcgcggggaggtcgttcccgctcaagagcgtgctggccatggagctcagctggtacaccagccctgaggatgcggacgacagcgccgctaccttcgcctctgacgtctacagactgggtgtgctcttgttcgagctgttctatacgttcgaaacgatggaggacaagatgcgggcaatggcgaatctgcggcaccgggtgttgccaccgcagttgctgttcaaatggcccaaggaagcatccttctgccagttgctaatgcaccctgtgccagaaaccagaccgaagatgagtgaggtgctgcagagtgagttccttaatcagtcaaggaatagcctggaagagcatgaagcggcacttaggttacgcgaagagatagaagaacaagaattattgctggattttcttcagcagttgcagaaaagaaagcaagatatagccgacagtttgcagggcactattgctttcctctcttctgacatcaatgaggtaccccaccagcaatctacaattggccactgtgagaacttcttatccgatggggataaagaggtgtgctctggaactgttgaagagcagagtgattgtggatccaggaagcgttttagacctgagctgcaaggtgttgatatggaggaaaataatcgtagtgttgaagaatgttccagaacagtaccatcctctgagttaatccaggaaagtgttctgtctaaaagctccaggttgatgaagaacttcaaaaaacttgaaacagcctattttctaacaaggtccaagttgatgaagcaagttggcagccaaataagtagctgtgatcgagttgttaagaacactactggttcagctgttgggactgagggaagttcactagatgatttttctttggaaaggcaatatggtacaaggcaaagaggttgggtaaactcttttcttgaaggattgtgcaagtatttgtcattcagtaagttgaaagttcgggcagaactgaagcattgtgatttgctgaactcgtcaaacttagtatgctccgtagggtttgaccgagatagagagttttttgcaactgcaggtgtaaataagaagataaaagtgtttgagtataatatgattgtaaatgaacaccgtgatattcactatcctgtagtagagatgtctaatagatcaaagttgagttgtatttgctggaacagttatatgaagagccatattgcatctagtgattttgagggtatagtacaggtttgggatgttactaggagtcaagtttttgttgggatgagggagcatgagcgacgcgtgtggtcggtggacttctcaattgtggacccaacaaaattggtcagtgggagtgatgatggatctgtgaaactgtgggatatgaatcaggcaattttattcttgcacctactgtatgtcaggcttttaactaacgataacatggttatcgaacttgctgggagtattggcactattagaacaagagcaaatgtgtgttctgtacaatttcaacctgatactgctcgctccattgccatcggctctgcagaccacaaaatttactgctatgatctacgtaacatacgagctccttattgtacactagttggccacacaaagactgtaagctatgttaagtatctggatgcatcaacaatactatccgcatctactgacaactcattgaagctttgggacttatcgatgaatccaggaaggataattgacagtccagttcaaacatttacagggcatacaaatacaaagaacttcgttggtctttccatatctgatggttacattgctactggctctgaaacaaatgaggtttttgtctaccacaaagaatttcccatgccagtgttggcttataagttcagcgtgacggaccctatatcgggacaggagattgatgatcagtcacagttcatttcatgcgtctgctggagagggcagtcttcaactctactttctgcaaattccagcggcaacattaagatcttagaaatggactgaggagtttgcatctgtttgagtctcagctataaatagaccgacttcttaggccgtgctcaacaaatcatgcatatagccgtggtagatgtcactgtctagggagttgagtttaaaa

SEQ ID NO: 147772 - DNA, 108 bp, Zea Mays
ctaaaattcttattccatgtcgagtgcttaaacttgataacattatacgatattttttatcagatagtattgatgaattaatcagcccccccttatattatattcctg

SEQ ID NO: 147773 - DNA, 1569 bp, Zea Mays
cctcagttcctcaaccagcggccgaccgtcgaccgagaagcccgagcagcggtccgatcaggtgagcagcggcgcggctgctgcctgcccgcgcctgcctccgcggctccgccggccgtcgaccgagcagccgagcagaggcgcggcggctgcctgcccgcgctcgcctccgcggctccgctggccgtcgttcgccgacccgaacgccgagtcgcgcgagcgtgccggcgtgccccgcctctcgtcggctcgcgactgcgccagcgcggtcgcgccgccccaccccccggtgaccggcgtccggatccatccgtctggcaacccaaccggccaagggccaaccccgtccccggaccccgactccccgagggccaaccggccaaggcacaaccgctgaaccgcacaatgcagtgagagaccgagggtgattattttttatttgaatagaaataaaataacgtgtctaatccaatatattttcactgtgatactagtatttagtcgcctactcgcctaggcctattatttccctctcaaactcaaattcttcctggaatccaccaaagccctgcctcccctctactgattctgaaagtggagttccatctgcgcgtcggttgatttattctatttgctgagttggactacattacctccatgtcgagactgcgagctctgtggcaggcttcctttaacgccacaaagagagctcttgtatggagttcagatgatctaattccgccaagtgaaagatgtatcttcaatttcaactcaaaagatgagctgaaaaggtggcatttgtactcagattcagagtatggaggtttgtcttctgcatccttagaaataactgatggcgcttcagttggagatactccattaactggtgtgttttctggtaacctttctttggatatgtctgaagagtcaacatggaggatcaggcgctatggattctgtgggatgcgatcaaagaagtttgatgggttcattgaccttgatgcatatgatacaatagcaatgaagatcaaaggggatggaagatgctacatatctacaatatacacggagaattgggtgaattcacccgggcaacaagaagacaactcgtggcaggcttttgtgtacatacctcctcaagacagatgggaagtcttgaagatccctcttgatcgctatttacccacatggagaggaaatgtgatccaggcaaagttggaaatgaaccctgctcggatcgtggggatgtctctctctgtaaacgcagaaggcggtgttcctggcgccaagactgggcctggtgattttaggcttgatgttgcttggatcaaagcgttgagagctttgtgaactccacaagtcatagttttatttcacatcggccctttccttctttatcaccctgccccagtggcgccgctgaactcatcacccgaccacaaccacaggagtaaccatagcacagattgccaactcctttatgcacttaataatggattttgttttgcttctgaggtttatgaataagtggtagaaaaatggagcatttagttaaggtgccccctttgg

SEQ ID NO: 147774 - DNA, 1753 bp, Zea Mays
caaccagcggccgaccgtcgaccgagaagcccgagcagcggtccgatcaggtgagcagcggcgcggctgctgcctgcccgcgcctgcctccgcggctccgccggccgtcgaccgagcagccgagcagaggcgcggcggctgcctgcccgcgctcgcctccgcggctccgctggccgtcgttcgccgacccgaacgccgagtcgcgcgagcgtgccggcgtgccccgcctctcgtcggctcgcgactgcgccagcgcggtcgcgccgccccaccccccggtgaccggcgtccggatccatccgtctggcaacccaaccggccaagggccaaccccgtccccggaccccgactccccgagggccaaccggccaaggcacaaccgctgaaccgcacaatgcatcgcctactcgcctaggcctattatttccctctcaaactcaaattcttcctggaatccaccaaagccctgcctcccctctactgattctgaaagtggagttccatctgcgcgtcggttgatttattctatttgctgagttggactacattacctccatgtcgagactgcgagctctgtggcaggcttcctttaacgccacaaagagagctcttgtatggagttcagatgatctaattccgccaagtgaaagatgtatcttcaatttcaactcaaaagatgagctgaaaaggtggcatttgtactcagattcagagtttgtcttctgcatccttagaaataactgatggcgcttcagttggagatactccattaactggtaatagttgttctatgttcttagcttttccatcttgtgccaatcatttgaagtatagtttgaattgagtactttctggtacaagagaaaacaatgatgtatctgtagcttcttacatttagcatgatagacctcattaaccatgaaatgtttgtggttttcttggaaaatgtctgaggtgagtccaaattatcagtgggtaccggctgctgtattttctttagtaattgaatcgaaacatgcagttttttacttatgattttcttagactggtttgtaaggtaacttttattaacatgtgtattcttgaaggtgtgttttctggtaacctttctttggatatgtctgaagagtcaacatggaggatcaggcgctatggattctgtgggatgcgatcaaagaagtttgatgggttcattgaccttgatgcatatgatacaatagcaatgaagatcaaaggggatggaagatgctacatatctacaatatacacggagaattgggtgaattcacccgggcaacaagaagacaactcgtggcaggcttttgtgtacatacctcctcaagacagatgggaagtcttgaagatccctcttgatcgctatttacccacatggagaggaaatgtgatccaggcaaagttggaaatgaaccctgctcggatcgtggggatgtctctctctgtaaacgcagaaggcggtgttcctggcgccaagactgggcctggtgattttaggcttgatgttgcttggatcaaagcgttgagagctttgtgaactccacaagtcatagttttatttcacatcggccctttccttctttatcaccctgccccagtggcgccgctgaactcatcacccgaccacaaccacaggagtaaccatagcacagattgccaactcctttatgcacttaataatggattttgttttgcttctgaggtttatgaataagtggtagaaaaatggagcatttag

SEQ ID NO: 147775 - DNA, 1510 bp, Zea Mays
caaccagcggccgaccgtcgaccgagaagcccgagcagcggtccgatcaggtgagcagcggcgcggctgctgcctgcccgcgcctgcctccgcggctccgccggccgtcgaccgagcagccgagcagaggcgcggcggctgcctgcccgcgctcgcctccgcggctccgctggccgtcgttcgccgacccgaacgccgagtcgcgcgagcgtgccggcgtgccccgcctctcgtcggctcgcgactgcgccagcgcggtcgcgccgccccaccccccggtgaccggcgtccggatccatccgtctggcaacccaaccggccaagggccaaccccgtccccggaccccgactccccgagggccaaccggccaaggcacaaccgctgaaccgcacaatgcagtgagagaccgaggccctgcctcccctctactgattctgaaagtggagttccatctgcgcgtcggttgatttattctatttgctgagttggactacattacctccatgtcgagactgcgagctctgtggcaggcttcctttaacgccacaaagagagctcttgtatggagttcagatgatctaattccgccaagtgaaagatgtatcttcaatttcaactcaaaagatgagctgaaaaggtggcatttgtactcagattcagagtatggaggtttgtcttctgcatccttagaaataactgatggcgcttcagttggagatactccattaactggtgtgttttctggtaacctttctttggatatgtctgaagagtcaacatggaggatcaggcgctatggattctgtgggatgcgatcaaagaagtttgatgggttcattgaccttgatgcatatgatacaatagcaatgaagatcaaaggggatggaagatgctacatatctacaatatacacggagaattgggtgaattcacccgggcaacaagaagacaactcgtggcaggcttttgtgtacatacctcctcaagacagatgggaagtcttgaagatccctcttgatcgctatttacccacatggagaggaaatgtgatccaggcaaagttggaaatgaaccctgctcggatcgtggggatgtctctctctgtaaacgcagaaggcggtgttcctggcgccaagactgggcctggtgattttaggcttgatgttgcttggatcaaagcgttgagagctttgtgaactccacaagtcatagttttatttcacatcggccctttccttctttatcaccctgccccagtggcgccgctgaactcatcacccgaccacaaccacaggagtaaccatagcacagattgccaactcctttatgcacttaataatggattttgttttgcttctgaggtttatgaataagtggtagaaaaatggagcatttagttaaggtgccccctttggacagatgttgctttttctctctctctagtatctgatcggccgataaaacgagtgcattccacccggacgataatgcgagagtaggattcagttt

SEQ ID NO: 147776 - DNA, 1630 bp, Zea Mays
caaccagcggccgaccgtcgaccgagaagcccgagcagcggtccgatcaggtgagcagcggcgcggctgctgcctgcccgcgcctgcctccgcggctccgccggccgtcgaccgagcagccgagcagaggcgcggcggctgcctgcccgcgctcgcctccgcggctccgctggccgtcgttcgccgacccgaacgccgagtcgcgcgagcgtgccggcgtgccccgcctctcgtcggctcgcgactgcgccagcgcggtcgcgccgccccaccccccggtgaccggcgtccggatccatccgtctggcaacccaaccggccaagggccaaccccgtccccggaccccgactccccgagggccaaccggccaaggcacaaccgctgaaccgcacaatgcatatttagtcgcctactcgcctaggcctattatttccctctcaaactcaaattcttcctggaatccaccaaagccctgcctcccctctactgattctgaaagtggagttccatctgcgcgtcggttgatttattctatttgctgagttggactacattacctccatgtcgagactgcgagctctgtggcaggcttcctttaacgccacaaagagagctcttgtatggagttcagatgatctaattccgccaagtgaaagatgtatcttcaatttcaactcaaaagatgagctgaaaaggtggcatttgtactcagattcagagtatggaggtttgtcttctgcatccttagaaataactgatggcgcttcagttggagatactccattaactggtgtgttttctggtaacctttctttggatatgtctgaagagtcaacatggaggatcaggcgctatggattctgtgggatgcgatcaaagaagtttgatgggttcattgaccttgatgcatatgatacaatagcaatgaagatcaaaggggatggaagatgctacatatctacaatatacacggagaattgggtgaattcacccgggcaacaagaagacaactcgtggcaggcttttgtgtacatacctcctcaagacagatgggaagtcttgaagatccctcttgatcgctatttacccacatggagaggaaatgtgatccaggcaaagttggaaatgaaccctgctcggatcgtggggatgtctctctctgtaaacgcagaaggcggtgttcctggcgccaagactgggcctggtgattttaggcttgatgttgcttggatcaaagcgttgagagctttgtgaactccacaagtcatagttttatttcacatcggccctttccttctttatcaccctgccccagtggcgccgctgaactcatcacccgaccacaaccacaggagtaaccatagcacagattgccaactcctttatgcacttaataatggattttgttttgcttctgaggtttatgaataagtggtagaaaaatggagcatttagttaaggtgccccctttggacagatgttgctttttctctctctctagtatctgatcggccgataaaacgagtgcattccacccggacgataatgcgagagtaggattcagtttaattctttgactgttaagagtactactgtttgatcgtttgaattatacacgttcatttgagt

SEQ ID NO: 147777 - DNA, 1568 bp, Zea Mays
caggtgagcagcggcgcggctgctgcctgcccgcgcctgcctccgcggctccgccggccgtcgaccgagcagccgagcagaggcgcggcggctgcctgcccgcgctcgcctccgcggctccgctggccgtcgttcgccgacccgaacgccgagtcgcgcgagcgtgccggcgtgccccgcctctcgtcggctcgcgactgcgccagcgcggtcgcgccgccccaccccccggtgaccggcgtccggatccatccgtctggcaacccaaccggccaagggccaaccccgtccccggaccccgactccccgagggccaaccggccaaggcacaaccgctgaaccgcacaatgcatcgcctactcgcctaggcctattatttccctctcaaactcaaattcttcctggaatccaccaaagccctgcctcccctctactgattctgaaagtggagttccatctgcgcgtcggttgatttattctatttgctgagttggactacattacctccatgtcgagactgcgagctctgtggcaggcttcctttaacgccacaaagagagctcttgtatggagttcagatgatctaattccgccaagtgaaagatgtatcttcaatttcaactcaaaagatgagctgaaaaggtggcatttgtactcagattcagagtttgtcttctgcatccttagaaataactgatggcgcttcagttggagatactccattaactggtgtgttttctggtaacctttctttggatatgtctgaagagtcaacatggaggatcaggcgctatggattctgtgggatgcgatcaaagaagtttgatgggttcattgaccttgatgcatatgatacaatagcaatgaagatcaaaggggatggaagatgctacatatctacaatatacacggagaattgggtgaattcacccgggcaacaagaagacaactcgtggcaggcttttgtgtacatacctcctcaagacagatgggaagtcttgaagatccctcttgatcgctatttacccacatggagaggaaatgtgatccaggcaaagttggaaatgaaccctgctcggatcgtggggatgtctctctctgtaaacgcagaaggcggtgttcctggcgccaagactgggcctggtgattttaggcttgatgttgcttggatcaaagcgttgagagctttgtgaactccacaagtcatagttttatttcacatcggccctttccttctttatcaccctgccccagtggcgccgctgaactcatcacccgaccacaaccacaggagtaaccatagcacagattgccaactcctttatgcacttaataatggattttgttttgcttctgaggtttatgaataagtggtagaaaaatggagcatttagttaaggtgccccctttggacagatgttgctttttctctctctctagtatctgatcggccgataaaacgagtgcattccacccggacgataatgcgagagtaggattcagtttaattctttgactgttaagagtactactgtttgatcgtttgaattatacacgttcatttgagt

SEQ ID NO: 147778 - DNA, 1206 bp, Zea Mays
aattagattccttccgtttctctccgtttgcggcatcatgagaaattattctttctcttcaacatgcccaatttgttgcgactcatgtctcatttgctgcatgtcatgtatacagagttggactacattacctccatgtcgagactgcgagctctgtggcaggcttcctttaacgccacaaagagagctcttgtatggagttcagatgatctaattccgccaagtgaaagatgtatcttcaatttcaactcaaaagatgagctgaaaaggtggcatttgtactcagattcagagtatggaggtttgtcttctgcatccttagaaataactgatggcgcttcagttggagatactccattaactggtgtgttttctggtaacctttctttggatatgtctgaagagtcaacatggaggatcaggcgctatggattctgtgggatgcgatcaaagaagtttgatgggttcattgaccttgatgcatatgatacaatagcaatgaagatcaaaggggatggaagatgctacatatctacaatatacacggagaattgggtgaattcacccgggcaacaagaagacaactcgtggcaggcttttgtgtacatacctcctcaagacagatgggaagtcttgaagatccctcttgatcgctatttacccacatggagaggaaatgtgatccaggcaaagttggaaatgaaccctgctcggatcgtggggatgtctctctctgtaaacgcagaaggcggtgttcctggcgccaagactgggcctggtgattttaggcttgatgttgcttggatcaaagcgttgagagctttgtgaactccacaagtcatagttttatttcacatcggccctttccttctttatcaccctgccccagtggcgccgctgaactcatcacccgaccacaaccacaggagtaaccatagcacagattgccaactcctttatgcacttaataatggattttgttttgcttctgaggtttatgaataagtggtagaaaaatggagcatttagttaaggtgccccctttggacagatgttgctttttctctctctctagtatctgatcggccgataaaacgagtgcattccacccggacgataatgcgagagtaggattcagtttaattctttgactgttaagagtactactgtttgatcgtttgaattatacacgttcatttgagtaat

SEQ ID NO: 147779 - DNA, 456 bp, Zea Mays
aaccacgtccacctcctcgggcacctacaggagagaggaagccagggaagagatgtgaaccgggcacagctcacaggacgtggtggtgaggttgtcgaggcagccacaggctccggcgagctgttcattgatgtcacagtcttcgaaggccatgtgtggggcgaacggagtccctggatctacctgatgacgagggtcggcggagtttgcaacagggacggtgccgaagtcaatgtggatgagcaggttgaggtgcgcgagcgcaaccgcagagtcgacgacgaattgatccgggcaagcgaggtcggacacgcaaacagaaccgaggctcgacgactaggaggttgtgagatagtctgcgtcacgcgtacccgtagaggcctcccagtaaatccgatccaagagatccgcgtcgtccgccaagagatgtgcctcgacgtctgcgcggagggctga

SEQ ID NO: 147780 - DNA, 111 bp, Zea Mays
tttggaaccataaatatgaataccatttaccaggaaccataattatgaaacatatttttggacagccatattgtgcccagaagttcatgaatttctcgaaaaactaggata

SEQ ID NO: 147781 - DNA, 398 bp, Zea Mays
acaatcacaagactacaaagcaaatgaagtttcctcgcaaaagggtgcagatccaggaccgaaaactgctgccatcagaagggataatacatacatatgttgtgatctcatcgcattcggcaaacacaagccacgaattgctcaaagcccttgcgcaatattcccagcatcacttggcagcaggaaaaacacacacgtagatttggggctacaaggaaatgaacgaatgaagcaggcacgcccaaagactgggaggagagacgaggtacacggggacacggctgtgtctggcaagaagcaacaaatctcccatggttgctgccttgctgattggaggcggcggcggcgttccgggcacagcggtagggttaagggggtggcttaacgacgacgcgtgc

SEQ ID NO: 147782 - DNA, 1357 bp, Zea Mays
gaaaacgtaagggagtcctacttgtctgcttcccgagttcagagttcagactcagcacatcacccttctctagtctcaaatggcgtgctcactcccgctccacgcccccttctcctcgtcgccccgcatcctctcctaccgccccgcgcccagaaccctccctctgttccgccgagggctcagggttccgtaccaccgctccccttccccgcctcgcgcgctcccggacgttgctgcgggggccgtggcgggcatccgggacgcgctcgccgacgccttcttgacgtcgccgccgacgtggcggtccgccgctgccagcaacctcgctgtctttgtctccggatcgccgttgcttctctcgggactgtccgcctccggcttcgccgccgcctatctcttgggcaccctgacgtggcgcgcgttcggagcccagggtttcctcctcgttgtcgcatacttcgttgtgggcacagcggttactaagttgaggataagacagaaggaagctctgggagtagcagaaaaaagaggaggaagaagagggcctggaagtgttattggttctagcgctgccggttgtgtttgtgccctactatcgatatatcatgctggtggtacagcgtcctctgagctctggagactgggttttgttgctagtttctgtactaaactaagtgatacagtttcaagtgaaatagggaaggcttttggaagaacaacgtacctggtgacaacattaaaggttgttcctagaggtacagaaggtgcaatcagtattgagggtactattgctggaattctagcgtctgtgtttcttgcaggtgctggttatcttcttgggcaggtggatgtatcacaagttgtgttatgcgttcttgcttctcagattgcaaattatgttgagagctatattggggccactttacaagacaaggaaggttttgaatggctgaataacgatattgtcaatgtactgaatatctctattggtgccatattggctgttctaacgcagcagctgctcgtcagttggagatcttaatttttccttttgacttaggtctgcatccactattcgaattttattcttgtagtagctgccatattttgcccatctgaaatgtaatcatagattcacatttgggcccatcctaactttctctaggttccggtctttgttatgcctactgtgaaaatgcaaaactgtctttccttcagttacattgaggagttctctaattatgctgttaacttaggcagatgttgattaggatctgtttgatagagctctcaaagtgttttttgggagctgaaaacaattttttttattaagaagtgggtgattttatgctaatta

SEQ ID NO: 147783 - DNA, 1229 bp, Zea Mays
agtcctacttgtctgcttcccgagttcagagttcagactcagcacatcacccttctctagtctcaaatggcgtgctcactcccgctccacgcccccttctcctcgtcgccccgcatcctctcctaccgccccgcgcccagaaccctccctctgttccgccgagggctcagggttccgtaccaccgctccccttccccgcctcgcgcgctcccggacgttgctgcgggggccgtggcgggcatccgggacgcgctcgccgacgccttcttgacgtcgccgccgacgtggcggtccgccgctgccagcaacctcgctgtctttgtctccggatcgccgttgcttctctcgggactgtccgcctccggcttcgccgccgcctatctcttgggcaccctgacgtggcgcgcgttcggagcccagggtttcctcctcgttgtcgcatacttcgttgtgggcacagcggttactaagttgaggataagacagaaggaagctctgggagtagcagaaaaaagaggaggaagaagagggcctggaagtgttattggttctagcgctgccggttgtgtttgtgccctactatcgatatatcatgctggtggtacagcgtcctctgagctctggagactgggttttgttgctagtttctgtactaaactaagtgatacagtttcaagtgaaatagggaaggcttttggaagaacaacaataggtacctggtgacaacattaaaggttgttcctagaggtacagaaggtgcaatcagtattgagggtactattgctggaattctagcgtctgtgtttcttgcaggtgctggttatcttcttgggcaggtggatgtatcacaagttgtgttatgcgttcttgcttctcagattgcaaattatgttgagagctatattggggccactttacaagacaaggaaggttttgaatggctgaataacgatattgtcaatgtactgaatatctctattggtgccatattggctgttctaacgcagcagctgctcgtcagttggagatcttaatttttccttttgacttaggtctgcatccactattcgaattttattcttgtagtagctgccatattttgcccatctgaaatgtaatcatagattcacatttgggcccatcctaactttctctaggttccggtctttgttatgcctactgtgaaaatgcaaaactgtctttccttcagttacattgaggagttctct

SEQ ID NO: 147784 - DNA, 835 bp, Zea Mays
tcattttaatccttttagcttttaggctatcagccaggttgtttatttagtatttgatatgcagggcacagcggttactaagttgaggataagacagaaggaagctctgggagtagcagaaaaaagaggaggaagaagagggcctggaagtgttattggttctagcgctgccggttgtgtttgtgccctactatcgatatatcatgctggtggtacagcgtcctctgagctctggagactgggttttgttgctagtttctgtactaaactaagtgatacagtttcaagtgaaatagggaaggcttttggaagaacaacgtacctggtgacaacattaaaggttgttcctagaggtacagaaggtgcaatcagtattgagggtactattgctggaattctagcgtctgtgtttcttgcaggtgctggttatcttcttgggcaggtggatgtatcacaagttgtgttatgcgttcttgcttctcagattgcaaattatgttgagagctatattggggccactttacaagacaaggaaggttttgaatggctgaataacgatattgtcaatgtactgaatatctctattggtgccatattggctgttctaacgcagcagctgctcgtcagttggagatcttaatttttccttttgacttaggtctgcatccactattcgaattttattcttgtagtagctgccatattttgcccatctgaaatgtaatcatagattcacatttgggcccatcctaactttctctaggttccggtctttgttatgcctactgtgaaaatgcaaaactgtctttccttcagttacattgaggagttctct

SEQ ID NO: 147785 - DNA, 2194 bp, Zea Mays
gtgctaaaattgtattctcattcagggtgtagctagcgcacgaccagtcaaactacgtacactgtattactcgatcctgctactatacagcaagaacctcaagcgtgcggttccttgtgagtgacccctactggctactgctacagcggaggcaagatcctggatgcggacctccgtttgtgggattacggcgggcgacacgaacgcacggcgaggccttgcctggacgggccccgtgccggtgcccccccccctgttctgcttgtatctggcgcgctttctctcatgtcgcgtcaatcgagtcgctcacgcgagtcacctgttttctttactggaagtgcaaccccctgttttactgcaagtgcaagtgcaaaggcttcatggcgagactcactctccccagtccccaaagcccagaaccccagagccgcacgcgcgagcgcgaacaccatgctgccggcgctcattgccctgctgctgtccctgctccccgcggtcgccgacgcagcgtcaatggatccaacagagagggagacgctgttccgcgtcatggaggccgtgtcctccgaccgggactggcgcgtcgagagccccgacccctgcggcgggccgtggccggggctggagtgcaagccggccgccgacgcgggcgcggcgcgcatgcacgtcacgcggctggacttcggcgtggagcccaacccgacgtgcaaggactcggcgtccttccctcccgaggtcttcaccctgccgcacgtccagtccctcttcttcgtcgactgcttcaccaacccggccgccaccacggcgctcgccctgccgccgcccgccaacctctcggccaccggcctgcagcagctcagcatccgggccaacccggcgctgtccggcgtgatgccgccggcgctggccagcctccggtcgctccaggtgctcaccatctcccagaacggcctggtccgcggcgagatcccgccgggcatcggggacctcacgtcgctgctgcgcctcgacctcagctacaactcgctctcggggccggtgccaagccagatcggccagctcaagagccttgtcggcctggacctcagctacaactcgctctccggcgccatcccgagccgcctcggcgagctgcgccagctgcagaagctggacctcagctccaacaacctcaccgccggcatcccggacgccgtcgccaacctcacgtcgctcaccttcctggcgctcagcaacaacggcctcaccggccgttttcctccgggcatctccgggctgcggagcctccagtacctcatcatggacagcaaccccatgggcgtcccgctgccttctgagctcggcagcctcgcccgcctgcaggagctccgcctggccggctccggctactcgggcccgataccggacgcgttcggccagctggcgagcctgacgacgctctcgctgcaggacaacaacctgacgggacccatccccgcggcgctcagccggctgggcaggatgtaccacctgaacctcagcaacaacgcgctcggcggggccgtgccgttcgaccgcgcgttcctgcgccggctcggcgggaacctcgacctgagcggcaactccgggctgtgcctggacgaccggagcgccctgcggggcatcggcgcctgccgaggcggcggcgacggtggcactccgatgtcgtcgtcggcgcgcactagctcggggagcagaggtgtgaggggttcgctggtcggcgctgcgtgcgtggccgtgtgctgccttcttgccttgaacgagcacgctctgtattgactggacaattgtgctcgtactaccattattgtaggtgtagttgtgcgctgaagtgaaatgaaccgctctatgctctcgagatgagcaacgagccggtgcagttacaatttttagctgctgcgtatgctagagcagagagcccgagccgtttgaaattgtatcacatcacacacgaccatcagcttagctagctcgtgctgccagtgaagttccaaattgtagtgtagagcaacaataatttaaggagccgacgctttgaaggagctgagctgagaagcaccgcgcgcgacaagtactacacatctaggctagcggtctctcttgtttcgtctcttgttttaaagtcgaaacagcgctgtctgatcatatatacggatggcaactgccacattttacc

SEQ ID NO: 147786 - DNA, 2554 bp, Zea Mays
cgcaaccagacaagggtatgtgcgagagcaactggacggacgggtaggcacgcccttatccactccggcgcggggagccgaagctgcgctgggcccagccggggccgtcaggcgggccatgcggcggaagcggtgcggtgcggtgcggtgcggtgcggtcgtgcgggcgatcttctagtccctgtcgatccacgtcgactcggtgtctcggtcaaggccttctttatcctccccgacctcacccagcgcgaccgtcaccgtccccggccactattattattttaccatcacctacccgctgccttcctccttcttttccctttcccatcgtcgaatcctcgccccttctcccgtcggctgttgcttttgcttcgaattcccgatttgcttgccggaaccctagcgacgccgtggtgacgcgacgccgacgcgtatggagatctccttcgaggcgtgggagggcgtgcagcggcatggtcaggacctcgcggaccgcctcgcgcagggtttcacgggcctgctccaggtgccgccgcagttcccgtggccgccgtcgccgcacaagcggatgcccttcgacatcgacctccccgtcgtccccttcggcgccggcggccccctcggcgtcccggggaaggacttccccttccccgccgcggccgtctcctcggtcatcgacatcggcggcaggctgggccaggccggcgctgagctcggggcgtccgtgggcggggccgtgcagcacgccgtgcggcgtctgcccgtgccgttccggaacggacagatccggcgccgcaagctaccgccgccgcttcctcagccgcccgcggattcggtgggcgagggcgcggtagggctcttcgtcgaaagggctgctgtagataggtgccccctcgaggcggcggccgccgccgccgccgcggcgactgggagcgctgccgcatctagcgtcagcggccctgttagcggagaagatttggacgaggacgacgatggtttcggctgcgatattgggactcttggaaacttcaagaaagctaacggtactgtaaatatgtcggcaacatacaataccaggagtcaagacatcgagagttctgttgttgcacgtggaggcctctggaggctggaggcatcggttggtccatctacttctggaaatgatacttcgcccctgtaccttattcagttggggcctctactatttgttcgagactctacgcttctcttgcctgttcatctatcaaagcaacatttgctttggtatggttatgatcgcaagaatggagttcattccctctgtccagctatatggtcaaaacataggagatggttgatgatgtcaatgatgtgtctcaatccaatagcttgttcgtttatggatctgcaattccctaatgggcaactaacatatgttgctggtgagggaatatcagccagtggctttcttccgttatttggtggtttgcttcaagctcatggaaaatatcctggagaaacaagagtgagtttttcttgcaagaataagcgtggcacaaggttcactcctatggtccaatggcccgataagtctgtttcattaggagttactcaagccttggcatggaaaagatctggccttatggtgagacccagcatacaagtcagtgtgtgccctacgtttggaggaagtgatcctggggtacgtgcagaagttgtccattcattgaaagaggaattgaatctgatgtgtggcctctcttgctcacagcgcccatcagcttatactgctctctctattggacgatcaaagtggaatggtcaagtgggcagttctggagtggtaatcaccttggaaacacctcttaataacattggaaggccgtcgttatctgttcaactgaatggtggttttgagttgtgatccttatgactcctgcactgaagctgtacatactattgtatatattgccatcactaatgttcgtgctccattgtcatggagacggctactcagctgatcaacctagaaaagtttgtggaagtgggctgcaggcttgcaggttgtttttgttactgtagtctataggtctaaagtctcaactcagcaaatcagctgctatggtatactcatgcgggcacagaactcaactgctttgttttccactcgaagaattataacaatccttgaagggattgcgatacttgcagcagttcagctcatattttcagaagttcatgaaagcggagggctcgctgccatggaatatgttcgtccagaatcacattttcttggagcaagactgactacctgtcgcaaactcgcagttggacattgttaacaattgtctgtttagtttgctttgttggatgttgagacaaacaagctggtgtatttttgtatttctctacatgcattgatcaatgaaccaaagactagcgatccctgttctactgttccactgacatgacaaatctgctgtcgatgttgtcccattacgtgctagtttcaaccttaacttatactagtttcaatcttaacttatatggaatttgactatgttgcagaaagaaa

SEQ ID NO: 147787 - DNA, 5454 bp, Zea Mays
aacttcgtcacggcgtcctgcttggcaagctcaggccacactacctctccagcgacgcctacggcctacctcattgatggcctcccctgctccaacctcgccgccggcgccgcgaagtcccccgcgaatctccccggcgtctgcggcaagacgggagctggtgaacaagattacaagacccatcaattgcctcctccaaccaccgtgtgttcccaagagaaggcccaaggctcaacgtcctcgctccatgcctcgccgcagcaggactgcaggagggtggccggcgttggcccctgttccccgggaccagtggtgtctgaggcgcaaaagaaggatcagtatagcaagctgttctgcaatcccattcctgatacacagctggctgtgttggcagcaattttcggttgggcagtagaggaagggctggagacccgtccgagtctccccctggatgtgctctgatctgggaactctttagggtcgtccttcttctgttttaatgaatccaagttccattcttgtttggaatgttcgcgagctgaacatgaaggcccgtagggactctgtacgagatgtgattgtctcgtcaggagcagatattgtttgccttcaagaaaccaaagtaatggccgttaatcatttcttccttggttcagtttttgggtctaattttgataagtttgttctgctacctgctgatggcactcgtgggggtattatcattgcttggaagagtgcaacagttcaggtcctagcttcccgggtggacagtcattcagtctcagttcagttcgccgaggttgaaggccgcaattggtggtttactggtgtgtatggtcccaagaggacgacgacaaattggccttccttcaggaactgggagatatcagggcagcatgtcctgggccttgggctattgcaggggatttcaatctgatttatcaagcttctgacaaaaacaataataatctgaatcgtgcaatgatgggttgttttaggcgcctctgggatgatttagaatgtgtttggtttgaggtcaaagtgggatgatgcgggggcgataccgtcctctcaattttttaagatcacgccgccaccaaaaactactcctgtgtttatctcgctcctacgtgactctcatccaaacactataaaaactatggccgccccatttcatcctttcatatacatccaaccaaacacatccttagagctgcaagaaacccctctttcgggacgaaagtttacctggtccaatgagcgtgacaatccatccaacacctgtccggctggaccgtgccttttgttcagttgattgggatgatatttttccggatgctgtgcttcagttcaaagcactacatctggaatttcagatcactgccccttgttattaggccttaaggtctgctcccagggtaaaaggaggtttcattttgaaagtttttggcccaagatggcagtttttttggatgcagtcaagcaaaactgggaggcacctgttactgctacttgcccagtctagagtttatttatgaaactgcaaagactcagcagagctttgcaaaagtggagccaacgtaaggttggcaacgtaaagttgcagctcgcaatggctaaggagattttgcaccggttggaaatcgtcagggactctcgtgctttatctcaaggggaggattggctgcgcagaaagctcaagggtcattgtttggggctggtttctctggatgaacttcatttctaaacggcaagttgaggacaagttatatatttctcaggatgagaaggaggagatagtggcagatttctatgagaagttgcttggttcagaagaggagagggaattttgttttgaccttgcagccttccacatgcagcagcagcatgatctgtcccctttggaagccccttttgcagaagaggaagtttgagcagtaattagggacctaccgatggacatggcccctggtccggatggcttcaccggtagattttaaggttggctggagtattattagcagcgatgtgcttgctgcgctgaatgcaatttatgggggccatgtgttcaaatttaggctcttaaactcagcattcataaccctgctccctaagattgaggatgctaccatggtgaaggattatcgacctataagcctgattcacagctttgtaaagttggtcaccaagatcctttctgctcgcttggcaccattgctgcccaagttggtctctaataaccagagtgcattcgttgaaggacggaatattcacgacaatttcctgccagtacaacagcttgccagagccgtgcataaaagcaaagagcctcacatcgatgaagttggatatttcgaaagcttttgacactgtgtcctagctcttcctattagaggtcctgcagcatctgggttttgggagatggcggtgtaaccttctgtgtttgctcctgtccacctccaccacataagttttggtgaatggtgtccctggctgccccattctccatcgccgtggactcaggcaaggcaacccctctcccccatgctctttattttggttatggacgtgcttaactctctgatccaactggcttcttcagacaatctgctgctgcccatagctgggcaaggtccctggcctaggatttctctttatgcagataatgtgattacttttttgaagcctgaacttttggacttatctgtggtgagggatttgttacattgcttcggggcggtctctaggctcaaaaccaacttgttaaaaagctcagctatagtgctctgaggatgacattgtgcgtactttgaatattctttcttgctcagttggcaaccttgttcttatctaggtatacccctcacaattaagaagccttctaaaagtgatttgttgccattgattgataaagtagcaagcaagctgccagggtggaaggcccctctcttgagcaaagtttttttttttctcgaacacgcagagagctgcgtatcattatattaaaagtagaaagaaataaggtccaaaatagaccggagtacaagtgacgccttacgacggtctaaacgtaacaaacataaactgattcatctataatggccttatgctaggtgcttgggtcttatggaatcatagaaacagatgcatttttgatggcatttcttctaatattgctaatttcttaatttaagttggggacgagcgccgtctgtgggagactgttggggccaagggcttgtcctcccttgctgcctccctctcttgagcaaagctggacgactggtagtggttaaatcagtcctcttcaacccctattcacgtaatgttggcgttggatctgtctaagtgggttattaaggccattgacaagaagagacggggtttcctttggaaaggccatgaacaagccaatggtggtaattgcatggtctcctgggcaaagccgcaacggtacaaaggccgttgctgtacggtggccttggggtccttgatctagagcgtttgggctgggcgctacgcatacacgttggctctagttcatgaaaaccgacacctcgacaccgtgggctggtctcaatttacagatcctgaggcaggttagggccttgtttgacatggcaactgaagtcattgtgggcaatggtgagaacactaaattctggacagattggtggctgcatggtaagagagtggctgatatggtccctaacctctttcgtgcaatccccatacggatggctaaaaggcgtacagtgagtcaggctgttcacaacagaagttgggtctccgatatcatgggtgctctcacggtccaagtgctgtttgaatatctccacatctgggagctgctggaggaggtgataatccagcccgacaccctggatactcttgtttggaggctttcttcttcgggatgctatagcagcaaatctgcttatgaaactatgttcgttggcaccatcaaattctccccttggaagcgagtgtggaaggcttgggctcctggaaagtgcaagttttttatgtggctggccctcaataaccgatgttggacctcggattgcctggcaaaaagggggctgttccatcagtcggcttgcctcttgtgtgaccaggctattgaatcaatcaaccatgtcctctcttcctgtgtgttggccagggaggtctggaccttggtgctgtttgagaatatcaagccaaatgcacagttggttgtccaggctgtagcgactgaagggtgtttggcgggggcaaaagccctccaggacttcgtcctaagggttggctcttagaggtcgtggtcactttttttcctttgtgtttgtgtaagggcggtggtgttgtactgtttggccatgggggattcttttctcccaggaccttgactttgctttcttaatgaaatgacgcgcaactttctcgcgtggttcgagaaaaaaaaaacaacaccgctctgctttggcttcccgatgggggtgtcggaacaccctgaaccgcagagacacgctgcgcgctaggttggccttgcgaaatctctctctcacgtggccatccttgatgtcctaatcatgtagttcgagcagagaatttggaatccggccgattgggtagccaattacagcctagtatggatatgtggggaagaagctcctagcatctttctggacgatttctgtttccttccagtcttgcaagatctgaataggattgtggaaggctatgaattttgaatggttccgtaggagtttcgcccacccctgggccctggtatttattcagtatcataaatgttagcacatttctgtatagatttggtcaaacttcaaatcatttgactcgttgaaaagtgagaattgcatttttttgggacggagacaatactttctaaccatatgtgcaatatagcatactgttccttctattatgtagcatacctgtctaaaaaactctacatatatgactttacattccttagttgtaatctgtcagatccagctaacaacaatttcaggtgatatatactgaaccaagagaaacgtcttctttctctctttacaagcctaattttctgcaatctttgctttcttttttttatacccaaactgaagtgttttctgcagctgccatagtttggctggtagggtgtgcaaggcgcacaccaatttctagtgatgtttatgccaattttcaaacttaccatatttaggatttaaatgaacctcttctgttgaaatcacactagcaagtgagattggtgtgctgacaaatgaactgaagtaatgtttgcatctttaatttgacaagtgtgctttctaatttatgaaatttctatgtttctgatacatgacttcatgctttatggtttgacactatcttccgattgtggtccattttatctttagtctttatgttatttgtatacctgaatattggaataaaattaaaagg

SEQ ID NO: 147788 - DNA, 488 bp, Zea Mays
ttacctggtccaatgagcgtgacaatccatccaacacctgtccggctggaccgtgccttttgttcagttgattgggatgatatttttccggatgctgtgcttcagttcaaagcactacatctggaatttcagatcactgccccttgttattaggccttaaggtctgctcccagggtaaaaggaggtttcattttgaaagtttttggcccaagatggcagtttttttggatgcagtcaagcaaaactgggaggcacctgttactgctacttgcccagtctagagtttatttatgaaactgcaaagactcagcagagctttgcaaaagtggagccaacgtaaggttggcaacgtaaagttgcagctcgcaatggctaaggagattttgcaccggttggaaatcgtcagggactctcgtgctttatctcaaggggaggattggctgcgcagaaagctcaagggtcattgtttggggctggtttctctggat

SEQ ID NO: 147789 - DNA, 683 bp, Zea Mays
acaacagaagttgggtctccgatatcatgggtgctctcacggtccaagtgctgtttgaatatctccacatctgggagctgctggaggaggtgataatccagcccgacaccctggatactcttgtttggaggctttcttcttcgggatgctatagcagcaaatctgcttatgaaactatgttcgttggcaccatcaaattctccccttggaagcgagtgtggaaggcttgggctcctggaaagtgcaagttttttatgtggctggccctcaataaccgatgttggacctcggattgcctggcaaaaagggggctgttccatcagtcggcttgcctcttgtgtgaccaggctattgaatcaatcaaccatgtcctctcttcctgtgtgttggccagggaggtctggaccttggtgctgtttgagaatatcaagccaaatgcacagttggttgtccaggctgtagcgactgaagggtgtttggcgggggcaaaagccctccaggacttcgtcctaagggttggctcttagaggtcgtggtcactttttttcctttgtgtttgtgtaagggcggtggtgttgtactgtttggccatgggggattcttttctcccaggaccttgactttgctttcttaatgaaatgacgcgcaactttctcgcgtggttcgagaaaaaaaaaacaaca

SEQ ID NO: 147790 - DNA, 225 bp, Zea Mays
atgccgaccaatctgcagcggggactgccagccaccgcggcgaccggccaacacgcgggcggggacaacacaaagaagcagagaaggttcctgacaggtgggggccacagggcagcgggcgagcgtgcaaaaacacaacggtacatcgctgacaaccgagcccacgcgacaacaacactaggtgcaggcacgcgggtcgtccgcgtcgcacgcgactgcgactga

SEQ ID NO: 147791 - DNA, 1780 bp, Zea Mays
acacaacatatctcccccatccttctctctcacccatgccttcataaacagcaaagttggctagctggttatttgtatcaagatgaagtttgaagccaacacatccatttctcgctagtaagatcaagaaaaatccattgaagcctacttcctacctaaatcttcatggatccttggagtgaaagtgagggcaagagagcccatgatcctatcttcaaatgtttcagccaaaaccaaggtcaccatcacttcatggaaaggagcacagatgctgctgttgctctctctgagagatgtagatgcatctgggtttcaggtccaattatcgtgggtgcaggaccatcagggctcgctgctgctgcatgtctcaaggagaagggaatcagtagccttattcttgagcgctccagatgcctagcttccctctggcagctcaagacatatgatcgtctcagccttcatcttcctcggcaattctgtgagcttcctctcatgcctttccctgccgactatccgatatatccctcaaagcagcagtttgtagcctacctggagagctatgctgcaagttttggcatatgtcccacatacaatcgcacagtggtgtgcgcagagtatgatgaacagcttctgttatggcgtgtgaggacgcagacttctgacacaacgggagaggaggtggagtatgtatcccggtggcttattgtggcaactggtgagaatgctgaggccgtgcagccggatatcggtggtctacaagagttcccgggaacaatcatgcacaccagtgcatataaaagtggcagtgcattcactgggaagcgtgttctcgttgtcgggtgtggaaactccgggatggaggtgtgcctagacctctgcaaccacagtgccgagccccatattgttgtaagagatgctgtacacatcttgcccagggagatgcttggccactccacctttggtctgtcaatgtggctcctcaagtggctcccggtccacgttgtggaccgtgttcttctgtgcatagcgcgggccatgctcggggatactgctcggcttgggctaaagcggccggcctctggtcctcttcagctcaagtcactgtctggaaagaccccagttcttgacgtcggcacatttgcaaagatcaagtctggagatatcaaggtacgacctgccgtaagacaggtatcaggaagagcggtagaatttgcggacggtgagttggaggagttcgacgccattgtgcttgcgactggctacaagagcaatgtccccttctggttgaaggaccgagtgttattttctgaaaaagatggattgccaagaaaagcatttccgaacgggtggaagggtgagaagggcctgtactcggttgggttcacccggcgtggactgatgggcacctcggtcgatgccaggagggttgcccacgacgtcgagcagcaatggcggaaggccaaagggacgcatcgggacggcgttcctctacctctggtcgctgttgtttaccatggtgatgggttgtgattgtgagttgccaaagggtgtatgtacgtacgcatgcattctgctgcttgcttgtgtagtgctttgtatagggtattgtactgtcaatttctttttctttttttcttttggcgtgcgttcgttttgatgactaaccatcctacgtactataggggagggggtgaatactgaggtggccgtgttcttccaaagtcggggctcagttgacttggcctctagctactgataatgaaagaagcttgcctggttt

SEQ ID NO: 147792 - DNA, 234 bp, Zea Mays
atgagcggtggtggggataaggctgttggtgctccacagcaaagaaacagagaacgagatgagaaatatcaggggataaaaacagaagctaagtacgatggaatgaaagatccggctgaggatatttccagaaaaaataacgcgctaagaatatcccaggaagctgacatgatgagctctagcggcaaaaatctcgtcgtaggaaagtttctagcgtctaggagatgtacgtga

SEQ ID NO: 147793 - DNA, 2964 bp, Zea Mays
atggcggattcgcgaggaatagcttccaagagcgctgacaaggatagcacctccactcgcccggcgcgcctccgcgtcatgcgccaggaagtcaaggattttttgacgagtcctcgccgtagccgccccaagaagcagccgcctccgcctcatcccccgccgccactggaggagaaggtgaaggagaggaagaagggaaaggagaaggcagcgacggaggaagagaaattcgagcgcgcgcaatacagctgtgccttccaggacgagggcgatgggggccgcgacttcgcgccgccggagctggtctggggtaaggtgcggagccacccctggtggcccggacaggtattcgacgccgccgatgcgtcagagatcgcactgcagcaccggaaagccggcgccccgctcatcgcctacttctgggacaggaccttcgcgtggagcgactcttctgcgctgctccccttctgcgccaactttacgcgactatccacccagagtactatgtctagcttcgtctccgccatcgactccgcgctgttggaggttgagcgacgcgtagaggctggcctctcgtgcggttgcttcagttccaacattgccacgaagcaggaggttcaaaactccggtatccggcaaggggcgtatggtgcggcgatagactctgtctacacgagggatgccttccatggcaaaacatttcttgactacatctcagcactaggaaagaagccactagccggtgctgatcttcttgacctagccaccgccaaagcacagttgagggcattcaatcgttcaaggggttcaagggaccttcctgagtttgtgatgtttgagggcattgcggagattacagagatgacacacacaaagggagaaaggatgcacaagagtgaggatgatgttctgagcaaggagaagaaatcgaggcgcgctgggagttcacgtagaaaaggagaggctttaccagaggctgcaaatgatgatgctatagatgaagacagcaatggaggggcaggaaatgatacgttgagtcagggggaaaagtcaaagcgtgtgaagagttcatcgaagaagaaaacagacatttacaaacatttatatggactcaaaactgattctgttgctgacagcagaacactggacaagaagggagtagatgatgttttgagcgagagaaaatctgggcgcacactgcgatccacgagcaagaaggaagatgcattagagggtttgaaaaggctggcaaagcatggaattgaggaattagcaggaaaaagcaaagatgcccccgttcttaaagaaaacaatcagaggcatggtgcaggctctgcacacaagggtagaatcacagaggatgggtatcatagacttggagattgcaatgctgaggatctaacttctccaagcaagagaagattggggcataatgaaaactcaataatcaagccagtgaccatctccgagcatggtaggaagaagaagaaactttctgaactcatggcagctataggcaggcctaattctgtatcgggtggtaagagcaaagctcgagggaagcgttcgttgcatggtttagctgagaaacctgaggatgctgatcgccactctaaggatacattgatgactaggaaaagaaagaagctcaacacattaggggatttatcttcacagtcagagcctctctctcctaagaagtccacaaaggttggagaactgatgagcaaagcagctgggagcaacatgttacaggcagcacctgctgtcaaagctattagtgcagtgtctcagacgaaaccacgtagggctaagcacaggcaagtaaatgctgcagacaaatctccacgtcatatgaaggtaaatcgggggaacagcaaagccgctagtaaggagtctctatcttgtggagaaatgctacggcagatctcattagcagcatgtggtcttaagcagagagaggaaattgctccttcaagtgttaatttctttaccgattttaggaagaactccattttttctagttctgatgtcgatgagaggatgcctgagaaggcaaccaacgccgagtccactccttcagaacagcccattgttgatcatatgcaggatgactattggtccgacattctcattaatgtggaggagccgttatctagcctcaaaaagaagatatataagagtaagaaaagagcaaacaagaaggcacctcaggttaagaaacctcctgttaattcattggcgactgcagaaaatgcggatgagccaaggagtgaaggcaaccaagatacagaaaatggggaacaacttaggaacaaaacgaagctgttttctgcaaatggatctcaacagaatgggacaaaatctggtgaagagatggaaaatagctttctgtctggactggtgctgcacttcagcaggccaagtgatgttccatcatgcagtgaccttatcaagatctttagccaatacggtcctgttaatgaagccaaggcagaggttgcaaacagtaccagctctgctcaggtgatcttcaagaggcgcatggatgctgaggcagcgtttgcaggtgctgggaagatcagtgcccttggaccagcccttacgagctttcgtctcaccgacttcccagcaagtgcttcaggaaataaagcttcacatggtgcatgaaagagcgaatagagtgttgcatggcagtgagggaaaccagatgagggagttagagaaaaaggtatactctactgtatgtggtagctaggttgttgcaggattaattcataggaacagcgatgacacttgtgtcgtccagtgttgtggaggtgtcatatactgcagatcacttgacatgagttgccaagaaccaataggtgttgtaaaagcatgtttgttttaaactgagttttggtacttaaaaagtgtgctttgtttcttaataatccaagtactggatattgttgcgggtgc

SEQ ID NO: 147794 - DNA, 1259 bp, Zea Mays
cgtcactggcattatcctacctttggtttcgcactcgcccatcacccacctctgactgtcgtatcgagctaaaacccttgctctccctgcccgcccattttcctttccccttggcattcggctccactgcttctccggcgaattggatcggcgatccatcgtcgtcggatcgcaactcctgactagcttgttgctgcaggatcgttatccgccgcgcctgctgcttgggtttgttttccctgcccacggaaatggggatggagatagacatggagacgtatcccaatcttaatacttccccctcggccgccactgcctcaggcgacgccaaggcctgcgccaactgccacaccaccaagacgtcgctctggcgcggaggaccggagggccccaagtccctctgcaacgcctgcggcatccgctaccgcaagaggaggcaggcgatcggtctcgacgcaggagcggccgccgccgccaactcacagcaagatctgcagcagccaaagaagaaggccgccgtcgatccgcagcagcaggaccagcatcagctgagaaagaagacaacagcggtcgctaatccacagcaggatcggcatcagccgagaaagagagcagctgccgctgccgctgccaccgatccacagcacaccagcatcaccaagaaagacacggacaagaaggatcagcaagtcaccgtggatctccacgtggtggggttcggcaaggaggcgacgttcaagcagcgccgccggatgcgccacaataagtgcatgagcgaggaggagagggccgctgttcttcttatggcgctctcatcgggcgtcatatatgcatcatgagaagtccgctctcctgattccaactgttccgttgcagatggagatatagatccgccttcccttccattcatcatccccctgcttcctatccctatcttcctcttcctcctaggtcatccatcagtagtactgtagtgataggtctagctagactctcatcaatcaatctatcgcttgactcatcagtcaatctatctctctatcttgaaaaattaatccatcctctatctctctctctctctctctctcttttagtttttttgggcaagttagtagtagcaatagcgaagccggacaagacaaatccattcagtcatgtgatgtacttgctcagctgtgtaatgtagtataatgccgttatgcaatgcaatgtttacctgactgactgtaatctccagatgcagcaacgtctctttgttg

SEQ ID NO: 147795 - DNA, 1020 bp, Zea Mays
atttcgttccggccggtcgccgaatcgctctttcgttttgttttacttatttatcatcatagtcaatagtcccgggctcatcatcttatatgtctgtatcctctgcagtccctctgcaacgcctgcggcatccgctaccgcaagaggaggcaggcgatcggtctcgacgcaggagcggccgccgccgccaactcacagcaagatctgcagcagccaaagaagaaggccgccgtcgatccgcagcagcaggaccagcatcagctgagaaagaagacaacagcggtcgctaatccacagcaggatcggcatcagccgagaaagagagcagctgccgctgccgctgccaccgatccacagcacaccagcatcaccaagaaagacacggacaagaaggatcagcaagtcaccgtggatctccacgtggtggggttcggcaaggaggcgacgttcaagcagcgccgccggatgcgccacaataagtgcatgagcgaggaggagagggccgctgttcttcttatggcgctctcatcgggcgtcatatatgcatcatgagaagtccgctctcctgattccaactgttccgttgcagatggagatatagatccgccttcccttccattcatcatccccctgcttcctatccctatcttcctcttcctcctaggtcatccatcagtagtactgtagtgataggtctagctagactctcatcaatcaatctatcgcttgactcatcagtcaatctatctctctatcttgaaaaattaatccatcctctatctctctctctctctctctctcttttagtttttttgggcaagttagtagtagcaatagcgaagccggacaagacaaatccattcagtcatgtgatgtacttgctcagctgtgtaatgtagtataatgccgttatgcaatgcaatgtttacctgactgactgtaatctccagatgcagcaacgtctctttgttgaaaccaggagtaaaccgttgcatggatgttgaccttgcatcgatttgg

SEQ ID NO: 147796 - DNA, 1377 bp, Zea Mays
gcaggctgctgatacgctccgaccacagccgtcctccgccaggcacccaggccgcctccgcctccctcgccatcgccagtcgctcgccgccttgtcctgctccctcgcctctcctgctcggtgctcgccagtcgcccccgctccctgggcacccgcgtcccttggctcacccgacgccgccggcccacggttggcctggccccctcccccctcgcctgctctgctgcggcgctgctcgcccgtcgccccgcttccctggctcactccctcttttcggtctctgtcacccttctcacggaggaacaaaggatcagaaatggctatgcaggccacaaggaggctagcgtctttgagcctccaacgacgcctactccttctctctcagaccgaggccccaagcatcccaaccgcggcggcggcggccttcctccactcccatgccaccagcttcgggtacaagcagattcgcgaagaggataagagcaaattggttggcaacgtgttcagcagtgtggcttccagctacgacctcatgaacgatctcatgagtgtcggcctgcataggctgtggaaggacaggcttatttccaagctgaacccctttccggcaatgaagcatctcgatgtggctggtggaacaggtgatgttgcttttcgtgtactggaaagaattaagagtgtgagtcacagagctatgcagggtacacttactgaaaccgaagaagacacccacatttatgtctgtgacattaatccaaatatgctaaatgttgggaaaaagcgtgctgcagaaagaggttatagcgaagagcattgtcttagctggatacaaggagacgcagaagctctgagttttgaggatggatctatggatggttacactattgcatttgggatcagaaatgtgacgcacattgagaaagctctatcagaagcttacagggttctaaagcgaggggggaggttcctatgcttggagttgagtcatgtggatgtccctgtttttaaagagatttatgatgtttactcgttttctgtgattccgactattggagagctggttgctggtgatcggcagtcgtaccaatacttggttgagagcatccgtcggtttccaaatcaggaaaagtttgctcagatgattcaggaagccggattccagagggtggaatatgagaacctcgtgggtggtgtagttgccattcattctggactgaaactgtagagctgaatacggatggatgttttttatcattcatgcgtgcaccgcaccttctaaaaacaataaattctacaataagcagtactcctgcaatatattttgttaatgttgtttttgaaatgaattctataacatcaaactgattttattacata

SEQ ID NO: 147797 - DNA, 1445 bp, Zea Mays
gcaggctgctgatacgctccgaccacagccgtcctccgccaggcacccaggccgcctccgcctccctcgccatcgccagtcgctcgccgccttgtcctgctccctcgcctctcctgctcggtgctcgccagtcgcccccgctccctgggcacccgcgtcccttggctcacccgacgccgccggcccacggttggcctggccccctcccccctcgcctgctctgctgcggcgctgctcgcccgtcgccccgcttccctggctcactccctcttttcggtctctgtcacccttctcacggaggaacaaaggatcagaaatggctatgcaggccacaaggaggctagcgtctttgagcctccaacgacgcctactccttctctctcagaccgaggccccaagcatcccaaccgcggcggcggcggccttcctccactcccatgccaccagcttcggtacacattccctgtattttccttgttttttctgcttatatagatcctaaaatctcgtagttcaccagggtacaagcagattcgcgaagaggataagagcaaattggttggcaacgtgttcagcagtgtggcttccagctacgacctcatgaacgatctcatgagtgtcggcctgcataggctgtggaaggacaggcttatttccaagctgaacccctttccggcaatgaagcatctcgatgtggctggtggaacaggtgatgttgcttttcgtgtactggaaagaattaagagtgtgagtcacagagctatgcagggtacacttactgaaaccgaagaagacacccacatttatgtctgtgacattaatccaaatatgctaaatgttgggaaaaagcgtgctgcagaaagaggttatagcgaagagcattgtcttagctggatacaaggagacgcagaagctctgagttttgaggatggatctatggatggttacactattgcatttgggatcagaaatgtgacgcacattgagaaagctctatcagaagcttacagggttctaaagcgaggggggaggttcctatgcttggagttgagtcatgtggatgtccctgtttttaaagagatttatgatgtttactcgttttctgtgattccgactattggagagctggttgctggtgatcggcagtcgtaccaatacttggttgagagcatccgtcggtttccaaatcaggaaaagtttgctcagatgattcaggaagccggattccagagggtggaatatgagaacctcgtgggtggtgtagttgccattcattctggactgaaactgtagagctgaatacggatggatgttttttatcattcatgcgtgcaccgcaccttctaaaaacaataaattctacaataagcagtactcctgcaatatattttgttaatgttgtttttgaaatgaattctataacatcaaactgattttattacata

SEQ ID NO: 147798 - DNA, 2430 bp, Zea Mays
gttggagttactctaatattagacataggtttatagaacaaaagtctacccattaaaaaatatttctaaatataaatttaaaataattattctttaaatgatagaagataaagtttgaattttaaaatacgtaacggagggagagggagtagcactctgtaattatccgtgaaaaaaaagaaggaagcaaaacgaacatgtggggaaaaaacttggattgagtagggtgggttggtcggaagtccgacggacgggacgggacgcgagacggtgccgcaccgcccgcccgttttcttcctcagcgccggcacggcggcacatccactccaccgcaactgagccatctcttctccttcctcctccgcgcttctgaatgtgaggaggcttacaacgcccggtcccccctaaatccaaatccagcttccgctttgcagggcacgacccccttcgcaactgactgagtccaaatccaaatccagttaccccactcaacctcttttgatttgatttcgcaggatccatccgagaacaagcagccacttctccgatgccgtcctcaatggccaaatccctcctcctccctccccagttcgtctccgtctcaccccgccacccccaccgcgccggattccccgtcctcaagccccgccgcgcctcgctgctggcagccaccggtggagacgtcacgcccgcgccggacgccgacaacggctccaacaccaaccctctcgtcgaggtgccccgcgcgctctggcgccgcaccctgcagcctctcggcgactatggcttcggcaagcgcagcgtctgggagggcggcgtcggtctcttcatggtctccggggccgccctcctcgccctcgccctcgcatggcttaggggattccagctccgctcccgcttccgcaagtacaacaccgtcttcgagttcacgcaggcgtgtggcatctgcgtcggcacgcccgtccggatacgaggggtcaccgtcggctccgtcgtccgcgtcgactcctccctcaggagcgtcgatgccaccgttgaggttggagatgataagatcatcataccacggaattcagtggtcgaggttaatcagtcgggtcttctaatggagacactcattgatatcacacccaaggatccactccctgcaccttcagtaggaccacttgacccagactgcaccaaagaaggtttgattctctgtgacaaagagaggatgaaaggacagcaaggtgtaagcttagatgcattggtgggaatatttacccgactaggtagagacatggaggagattggcgttagcaaaagctataagttggctgaaaaggttgcatctataatggaagaggcacaacctcttcttacacggattgaggatttagctgaagaaatgcaacctttgctctctgaagtccgtgatagtgatctgctgaaggatgtggagactatagctaaaggcctggccgacgcgtctgttgacctaagaaggctgaagtcgtccatgctcaccccagagaacacggatcttattaagcagtctattttcacccttatatttaccctgaagaacattgagagtatcagctcggacatctctgggttcacgggtgatgagacgacaaggcagaacatcaagcttctgatcaagtctctcagcaggctattatgattgtttttcaatgtgcagaacagaatgatggattgctttgctttgctttgctttgtttgagacaggaattgatgctggtagagtagggtgactgtgtgtgtcttggtggcacagaggtgtaggaagagtagcagctaattaatgttccacaaggttttggttattctggtaacaagtttttttttcttttttctttttttttaaaaaaaaaactcggatcagtattgagctgttgtaggtcatatagtaggcccatttttcatcagctgatggatcgcccttgttggctgcctgagcaaatgcgcaactgattgtttctgttgtggattggtgcaacttgcaaatgattgaagcttatgacgaggccgtggggatggtgtaggcgatcgatcttaaacgccgaagcatgcacagatgcaggagtggaagcagccgagctggaatgatgatgaagtgcaggggtagacattttaaaaccgaaacctgaattcgaatagaccgaattatcgatctattctgtttttcgggttcgattcatatatatatgctatattttaggatatgggttcagttcctaacctttaaaatccgaataacccgaaatataaaaaaagcttttaatatgtgatggtattattatgtgatttatgaacttattaactaaaaatcatgatatcatatgtatatatgtatgttatttttttagtcacttgttgtaataatagtactttcaattaattaattattgtatatattataat

SEQ ID NO: 147799 - DNA, 2290 bp, Zea Mays
gttggagttactctaatattagacataggtttatagaacaaaagtctacccattaaaaaatatttctaaatataaatttaaaataattattctttaaatgatagaagataaagtttgaattttaaaatacgtaacggagggagagggagtagcactctgtaattatccgtgaaaaaaaagaaggaagcaaaacgaacatgtggggaaaaaacttggattgagtagggtgggttggtcggaagtccgacggacgggacgggacgcgagacggtgccgcaccgcccgcccgttttcttcctcagcgccggcacggcggcacatccactccaccgcaactgagccatctcttctccttcctcctccgcgcttctgaatgatccatccgagaacaagcagccacttctccgatgccgtcctcaatggccaaatccctcctcctccctccccagttcgtctccgtctcaccccgccacccccaccgcgccggattccccgtcctcaagccccgccgcgcctcgctgctggcagccaccggtggagacgtcacgcccgcgccggacgccgacaacggctccaacaccaaccctctcgtcgaggtgccccgcgcgctctggcgccgcaccctgcagcctctcggcgactatggcttcggcaagcgcagcgtctgggagggcggcgtcggtctcttcatggtctccggggccgccctcctcgccctcgccctcgcatggcttaggggattccagctccgctcccgcttccgcaagtacaacaccgtcttcgagttcacgcaggcgtgtggcatctgcgtcggcacgcccgtccggatacgaggggtcaccgtcggctccgtcgtccgcgtcgactcctccctcaggagcgtcgatgccaccgttgaggttggagatgataagatcatcataccacggaattcagtggtcgaggttaatcagtcgggtcttctaatggagacactcattgatatcacacccaaggatccactccctgcaccttcagtaggaccacttgacccagactgcaccaaagaaggtttgattctctgtgacaaagagaggatgaaaggacagcaaggtgtaagcttagatgcattggtgggaatatttacccgactaggtagagacatggaggagattggcgttagcaaaagctataagttggctgaaaaggttgcatctataatggaagaggcacaacctcttcttacacggattgaggatttagctgaagaaatgcaacctttgctctctgaagtccgtgatagtgatctgctgaaggatgtggagactatagctaaaggcctggccgacgcgtctgttgacctaagaaggctgaagtcgtccatgctcaccccagagaacacggatcttattaagcagtctattttcacccttatatttaccctgaagaacattgagagtatcagctcggacatctctgggttcacgggtgatgagacgacaaggcagaacatcaagcttctgatcaagtctctcagcaggctattatgattgtttttcaatgtgcagaacagaatgatggattgctttgctttgctttgctttgtttgagacaggaattgatgctggtagagtagggtgactgtgtgtgtcttggtggcacagaggtgtaggaagagtagcagctaattaatgttccacaaggttttggttattctggtaacaagtttttttttcttttttctttttttttaaaaaaaaaactcggatcagtattgagctgttgtaggtcatatagtaggcccatttttcatcagctgatggatcgcccttgttggctgcctgagcaaatgcgcaactgattgtttctgttgtggattggtgcaacttgcaaatgattgaagcttatgacgaggccgtggggatggtgtaggcgatcgatcttaaacgccgaagcatgcacagatgcaggagtggaagcagccgagctggaatgatgatgaagtgcaggggtagacattttaaaaccgaaacctgaattcgaatagaccgaattatcgatctattctgtttttcgggttcgattcatatatatatgctatattttaggatatgggttcagttcctaacctttaaaatccgaataacccgaaatataaaaaaagcttttaatatgtgatggtattattatgtgatttatgaacttattaactaaaaatcatgatatcatatgtatatatgtatgttatttttttagtcacttgttgtaataatagtactttcaattaattaattattgtatatattataat

SEQ ID NO: 147800 - DNA, 2356 bp, Zea Mays
gttggagttactctaatattagacataggtttatagaacaaaagtctacccattaaaaaatatttctaaatataaatttaaaataattattctttaaatgatagaagataaagtttgaattttaaaatacgtaacggagggagagggagtagcactctgtaattatccgtgaaaaaaaagaaggaagcaaaacgaacatgtggggaaaaaacttggattgagtagggtgggttggtcggaagtccgacggacgggacgggacgcgagacggtgccgcaccgcccgcccgttttcttcctcagcgccggcacggcggcacatccactccaccgcaactgagccatctcttctccttcctcctccgcgcttctgaatgtgaggaggcttacaacgcccggtcccccctaaatccaaatccagcttccgctttgcagggatccatccgagaacaagcagccacttctccgatgccgtcctcaatggccaaatccctcctcctccctccccagttcgtctccgtctcaccccgccacccccaccgcgccggattccccgtcctcaagccccgccgcgcctcgctgctggcagccaccggtggagacgtcacgcccgcgccggacgccgacaacggctccaacaccaaccctctcgtcgaggtgccccgcgcgctctggcgccgcaccctgcagcctctcggcgactatggcttcggcaagcgcagcgtctgggagggcggcgtcggtctcttcatggtctccggggccgccctcctcgccctcgccctcgcatggcttaggggattccagctccgctcccgcttccgcaagtacaacaccgtcttcgagttcacgcaggcgtgtggcatctgcgtcggcacgcccgtccggatacgaggggtcaccgtcggctccgtcgtccgcgtcgactcctccctcaggagcgtcgatgccaccgttgaggttggagatgataagatcatcataccacggaattcagtggtcgaggttaatcagtcgggtcttctaatggagacactcattgatatcacacccaaggatccactccctgcaccttcagtaggaccacttgacccagactgcaccaaagaaggtttgattctctgtgacaaagagaggatgaaaggacagcaaggtgtaagcttagatgcattggtgggaatatttacccgactaggtagagacatggaggagattggcgttagcaaaagctataagttggctgaaaaggttgcatctataatggaagaggcacaacctcttcttacacggattgaggatttagctgaagaaatgcaacctttgctctctgaagtccgtgatagtgatctgctgaaggatgtggagactatagctaaaggcctggccgacgcgtctgttgacctaagaaggctgaagtcgtccatgctcaccccagagaacacggatcttattaagcagtctattttcacccttatatttaccctgaagaacattgagagtatcagctcggacatctctgggttcacgggtgatgagacgacaaggcagaacatcaagcttctgatcaagtctctcagcaggctattatgattgtttttcaatgtgcagaacagaatgatggattgctttgctttgctttgctttgtttgagacaggaattgatgctggtagagtagggtgactgtgtgtgtcttggtggcacagaggtgtaggaagagtagcagctaattaatgttccacaaggttttggttattctggtaacaagtttttttttcttttttctttttttttaaaaaaaaaactcggatcagtattgagctgttgtaggtcatatagtaggcccatttttcatcagctgatggatcgcccttgttggctgcctgagcaaatgcgcaactgattgtttctgttgtggattggtgcaacttgcaaatgattgaagcttatgacgaggccgtggggatggtgtaggcgatcgatcttaaacgccgaagcatgcacagatgcaggagtggaagcagccgagctggaatgatgatgaagtgcaggggtagacattttaaaaccgaaacctgaattcgaatagaccgaattatcgatctattctgtttttcgggttcgattcatatatatatgctatattttaggatatgggttcagttcctaacctttaaaatccgaataacccgaaatataaaaaaagcttttaatatgtgatggtattattatgtgatttatgaacttattaactaaaaatcatgatatcatatgtatatatgtatgttatttttttagtcacttgttgtaataatagtactttcaattaattaattattgtatatattataataaaaga

SEQ ID NO: 147801 - DNA, 587 bp, Zea Mays
caaaggaacgcctggtagtggttacacacactgcacttgtcttgtcatctgccttctctcccgcccgctttattaaaggatggatgtctcatttgttccgaacaaaccgcttcagacgatacaaggtaactgacctgatcagccataggaggcatgagtccaatggcctttgccagaagaaagaaggaagcagctggttgtagtagtatagtgttccatccagttgaaaaggatattgttacttgctgaactgaactacccagctacgagtacattacatcacaagcagaagcaaggggatggacctactaagaagaggaagacgaagacgaagatgaggaatcctgagcatcgggtccgtctgcttggtcgataccaaacttgtgcttgaaggtgtcctggcgctgcatccacatcatgtggccctgatacaccaacgaaatcattttggattcggaaagggaggcggaggggaatagaagcctccggatccagtcgatgacaagcatgcatgaggaaagcctgcacctacctgcagcgctgctgcccatacgacgaggaaggaggccacccagaagcgcttctcc

SEQ ID NO: 147802 - DNA, 1630 bp, Zea Mays
aaccctaacttcagcccctgccgcgcgcccgcgatccaccccgtttcgactgctcgcctgctgcgtgctgcctgctgtctacggcctcatacgactgccctgcgcccctcgtggcttctgcggttctgcacacgcgcacttgtccccaaacagcggcgtcggcgtcggcggcgatgagtatctcaggcgagcttcccggcgaaggatctgacggcgaggaggaggtcttcatcgacgaggaggacatcatccacgagataaccatcgacgaagaagatctccccgaccgcgacgaagaagatgacgacgtcggcgacgggattgttgattcagaagacatcattgatgattctacgtactcatttcttggccacaaagatgaagtcttctctgttgcatgcagtcctacagatgcatcacttgtggcttctggaggcaaagatgataggggatttctgtggaggatcggatcagatgagggtgccttggagctgactggacacaaggatactgtcggcacagtggctttcagttcagatgggaatttgttggcttgtggaagttttgatgggcaaataaatgtgtggaatacagctgcacgagctctcaagggaacccttgagggttctgggtcaggttttgagtggcttaaatggcatcctcggggacatttgataattgcaggatcagaggattgtaatgtatggatgtggaacgctgaccataatgccattataaatacatttgttggacatagtaacacagtgacatgtggtgattttactccagatggtaaacttatatgtactggatcagatgatgcatctttgaggatatgggacccaagaagtgcacaaagcaggcatgttattcgaggccatggttatcatactgatggattgacatgcttatcaatgactttggattcacaaacggttgttagtggctccaaggacagttctgtgcacgctgtgaatgtaaactcgggccagatcgttggctcactagtaggccacaccacttccattgagtgtgttggtatctcatcaagctatggctgggtagctacagggagcatggatcaaaagctgatcatatgggacctcacacaccagtccagccgatgcacttgtgaacatgatgagggagtgacatcactggcatggttaggttcgtcaaggtatgttgcgtcaggatgcatcgacggcaaggtgcgcatctgggacagcctctctggggattgtgccagggagttcagtgggcatgcagatgtagtacagtcgatggccatcacagctgacggcaacgccatggtctcggtctcatcagatggctccgcccgtgtgtttgacatctccatgttcaagtgaaggaaactgggacggagtagatggttgctgtgtatgctaatgcttgttcgcggtgcatgtgcatgaatgatgatggcatgccatggtaatatgttattctactcatgggaaactcgtgcatttgtattgcatataagtcccgtactcttagtatctgttacagttgaacaaataatgtatttggagtctattccttccttctctacttgattactcttttgtgtgttttttcccattaggagagaagtaatctgttctgc

SEQ ID NO: 147803 - DNA, 1694 bp, Zea Mays
aaccctaacttcagcccctgccgcgcgcccgcgatccaccccgtttcgactgctcgcctgctgcgtgctgcctgctgtctacggcctcatacgactgccctgcgcccctcgtggcttctgcggttctgcacacgcgcacttgtccccaaacagcggcgtcggcgtcggcggcgatgagtatctcaggcgagcttcccggcgaaggatctgacggcgaggaggaggtcttcatcgacgaggaggacatcatccacgagataaccatcgacgaagaagatctccccgaccgcgacgaagaagatgacgacgtcggcgacgggattgttgattcagaagacatcattgatgattctacgtactcatttcttggccacaaagatgaagtcttctctgttgcatgcagtcctacagatgcatcacttgtggcttctggaggcaaagatgataggggatttctgtggaggatcggatcagatgagggtgccttggagctgactggacacaaggatactgtcggcacagtggctttcagttcagatgggaatttgttggcttgtggaagttttgatgggcaaataaatgtgtggaatacagctgcacgagctctcaagggaacccttgagggttctgggtcaggttttgagtggcttaaatggcatcctcggggacatttgataattgcaggatcagaggattgtaatgtatggatgtggaacgctgaccataatgccattataaatacatttgttggacatagtaacacagtgacatgtggtgattttactccagatggtaaacttatatgtactggatcagatgatgcatctttgaggatatgggacccaagaagtgcacaaagcaggcatgttattcgaggccatggttatcatactgatggattgacatgcttatcaatgactttggattcacaaacggttgttagtggctccaaggacagttctgtgcacgctgtgaatgtaaactcgggccagatcgttggctcactagtaggccacaccacttccattgagtgtgttggtatctcatcaagctatggctgggtagctacagggagcatggatcaaaagctgatcatatgggacctcacacaccagtccagccgatgcacttgtgaacatgatgagggagtgacatcactggcatggttaggttcgtcaaggtatgttgcgtcaggatgcatcgacggcaaggtgcgcatctgggacagcctctctggggattgtgccagggagttcagtgggcatgcagatgtagtacagtcgatggccatcacagctgacggcaacgccatggtctcggtctcatcagatggctccgcccgtgtgtttgacatctccatgttcaagtgaaggaaactgggacggagtagatggttgctgtgtatgctaatgcttgttcgcggtgcatgtgcatgaatgatgatggcatgccatggagagaagtaatctgttctgcacttctgcttatagtgatagaggtcaggcgggaattctgtcacgtcatcacgagggacctgctaaaattcaggtgccactgtatatgttttatattgcagctttagtccgttgcagtttttagcaggcagtctgtcatttttggttcagaaaataggaaactcgatagaaaaaaacccataaacccgatgaaatctgatttgcattgcgacatcttaa

SEQ ID NO: 147804 - DNA, 102 bp, Zea Mays
ccactgccgttaccgctcctttcgtccaagcaaacagcacctatattgcatctcagttaagggtagcagcaccggggacgtatgaggggagaataagaaagg

SEQ ID NO: 147805 - DNA, 1363 bp, Zea Mays
gccaaaacaaagcttttgttgtctctcacctactattcttcttgcctcctccctccaccagcatccctgagtctgccatgggcaactgctggggaaccaagattagctctgacaccgccgcctccccttccacatcaccgttccctcgcagcgagggtgagattctccggtgtgccaatgtcaggagcttcaccttgacggagctgatgacctccacccggaacttccggcccgacagcgtcctcggcgagggaggcttcggctccgtcttcaaggggtggatcgacgagaccaccttcgccccggccaggcccggcacagggatggtcatcgctgtcaagaagctcaaccagcagggattgcaggggcacagggagtggctggctgaagtcaactacctgggccagttgtctcaccccagtctcgtaaggctcgtagggtactgcctccaagacgagcagcgccttctcgtctacgagttcatgccgcgaggaagcttggagaaccatcttttcaggacctcacgtttccagccgctctcctggaacctacgaatcaaagttgccctgggagcagccaagggccttgcgttcttgcacagcgacaaggccagagttatctaccgagatttcaagacatccaacgtgctcctggattcgaactacaacgccaagctgtctgacttcggtttggcaaaggacgggccaaccggcgaccagagccacgtgtccaccagagtcatgggcacctacggatatgctgctccggaatatctcgcaacaggtcatctcacgccgaagagcgacgtctacagcttcggcgtcgtgctgctggagatgctgtcgggccgccgcgccatggacaagaaccgcccggccaccgagcacaacctcgtcgactgggcgcgcccctacctcagcagcaagcgccgcgtctcccgcatcctggacgaccgcctggccggccactacccgctgccggccgtccaaagggcggcagcgctggcgctgcagtgcctctccgaggactccaggaagaggccaaccatggaccaggtcgtcgcgtcgctgcagcaactcacagccgcccaggaccacgacgatgcccaccggtcgtcgcgcaggtacccaaaagatcaccgtcaggctgcggcgctcaacaaccggaatctgaacgctcatcgccgcctgtccgccttgcctctacccgagtgaactaccatattcatattcgatcatcttttgtatcttcacaaaagtagtatgtaaatccgtggtgaagacctgggtaattagtgataaaacacaacttgattgttgattagatgtaaatggtggcttcaacttaaccggtttatggaaga

SEQ ID NO: 147806 - DNA, 1590 bp, Zea Mays
gccctttaaagaggcccaaatgaaagaaaataacatgtgaagggcaaaaaaaatctaaagagccagactctgcccaatccgtaatccaggatgaaatggctgcgccccagcacgtccgcgccgctcccctcgcacgcgcgctccgcgctaccgccaccgccaccgccaccgccaccgcctccgtccccgtacccgttcccgtccccgccggcatcaagtctcaggggacttcccgccgcgcactgctcggcctatcggagcctcagctccgccagcttgccatcgatctcggccagcaaagctaccggggcaagcagctgcacgacctcctctacaaatcaagagccaagcaaatccaagaattcaaccacgtgcccaaggcgttccgggaggcgttgcttggcgctgggtggagtgttggccggtcgccagtgcaccacgccgtcacagcctcggatggcactaccaagatacttctcaagttggaggataaccggttgatcgagacagtggggattcctgtcgatgatgacaacaaaggctcttctaggctcactgcctgtgtttcatcacaggtcggctgcccccttcgttgctcattttgtgccacggggaagggagggtttgcaaggaaccttcaaccacatgagattgttgaacaggtgttggccatcgaggagacgttcaaacacagggtgacaaatgttgtgttcatggggatgggtgagcccatgatgaacctcaagtcagttctagaagcacaccaatgcttcaataaggaactaaaaattgggcaaaggatgatgacaatatctacagttggtgttccaaatacaataaaaatgctagcatctcacaagcttcagtcaacgctggcagtcagtctgcatgccccaaatcagaagctgcgggagacgattgttcctagcgccaagtcttaccccttgggagcactaatggatgactgcaagagttacttccttgaaactgggcgcagggtatccttcgagtacactctgctagctgggattaacgatgaaaaggagcatgccgaagagctagcagaactacttcgtatgtgtggaggtggttaccatgtgaacctgattccctataacccaattgaaggctccgagtacaagagaccttacagaaaagtggtccaagcctttgttgatgctttagaagcacgcaagataaccgttagcgttcgacggacccgtgggcttgacgctaacgcagcctgtgggcagctgaggaatgagtttcagaagaatccactacttgagattgaaccgtcaccctccacagagcggaccctcgtagctgcttaattgaaacacctatcaggttgatgcagcatgttcaagcatacggaatcgtcatttaatttatggggacattaggtgttgtaaagtgacagcaagttatgcataacgctagagaattttggaacgttctgtccgtgcccatctgatgtcatgagtggcaattacggaattaccacacttgtctcagatattataaacccatctttgttacagaaagtcaccagaaatgaactcctactgtccatgatctgttgcattc

SEQ ID NO: 147807 - DNA, 2283 bp, Zea Mays
gccctttaaagaggcccaaatgaaagaaaataacatgtgaagggcaaaaaaaatctaaagagccagactctgcccaatccgtaatccaggatgaaatggctgcgccccagcacgtccgcgccgctcccctcgcacgcgcgctccgcgctaccgccaccgccaccgccaccgccaccgcctccgtccccgtacccgttcccgtccccgccggcatcaagtctcaggggacttcccgccgcgcactgctcggcctatcggagcctcagctccgccagcttgccatcgatctcggccagcaaagctaccggggcaagcagctgcacgacctcctctacaaatcaagagccaagcaaatccaagaattcaaccacgtgcccaaggcgttccgggaggcgttgcttggcgctgggtggagtgttggccggtcgccagtgcaccacgccgtcacagcctcggatggcactaccaagatacttctcaagttggaggataaccggttgatcgagacagtggggattcctgtcgatgatgacaacaaaggctcttctaggctcactgcctgtgtttcatcacaggtcggctgcccccttcgttgctcattttgtgccacggggaagggagggtttgcaaggaaccttcaaccacatgagattgttgaacaggtgttggccatcgaggagacgttcaaacacagggtgacaaatgttgtgttcatggggatgggtgagcccatgatgaacctcaagtcagttctagaagcacaccaatgcttcaataaggaactaaaaattgggcaaaggatgatgacaatatctacagttggtgttccaaatacaataaaaatgctagcatctcacaagcttcagtcaacgctggcagtcagtctgcatgccccaaatcagaagctgcgggagacgattgttcctagcgccaagtcttaccccttgggagcactaatggatgactgcaagagttacttccttgaaactgggcgcagggtatccttcgagtacactctgctagctgggattaacgatgaaaaggagcatgccgaagagctagcagaactacttcgtatgtgtggaggtggttaccatgtgaacctgattccctataacccaattgaaggctccgagtacaagagaccttacagaaaagtggtccaagcctttgttgatgctttagaagcacgcaagataaccgttagcgttcgacggacccgtgggcttgacgctaacgcagcctgtgggcagctgaggaatgagtttcagaagaatccactacttgagattgaaccgtcaccctccacagagcggaccctcgtagctgcttaattgaaacacctatcaggttgatgcagcatgttcaagcatacggaatcgtcatttaatttatggggacattaggtgttgtaaagtgacagcaagttatgcataacgctagagaattttggaacgttctgtccgtgcccatctgatgtcatgagtggcaattacggaattaccacacttgtctcagatattataaacccatctttgttacagaaagtcaccagaaatgaactcctactgtccatgatctgttgcattcacaacattgacactggccttttaaactgaacgcttatgattcatgaagctactctgtttctgtttggagaccctgggcaaacaacatcaaatcttctccccccgccggtggagctgctgcagagacgagggatgagaagcacagcaggagcaggtctgaggtctctcgtcattgatatatgcaaagccatccagggcaatctcttgggcgagaggaggctcagccgttggttgctgcggggtcgcgactcttggggcggacggccatggctttttttttctcgggcacatgagagctttttttttccctgggcacatgggtggcgatctagttttgcttcggtactgtggtttcgtactttagttggctgcgagaagccgaaagttttgtaccaaggctttgtatcctcttgatgtaatgtacttggtaactttaatataagctttctttataaaaaaaaatccagggcaatctcacctcaggctccgctgaaaaaggattagctcgtctcaagagaaaagaggatgactaccagcttactgcaataaccacactaactactaccaggaaccaagctctgatggcttccctgcaaagtagatgcatgtttcgttcgttgccgtcttttaaactctctttaagttccatttgtgttttaaaaaatatggctaagtatccattagggtgttcaaa

SEQ ID NO: 147808 - DNA, 1458 bp, Zea Mays
atggctgcgccccagcacgtccgcgccgctcccctcgcacgcgcgctccgcgctaccgccaccgccaccgccaccgccaccgcctccgtccccgtacccgttcccgtccccgccggcatcaagtctcaggggacttcccgccgcgcactgctcggcctatcggagcctcagctccgccagcttgccatcgatctcggccagcaaagctaccggggcaagcagctgcacgacctcctctacaaatcaagagccaagcaaatccaagaattcaaccacgtgcccaaggcgttccgggaggcgttgcttggcgctgggtggagtgttggccggtcgccagtgcaccacgccgtcacagcctcggatggcactaccaagatacttctcaagttggaggataaccggttgatcgagacagtggggattcctgtcgatgatgacaacaaaggctcttctaggctcactgcctgtgtttcatcacaggtgctgtcagtggatcctctgctattgggcactgttattcaaacggtagtgttggccatcgaggagacgttcaaacacagggtgacaaatgttgtgttcatggggatgggtgagcccatgatgaacctcaagtcagttctagaagcacaccaatgcttcaataaggaactaaaaattgggcaaaggatgatgacaatatctacagttggtgttccaaatacaataaaaatgctagcatctcacaagcttcagtcaacgctggcagtcagtctgcatgccccaaatcagaagctgcgggagacgattgttcctagcgccaagtcttaccccttgggagcactaatggatgactgcaagagttacttccttgaaactgggcgcagggtatccttcgagtacactctgctagctgggattaacgatgaaaaggagcatgccgaagagctagcagaactacttcgtatgtgtggaggtggttaccatgtgaacctgattccctataacccaattgaaggctccgagtacaagagaccttacagaaaagtggtccaagcctttgttgatgctttagaagcacgcaagataaccgttagcgttcgacggacccgtgggcttgacgctaacgcagcctgtgggcagctgaggaatgagtttcagaagaatccactacttgagattgaaccgtcaccctccacagagcggaccctcgtagctgcttaattgaaacacctatcaggttgatgcagcatgttcaagcatacggaatcgtcatttaatttatggggacattaggtgttgtaaagtgacagcaagttatgcataacgctagagaattttggaacgttctgtccgtgcccatctgatgtcatgagtggcaattacggaattaccacacttgtctcagatattataaacccatctttgttacagaaagtcaccagaaatgaactcctactgtccatgatctgttgcattcac

SEQ ID NO: 147809 - DNA, 2011 bp, Zea Mays
tttcttgaaattagttattttctatggttcaaaaaccttattataatttttaactaaaaaggcaagaaaagatcttaaaaattacttctaactaggctggggaggttatttaaaatgattttacgagttgagattcaaatcaaacacaaaaatacatacgactgagcctttcttaaggttttggcccatgcattacaagaaagcccaacccaagagccgacgacatcctttggttcctttccccttgcccttgcacgacgagaagggacaaggataaatgacgtgtttttttttctcgtttccccccaaaagaattttgaactccaggctcctcttcttctccaacgcctaccgcggtgccaccccgcagcagccaatggcggatgccgccgccgatctgcgccggaggatgaaggagcagcgcgccgccatccagcggcggttcatcgactcccggaactgggccgccgccgcctcctcggccttcagtgccgccctcctcgaggcgcgctccatcgccaaccagaccgtctccaaccgaggcatatcaacctcttcgcccccacttttgtttttttacctgtttcggcttcgccctcgatctatggtttagtcatcatgatggatcagccaggtccatagtgtgttgtattccgtggggagccaacatccaatccaccacataggctcctagaaccagtccacgtttctaccagggaagctcgattctgcctgacacaaccccacctactagtactatgttggacttgtactcactcagtggcacctgcctagtagtagtacccatttcttgctaaaggtgttctctcaacgtggccgttctcaattcatccagaccttatagcacctcatcaatttgacaaatagcactggtcgttgcctttcagtacaacagttgccattagcatattatctatatctagttgtttaagctcaatattatttgcaaaattactttactcgtatttgtgtttttggaatgccagcaaaactcagcgaacaaaaacaacatctccggaagttagaatcagatctagcacaggccctctccgtccaaacaagcagaaggtcaaaacataatctcatgactgagtcgattttaaaaaccactgcaacaaatgagcagctcacacacttggttacgggtcgtagggctacaagagatgaatgcatgaatgccatatcaattcaactcaaagatattgaatcccttgaatctgaaagtgacacaaacgaggataagaacttagagaaagctcttatatggtacaataagtttcttggttttcaagttgttggaggagaaggcgtgaaatttatgttcaataaaattgatgtgcaaagtcctgacaaggagtgctatttttgcgtaaagcttgttgaaggaagatacacattagtacaatgtgttccctctgtggatggcgctgaagaattggtgaaggatcttaactgtaataatgatctttacaaatttgtgagggtcgtgagagacagactccaggctgctataatcagtggaaatatgttgtcaagctcattttgcgctgacttatcatcaataacatcttcatcattctcagcgtcatcactggattccacaagtgaaaacaacattaatcgaagtcagtcaaagaatcaggaatgtccagttaaagggctagcaaaatcacttgccatgtagcaaaatcatctgaatgtgggaaggaaacgggatctacacttgatagacaaggggattctccatctcgagttcctgtttgatctgcccaatagcattgggatgtggagatctgtacagtaaaagttaaagcacttgtggtggacccctatgttatgcacactagcaatagcgacgatgtacagtgttgtctgctgattgcatttctgactcaaaaaactggcgctgtacgtcagttttgtattactaacaatggtaatgtataagcgcttgagcatttgttttcatccatgtacttcactaaatgag

SEQ ID NO: 147810 - DNA, 1277 bp, Zea Mays
aaggataaatgacgtgtttttttttctcgtttccccccaaaagaattttgaactccaggctcctcttcttctccaacgcctaccgcggtgccaccccgcagcagccaatggcggatgccgccgccgatctgcgccggaggatgaaggagcagcgcgccgccatccagcggcggttcatcgactcccggaactgggccgccgccgcctcctcggccttcagtgccgccctcctcgaggcgcgctccatcgccaaccagaccgtctccaaccgagcaaaactcagcgaacaaaaacaacatctccggaagttagaatcagatctagcacaggccctctccgtccaaacaagcagaaggtcaaaacataatctcatgactgagtcgattttaaaaaccactgcaacaaatgagcagctcacacacttggttacgggtcgtagggctacaagagatgaatgcatgaatgccatatcaattcaactcaaagatattgaatcccttgaatctgaaagtgacacaaacgaggataagaacttagagaaagctcttatatggtacaataagtttcttggttttcaagttgttggaggagaaggcgtgaaatttatgttcaataaaattgatgtgcaaagtcctgacaaggagtgctatttttgcgtaaagcttgttgaaggaagatacacattagtacaatgtgttccctctgtggatggcgctgaagaattggtgaaggatcttaactgtaataatgatctttacaaatttgtgagggtcgtgagagacagactccaggctgctataatcagtggaaatatgttgtcaagctcattttgcgctgacttatcatcaataacatcttcatcattctcagcgtcatcactggattccacaagtgaaaacaacattaatcgaagtcagtcaaagaatcaggaatgtccagttaaagggctagcaaaatcacttgccatgtagcaaaatcatctgaatgtgggaaggaaacgggatctacacttgatagacaaggggattctccatctcgagttcctgtttgatctgcccaatagcattgggatgtggagatctgtacagtaaaagttaaagcacttgtggtggacccctatgttatgcacactagcaatagcgacgatgtacagtgttgtctgctgattgcatttctgactcaaaaaactggcgctgtacgtcagttttgtattactaacaatggtaatgtataagcgcttgagcatttgttttcatccatgtacttcactaaatgag

SEQ ID NO: 147811 - DNA, 1214 bp, Zea Mays
ctcaatagttgcagcagcagtcacaggcctacagcctacagctagctagcacacacaaggccaccatcttccctcagctcattcccctttcctttttttcccctcccatcatcacgtgcaggtactccaaccagcaatttcatcaattcctcctactcttgttcctcatctccatctctgctggtgtggagtttctacgtacctctccattccattgcattgcattgcattccattgttattcttgagtagctgagtcactcgatccagctagtgactgaggccaccgagcgtgagagggcagggatgaggaagcgctagctctcagtccttgagtctcttctctcttctctctatataaatctaggcagcaggcagccactgcacattccctcaccaactcaggcaggcagaggcagaggcagagagagtttgccgccgacacagccatacatagatacaccagccggccggcatccggatggattcgtcctcgtcagccggggccggggacgacaggtggaggctgtccaagaaggggcggagcagatccggcaggccgcacgccatggacgccgccgcggggagcgtgctcagccggagctactcggccagcgtgagcagcagcaggagtactgcagcaggcaccagtactgcagcagccacaggcagctctgccgccgccccgtcttctcagcagcagcagcaacaacaacaagcaggcgccgccgcctgcccagcggagtcgtcgtcgtcgtcgtcgtcgtcgtcgtcgcggctgtccaagaagtgcgtggaggcggtgaaggagcaccgcgcgcgcttctacatcgtccggcgctgcgtctccatgctcgtctgctggcgcgactactagctagctaagctaagcaaccccgccctgctctgccgagctagcgttcctcggactcggacctatatatccacctagctccatgcgtccatccatggccttctcttctttctgtagccccacccactgcactcttccttgaatccgtgtagctgattttgttccccatttattttgctgcgtgttgcttgctgtcaatagtttctgtatgtacataagtaagttagcaagaggtgaacgaaaaggggcatggtgaattggtgatggatgagcagatgactccttccttctcttgccactgctaaagtaaagatctaattttttttgttttgttttgtgtt

SEQ ID NO: 147812 - DNA, 882 bp, Zea Mays
atgacctcgccgcagcccactaagctattgccgtcagtcctcctcgtccggcacctgacactctccttctccttaactgccttcagctggacgcctggaccagagggaaggctcacagccgccgcagggtgccagggcgttagggccttagggcaaagcatagcaacggcggctgcgcagcaagcagttcagctcagcacctcgccggacgccggctcacccatccggccatcccctgccggccgactctccctggtccccagcgcagcaagcagttcaccggagccggcgcagcaagtagtcaggcaagtctccatttccagatctcaacacaggtacaggtatcgtgtatacatgtatcatcgtgtagtattccatgtactgagtattatgtttatcaattataaattagtatgtactgagtatactagtattccatggcatacatgtaccgtgctctctcctatctagaaaaaaaagattaggacatttcaactcgtattatgtttatcaattataaattagttcctgttttctcagtgttcatgtactgtgttcaggaggcttttgtagatttgtttgtgtttagcaattagtccctattgcaggttgattaacaaggtttgggtttgggagcacttcacaaggtatgaggtagaggttcaggaagctgatggttctattgttaagcaaaagtgggctaaatgcctaagatgttcacataaagctaaggcatatagttataatggcacaaaggcttttagtaaccatttaaggatgaagcatcaagttttgaaaggtcaacaaatgcttagtcagagtggggatgccatagcaacatataaatatgatgagaatgctagtgtgagacttttatattat

SEQ ID NO: 147813 - DNA, 1064 bp, Zea Mays
atgacctcgccgcagcccactaagctattgccgtcagtcctcctcgtccggcacctgacactctccttctccttaactgccttcagctggacgcctggaccagagggaaggctcacagccgccgcagggtgccagggcgttagggccttagggcaaagcatagcaacggcggctgcgcagcaagcagttcagctcagcacctcgccggacgccggctcacccatccggccatcccctgccggccgactctccctggtccccagcgcagcaagcagttcaccggagccggcgcagcaagtagtcagcagtcatcaatgcaaaatcaaccacaaaaggttctagttcaagagagagtgagtttgttccacataaaaatacttgtttggtggatgaggaggaggatgaggttgatcttgatgagttgtatgcaacaacaagcaatgacaagaaggtgtcagagttagatttgtatatgagcgaggacctagtgaaggtcaatgacaatgaagcaacatttgatatcctatcatggtggaaagggcaagtcacaaattttcctattctttctacccttgctcgtgatgtgttgtctatgcaagtgtctactgttgcttcagagtctgcatttagttcgggtggacgcattgttgatgcattccgttcaagactcaaaccagaatttattgaggcattggtttgttgtaaagattggaagattgcttcggagaaagatttggagattgaaattaaaaccttaagtgaacctatgaatgacgttgacttggaggatgctgctgcaattggaacttgagaagttaaagttcaagttaccatggatgatgttgaacttgttacttattgttgtaatgttgtggagcggaggtttgctggttgtttggttgttgcaactttattttcttatttgcacttcttcacttgaacatgttaattaatgtcaactatctactatttgttatatacttgtggatttgtggattatgcctaaaataggggaaatgctgccgaatttttttaatattagtaactttgaactgcatgatgtt

SEQ ID NO: 147814 - DNA, 2506 bp, Zea Mays
atgacctcgccgcagcccactaagctattgccgtcagtcctcctcgtccggcacctgacactctccttctccttaactgccttcagctggacgcctggaccagagggaaggctcacagccgccgcagggtgccagggcgttagggccttagggcaaagcatagcaacggcggctgcgcagcaagcagttcagctcagcacctcgccggacgccggctcacccatccggccatcccctgccggccgactctccctggtccccagcgcagcaagcagttcaccggagccggcgcagcaagtagtcaggttgattaacaaggtttgggtttgggagcacttcacaaggtatgaggtagaggttcaggaagctgatggttctattgttaagcaaaagtgggctaaatgcctaagatgttcacataaagctaaggcatatagttataatggcacaaaggcttttagtaaccatttaaggatgaagcatcaagttttgaaaggtcaacaaatgcttagtcagagtggggatgccatagcaacatataaatatgatgagaatgctagtgtgagacttttatattatgccattatcatgcatgagtatccgtttagtattgctcaacataggtactttgtgaaattcatcaaatcattaagaccatcatttccttcgaagtctcgtgttactgtttgtaaagagatcatggaactttataaggaggaaaagaatctactgtatgcacaattcaataaactatcatgtcgtgttagttttactatggatacttggacatctattcagaacaagtcatatttgtgtgttactgcacattggattgatgatcattggaaaatgcaaaaaaggattatcaactttatgcatgtagaaggcagccatggaggaataaaattgagcgatacattttttgcaaatgtgttgaattggaacctagataagaaaatgtttgctctttctttggataatgctgctgcaaacaaggtagccgttgagatagtgattgaaaatgctaaagagttgcttgtatgtgatggaaaattctttcatgttagatgtgcaaatcatatattgaatctagttgctagagatggattatcatgccttggaaatgtcattggaaacattagacaatttgtaacaattatcaaaaggtcacctttgcagttggaggcatttgagaaatgtgctaaagaatgtggtctagaccctaaaaagaccctttccttggatgttgctactagatggaactctacatatatcatgattagagatgccatttactataagaatgcttttgatcgtctggctaaaaaagataaggacaaatatggtcacatcaatccttcaagcactgattggttgaatgcaacaaatattagcaagtgtttgaaaaaattctatgatgtcacattgcttttttccggtacttcatatcctactgcaaatcatttctttcggaagttttctgagattaagatggctattgcaagatggtgtgatagtagtgatctggtaatttgcacaatggcattttctatgagacacaagtttgataaatattgggaaatgaacaatttagctttggcagtgggagcatttcttgatcctagatacaaacataggatgattgagctatatatgtctaagatgtatggcagtgataaagccgagttagagaaattagtattcatgaatgttatcaatgaattatttgcatattattcagcagtcatcaatgcaaaatcaaccacaaaaggttctagttcaagagagagtgagtttgttccacataaaaatacttgtttggtggatgaggaggaggatgaggttgatcttgatgagttgtatgcaacaacaagcaatgacaagaaggtgtcagagttagatttgtatatgagcgaggacctagtgaaggtcaatgacaatgaagcaacatttgatatcctatcatggtggaaagggcaagtcacaaattttcctattctttctacccttgctcgtgatgtgttgtctatgcaagtgtctactgttgcttcagagtctgcatttagttcgggtggacgcattgttgatgcattccgttcaagactcaaaccagaatttattgaggcattggtttgttgtaaagattggaagattgcttcggagaaagatttggagattgaaattaaaaccttaagtgaacctatgaatgacgttgacttggaggatgctgctgcaattggaacttgagaagttaaagttcaagttaccatggatgatgttgaacttgttacttattgttgtaatgttgtggagcggaggtttgctggttgtttggttgttgcaactttattttcttatttgcacttcttcacttgaacatgttaattaatgtcaactatctactatttgttatatacttgtggatttgtggattatgcctaaaataggggaaatgctgccgaatttttttaatattagtaactttgaactgcatgatgttaatttt

SEQ ID NO: 147815 - DNA, 1376 bp, Zea Mays
acccaccaacacgccacacaacacaaatatctccgtccttgtcccccatctctctcgcccgccgccgccggttgaatcgacggagggaggcgttgatggattgctcgattcctggtgggaattgattgatttcagctgcatgtgcttgtgcttgtgctgctcaatcgaattcgagtccgaattggattaggcaggtgggttgggtaggtgcgggatccagcgagcggaggatgggcgaggaggcggtggacgactacgagctccacatggtgtgctacggcagcgacgaggacgagcgcgtgatggagtgggagtcggggctccctggcgccgacgagctgaccccgctctcgcagccgctggtgccgccggggctggccgcggcgttccgcatcccgccggagcccgggcgcaccctgctggacctgcaccgagcgtccgaagccacggtggcgcggctgcggcgcgcgccgccgtcgtcgccgggcacctcctcctccccccacggccaccaggaggcgagggggggcgaaggggcggactcggcggcggcgactaccacgaacagcaacagacggccccggctggtttggacgccgcagctgcacaagcggttcgtggacgtggtggcgcacctggggatcaagaaggcggtgcccaagaccatcatggagctgatgaacgtggaaggtctgacgcgggagaacgtggccagccacctgcagaagtaccggttgtacgtgaagcggatgcgggggcagggtccgtccccgtccgaccacatcttcgcacccacaccggtgcacggcgtcgccgtcggcatggtgcccatggtcagcggccaggcgtaccactacctgtacaacggaggagggggaggagacagatgacacccgcttcggcgacgactccagaatctagtttcctcttggggaagaccggaagacaaatccaaaacggaacaagcgattgcctgcctcactctatactctactccctccaaattatccaaagcttctactgtactccgtccgtcccgttccaaggtattcggtatttttaaagccaaagcttttgttcaagtttattagagaataaatttcgaagcttttggtgaaggggaaagtaatgagtttttagtcccatacagaaaattgaagagaaataaaattaacttaaatagcttgtcttttgccattgcttaacagttaaaagcgcgttttacagaacgtgtgattgctcgtgtgacttggggtgtggagacagacactaattccgtttctatctactacattttgtcttacatgacacgttcgaaactaaacccatcgaagcatggatttagtttcctacatcttttgtgtgtgcttgtcgtg

SEQ ID NO: 147816 - DNA, 1034 bp, Zea Mays
cgccacacaacacaaatatctccgtccttgtcccccatctctctcgcccgccgccgccggttgaatcgacggagggaggcgttgatggattgctcgattcctggtgggaattgattgatttcagctgcatgtgcttgtgcttgtgctgctcaatcgaattcgagtccgaattggattaggcaggtgggttgggtaggtgcgggatccagcgagcggaggatgggcgcgtgatggagtgggagtcggggctccctggcgccgacgagctgaccccgctctcgcagccgctggtgccgccggggctggccgcggcgttccgcatcccgccggagcccgggcgcaccctgctggacctgcaccgagcgtccgaagccacggtggcgcggctgcggcgcgcgccgccgtcgtcgccgggcacctcctcctccccccacggccaccaggaggcgagggggggcgaaggggcggactcggcggcggcgactaccacgaacagcaacagacggccccggctggtttggacgccgcagctgcacaagcggttcgtggacgtggtggcgcacctggggatcaagaaggcggtgcccaagaccatcatggagctgatgaacgtggaaggtctgacgcgggagaacgtggccagccacctgcagaagtaccggttgtacgtgaagcggatgcgggggcagggtccgtccccgtccgaccacatcttcgcacccacaccggtgcacggcgtcgccgtcggcatggtgcccatggtcagcggccaggcgtaccactacctgtacaacggaggagggggaggagacagatgacacccgcttcggcgacgactccagaatctagtttcctcttggggaagaccggaagacaaatccaaaacggaacaagcgattgcctgcctcactctatactctactccctccaaattatccaaagcttctactgtactccgtccgtcccgttccaaggtattcggtatttttaaagccaaagcttttgttcaagtttattagagaataaatttcgaa

SEQ ID NO: 147817 - DNA, 1931 bp, Zea Mays
atgaataaaaaaaactcgtttattccccaaccatcctctcttcctcgccgcaaagcccctaaacctccacctccaacggcggcgcttccccctctccgccgtctcctggccctccgcggccaccgacgcctcctctccacacccgccgcctcatccaacaaccgcctttccccagaggccgtgctctacaacatccacagcctctccaaggacccctcccaagcgctcgccgtcttccgccgctccgtcgccgccggccagccagttggctccgcggcatacaacctcatgctccgcaccctcgcctcccacccctctgcgcagcgccatttctggcccttcctccgcgagatgcaggaggctggccactccgtcgaccagggcacctacctcgctgctctcgcctccttcaagaaggccagtctcaccgccgactatgcctccctcaccgcgcattacgacaagttccggaaaggtgccaagtccgccaccgcggcggcggaggcggtccgggaccacgacgccgcgggcctcgatagcaggctctccgccatcggtctccttccgcttacggagacctccgtcaccacggtgctccgagagctgagggagcatccgattaaggctctcgccttcttcagatgggctgggcggcagcaggggtacacgcacagctccgtggcctacaatgccatggcaagggtgctcggcagggaggagtcagtgccggagttttgggacttgatccgggaaacaaaggctgctgggatgcacgtcgatatcgacacttacctcaagctgtccaggaacttccagaggcgccacatggtccgggaggctgtggagctatatgagctcatgatggatggccctttcaagccagcacagcaggatggacccatcatcatcaggcgcatctcgatggggccgtcgccagatcttgagcttgtcaatcgggttgtcaacaagtttgaggctgtctggggcgtcaagaccaaggagttgcttgatggggtccatagggcgcttacacgtaatgggatgttcgatgaggctgcagagattgtgcaaacaatgaaggcccaaggccaccagccggacaatgttacatatagccagttggtgtatggtctttgcaaggctgacaagctggaggatgctcgcaaggtgctcgatgaaatggaggctgaagggtgtgtcccagatttgaagacttggaccctgttgatccatggttgctgtttagctggggatgtggatagagctgtgcaatacttaaccgagatgatcgaaaagggcttggacgcagatgccaatttgctggatgtgatattgaaaggtctatgtagccatgaaaaggtcgaagaggcttactctttctttattgagatggtggataagactgagttgaggccttggcaaggcacttgccagcatctaattaatgacttgctgagggtaaacaaacttgaggaggcactgtctcttctgaagacaatgaaaacctgcaagttcccacctttcgccgatccattccctccttacattgccaagtatggaacggttgaagatgcaaggaactttttcaaggccatgacagtgaatacttctccagaacctgttgcctacctgcatgttctcaagttgttctttgcggagggaagatattctgaagctcaagatctactgtatggatgccctaatcacatccgcaagcaccccgatgtcattaaactgtttggatcaataaaagttgagagtgcctctgcttctagattgggttcaagcaagcaatagttggtgagattatgatgaacccttaggtttgcatgctagctagctttatgtttttaagtagccttggtattgggtacttttaacaaatgatccatcttttaatgatatatggttcaactaagtcgaatttcagt

SEQ ID NO: 147818 - DNA, 1545 bp, Zea Mays
ttcagggctgaggagattggctatgtcgtgcccaccgagatgcaggagcaatccctgccgcttctgctgtccggccaggattgcattctccacgcgcagacaggctccgggaagacgctggcctacctcttgtccatcttctccaccatcgacttcagcaggtcctcggtgcaagcgctggttgtcgtccccacgagggagctcggcatgcaggttaccaaggtcgctagactactcgcagccaaggcgtgcaccgtcatggctttgcttgatggcggtacgctcaagaggcaaaagagctgggtcaaggcagagccccccgcgataattgtagctactgtggcaagcttgtgtcaaatggtcgagaggcgcgcattcagtcttcaatccatgagagtgttagttattgatgaggtcgattttattttcgggtcatcaaagcaagtcagctctcttcgcaaaatattaacctcctattcagcagcttccagtcgtcaaaccatatttgcaagcgcatcgatccctcagcacaatcgctttctgcatgattgcgtacagcataaatggaccaagggtgatgtggttcatgttcatgtccaccctgtacagcccatgccttcgcacctgtgtcacaaatatgtgatctgcaccaagaaggaaaggatgcatgttttactatcgttgcttgagagggacgcaccgaagtctgcaatcatatttgttgctgggcagtctgagagatcaaagaaggctggaaatcctccttcaaccatggtggtctctgatttcttgagaaatgaatacaagggaagccttgatgtgatgctgctggaagaagatatgaacttcaatgctcgagctgcctcgttctccgaagtgaagggaagaggattcctgctggtctcaaccgacatagcgagcagagggtttgaccttcctcaaaccagccacgtatacaacctggatcttcctaagacggcaaccgactatttgcaccgtgctggaagaacagggaggcaaccattctccaggttagaattggaatgctgcgtgacaacccttataacagaggaagagcacttcgttctacggagatttcagaatgagctcaagttccacacccaagaggaagagctgcccctcatgaattgctttccaggatagagatacttgcttgtttcatcgtctcgtcatcctatgaatgaattattccatctctctaggtgggccgtcgacattcccacgtgaatcgcatgcttgtgtcagtgtcacgtcttttctcgtgttgtacagcagccgatgacaaataaatgaaaatgttttgcaactttgcgttgctttgctttgctttgatgtaagtgtgaactgagctgattcctctattttcaggatgtatttaaatatctactagttagtgcccgtgcgttgcgacggtacacgaacaccgctgataaaagcattagtagtaattaattttagatcacttctaaggtgtgctctcttgacaggaggaaaaggaggaaagattcattcatttttattcat

SEQ ID NO: 147819 - DNA, 1746 bp, Zea Mays
ttcagggctgaggagattggctatgtcgtgcccaccgagatgcaggagcaatccctgccgcttctgctgtccggccaggattgcattctccacgcgcagacaggctccgggaagacgctggcctacctcttgtccatcttctccaccatcgacttcagcaggtcctcggtgcaagcgctggttgtcgtccccacgagggagctcggcatgcaggttaccaaggtcgctagactactcgcagccaaggcgtgcaccgtcatggctttgcttgatggcggtacgctcaagaggcaaaagagctgggtcaaggcagagccccccgcgataattgtagctactgtggcaagcttgtgtcaaatggtcgagaggcgcgcattcagtcttcaatccatgagagtgttagttattgatgaggtcgattttattttcgggtcatcaaagcaagtcagctctcttcgcaaaatattaacctcctattcagcagcttccagtcgtcaaaccatatttgcaagcgcatcgatccctcagcacaatcgctttctgcatgattgcgtacagcataaatggaccaagggtgatgtggttcatgttcatgtccaccctgtacagcccatgccttcgcacctgtgtcacaaatatgtggccgcacgtcacatttcttctcaaccaatccaatgcatatagaggaaaccctctaatccaatgcatacagaggaaaccctctctgccccagtttttctcttctttcccaaaataagctcgcggcctaccttctttctcctgagaattcatttcgatctctgtctgaatattggtaactatgacaacacaatcaatgtgcagatctgcaccaagaaggaaaggatgcatgttttactatcgttgcttgagagggacgcaccgaagtctgcaatcatatttgttgctgggcagtctgagagatcaaagaaggctggaaatcctccttcaaccatggtggtctctgatttcttgagaaatgaatacaagggaagccttgatgtgatgctgctggaagaagatatgaacttcaatgctcgagctgcctcgttctccgaagtgaagggaagaggattcctgctggtctcaaccgacatagcgagcagagggtttgaccttcctcaaaccagccacgtatacaacctggatcttcctaagacggcaaccgactatttgcaccgtgctggaagaacagggaggcaaccattctccaggttagaattggaatgctgcgtgacaacccttataacagaggaagagcacttcgttctacggagatttcagaatgagctcaagttccacacccaagaggaagagctgcccctcatgaattgctttccaggatagagatacttgcttgtttcatcgtctcgtcatcctatgaatgaattattccatctctctaggtgggccgtcgacattcccacgtgaatcgcatgcttgtgtcagtgtcacgtcttttctcgtgttgtacagcagccgatgacaaataaatgaaaatgttttgcaactttgcgttgctttgctttgctttgatgtaagtgtgaactgagctgattcctctattttcaggatgtatttaaatatctactagttagtgcccgtgcgttgcgacggtacacgaacaccgctgataaaagcattagtagtaattaattttagatcacttctaaggtgtgctctcttgacaggaggaaaaggaggaaagattcattcatttttattcat

SEQ ID NO: 147820 - DNA, 612 bp, Zea Mays
aagaacaagtgagcaactattttattataggtataactagatatacaagagcatacacgagcaacaaatactcactagcataagtatatgaacaagtaaatacaagctagtgaggaaagttgcaaaccaatgggaagatgatgacacgtggcacaatgattttttcccgtggtgtcgatgacttgccggtcacccctagtccacgttgaggtagattcaaagctcccaaccgctcctctatcaagtctccacttgatctcttgagctggattggtcaatgaaccctcaaacctcgattccactagagttgcttttcaccgctccggcgaggcaagcacaacgcctctcacaatcaccaccgcggcctcttcacaatctcctttgaagagctcacggggaaccaccaccaagccgtctaggaggcggcaacctccaagattaacaagccaacgacctcacttgatgatctccctagtgcctcaaagatcaacaacttgatgcaatgcactagatggctctcaatctcactagaatgcaatcccaaccaatatgagtgagagagagggagaggaagggcttcatatgctcacaagtgttccaaatggcctcctt

SEQ ID NO: 147821 - DNA, 1672 bp, Zea Mays
cagattcctttctccgggcacaccatactgttcttgctacttctagatagaggaacaagagagagaaggccaccgacatcgcctcttaacccgacaagccccattgcccaggagaaccccgtgccggggagcgagccgcgcgcattccccgtcccgtgccaccggaccaggggaaggaggacacacatgtcgtcgtctctctctccagcggcggcagccgcgcccctggatctggacggcaactccgtcgcgcccctcaccatctgcatgattggtgccggcggcttcatcggctcccacctctgcgagaagctcatggccgagacgcgccatgtcgtcctcgccgtcgacgtatactgcgataagatccgccacctcgtcgaccccgcgccgccgcacctcgcggggcgcatctccttccaccgcctcaacatcaagaatgactccaggctcgagggcctcatcaagatggccgatctgaccatcaacctggcggctatctgcacgccggcggactacaacacgcgccccctcgacaccatctacagcaacttcatcgatgcactcccagtggtcaagtactgctccgagaacagcaagcgtctcatccacttctccacgtgcgaggtctatggcaagaccatcggcagcttcctccccaaagaccacccgctccgcaaggaacctgaattttatgttctgaaagaagatgagtcaccctgtatttttggtccaatcgtgaaacaacgatggtcctatgcttgcgcgaagcaacttattgagagacttatatttgctgagggtgcagaaaatggccttgaattcacaatcgtgagaccttttaattggattgggccaaggatggatttcattcctggtgtcgatggtcctagtgagggtgtaccccgggtgctggcttgcttcagtaacaatctgctccgccgagagcctttgaagcttgtcgatgggggccagtctcagagaacctttgtatacatcaaggatgccatcgaagctgttgtgctgatgattgaaaatcctgctcgagccaatggtcacatcttcaatgttgggaatcctgacaatgaggttacggttagggagttggcccaaatgatgacagaggtctatgcaaacgtctcaggagaggcgccgctggatgagcctatgatcgacgtgagttcgagtcagttctacggtgaaggatacgatgacagtgataagagaattcctgacatgactataatcaacaagcagctaggttggaacccaaagacacctctcaaggatctgctggagacaacattgacgtaccagcacaagacatacaaagaagctgtgaagaggcaaatgtcgcaggcttcagcaacaagttaagttggcgctggctggggacggctcctcgtttagagccctagtcgcagcagctgtttcgcaagtcagaatacatatacgccggtaatcgttctgtttgaggccctagacgcgcccatgttttgtctgctaccaagggatgttatcctattgtgatataactactacctgtgtttggttgctcctagttttttttcttgcaattatatgtatttatattgaaaaactatatattatttaaaatacaattaaaaacaaacaagcaatatatattgtgtacaaagaatgaacaaccaat

SEQ ID NO: 147822 - DNA, 1157 bp, Zea Mays
catttcctactacagctgacatggctgatgaccgtttccttccttcccttcttttcaggtcaagtactgctccgagaacagcaagcgtctcatccacttctccacgtgcgaggtctatggcaagaccatcggcagcttcctccccaaagaccacccgctccgcaaggaacctgaattttatgttctgaaagaagatgagtcaccctgtatttttggtccaatcgtgaaacaacgatggtcctatgcttgcgcgaagcaacttattgagagacttatatttgctgagggtgcagaaaatggccttgaattcacaatcgtgagaccttttaattggattgggccaaggatggatttcattcctggtgtcgatggtcctagtgagggtgtaccccgggtgctggcttgcttcagtaacaatctgctccgccgagagcctttgaagcttgtcgatgggggccagtctcagagaacctttgtatacatcaaggatgccatcgaagctgttgtgctgatgattgaaaatcctgctcgagccaatggtcacatcttcaatgttgggaatcctgacaatgaggttacggttagggagttggcccaaatgatgacagaggtctatgcaaacgtctcaggagaggcgccgctggatgagcctatgatcgacgtgagttcgagtcagttctacggtgaaggatacgatgacagtgataagagaattcctgacatgactataatcaacaagcagctaggttggaacccaaagacacctctcaaggatctgctggagacaacattgacgtaccagcacaagacatacaaagaagctgtgaagaggcaaatgtcgcaggcttcagcaacaagttaagttggcgctggctggggacggctcctcgtttagagccctagtcgcagcagctgtttcgcaagtcagaatacatatacgccggtaatcgttctgtttgaggccctagacgcgcccatgttttgtctgctaccaagggatgttatcctattgtgatataactactacctgtgtttggttgctcctagttttttttcttgcaattatatgtatttatattgaaaaactatatattatttaaaatacaattaaaaacaaacaagcaatatatattgtgtacaaagaatgaacaaccaat

SEQ ID NO: 147823 - DNA, 928 bp, Zea Mays
acaaggccgagcagaggcagaggcagttcctctcatggaggcgtccttgctcgtggctcccaagccttccatgcccaggaccatcttctccgccaggcgagccggtcggagttggaggtgcctcgtcgtcgctgccaccatcaagcaacaactcggcacacggtcagaaagtgtggacgtcgatgcgccggtcgagcacctagcgccgccttcgaaggcgacgacgggagctcgcggcggcctgctcgccgccgtggcgacgacgacgagcagctgcacggcagtgttaccgtgtcacgccttatcaggcgccggagcggtggaatcgggaccgtggtggtggacgtcgccgctggacaccctgtaccgcgcggcggcggtgctgggcgacctggacccggcgacggcgcgggcggtggcgggcgtggcggggccggtgctgtcggcgttcggcttcctgttcatcctgcggatcgtcatgtcgtggtacccgaggctccccgtgacggagttcccgtacgtggtggcgtacgcgcccacggagccgttcctcgccgtcacgcgcagggtcatcccgccgctcggcggcgtcgatgtcacgcccgtcgtctggttcggcctcgtcagcttcgccagcgagatcctcgtcgggccacagggcctgctcgttctcctctcgcagcagcgctagcgaccactgcgtttctgcttccattccttcgatgaacaaattagtagtcatttttacaagggcacacttcgtgccatatccatttgattttaagatgattttaggttgtcttcagctatcgtgcccttaattatatattggtacgctattcctatatatttcgcatgcctaaattttagaagaagaaaaattattgtaccaccaattagtataaataatttatcatttttatggctt

SEQ ID NO: 147824 - DNA, 869 bp, Zea Mays
atggcgagtcagacaactcttcgtctttctttcttcttcttctcttctccactgcacatcctcctttcttcttctcctcgtcgatcggcaagctaaggaggcaccattgcttgtcgtctgatccccgccgggcgcgtgtcgctgcacaagatgacgacggcaacagccgttggcagcgtcgccgaccgcatcatgccgcacctcctcaacatatatggatcgtctgcgacggcacgggacttcgagatttacgcgccaaatgcgacgtttgaggacccgctcatgcgagctcacggggttaagcagatcaaatcagcgttctacacgctgccaaaggtgtttggggaatccaagatcaccgaatacaccgtacaagagaatcccatggggccgggcaagaccgaggtggtgatccagaacaagcagcactacaaggtgctgggcaagccggtggatctgacgtcgctcatcaggctgcagctccaggacggcaaggtggtcaagcacgaggactggtggcacgggaagcctctcaagaacagggacacggtgggcgtgccgctggtgggccgactcgcagaggccagccgccggggcgccatgctgctcacccacgcactcatgggcttcggcaaagacccaacccagcctcctcctcctcctccgacacattgaattcgtcagactcgtagtctgatcaatccaacgaatcatatacgtttgtatatctatctgtctgtctatcttcgcattgttactctcacgcataacacctggacattattttcttttgttgtgtgcacaaagcttagaacctagtttggaaacccatgtcactccagatttgagtaaaagtctttctaaagctc

SEQ ID NO: 147825 - DNA, 1016 bp, Zea Mays
ccataatcaaatgtaaagctcgttcaattcgctcacaatctacgtgaattgagtagaattggatgagtttaaatctaaaaaaatcaaacttcttattttttttctaatctcgtctaattcacgtataatagaaataatcaaaataatttagaaggaaaacaaacacattagaattagtttgggagcgggaaaccggagtaatagattctcatttttattcaaaattgcataaaaattttgaatagaaaagagaatctagtctctacaatcttcttcggttttatagctcccaaactagttcttagaatgctttaaacaaagcaaaacaacaacaaacctctgttgctgtgctggtgaagatatggatcgtctgcgacggcacgggacttcgagatttacgcgccaaatgcgacgtttgaggacccgctcatgcgagctcacggggttaagcagatcaaatcagcgttctacacgctgccaaaggtgtttggggaatccaagatcaccgaatacaccgtacaagagaatcccatggggccgggcaagaccgaggtggtgatccagaacaagcagcactacaaggtgctgggcaagccggtggatctgacgtcgctcatcaggctgcagctccaggacggcaaggtggtcaagcacgaggactggtggcacgggaagcctctcaagaacagggacacggtgggcgtgccgctggtgggccgactcgcagaggccagccgccggggcgccatgctgctcacccacgcactcatgggcttcggcaaagacccaacccagcctcctcctcctcctccgacacattgaattcgtcagactcgtagtctgatcaatccaacgaatcatatacgtttgtatatctatctgtctgtctatcttcgcattgttactctcacgcataacacctggacattattttcttttgttgtgtgcacaaagcttagaacctagtttggaaacccatgtcactccagatttgagtaaaagtctttctaaagctc

SEQ ID NO: 147826 - DNA, 162 bp, Zea Mays
atgtctatcattttaggatctcttcagtatatgttgttggtttttagttggcaaagttctatcaatttcacccagcctcctttactactaccttactgttcaggtcaaaactgttttttttttttggggggggggggggtgtttagaagaaatggtgagtag

SEQ ID NO: 147827 - DNA, 648 bp, Zea Mays
atggctcgccccgcagaggcagggggcccttccaacgatggagcacctcgccccgcactggcagggggcccttccatccatgagagcaccgaggagccgtggagccgcgcccgaggaggaccgccgaggccgggcggccgggcacacgccgcgccgggatgcacgggtgctggggccagaccgcgcccgcccctgcgccggatccgaggccgaggccgcgcccttgcctggaggaccgccgaggagccagttgtggagccgcgcccgaggaggaccgccgaggccgggcggccgggcacgcaccgcgccgggatgcacgggtgctgggaccagaccgcgcccgcccctgcgccggatccgaggccgaggccgcgcccttgcctggaggaccgccgaggagccagccatggagccgcgcccgaggaggaccgccgatttggggccagatttgggggaagaggagaggagaacaggcttgggcattttgcagctataatacgtcatgctaacaaaacttcgtacaattgttttccagctataatacgtcataaccagcctgaagtttgggcattttgcttgggaaatggctatgctggattgaaggatgctcttggttcaaatgattccagacttcaaagaatttgctaa

SEQ ID NO: 147828 - DNA, 1944 bp, Zea Mays
cgcacgccacgccaccgccgtcgccccgtggacccaattcgcctcccttcctcctccgccgccgccccgacccaaccctcgcggcccggattctgcgatgaagatcacggcgctgctggtactcaagtccccgggcgattcctccacctccgcctctggcgtcggggagcagcaggaggaggccgtggtgctggccaactcgtcggacgtcagccacttcggctacttccagcgcgccgccgcccgcgagttcatcctcttcgtcgcccgcaccgccgccctccgcacccccgccggcacccgccagaacgtccagcacgaagagtacacggtgcattgctacaaccagaatggactctgcgccatcgccttcaccgacgcccactatcccgtcaggagcgccttctccctcctcaacatcgtgctggaagagtaccagagaacttttggggagtcatggaggacaaccaaaactgatgtgacccaaccttggcaatacttggatgatgccttaaccaaataccaggctggttccagtgcgggcggagcacgggcgggcgtgagggagccgctgccgcccggacgtgggcgagaatgccccccggccacggcgctcgcgctcggcgagagcgggcggtatcgccccactctcgtccgcgctggagcgcgcgcccgggtgagaggtggcgagagtgaggcattggccaggcgcgtggacgtgcgagagcaagctgacgcgagctgattggttggtccccatttgaacaccttcacagatctcttgtagtccgatgggtcacctacaacccttccgtttgatgagtcttctccactacatcgtcgctccgatgtttcagcctcagtatcccgtgcaatatttccggctgcgcgtccaccaccatacccttatccctatcatttgtatcaatatccaccgtcttcatatggtcaacctccaacttccgaagctggaattcaagcttcattcccgatacgtctgtatgcccctcccccacctgctaccgatggaagtcaagcttctttccagttgcacctttatttgttggatctgaaaaccaagctgaggaaaatcttgtgccgaaggaaaatcgtccaaaaaggctagagtggacgactgccgacgagaaaaagcgggttaatgcttggattctgcattctaacgatcccatctccggcaacaataagagcagatcaagtttcttgggccaaatagcggcaacatataactccacctccgagcagtctatgcacttaattaaaaaatattatgctgaggctgtagcctgctgcagtctgtgcactgtagcagcagaggtgagagtggagtcgggagatgacgtggcaggggcgatatggaggctgtgaactggaaccagcctcaggctgttatatattgaaaatgtagcttatccaggaatcagatctttgtatgcaacgaaatcgggaactctatgcgtaggctgacaagttgttgaaaattcagagggacttggatgaaaccaagattattcttcacaaaaccatcgatagcatgcttgccagaggtgaaaggttggacagcctagtggcgaagagttcggatctaagtatttcttcacagatgttctacaagcaagcgaagaaaaccaactcttgctgtaccatcctgtagaggaagctgtgcatccttgtaggcagtgatgccagacagacgtgtatgtatttcatgccatgcccttcactttgctctcgtaactgaagaatggatgggatgagccggcctgatcgatcgttcgttcttcttttcttttaatatttgtaacgttgtgtgtggctgtggcctgtgggagtcgaaagggataatgcggcctgctggttttgttcgccaaggcagaacaatgaattcactggaagatgaaagttgaaaggaactggtagcagatc

SEQ ID NO: 147829 - DNA, 978 bp, Zea Mays
ccaccgccgtcgccccgtggacccaattcgcctcccttcctcctccgccgccgccccgacccaaccctcgcggcccggattctgcgatgaagatcacggcgctgctggtactcaagtccccgggcgattcctccacctccgcctctggcgtcggggagcagcaggaggaggccgtggtgctggccaactcgtcggacgtcagccacttcggctacttccagcgcgccgccgcccgcgagttcatcctcttcgtcgcccgcaccgccgccctccgcacccccgccggcacccgccagaacgtccagcacgaagagtacacggtgcattgctacaaccagaatggactctgcgccatcgccttcaccgacgcccactatcccgtcaggagcgccttctccctcctcaacatcgtgctggaagagtaccagagaacttttggggagtcatggaggacaaccaaaactgatgtgacccaaccttggcaatacttggatgatgccttaaccaaataccaggatcctgcagaggctgacaagttgttgaaaattcagagggacttggatgaaaccaagattattcttcacaaaaccatcgatagcatgcttgccagaggtgaaaggttggacagcctagtggcgaagagttcggatctaagtatttcttcacagatgttctacaagcaagcgaagaaaaccaactcttgctgtaccatcctgtagaggaagctgtgcatccttgtaggcagtgatgccagacagacgtgtatgtatttcatgccatgcccttcactttgctctcgtaactgaagaatggatgggatgagccggcctgatcgatcgttcgttcttcttttcttttaatatttgtaacgttgtgtgtggctgtggcctgtgggagtcgaaagggataatgcggcctgctggttttgttcgccaaggcagaacaatgaattcactggaagatgaaagttgaaaggaa

SEQ ID NO: 147830 - DNA, 1096 bp, Zea Mays
tccattttccggaaaagaaactagacgcaaccagtttctctttccctcccgattttctgtttttcttctcttggattgggctcaccctgctcaaaacttcggcggcagcggcagcggtagcggtggcggcgccggctttctccatgaacacggtggctttgttgtccttggcgccgcagctgctcattaagccctccctcacctgtttctccagaaagggcgttggccgctatggcggaatcaaggtgtacgccgtgctcagagacgacggagctgagtttgccaagaacaacaacctggaggccctgttccatgtggatgaccccgggccgagggtccccatcaagaagggcaagttcctggacgtgaacgaggctctcgaggtggtccgttttgacatccagtactgcgactggagggcgcggcatgatcttctcaccatcatggttctccacaacaaggtggtagaggtcctcaaccccctagcgagggagttcaagtcgatcgggaccttgaggaaagagcttgccgagctacagcaggagctggcaaaagctcacaatcaggttcatctctcggaaaccagagtctcatctgcgctcgacaagctagcgcatatggagaccctggtgaacgacaggctgttgccaccggacggagcctctagtacgtccacggcgcagcccacttccttggttccaagcacttcgtccaccgcccgtgtccgagccaagaaaccgccacgtcggggccttaacgtgtctggcccggtgaagccgtacaatcccagcctgaagaacttctggtacccagtcgccttctccagtgatctgaaagatgacaccatggtgccgatagcttgcttcgaggagcagtgggtgatattccgtggaaaagacggaaggcctgggtgtgttcagaacacatgtgctcacagggcttgcccgctgcatcttggttcagtgaacgagggtaggatccagtgcccttaccatggtaagtctcctactgtctgaattaggtcagagattctcggggttactgtatcttgttttcagaagtgcgcctacttgttttgtttaccctgtctgaatta

SEQ ID NO: 147831 - DNA, 2941 bp, Zea Mays
tccattttccggaaaagaaactagacgcaaccagtttctctttccctcccgattttctgtttttcttctcttggattgggctcaccctgctcaaaacttcggcggcagcggcagcggtagcggtggcggcgccggctttctccatgaacacggtggctttgttgtccttggcgccgcagctgctcattaagccctccctcacctgtttctccagaaagggcgttggccgctatggcggaatcaaggtgtacgccgtgctcagagacgacggagctgagtttgccaagaacaacaacctggaggccctgttccatgtggatgaccccgggccgagggtccccatcaagaagggcaagttcctggacgtgaacgaggctctcgaggtggtccgttttgacatccagtactgcgactggagggcgcggcatgatcttctcaccatcatggttctccacaacaaggtggtagaggtcctcaaccccctagcgagggagttcaagtcgatcgggaccttgaggaaagagcttgccgagctacagcaggagctggcaaaagctcacaatcaggttcatctctcggaaaccagagtctcatctgcgctcgacaagctagcgcatatggagaccctggtgaacgacaggctgttgccaccggacggagcctctagtacgtccacggcgcagcccacttccttggttccaagcacttcgtccaccgcccgtgtccgagccaagaaaccgccacgtcggggccttaacgtgtctggcccggtgaagccgtacaatcccagcctgaagaacttctggtacccagtcgccttctccagtgatctgaaagatgacaccatggtgccgatagcttgcttcgaggagcagtgggtgatattccgtggaaaagacggaaggcctgggtgtgttcagaacacatgtgctcacagggcttgcccgctgcatcttggttcagtgaacgagggtaggatccagtgcccttaccatggttgggagtactctactgatgggaaatgtgaaaaaatgccatcaacaaagatgctcaacgtgcgcatccagtcattgccatgctttgagcaggaaggaatggtctggatttggcctggggatgacccaccaaaggctacaatcccttctcttctgcctccttcaggatttacagtacacgcagagatagtgatggaactgccagttgaacatggactactcctggataacctcttggaccttgctcatgctccttttacacacacatccacctttgccaagggctggagtgttccaagtttggtgaagttcttaacacctgcgtctgggctccaagggtactgggatccttacccgatcgacatggagttccgaccgccatgtatggtcttgtcgaccattggcatctcaaagcctgggaagctagaagggaagagcacccagcaatgctccacgcacctccaccagctccacgtctgcttgccctcctctaggaacaaaactaggctgctgtaccggatgtcgctagacttcgctccgtggctcaagcatgtaccgctcatgcacctgctgtggtcacatttcgcagagaaggcatgtcagtcaatgtgataaagtcttgaacgaggacctacggcttgttcttggtcagcaagaacggatgatcaatggcgccaacgtctggaactggccggtatcatatgacaagctcggggtccggtaccggttgtggagagacaccgttgagaggggctctgaacggttgccattcagtaaccaagctgagagtggatcatagccggccggtgggtctcttaatttcctcctcgtcacatttattcgcgagacgacggccagaattagttacctaggcgtgcgtctctgtgctctgctccctgatgctgctgcgtctatctggaaggcgaaggttgatgggtaacatcatcgtgtctctctctcccctctggtgttggaatgtacactagcgtcgttatcatgagatgcaattgtaatctgaggttgatattttctttctttctttctttttccttttcgctttcttcttttcttcaccctttttgtgtaaagattcagcgaatgttactttgtcaaagcatgtataatcaatcatactactaactatggagacatgttcatatgagaaatggcagcagcacatctttgcttatatattcaccatctgttcctagagtgtatgccacagcagacacaaagtcgtctaagctatgcggaaaacaaaacaaaaaccaggaaagagcagttcgtttgcggctgcgtttgcggctgcttgtgggccaggtctgtcagtgaccatacgaggaataatatgcaccagagctccataccaaatggaaatgaacatcacaaggttttcctgtttgccaaattgccagtaccaacatcagatcaaggagtggttccgatcaacgttaaagatctatacaaaactatacctgtaaaacacatacaatcagcgaccccttgaaaggctgcttgctggttgttggcaaagaacaatcaattaacacgatttctttatcagctggaggcgcatgtacaaggtgttacatttatacatataacttacaaaactctacaatttgatacagtgccgagattctactgataaatgtattccgttgccgtcgcacaaagactgtttacagagcctgcaactggctaacatcttttccccctttagttttctcatagggcgattccctatgatctccatggtgttcggttcttcgaattcatttcgagcttctttcaccctccacctcggcaaactgcacactgagctcggaatacctgccctgcatctcttttagctcattctctactgccatctgcctcctcttcaactcgatagtatcttgtatcagttcattgatgtcccagaagctttgcaagactgctgcttc

SEQ ID NO: 147832 - DNA, 2923 bp, Zea Mays
tccattttccggaaaagaaactagacgcaaccagtttctctttccctcccgattttctgtttttcttctcttggattgggctcaccctgctcaaaacttcggcggcagcggcagcggtagcggtggcggcgccggctttctccatgaacacggtggctttgttgtccttggcgccgcagctgctcattaagccctccctcacctgtttctccagaaagggcgttggccgctatggcggaatcaaggtgtacgccgtgctcagagacgacggagctgagtttgccaagaacaacaacctggaggccctgttccatgtggatgaccccgggccgagggtccccatcaagaagggcaagttcctggacgtgaacgaggctctcgaggtggtccgttttgacatccagtactgcgactggagggcgcggcatgatcttctcaccatcatggttctccacaacaaggtggtagaggtcctcaaccccctagcgagggagttcaagtcgatcgggaccttgaggaaagagcttgccgagctacagcaggagctggcaaaagctcacaatcaggttcatctctcggaaaccagagtctcatctgcgctcgacaagctagcgcatatggagaccctggtgaacgacaggctgttgccaccggacggagcctctagtacgtccacggcgcagcccacttccttggttccaagcacttcgtccaccgcccgtgtccgagccaagaaaccgccacgtcggggccttaacgtgtctggcccggtgaagccgtacaatcccagcctgaagaacttctggtacccagtcgccttctccagtgatctgaaagatgacaccatggtgccgatagcttgcttcgaggagcagtgggtgatattccgtggaaaagacggaaggcctgggtgtgttcagaacacatgtgctcacagggcttgcccgctgcatcttggttcagtgaacgagggtaggatccagtgcccttaccatggttgggagtactctactgatgggaaatgtgaaaaaatgccatcaacaaagatgctcaacgtgcgcatccagtcattgccatgctttgagcaggaaggaatggtctggatttggcctggggatgacccaccaaaggctacaatcccttctcttctgcctccttcaggatttacagtacacgcagagatagtgatggaactgccagttgaacatggactactcctggataacctcttggaccttgctcatgctccttttacacacacatccacctttgccaagggctggagtgttccaagtttggtgaagttcttaacacctgcgtctgggctccaagggtactgggatccttacccgatcgacatggagttccgaccgccatgtatggtcttgtcgaccattggcatctcaaagcctgggaagctagaagggaagagcacccagcaatgctccacgcacctccaccagctccacgtctgcttgccctcctctaggaacaaaactaggctgctgtaccggatgtcgctagacttcgctccgtggctcaagcatgtaccgctcatgcacctgctgtggtcacatttcgcagagaaggcatgtcttgaacgaggacctacggcttgttcttggtcagcaagaacggatgatcaatggcgccaacgtctggaactggccggtatcatatgacaagctcggggtccggtaccggttgtggagagacaccgttgagaggggctctgaacggttgccattcagtaaccaagctgagagtggatcatagccggccggtgggtctcttaatttcctcctcgtcacatttattcgcgagacgacggccagaattagttacctaggcgtgcgtctctgtgctctgctccctgatgctgctgcgtctatctggaaggcgaaggttgatgggtaacatcatcgtgtctctctctcccctctggtgttggaatgtacactagcgtcgttatcatgagatgcaattgtaatctgaggttgatattttctttctttctttctttttccttttcgctttcttcttttcttcaccctttttgtgtaaagattcagcgaatgttactttgtcaaagcatgtataatcaatcatactactaactatggagacatgttcatatgagaaatggcagcagcacatctttgcttatatattcaccatctgttcctagagtgtatgccacagcagacacaaagtcgtctaagctatgcggaaaacaaaacaaaaaccaggaaagagcagttcgtttgcggctgcgtttgcggctgcttgtgggccaggtctgtcagtgaccatacgaggaataatatgcaccagagctccataccaaatggaaatgaacatcacaaggttttcctgtttgccaaattgccagtaccaacatcagatcaaggagtggttccgatcaacgttaaagatctatacaaaactatacctgtaaaacacatacaatcagcgaccccttgaaaggctgcttgctggttgttggcaaagaacaatcaattaacacgatttctttatcagctggaggcgcatgtacaaggtgttacatttatacatataacttacaaaactctacaatttgatacagtgccgagattctactgataaatgtattccgttgccgtcgcacaaagactgtttacagagcctgcaactggctaacatcttttccccctttagttttctcatagggcgattccctatgatctccatggtgttcggttcttcgaattcatttcgagcttctttcaccctccacctcggcaaactgcacactgagctcggaatacctgccctgcatctcttttagctcattctctactgccatctgcctcctcttcaactcgatagtatcttgtatcagttcattgatgtcccagaagctttgcaagactgctgcttc

SEQ ID NO: 147833 - DNA, 2919 bp, Zea Mays
tccattttccggaaaagaaactagacgcaaccagtttctctttccctcccgattttctgtttttcttctcttggattgggctcaccctgctcaaaacttcggcggcagcggcagcggtagcggtggcggcgccggctttctccatgaacacggtggctttgttgtccttggcgccgcagctgctcattaagccctccctcacctgtttctccagaaagggcgttggccgctatggcggaatcaaggtgtacgccgtgctcagagacgacggagctgagtttgccaagaacaacaacctggaggccctgttccatgtggatgaccccgggccgagggtccccatcaagaagggcaagttcctggacgtgaacgaggctctcgaggtggtccgttttgacatccagtactgcgactggagggcgcggcatgatcttctcaccatcatggttctccacaacaaggtggtagaggtcctcaaccccctagcgagggagttcaagtcgatcgggaccttgaggaaagagcttgccgagctacagcaggagctggcaaaagctcacaatcaggttcatctctcggaaaccagagtctcatctgcgctcgacaagctagcgcatatggagaccctggtgaacgacaggctgttgccaccggacggagcctctagtacgtccacggcgcagcccacttccttggttccaagcacttcgtccaccgcccgtgtccgagccaagaaaccgccacgtcggggccttaacgtgtctggcccggtgaagccgtacaatcccagcctgaagaacttctggtacccagtcgccttctccagtgatctgaaagatgacaccatggtgccgatagcttgcttcgaggagcagtgggtgatattccgtggaaaagacggaaggcctgggtgtgttcagaacacatgtgctcacagggcttgcccgctgcatcttggttcagtgaacgagggtaggatccagtgcccttaccatggttgggagtactctactgatgggaaatgtgaaaaaatgccatcaacaaagatgctcaacgtgcgcatccagtcattgccatgctttgagcaggaaggaatggtctggatttggcctggggatgacccaccaaaggctacaatcccttctcttctgcctccttcaggatttacagtacacgcagagatagtgatggaactgccagttgaacatggactactcctggataacctcttggaccttgctcatgctccttttacacacacatccacctttgccaagggctggagtgttccaagtttggtgaagttcttaacacctgcgtctgggctccaagggtactgggatccttacccgatcgacatggagttccgaccgccatgtatggtcttgtcgaccattggcatctcaaagcctgggaagctagaagggaagagcacccagcaatgctccacgcacctccaccagctccacgtctgcttgccctcctctaggaacaaaactaggctgctgtaccggatgtcgctagacttcgctccgtggctcaagcatgtaccgctcatgcacctgctgtggtcacatttcgcagagaaggtcttgaacgaggacctacggcttgttcttggtcagcaagaacggatgatcaatggcgccaacgtctggaactggccggtatcatatgacaagctcggggtccggtaccggttgtggagagacaccgttgagaggggctctgaacggttgccattcagtaaccaagctgagagtggatcatagccggccggtgggtctcttaatttcctcctcgtcacatttattcgcgagacgacggccagaattagttacctaggcgtgcgtctctgtgctctgctccctgatgctgctgcgtctatctggaaggcgaaggttgatgggtaacatcatcgtgtctctctctcccctctggtgttggaatgtacactagcgtcgttatcatgagatgcaattgtaatctgaggttgatattttctttctttctttctttttccttttcgctttcttcttttcttcaccctttttgtgtaaagattcagcgaatgttactttgtcaaagcatgtataatcaatcatactactaactatggagacatgttcatatgagaaatggcagcagcacatctttgcttatatattcaccatctgttcctagagtgtatgccacagcagacacaaagtcgtctaagctatgcggaaaacaaaacaaaaaccaggaaagagcagttcgtttgcggctgcgtttgcggctgcttgtgggccaggtctgtcagtgaccatacgaggaataatatgcaccagagctccataccaaatggaaatgaacatcacaaggttttcctgtttgccaaattgccagtaccaacatcagatcaaggagtggttccgatcaacgttaaagatctatacaaaactatacctgtaaaacacatacaatcagcgaccccttgaaaggctgcttgctggttgttggcaaagaacaatcaattaacacgatttctttatcagctggaggcgcatgtacaaggtgttacatttatacatataacttacaaaactctacaatttgatacagtgccgagattctactgataaatgtattccgttgccgtcgcacaaagactgtttacagagcctgcaactggctaacatcttttccccctttagttttctcatagggcgattccctatgatctccatggtgttcggttcttcgaattcatttcgagcttctttcaccctccacctcggcaaactgcacactgagctcggaatacctgccctgcatctcttttagctcattctctactgccatctgcctcctcttcaactcgatagtatcttgtatcagttcattgatgtcccagaagctttgcaagactgctgcttc

SEQ ID NO: 147834 - DNA, 1370 bp, Zea Mays
ttagcgaagcgtgcgaactgcgaagccaagcaaagaactccaaattccacgccgatccgcccccaccactactccaccgcgcgcctcccctcccgaatcccgatccatctccatccagccgccgccggcatccgcgagaggccatggacgtgagcaggaagaagaagtgggtggcctgggcggtggcggccgccatcttcgtcgtcctcatgctcgtcacgcccgccatcccgcaggacgaagcctaccacgacttcgcggaccagcgcacccttttcttagggattcccaacaccttgaatgtgatctcaaacatccctttcttctttgttggcgtcacggggctcatcctgtgccacttcaacaactatttcaggctaagctcgcagggggagctctggagttggacgctgttctttgctggtgtcacggctgttggatttggttcttcctattatcatctcaacccgaatgacgccaccctagtttgggacagactgccaatgacgattgctttcacttctgtcatggctatattcattattgaaagggttgatgatagagcaggggcaaaatcccttgcaccacttgtgattgcgggtgccttgagcatcatgtattggagacactttgatgatcttcgcccgtacgcagtagttcagtttgttccatgcattgctttacctgtgatggctatagtaattccaccgatgtatacacattcaagctactggttgtgggcagcaggattttacctccttgctaaagtggaagaggctgctgacaaaactatctacaattggactcatcagattgttagtggtcatactcttaagcatctatgtgctgcgatggtaccggttttcctggctctcatgctagctaaaaggactaccgaaccagaaaggataagcttgctccagaagtggaagaccagttgggttgcggtgagagagaggcgtttcaaagatagcagtacagttgatgtggattgcggctacgctgttgtttcaagtatatctgaacagtaaattgtcatgcatctaattaacatgcacgttgtttcaagtattagcatgcatgctgcgcatgtgtatgagagaagatccctgtgaagtattaagaaaccaacctacctagttgagtttgctggtcggagttagctgtgcctgtgggtgacatatcttgtacatagcagaaagcaatacaagtaacggaagcatgtattacaagatttgcgtatatcatttcaatttttttccttgaagagactgatgcgtgccttaaaagtagatgggatattttgatttctagttgatccaacaaattcagcataacattggctgttgcaaattcatgcaataaatgca

SEQ ID NO: 147835 - DNA, 1818 bp, Zea Mays
gtgggttcgagtcccaccgggcgtggtctttttttttatttttgttttttagctaagaaaaaaacgctgtctattctgtaacatgaattttacgtgcaaaaggaaagatttattctacagggggttattcatggagcatgtgatagacgtctattctgtaacatgaattttacgtgcaaaaagaaagatttattctacagggggttattcatggagcatgtgatagacggtggacatcgtgtgcgtgcgtcttatcaacgcatactgctgactgttttgccatgtgaggagaccgcggtgggttgctttgatgcttgtcaattaacgcacgctatgggcacttccgctgccgtcgtgcggcgcgcctgcaactgcaacgctaccacctcgactcgcccctgctagcagcatccgggaagctgccctgccactgccaggctgccacaccgaggtgctcccttgactccctctcctctcctcttctcgcgcacgtggtctgtgcccgtacgcggcggcgctgccgctcaccagaccggccgccgccacgtctgcttccgcgcctccccgcctcctcaccgtccgcccccttttacctgcctggttactactgctctgcgagaagctggcctcgaatcgtcaaatctaatcctcggtattgatttcaccaaaagcaatgagtggtcaggcaggcattcctttagaagaaaatctctgcatgccattaatggcaccccaaatccatatgaacaagctatctctataatcgggcgaacgctgtcaccttttgacgatgataacttgataccatgttttggatttggcgatgcttctacacatgatcattctgtgttcagtttctacccagagaaccgaccctgtcgtggctttgaggaggttcttgtaagtaattggcagtaccatgtcctcgtgatcatagctgatggacaggtgactgccgcgaatataaatgatggaagattaagtccacaggaacaagcaactatacaagcaattgtcgatgctagctactatcctctttcaatagtaatggttggggtgggtgatggaccatgggatgcgatgcagcattttgatgactgtatccctgaaagagcttttgacaattttcagtttgtgaacttcactggtattatgtcaacaagtaaggatatgtcaaagaaggaggctgcatttgcccttgcagctcttatggaaataccttctcagtataaagcaacgcaaggcctccgacctccagaaaagcaagcacaaaggattggctctcctaggattcttcctcctccaaataaagttcttgaaaatgataatgccgccgccgctgcttcgcaccctcctcaaactgcaagctcgaaatcaactggtattggcaaaagtgctgctgacgagcaggtatgccccatatgtctaaccaatccaaaggacatggcttttcagtgtggtcatctgacatgtaaggaatgtggcccaacactatcaacgtgcccattgtgccgcgctctaatcaccatgcgtgtgaggctctactcctaagtcggttggtgtctggagggatgggaccaaacagaaaggagcaagaactttggggcgcaaggactgcgctacgatcttgagatatggtccatatggatgtcatgataacgatgcatgtacagaaaccttgtccgtgcctattcagtaatgtcgttgatgagtatcttccatcaatcacatgtaaaatttctaatgttatcttgtattagtagcaggggattgcttgttgagtggaataccaccagttgttcagcaacagatagtaaa

SEQ ID NO: 147836 - DNA, 1777 bp, Zea Mays
cggtgggttgctttgatgcttgtcaattaacgcacgctatgggcacttccgctgccgtcgtgcggcgcgcctgcaactgcaacgctaccacctcgactcgcccctgctagcagcatccgggaagctgccctgccactgccaggctgccacaccgagatcattttattataaatgtggggcgagagaactcatcataagcactggcatcaaggtcatggtacctcggggaattccaacaacaaaaagcatgataagcggcagccaaaatttataccagacaattatagctccgtcgatgaggttactactgctctgcgagaagctggcctcgaatcgtcaaatctaatcctcggtattgatttcaccaaaagcaatgagtggtcaggcaggcattcctttagaagaaaatctctgcatgccattaatggcaccccaaatccatatgaacaagctatctctataatcgggcgaacgctgtcaccttttgacgatgataacttgataccatgttttggatttggcgatgcttctacacatgatcattctgtgttcagtttctacccagagaaccgaccctgtcgtggctttgaggaggttcttgtaaggtatcgacagattgtaccacatttgaacctttcaggaccaacttcttttgcacctcttatttatgcagcgatttctgttgttgaaaacagtaattggcagtaccatgtcctcgtgatcatagctgatggacaggtgactgccgcgaatataaatgatggaagattaagtccacaggaacaagcaactatacaagcaattgtcgatgctagctactatcctctttcaatagtaatggttggggtgggtgatggaccatgggatgcgatgcagcattttgatgactgtatccctgaaagagcttttgacaattttcagtttgtgaacttcactggtattatgtcaacaagtaaggatatgtcaaagaaggaggctgcatttgcccttgcagctcttatggaaataccttctcagtataaagcaacgcaaggcctccgacctccagaaaagcaagcacaaaggattggctctcctaggattcttcctcctccaaataaagttcttgaaaatgataatgccgccgccgctgcttcgcaccctcctcaaactgcaagctcgaaatcaactggtattggcaaaagtgctgctgacgagcaggtactttgggccagttactcttcattacatttctcaagagtgatggcacattcaagtattaaactgtatctttgccacctacaggtatgccccatatgtctaaccaatccaaaggacatggcttttcagtgtggtcatctgacatgtaaggaatgtggcccaacactatcaacgtgcccattgtgccgcgctctaatcaccatgcgtgtgaggctctactcctaagtcggttggtgtctggagggatgggaccaaacagaaaggagcaagaactttggggcgcaaggactgcgctacgatcttgagatatggtccatatggatgtcatgataacgatgcatgtacagaaaccttgtccgtgcctattcagtaatgtcgttgatgagtatcttccatcaatcacatgtaaaatttctaatgttatcttgtattagtagcaggggattgcttgttgagtggaataccaccagttgttcagcaacagatagtaaactccatgtgcatttggaagtcacttttgtgatttgtgtccaaccattggttcctgatagacagtttaccaaaaacagggttcttt

SEQ ID NO: 147837 - DNA, 1714 bp, Zea Mays
gctaccacctcgactcgcccctgctagcagcatccgggaagctgccctgccactgccaggctgccacaccgaggtgctcccttgactccctctcctctcctcttctcgcgcacgtggtctgtgcccgtacgcggcggcgctgccgctcaccagaccggccgccgccacgtctgcttccgcgcctccccgcctcctcaccgtccgcccccttttacctgcctgatcattttattataaatgtggggcgagagaactcatcataagcactggcatcaaggtcatggtacctcggggaattccaacaacaaaaagcatgataagcggcagccaaaatttataccagacaattatagctccgtcgatgaggttactactgctctgcgagaagctggcctcgaatcgtcaaatctaatcctcggtattgatttcaccaaaagcaatgagtggtcaggcaggcattcctttagaagaaaatctctgcatgccattaatggcaccccaaatccatatgaacaagctatctctataatcgggcgaacgctgtcaccttttgacgatgataacttgataccatgttttggatttggcgatgcttctacacatgatcattctgtgttcagtttctacccagagaaccgaccctgtcgtggctttgaggaggttcttgtaaggtatcgacagattgtaccacatttgaacctttcaggaccaacttcttttgcacctcttatttatgcagcgatttctgttgttgaaaacagtaattggcagtaccatgtcctcgtgatcatagctgatggacgtgactgccgcgaatataaatgatggaagattaagtccacaggaacaagcaactatacaagcaattgtcgatgctagctactatcctctttcaatagtaatggttggggtgggtgatggaccatgggatgcgatgcagcattttgatgactgtatccctgaaagagcttttgacaattttcagtttgtgaacttcactggtattatgtcaacaagtaaggatatgtcaaagaaggaggctgcatttgcccttgcagctcttatggaaataccttctcagtataaagcaacgcaaggcctccgacctccagaaaagcaagcacaaaggattggctctcctaggattcttcctcctccaaataaagttcttgaaaatgataatgccgccgccgctgcttcgcaccctcctcaaactgcaagctcgaaatcaactggtattggcaaaagtgctgctgacgagcaggtatgccccatatgtctaaccaatccaaaggacatggcttttcagtgtggtcatctgacatgtaaggaatgtggcccaacactatcaacgtgcccattgtgccgcgctctaatcaccatgcgtgtgaggctctactcctaagtcggttggtgtctggagggatgggaccaaacagaaaggagcaagaactttggggcgcaaggactgcgctacgatcttgagatatggtccatatggatgtcatgataacgatgcatgtacagaaaccttgtccgtgcctattcagtaatgtcgttgatgagtatcttccatcaatcacatgtaaaatttctaatgttatcttgtattagtagcaggggattgcttgttgagtggaataccaccagttgttcagcaacagatagtaaactccatgtgcatttggaagtcacttttgtgatttgtgtccaa

SEQ ID NO: 147838 - DNA, 1080 bp, Zea Mays
ccagttcttactcagttatttgtggtcctgaattagtttcttggcattactgccatttcttttttccatttgctgatcttgtatgtattgtcttatctgaactaatctcacagaaagcaagcacaaaggattggctctcctaggattcttcctcctccaaataaagttcttgaaaatgataatgccgccgccgctgcttcgcaccctcctcaaactgcaagctcgaaatcaactggtattggcaaaagtgctgctgacgagcaggtatgccccatatgtctaaccaatccaaaggacatggcttttcagtgtggtcatctgacatgtaaggaatgtggcccaacactatcaacgtgcccattgtgccgcgctctaatcaccatgcgtgtgaggctctactcctaagtcggttggtgtctggagggatgggaccaaacagaaaggagcaagaactttggggcgcaaggactgcgctacgatcttgagatatggtccatatggatgtcatgataacgatgcatgtacagaaaccttgtccgtgcctattcagtaatgtcgttgatgagtatcttccatcaatcacatgtaaaatttctaatgttatcttgtattagtagcaggggattgcttgttgagtggaataccaccagttgttcagcaacagatagtaaactccatgtgcatttggaagtcacttttgtgatttgtgtccaaccattggttcctgatagacagtttaccaaaaacagggttctttctgtctttcaccgaactgttggtctggaatttggagccacaaattcaatcgcggcaatatatatttaggcccagttcggttgcctgggaaggcttccaggccaggaaacagtggaccactcaatccagcccaagatttgatctagatggtaagggatcgggattcctaccgggctatggaggaaggggaactttaaaccgggccgtttttgtttttatttcgggttgaaacgaaaatctcagggctggattccaaactggataatttttccagccggtaagaggcatagagcggccggatgaggccgaaatggacgagacctt

SEQ ID NO: 147839 - DNA, 78 bp, Zea Mays
gcggcggcggcggcgtcgtctcctccccggccgccgcggaggccctgcagatgtgaggagcggcggagcggcgccggg

SEQ ID NO: 147840 - DNA, 2389 bp, Zea Mays
gacgaaccggcgtgcgcgggcaggcaggcaggcaggcggttggcctggattcaaaagggactctacttttggcccatttccaaccaccatctgcctaggcgtctgtctgtctgtctgacgccgcgcccaccaccgtcccgcaaaaggcgcgccgcgccgcgccgcgccgtcccgtccgtcttcgtccccagtccccaccaacctgtccggatgggccactcggcgtcgcggcccactgcctgcgccggcgccggcgaggcgctgccctcgcgcttcgcgcggttccgccgccgcctgcgcaaccgcctgcgccgcggcgccggcgacgactcggtctcctccaaggccctcgccgccgacgagttcgccggcatcgcacgcgtccggatagccaaggcggatatgcagttcaaggacaagttcttcgcgtgcctctctctcggcgaccgcacgtaccgcaccgagacgtccgacaacacgcacaggcctgtgtgggactcggagaagaaggttatagtggagacgaatggacctcatattgcacgtatctctgtttttgagacgaaccgattttcgaagaacactttggttggttactgcgaggttaatctctttgaaatgcttactaaggacttggaggaacactctgaggaccttcgtctgttggacccatcgtcacccaatactaccgtgggcagcatatccatctcctgtcacattgaagaccctgttgaaacagaacaaagctttgcccgccgtgtcttagctatagtggactatgatgaagatggaactctttccttatcagaattctcagacttgatgaaagcttttggtaataaattagcagttgcaaagattgaagagcttttccgtcaagcagatacaaatagtgatggcatagttgacatagatgaactggcagccctactggctgctcaacaagaagaagaaccacttataagtaactgccctgtctgtggtgaagatcttggaaaatatgataacataaatgatatgatacatatgacactttgcttcgatgagggaactggtaatcagattatgactggtggatttctaactgacaaacaggcatccttatggggtggatgttcaagctcagtgaatgggcacatttctccacgtatgatgttggtttgcactctggctctacagcttcacatattctggttttcgaccggcgaacaaagaggatagtcgaagaagttattgacggaaaaattgtattgtccatgagggctttataccaatcaaaagtaggactcactcttatcaatacaggtgttaaagacctcttgaagaacctatctgagaagcaaggaaaaaagatgaactcgctggaatctgcaaaagatattcccaagttccttgagttatttaaggatcaaattaatatggatgagatcaaggaccctgttgaaagttttaagacttttaacgagtttttcataagaggactgaagcctggtgctagaccaattgcacatggtgatcaaaacagtattgctacctgtgctgctgatagccgattaatggctttcagttccgttgatgagagcacaaggctttggatcaagggccgtaaattttcaattgagggtctcctaggtaccagtgcacactcgaatgctttaagcaacggatcgttggtcattttccggctcgcacctcaggattaccacaggtttcacgtaccagtctcaggaactgtggagaaatttgtggaaattcccgggtgcctgtacacggtgaatcccatcgctgtgaatagcaagtattgcaatgtattcactgagaataaaagagttgtatcaatgatatcaacttcagagtttggaaaggtagcatttgttgcgattggagcaaccatggtaggaagcatcacgttcttgaaaaaagagggtgactacgtccgcaaaggagatgagtttgggtatttctcctttggagggagtacagtgatatgcgtcttcgagaaggacgccatccaatttgacgctgatctcgtggcaaacagcgaaaggtcactggagacccttgtttctgttggtatgaccctgggcatctcgacaaggaacaaggagatgcaagtcccggatctgcagaaagtttcgctcggatgacagacagagctgtaaactgtgtgcaggttaacagtagcgtatatttgatactagcaactgccactggtaggcaatactattatcacataatccaagactacatgtatagtcaggctagaggagtctggtttacggcggtgggcgtgggcatgggcattggcccagctgtcatcggctgagagctcactgcatggctcggtggtttttgcaatgacgatactaaccgtgcagttgctcccata

SEQ ID NO: 147841 - DNA, 855 bp, Zea Mays
agcacaacgtgaccttcatatggtagaatgtttagttgatgtctcactgtagtatgtcttctgttcctagggccgtaaattttcaattgagggtctcctaggtaccagtgcacactcgaatgctttaagcaacggatcgttggtcattttccggctcgcacctcaggattaccacaggtttcacgtaccagtctcaggaactgtggagaaatttgtggaaattcccgggtgcctgtacacggtgaatcccatcgctgtgaatagcaagtattgcaatgtattcactgagaataaaagagttgtatcaatgatatcaacttcagagtttggaaaggtagcatttgttgcgattggagcaaccatggtaggaagcatcacgttcttgaaaaaagagggtgactacgtccgcaaaggagatgagtttgggtatttctcctttggagggagtacagtgatatgcgtcttcgagaaggacgccatccaatttgacgctgatctcgtggcaaacagcgaaaggtcactggagacccttgtttctgttggtatgaccctgggcatctcgacaaggaacaaggagatgcaagtcccggatctgcagaaagtttcgctcggatgacagacagagctgtaaactgtgtgcaggttaacagtagcgtatatttgatactagcaactgccactggtaggcaatactattatcacataatccaagactacatgtatagtcaggctagaggagtctggtttacggcggtgggcgtgggcatgggcattggcccagctgtcatcggctgagagctcactgcatggctcggtggtttttgcaatgacgatactaaccgtgcagttgctccc

SEQ ID NO: 147842 - DNA, 303 bp, Zea Mays
atggcgaacgaactttttttgaagcctagaatcaatggatctacaccgtatagggacgggcctcacctgcgcttagcaggaggaggggagcgactccgggactgggacgacgacgacgagaaggagcgggagcgggacgagacggagccggaggagacggagtgggacggcgagcgggaggaagatcccgaggtggagcgagacgcggagcggccacgccgaggcttcgccatcgtccccggcggcagcggcggcagcggatgcggccgggcgaccggcggcgaccctgtggcgtttggctag

SEQ ID NO: 147843 - DNA, 592 bp, Zea Mays
gatttaataaatttctctcaacgtctgcgtcctctctcgtctccacactccggcgcacgcggcacgccgcacccacgaatccttcctcctcctcctcttcgtcccgatccacctgcaatcggatggtctcgctccgctgcgccgttggtctgtgcagcagcgctcaggttggttcgagctggccgctcttccaatccccccaccgcatcgcagttccgtccgtggccgcgcgtgacgtgacgtctcctcgagcgcctagcgcgtggtctagatcggcaagcgcggcatccatggagacagccaggctcacgccgagggagcaggccacgaccaggatatgtcaggtgtcgagctttgcgacggaactgctcgagataaggtccaaagagccgtccctccacgtgctgcttattgctgggaacccaggcatcgctgcgttttataaggactgtgtcgaggcgctctatgaaaacctcggtggccaagcatctattacagcaatagggcacatttcacacagccagaaggtaacttacacagcttaactgatgtttgtttcacattcaatgcaactatgagtgccaacaacccg

SEQ ID NO: 147844 - DNA, 1368 bp, Zea Mays
gatttaataaatttctctcaacgtctgcgtcctctctcgtctccacactccggcgcacgcggcacgccgcacccacgaatccttcctcctcctcctcttcgtcccgatccacctgcaatcggatggtctcgctccgctgcgccgttggtctgtgcagcagcgctcaggttggttcgagctggccgctcttccaatccccccaccgcatcgcagttccgtccgtggccgcgcgtgacgtgacgtctcctcgagcgcctagcgcgtggtctagatcggcaagcgcggcatccatggagacagccaggctcacgccgagggagcaggccacgaccaggatatgtcaggtgtcgagctttgcgacggaactgctcgagataaggtccaaagagccgtccctccacgtgctgcttattgctgggaacccaggcatcgctgcgttttataaggactgtgtcgaggcgctctatgaaaacctcggtggccaagcatctattacagcaatagggcacatttcacacagccagaaggattgcgagcatgggcgattgttttcgttgtatgaacaaattgaccacaaggttgatttcattgagcaagagcttcagcattctgaacaaccaatagttttggttggtcattcaattggtgcatacataggcttggaagtcttcaagagacttcagaataagataaaatttattgtaggactgtatccatttttaaagatgaacaagagttctgtaacacaatcagcaatcggatatatagcaaggtcatccctcctaagtaaatgggctagtttatttgcatctttcattgggtcactccgaccttcaataacaaggggcattgtgagaaggttccttggaccttcatggtctgtaacagctgttgatgctgcatgcagccatctcttaaggtacaacacaatgcgcaatgtccttttcatggcaatgacagagttccaaaagcttactgaagaaccagactggactttcatcagagcacaagaggacaaaatggcctttttgttcggtgtggatgatcactggggcccactatctcacttagaagaggtgaagtgatgacatgctattagtcaacagtctattgtgatagctggtgttggggaactgggctgcttgatgctaactctcttctgttaatttggaggatttgtagatatcaaagcacgcaccaagggtcaccctgtcggttgaaacagaaggtcacacacatggttactgctgtacagaggctggatctgtctgggttgcagactacatcgcaaatttgattaaaaaccaaatgctcctttggaacaactgaggttcatttggcagatgtatcataagactcttttctccg

SEQ ID NO: 147845 - DNA, 1452 bp, Zea Mays
gatttaataaatttctctcaacgtctgcgtcctctctcgtctccacactccggcgcacgcggcacgccgcacccacgaatccttcctcctcctcctcttcgtcccgatccacctgcaatcggatgggtatgcatctccgccccagggggctcgagccgccgccagcctcttcctcccgtaaccaaccgcctccttcctagtagtacgacttccgactaacgcgctctgctcctggtcctcgtcctccgcgtgatctcttcagtctcgctccgctgcgccgttggtctgtgcagcagcgctcaggttggttcgagctggccgctcttccaatccccccaccgcatcgcagttccgtccgtggccgcgcgtgacgtgacgtctcctcgagcgcctagcgcgtggtctagatcggcaagcgcggcatccatggagacagccaggctcacgccgagggagcaggccacgaccaggatatgtcaggtgtcgagctttgcgacggaactgctcgagataaggtccaaagagccgtccctccacgtgctgcttattgctgggaacccaggcatcgctgcgttttataaggactgtgtcgaggcgctctatgaaaacctcggtggccaagcatctattacagcaatagggcacatttcacacagccagaaggattgcgagcatgggcgattgttttcgttgtatgaacaaattgaccacaaggttgatttcattgagcaagagcttcagcattctgaacaaccaatagttttggttggtcattcaattggtgcatacataggcttggaagtcttcaagagacttcagaataagataaaatttattgtaggactgtatccatttttaaagatgaacaagagttctgtaacacaatcagcaatcggatatatagcaaggtcatccctcctaagtaaatgggctagtttatttgcatctttcattgggtcactccgaccttcaataacaaggggcattgtgagaaggttccttggaccttcatggtctgtaacagctgttgatgctgcatgcagccatctcttaaggtacaacacaatgcgcaatgtccttttcatggcaatgacagagttccaaaagcttactgaagaaccagactggactttcatcagagcacaagaggacaaaatggcctttttgttcggtgtggatgatcactggggcccactatctcacttagaagagatatcaaagcacgcaccaagggtcaccctgtcggttgaaacagaaggtcacacacatggttactgctgtacagaggctggatctgtctgggttgcagactacatcgcaaatttgattaaaaaccaaatgctcctttggaacaactgaggttcatttggcagatgtatcataagactcttttctccgaaagaagtgaatagctggagtgtggtggaacttattgaggttccggttttgata

SEQ ID NO: 147846 - DNA, 1500 bp, Zea Mays
gatttaataaatttctctcaacgtctgcgtcctctctcgtctccacactccggcgcacgcggcacgccgcacccacgaatccttcctcctcctcctcttcgtcccgatccacctgcaatcggatgggtatgcatctccgccccagggggctcgagccgccgccagcctcttcctcccgtaaccaaccgcctccttcctagtagtacgacttccgactaacgcgctctgctcctggtcctcgtcctccgcgtgatctcttcagtctcgctccgctgcgccgttggtctgtgcagcagcgctcaggttggttcgagctggccgctcttccaatccccccaccgcatcgcagttccgtccgtggccgcgcgtgacgtgacgtctcctcgagcgcctagcgcgtggtctagatcggcaagcgcggcatccatggagacagccaggctcacgccgagggagcaggccacgaccaggatatgtcaggtgtcgaggtgctcgcggcgattccctgcagctttgcgacggaactgctcgagataaggtccaaagagccgtccctccacgtgctgcttattgctgggaacccaggcatcgctgcgttttataaggactgtgtcgaggcgctctatgaaaacctcggtggccaagcatctattacagcaatagggcacatttcacacagccagaaggattgcgagcatgggcgattgttttcgttgtatgaacaaattgaccacaaggttgatttcattgagcaagagcttcagcattctgaacaaccaatagttttggttggtcattcaattggtgcatacataggcttggaagtcttcaagagacttcagaataagataaaatttattgtaggactgtatccatttttaaagatgaacaagagttctgtaacacaatcagcaatcggatatatagcaaggtcatccctcctaagtaaatgggctagtttatttgcatctttcattgggtcactccgaccttcaataacaaggggcattgtgagaaggttccttggaccttcatggtctgtaacagctgttgatgctgcatgcagccatctcttaaggtacaacacaatgcgcaatgtccttttcatggcaatgacagagttccaaaagcttactgaagaaccagactggactttcatcagagcacaagaggacaaaatggcctttttgttcggtgtggatgatcactggggcccactatctcacttagaagagatatcaaagcacgcaccaagggtcaccctgtcggttgaaacagaaggtcacacacatggttactgctgtacagaggctggatctgtctgggttgcagactacatcgcaaatttgattaaaaaccaaatgctcctttggaacaactgaggttcatttggcagatgtatcataagactcttttctccgaaagaagtgaatagctggagtgtggtggaacttattgaggttccggttttgataatctagtccacatttttttggctta

SEQ ID NO: 147847 - DNA, 1341 bp, Zea Mays
gatttaataaatttctctcaacgtctgcgtcctctctcgtctccacactccggcgcacgcggcacgccgcacccacgaatccttcctcctcctcctcttcgtcccgatccacctgcaatcggatggtctcgctccgctgcgccgttggtctgtgcagcagcgctcaggttggttcgagctggccgctcttccaatccccccaccgcatcgcagttccgtccgtggccgcgcgtgacgtgacgtctcctcgagcgcctagcgcgtggtctagatcggcaagcgcggcatccatggagacagccaggctcacgccgagggagcaggccacgaccaggatatgtcaggtgtcgagctttgcgacggaactgctcgagataaggtccaaagagccgtccctccacgtgctgcttattgctgggaacccaggcatcgctgcgttttataaggactgtgtcgaggcgctctatgaaaacctcggtggccaagcatctattacagcaatagggcacatttcacacagccagaaggattgcgagcatgggcgattgttttcgttgtatgaacaaattgaccacaaggttgatttcattgagcaagagcttcagcattctgaacaaccaatagttttggttggtcattcaattggtgcatacataggcttggaagtcttcaagagacttcagaataagataaaatttattgtaggactgtatccatttttaaagatgaacaagagttctgtaacacaatcagcaatcggatatatagcaaggtcatccctcctaagtaaatgggctagtttatttgcatctttcattgggtcactccgaccttcaataacaaggggcattgtgagaaggttccttggaccttcatggtctgtaacagctgttgatgctgcatgcagccatctcttaaggtacaacacaatgcgcaatgtccttttcatggcaatgacagagttccaaaagcttactgaagaaccagactggactttcatcagagcacaagaggacaaaatggcctttttgttcggtgtggatgatcactggggcccactatctcacttagaagagatatcaaagcacgcaccaagggtcaccctgtcggttgaaacagaaggtcacacacatggttactgctgtacagaggctggatctgtctgggttgcagactacatcgcaaatttgattaaaaaccaaatgctcctttggaacaactgaggttcatttggcagatgtatcataagactcttttctccgaaagaagtgaatagctggagtgtggtggaacttattgaggttccggttttgataatctagtccacatttttttggctta

SEQ ID NO: 147848 - DNA, 1381 bp, Zea Mays
atccaattttgggtccgcagaacctcctcctctcgctccgccgccgccttcccctcgcccaccacgctttggtcccaaacccacggtcgctcatcctggacctccacgccatcgaggcagtgaagctgggctcattcgtgcaatcgtgctcaagtctggcatcaactcccccatctaccgggacctccacgcgctcgtctcccacccacgcctgctctccgttgttgcctcgctcctccatatgcccggcctcgtctgcaacgtcccctacacagcgctcccgtcgtcgtcctctgcgtcgaccgctccatccccatgctcatgcgccgcaaggaggccaagccttacgacatgattgaggataggcactggagagtttgacttgcgatatttgagtacatcccattgctggcgctccgagtatctggccatactattgattcacataccagctaaatttaggaccatcccgattgaaggctcttcccacttaaggcatctggcttggtgtttcttgtttggtgatacctgtacaagcaaatttggtgacctgctacttaaaaactgtttctgcaaagaggtcgtcttgactgatcgcaatgatgaagttctggaggcaagtgttgttgttatgatgaaggcagacccaagtattgaaagggatgatctgattttgctctaggagattgccatgtacatgcttcttgcatgtggagctgtctatgtgatcttgataagaaagatttgtggatgttgacccaacaggaaattgctactgaggtgcaaagtgaatccaagtgaaagtaattaggggagttagctatgtcaaatggaaagagagtggttgctaaaggataggaagctgaagctggatgaaggaagcaactacatgcaaccgatggcaataatgcattgcagggttgaggctcgttagaaatgtcaagttggtcccggacgtgggtatggtgcccgcaaggccgacagagctgagatcaagcactgagatcgtgccctcgtgcctacggctgcatgtcacacctggccagaggcataggctaccactactgttctaagaggacaacctgctcgatagctagcctaggatggccttcagttccagcaaggcttgtcggctcgtctcactgcagaacgctattgttggcgcctaattgaacgaagttgataccggtaggatcccatgaagcaacataagcagcagaagtctgacgaggaatgacatagatgcagtgctttcgtttgttgctactgaaaaaagatctgaaccaagtatttctgtaagtataccaacaagttagttgctactactttgtatattgatcttcgttggccgaatgtttgagtttttttcaaggcacaaaca

SEQ ID NO: 147849 - DNA, 435 bp, Zea Mays
ggatttttggactttggttgctttagatctgtgagctgctacttgtattttaaattgatcacaaaccgcttactgcaatgcaggccatactattgattcacataccagctaaatttaggaccatcccgattgaaggctcttcccacttaagtgattcttccttctgaatccattttttagcttattcattcggattatgacccataattatgtttttttgtttgcttgaattcggtcaaacaaactgagaaaagcgtggatcctctgaagaatgtctgaaaaaaatgatagacaagtccctagatttaccccaatttcacttgctctatagatttatagttctataatatgtgcttccttatcaatctttgttactcaattatgctagataatcacttgtccttaatctaattaacagtgttgtcatcatagatg

SEQ ID NO: 147850 - DNA, 2697 bp, Zea Mays
caccattttttctgacctggaagacctgaattggtcgatgctccatcctaattgcattgacgtgtcaaataaagctagctagctttctacttgtaggattaggactggaagatgtcaagatgcaccgctagcgcgctgcaggtgccaaaatggcgcacgtctgccagcagaagctgaagctgaccctagctagctagcggtcatggaaatccttcgtcgtcgcctccgcgcgcgccgtgtctctcttgtcacgttcggcagcgaccagcgaccgcgccgccctgtccctgtgcaacgactcgatcgtctctcttggcaagtccttataaagttataaccccggcccgacgcgagagtgacacagatgccggctacaacgacgacgtactagctagctagctcgttcgatcgcgtgcgtcgttccacaccgacgaccggcggagacgagcggcatggaggcctccgccaaactgcccgtcgtcgtcccgaagggcgtcggcggcatggacaacgacgacgtcgcgccagcgggcggcaagaagcaggcggcggcgggcaggtgggggttcgtgcagttcttcttcgtgctcgccgtcgtcttctgcgtgctactctacgcaccgcgcgtcctcgtgctcagcccgtacgggtacagcatcgacgtcgggctcttcgcgccgacgccgacgacggcgacggcctcgtcggtgccgcagcgcgtcgccggaggcaatgcggtggcccttgaccttgacaaccaggtgcggtccccgtgctcgtccatgcgcgaccacaccatctgctgcgaccgctccagcgtgcacacggacgtgtgcttcatggccggcgacgtgcgcacggacgccgcgtcgctgtcgctcctgctgttcccgccgcaccagcaggcgcagaacggcacgtcgtcggaagaggacaaagaggagagggtgcggccgtacccgcggaagtgggagcgcttcatcatggacaaggtccccgaggtgcggctccgtgtggcggcgccgcggcggccagatggggagcgggaggaggaggagcaccggtgcgacgtacggcacgacgcgccgttgctcgtcatgtccgcggggggctacaccggcaacctgttccacgcgttcaacgacgggttcctgccgtcgtggctgacggtgcagcacctccgccgccgcgtcgtgctgggggtggtctcgtacaacccctggtgggccggcatgttcggcgaggtcatctccggcctctccgaccaccccgtggtggacctcctccacggcacgcggacgcactgcttcccgggcgccatcgtggggacccgctaccacggcatcctcatcgtggaccccgctaggctccgggacaacaagaccatcgtcgacttccaccagatgctcgccgacgcgtacgagaagccaccacgggagacggcaagaccagcacagcagcaggacctgcgggacgccgagcagcggcggcgacggcggccgaggctggggatcgtgtcgcgcaaggggacgcgggtgatcgagaaccaggcggcggtggcgcggctggcctcgtccgtggggttcgacgtggacatcctggagacggccaacgggctgccgctctcggcgtggtacgcgtcgctgcgtgcctgcgacgcgctcgtgggggtgcacggcgcggacctgaccaagttcctgttcctgcggccggggcgcgcctcgctcacccagatcgcgccgctgggggtgtccccgatcgcgcgcgaagacttcggggaacccgccgcccggatggggctggcgtacgagcagtacgaggtgcgcgccggcgagagctcgctggcgcgcaggtacgcgccgggcgacgtggtgctgaccgacccggaagcggcgaagcgggacaaggggggatggaacttggtggcgcgcgtctacctcggcggccagaacgtgaccctggacctcgctaggttccggcagaccctggcgaggatgcacgcgcacgcgatgcggcagcggcgccggcaggagagactgtgatggccggccggccggcggcgacaggtgtacgcacgcacggcggctgtctatgctgttccggaccggtagagggagcgtgacggcaggcattggcagcttgttggaacgacgacgtgcatcaagtgttggggggcggtgagcatgcacgcatcaccgtgtattttggatggagatggaacaagagaggcgtgctttgtcgtgtgctgtttgcgtgacggattgggaacgccgacgaccactaaggtgacggcagcatatatatatacctcgatcgaatgccgcatacatatggtgtgacgatgcaccccctgacacgtatattgtatgtgcaacatattacaaattacatattttactaatatctgcgtgcatgtatacttgttttttttgagtctttcgtttgctaattctgtgatcgacacgtcgtctctgattccttatactgaatatatatatacgtgctccgtccacctcaaaaaggtttaaaagtcatgaaccttaaatttaactaaacgtataaaaactagtaaaattgacagcatgaaataaaaatattattaaaataactacgtgatatatttattaaaattaacttaagtatattaatattaattttttctataaaacatagtcaatttatgattatttgattcct

SEQ ID NO: 147851 - DNA, 242 bp, Zea Mays
gaaggggtactcccggagcggcacgagcgcgagcttgtagaggacgcggttccccgtgcccatggcgacgaccgcagcggcggcgatggccacctccatcccggcgctcctcccggcgcccgcgctgctgctccccgcgacccgccccgccgccgcgcaccttgtcgcgtcccccctgccccttccagggctcgtccaggcgtgtgccgacgcccacgggtccgccgcgatccaccgcgcgt

SEQ ID NO: 147852 - DNA, 1719 bp, Zea Mays
ctcgtaccgcatcaccctacctccgatactgggaagaaacttgctcggtcggagtcggagctgccaacaatgtcgccgctgaggctgtcagtcctccttgtgctcctgtccagcctcttggccccttccactgccctgcgcagctcgacgctgctcctggcgcgttctcctcagtccgtgtcgctcagtgccgttcccgggacaccggtcaccgcatgggcggccaccctcgccgcccagacggcgtccgacgcggcgcgcgcagccacgctcgcaacgggaccccgggacccgccgccggccagtgccgtggacgccgccaagaaagggccgcgccggtccttcgtgccgatcgctccgggccggcagcttctcagcatccccagctacgtggcccgcgcgcgcctcggcacgccggcgcaggcgctcctcgtggccatcgaccccagcaacgacgccgcgtgggtgccgtgcgccgcctgcgcgggctgcgcccgggcgccgtcgttcgacccgacgcggtcgtccacgtaccgccccgtgcgctgcggggcgccgcagtgctcgcaggctcccgccccgtcgtgcccagggggcctgggctcgtcgtgcgcgttcaacctgtcgtacgcggcgtccacgttccaggccctgctcgggcaggatgcgctggcgctccacgacgacgtggacgccgtcgcggcctacacgtttgggtgcctccacgtcgtcacgggtggctccgtgccgccgcaggggctcgtcggcttcggccgcgggccgctctcgtttccgtcgcaaaccaaggacgtgtacggctccgtcttctcctactgcctgccgagctacaagtcttccaacttctccggcacgctcaggctcggccccgccgggcagccgaagaggatcaagacgacgccgctgctatccaacccacaccgtccttccctctactacgtcaacatggtcgggatccgcgtcggcggcaggcccgtgccagtaccggcgtcggccctcgcgttcgacccgaccagcggccgcggcaccatcgtcgacgccgggacgatgttcacgcggctgtccgcgcccgtgtacgccgccgtgcgtgacgtgttccggagcagggtgcgagcgccggtggcaggcccgctcggtggcttcgacacgtgctacaacgtgaccatctccgtgccgaccgtcaccttctcgttcgatgggcgggtgtcggtgacgctgccggaggagaacgtggtcatccgaagctcctcgggcggcatcgcgtgcctggccatggctgcgggaccaccagacggtgtcgacgctgcgctcaacgtgctggccagcatgcagcagcagaaccaccgcgtgttgttcgacgtcgccaatggccgcgtcggtttctcgcgcgagctctgtacggcctgaaatcagtggagccaggctatggattggatggagtattgtgtgtactactccagtataaaagcatgtttggttcactaccttagttgtcacactttgtccaacttttctgtctaaggttagttattcaattcgaacgactaaccttaggcaaagtgtgacacatttagccacaaaccaaacaggccctaagtgtttcagattcctgtggcgcactagcgccgtgagttcaatgtctcgttcgttgctgtcagtgcttggaaagtggatttactgagttgttgggttctgctgact

SEQ ID NO: 147853 - DNA, 216 bp, Zea Mays
atggcgtccctttgcggactccacactcggcgaggccaggacgttcatggaggcctacccaagcttcatgaccatgtcggtgctgcctccaacgtgcggatgcagatgctgcggtcaggtgcgcgcgacacagcggggaagctctgccctgacggccatggcgcgatggttctcctgctgcctcgagtgtgcggttgggctccctctatattttag

SEQ ID NO: 147854 - DNA, 6982 bp, Zea Mays
gtcagatgctttctgaagcgtatgacatggatgccgccacaatactcatcacaatagtgtgagtgagcggttgctccgccgttggccgccgctgccgagtggagccaatttcagatccacgcgtcgggcgtttggctgcggaacgttgcggcagagaggatcctgcggggtgcgggttagtgtagtaatggcacgacgacgatcgaagcagcttgcagctgtaaagaggatatttgtatgatcgggaaaaaatatatatttgaggctgcagaaaggaagcatgcttgtgcttggcgagtagaaaaaaacaaaaaggaaggcgttcgcgggcaacggaggagagtatactactgaccacagtggatgtctgaccgttggcaaatgtgtgagtgtgtgtggatgcgtgggatacatcgattccaatgttggcaggaggggtaggcagcaggctagctagctagatagatccctgaccctgacccctcccgctgaagagcgctcacgccttcaacgcggctgcaggatcggcaggagcagaagccatcagcagcagcagaagaagctcgtcagtggtgcgcagggggtcagcagtggtgcgagctgctgcaggctgcagggcaggcggcagcggcagggacgggggcaacaagacaagcgggggaagaggaagccaattggaaatcccaccgccaaagatagatagggagtgatcgagaagatctcacagaggaatttcagtgtccccactccgcccacttatattcataaaaccaccccacccacccctttcttttctcttcttttcctatcctatcctttctctctctcttgcaaccttcctccttcctccagttccagaggagagagacgcgagaagctttctcgctctactagtctctctctaccatcccttttcttcttcctctcctctctctcttccatgtcactgtcctaggctgaagaaatcgcaataaaaatcgctagactagcagcagcagcagggcaggaagcgaggtaaggggaggaaaaagacgagcgaaaagggggtgttagagttccccactgaaggctgagagtagatattgatgatgatcatgatgatgataggaacaggaccaggtatatagggtaggggagagaggaagccagtgattaggggggtagatagagagagagacaggacgctctactgcactagctgcgcaactcagagaagatactccaataccctcttggcgtgggcggagaaccagcagcaagttcagctcagctcagctgggaggtgccgcaggaggaagaggaggaggagatttttattcggaccggatccactgcgcgtagcgtagcctccttttcactcctacctgctgccggccgctgcctgccgctgctgccgtaacgaaatctacagcggcgcaagcagcgaaattttaaatctttgcggctgctccgaccgcagcgaagcagctccccactctctctccgctgctgcctccgcggacggattccatccccggccctataagtgtggcttcgggacggcgcttcccatccgacaccggcgccttcgcggactgggtcgcctcctccgccgccgcggcgcgcggggacgacctctccctcggcttcaatgccagcgcggcggccgccgcggccgcggccgcctccggcgcctcgctgggcgcgggcctctggggcccggcgtcctccgcctccgccgccatgcgccaggcggccgccatgaactacgggatggccgacgtggggatggtcgtcgtcgcgcccgccgcctccttccaccacacgcaccaccaccaccaccaccacgaggccgccgccgccgccgccgcggctgcggcggcctccggcgaccccatcttcccgctgctctccggcggcccctgcgtgcttgatccggacaagtcggcctccgccagcgccatccagttctggcagcagcagcctccgccgccgtcgtcgccggctgctgcagcgggcgctaaccctaaccctagcgccagccccttcgcctacctcaagaagcccctcccgatgctggacgccggcgccggctcctcaggctccggcgccaccacgtgccaggactgcggcaaccaagcgaagaaggactgcggccacaaccggtgccgcacctgctgcaagagccgcggcttcgactgcaacacgcacgtcaagagcacctgggtccccgccgcccgccgccgcgagcgccagcagctcgccgcctccggctccgcctcgtcctcccccgccaccgcctccgcggcggccgtcgccgcgtccgcgtccgcgtccgcgtccaagaagccccgcctcctctcgtcgcagaccaccacctcgcacacgtccacctccaacgccacgacgccccgaagcttcgacaccacgtccagccaccaagacgcgtcgttcagggacagcctcccgaggcaggtgcgcgcgccggcggtgttcaagtgcgtgcgcgtgacgtccatcgaggacggcgaggacgagtacgcgtaccaggcgacggtcaccatcaacggccacctcttcaaggggttcctgtacgaccagggccccgacgacgggcgccacgcggccaccagcaacgacgactgcacggccggcggggtgcccaacatctccgagctccatctcggagcggcgtctggttccggcgccggcaccggcacctcgatgtcgatggctcctcccacggggctgtacggtggcggtggcggaggacatcatccgcacattctcggcgggtcgtcgagctacggtaacaccatgaactgatggagtacgttccttccttgtacaccggaagagtcccggcccgttaatttccattccttgttgctcttcattttccacgctatagtagcagagttcaattttctcagccttgtcactcacccggcgccatagatagcagggcatcaatgcatggtgttattctgttctacctccttcattccatcgtcctactgtgttatttagccattcgttggtgtataataacatcgatgagttgttttttcttcttcttccagttgttctactgctatagcaagtactgcactgctagttcttttcccccctatcacactagttgggtacgtacgtagagaggagaataattgttagtaggaattgggaagaagatactctcggtagtgcaaagattaaattttttaccattgtgcataagatatcgcctgctagctggttcccaatgcctgtcgttccgtttccacatttggggatgcggtgttctcgccatgcgggtcacctcctcctcctgcctcgtgattgatacatgttcagcatccggagctgcaatgtttgactcctcctccatctgattggcccgccctgcccttttgcgtgcctaatttggcttttgctgtgagcatgagctccactcgttttccgctgcacagttcccttcgttcggcgtctcctcgttttctatgggtaggttaggtgtggaaggcatatggattcttgccgccgtctggacggcggaggaggagcatcttctattgctgggcgcattgggacttgtattctggaggggaggccggaggccaatgtgtagtgcatgcatgtgatgggataatcatccggctaggctattaggatattataagccatgccgatcgcgcatgtgtgtgttacttcgatccttatcctactacgtttacagccgcgcgcctggttcaccgccggctgcttcctgacgtactagaagaggaagaagatgaagatcatggcgcgcagcttgctgctcccctcttctctttatcttctgtgcgaagcccccatatttattccttgtgccggatctcctcgtggttgacaagatgtgaaacgaaagaaagttgtcctccacggtaaaagcattgccattgccatgcatgcactgagagagcctgtgcttttttttgttggggtggacgggctgttcgatttggttcgctgtcttccatcgcagcggcagcggcagcactccacatgtttttacagcgacagctttgctctgcgtttccatggagtaaaagaaaaaaaaacattacagcctatgcatggttgaggctgctcgtaggagtagtagacctctgtaataagtttggagttcactgcacatggctgttgttgcattgcatctcccctcccgtgaactttttcaagttcgggattttggtgctgttgtcctttcttgtcatcatcaaagctgctattatctcatgtacgtgtgatcatgtcactggtccatatcgccttgtccactgccgtcaaccctccgggagcacgtctactattcacattgcttctttattgggtactagacattatgcgtgcatcatggacgccgcgaattgtggtagagctttctttcaggctgcagacttgtttgcatccctactgttccagattgtgctcccctttgtttttttgtcgttgcattgcctacttctgttactacaaagaacacactttactttgaaggggtttcctgagtttaccaattgtagtattataccggagaatagtaatgtaattttcttaatttgtgattactgttgtgttggcattttgttccttattctagctgtcctgaaacacaactaagcaagggcaggttctttgcgtttggtcacgaagaaacgtgtgctacttggacagtccgaccggcgattttcgttttgcttttcatacactgtggacgtaactgcgatcggcatatttatcacatgcacaagttttcttgttggcagtttgcagtttctgatgggtctctttcctgtacaataaattagatgcggctagaacatgaatgtctgtttgctgtcttctgttctgtcttctgttattatgccaaaccaattgactggatcaactttcagttgcctacgaaacccacttaaactatcctgtttgtatgtgtccggtctttttttccccactatctggaaatatgtagtcatcatttggactgaactcaagtttcttctgtttgaaaattctaaatcataaccccgtacataagcaaaaggtatttaagcaccgagacatctttctaatacatatctgattcgtattgtgtaggctaattataagagggaaacagtttggctattgactttgcagtcatattttgtctttccttgctcattttttttttctcgctcaatcattaattcagatttcaattctatgttatttacatatatatagaacatgatatcgaattcgagatctgatttgtcaaagggattggactcatgacttggccattcactcattaatgactttggcacgggtgaattagataatagatagaggtcccttgatcttctccttttagggcattgcctgaaagagaatcctggacaattacgaattaagataactgtcctttcctttatgtttgaagcatagtaactatccttcatatgtttgttgagagaatgaccatcctaatgtttcggttgcccagctaaaaaattggccaggttaagtacataaacggtctgtgtatactaacatcaacataatgaggactgatcatgttcaaaatccgtgttctttttttggctgtgtagttgcattttgtactctttcggtgattgacgatttagttgatttgattcgaatgcatgtctaaagtgtcggtaaaaggttttgttgacaatgttgatactttgtttcttattggtggttattgtatattcgttctaaaagaagttgaagacatggttgttttgtacgtgcgcttttccaaaatgtaattctttctagctctttttttttgtccacatttgaattaatgacaacgaacataaattcataagttgatggtttaacttaaaacggattatattttgtgactgaaggagtattgccaaagcttgttctcattggtgaaccaaagtgactggttttttttgtttatcgccattgagtgtgcaccactcatttgtttttgccagtatcatgtttgtttgcatgccttactcaacgtcatatcagtataaaattaccctataatatttcttgtccataatgggagttccgtcaaaaaactaaaacatttttttgggattttattctcttggtcccttgttagggcattactgagtgcagacaagcctgtctgttgtgtcatatagttcaatgtgtggaatctgctgcctacatccaaaggaattatctcgtcatctagaaaccaagtctgtaaacacaatgtttctgaattattttatacccatcctactttgtctgtgtcaggagtagccaagtgattgaaacattgcacattgtgtctccatgtgtggtgtgcgtgtgtgttttctttcctgctccattacagtgacctgaatccaccgtacaaaatcagcagcttttcttggacatgttaaaggttctgtttacagctcccatgccgattaaagtttgaaaaaaaaattatacacaggtacttccaaagctgacattgtccatgaaatatgagtccgaaaccatctgttgcaattgcataggtcggcttacagtagcagtggtctagtgtttgattaaagaaaacatctgtagccgtacctgtgcttagttagggctagcccatctgttacaaatctgtaagagaattgtcatgctatgtccatacacaaatgactgacaaatccctgtgctccgcctggtggagtgcctccctctatacgtgcgctaccttttctttttgttcgcatcattgtatacactttgcttgcagtttactggactttgtctagctgtgaatatgcaggagttttgttttctgttagaaatatatatatatatatctgctttattgcggcatgcgtgttcccttttcgctcgcgtgttgcgtagcttttgctgttcatgcgggaattgtccgtgccccgtgcccctcacagacgagtggacggaacggtacaatttgcagaac

SEQ ID NO: 147855 - DNA, 75 bp, Zea Mays
gtagatagagagagagacaggacgctctactgcactagctgcgcaactcagagaagatactccaataccctcttg

SEQ ID NO: 147856 - DNA, 1786 bp, Zea Mays
agctccccactctctctccgctgctgcctccgcggacggattccatccccggccctataagtgtggcttcgggacggcgcttcccatccgacaccggcgccttcgcggactgggtcgcctcctccgccgccgcggcgcgcggggacgacctctccctcggcttcaatgccagcgcggcggccgccgcggccgcggccgcctccggcgcctcgctgggcgcgggcctctggggcccggcgtcctccgcctccgccgccatgcgccaggcggccgccatgaactacgggatggccgacgtggggatggtcgtcgtcgcgcccgccgcctccttccaccacacgcaccaccaccaccaccaccacgaggccgccgccgccgccgccgcggctgcggcggcctccggcgaccccatcttcccgctgctctccggcggcccctgcgtgcttgatccggacaagtcggcctccgccagcgccatccagttctggcagcagcagcctccgccgccgtcgtcgccggctgctgcagcgggcgctaaccctaaccctagcgccagccccttcgcctacctcaagaagcccctcccgatgctggacgccggcgccggctcctcaggctccggcgccaccacgtgccaggactgcggcaaccaagcgaagaaggactgcggccacaaccggtgccgcacctgctgcaagagccgcggcttcgactgcaacacgcacgtcaagagcacctgggtccccgccgcccgccgccgcgagcgccagcagctcgccgcctccggctccgcctcgtcctcccccgccaccgcctccgcggcggccgtcgccgcgtccgcgtccgcgtccgcgtccaagaagccccgcctcctctcgtcgcagaccaccacctcgcacacgtccacctccaacgccacgacgccccgaagcttcgacaccacgtccagccaccaagacgcgtcgttcagggacagcctcccgaggcaggtgcgcgcgccggcggtgttcaagtgcgtgcgcgtgacgtccatcgaggacggcgaggacgagtacgcgtaccaggcgacggtcaccatcaacggccacctcttcaaggggttcctgtacgaccagggccccgacgacgggcgccacgcggccaccagcaacgacgactgcacggccggcggggtgcccaacatctccgagctccatctcggagcggcgtctggttccggcgccggcaccggcacctcgatgtcgatggctcctcccacggggctgtacggtggcggtggcggaggacatcatccgcacattctcggcgggtcgtcgagctacggtaacaccatgaactgatggagtacgttccttccttgtacaccggaagagtcccggcccgttaatttccattccttgttgctcttcattttccacgctatagtagcagagttcaattttctcagccttgtcactcacccggcgccatagatagcagggcatcaatgcatggtgttattctgttctacctccttcattccatcgtcctactgtgttatttagccattcgttggtgtataataacatcgatgagttgttttttcttcttcttccagttgttctactgctatagcaagtactgcactgctagttcttttcccccctatcacactagttgggtacgtacgtagagaggagaataattgttagtaggaattgggaagaagatactctcggtagtgcaaagattaaattttttaccattgtgcataagatatcgcctgctagctggttcccaatgcctg

SEQ ID NO: 147857 - DNA, 159 bp, Zea Mays
ctggtggagtgcctccctctatacgtgcgctaccttttctttttgttcgcatcattgtatacactttgcttgcagtttactggactttgtctagctgtgaatatgcaggagttttgttttctgttagaaatatatatatatatatctgctttattgcgg

SEQ ID NO: 147858 - DNA, 361 bp, Zea Mays
accatgtcgcgccaccggcggcagccatcccgcgcgctccctctcgatttcaatctcgacgacgacgacgatacggcggcagccaaatgcggcgccacgtctctcgtcgacgtcgacgggagccagaaccctcgtccaggtggcagcggggatggcaaagggcaggacgacgacgaagaagaagccgccgccggccactggcagccggactccgccggatgggaccggcggcaacaagccgctggccgacggcgccagccgcggacgtcgttgagtcaagaccgacaacgccgccgccggcgcagctagctagctagcagctgactgtgactgcacgtacgtacgggtacggcgctatgtt

SEQ ID NO: 147859 - DNA, 110 bp, Zea Mays
caaagccagctagtttttcgtgcccgtcatgatctattgatctactacctagatccgaaatttaaacgttccgatgggacacaacaaccattatggttgcagacctcttc

SEQ ID NO: 147860 - DNA, 1233 bp, Zea Mays
ggttgcttgctgatgttggtactgtcagcacggaagcttcctcctcctcttcttctttctctgagtcaaattacaaggcgacttcgatgagaccaagaatgcacgcagggtactcaagtcgcagtatctcctagcaaatgacaaagccaatttgttttcaaccagctaaccttttggtctttgatgatcgtggcaaaacgcaaacggatcgattcgatcagggcatctcacaaatgaacacgattgtgcatcactcattaaaagttggacgccgagaatttattgaagcgcgcacacacggacacggcacggcatttggagctcggcgacgatgtgtagtgtagtttagtgcacccccgacgacgacgacgttcaagaagagtgtgcagcaacagcgagcttccccaggtgcagcctgagcgcgagagcctgcagcgccaggagcaccttggtgacctggtccttggtgtccgggtcgacgaggttgccgtcgtcgtcgaacttgctgggcggctggtgcgccctggtgaacacctcgggcttgttgacgaagtggaggtcgaggaagacgccgacctggcggacgtggtactgcgagcggctgccccccgacccgcccgacgcgctgaggatggcggcggccctgtcgccccagcagttgggcgggcgcgacccccagtccagcgcgttcttgagcgggcccgagatggagtagttgtactcgggcgacgcgaacaggaagcagtcggcggcgcgcaccttgccgcggaacgcctcgacggccgccgggaacgcgccggggcccgggccctccaggtcggtgttcagcagcggcagctccgagatgtccacgtgctccacctccagccccgggatcgactccctgcagatctccgcggctgcgcgcgggcgcgggcgcgttaggttaaatttattagtttgcccggcagcggcacggcacactgcaggccacacacacagaacgctggctggcgctcgaagcttcggataatgtttagataaggcgtggtgggggtgggcatggagcgagcttaccggcgcggatgaggccggtgttggccgacgccctgcgcagcgagccggagatcgccaccaccctcaggacggtcttccccggcgcctgtgccgccgagccttccatgcgtgcgtgatgaactcggagcccggttggtactggtggtgcctcaccttgctcctcgtacctttacaaaa

SEQ ID NO: 147861 - DNA, 1062 bp, Zea Mays
ttttggtctttgatgatcgtggcaaaacgcaaacggatcgattcgatcagggcatctcacaaatgaacacgattgtgcatcactcattaaaagttggacgccgagaatttattgaagcgcgcacacacggacacggcacggcatttggagctcggcgacgatgtgtagtgtagtttagtgcacccccgacgacgacgacgttcaagaagagtgtgcagcaacagcgagcttccccaggtgcagcctgagcgcgagagcctgcagcgccaggagcaccttggtgacctggtccttggtgtccgggtcgacgaggttgccgtcgtcgtcgaacttgctgggcggctggtgcgccctggtgaacacctcgggcttgttgacgaagtggaggtcgaggaagacgccgacctggcggacgtggtactgcgagcggctgccccccgacccgcccgacgcgctgaggatggcggcggccctgtcgccccagcagttgggcgggcgcgacccccagtccagcgcgttcttgagcgggcccgagatggagtagttgtactcgggcgacgcgaacaggaagcagtcggcggcgcgcaccttgccgcggaacgcctcgacggccgccgggaacgcgccggggcccgggccctccaggtcggtgttcagcagcggcagctccgagatgtccacgtgctccacctccagccccgggatcgactccctgcagatctccgcggctgcgcgcgggcgcgggcgcgttaggttaaatttattagtttgcccggcagcggcacggcacactgcaggccacacacacagaacgctggctggcgctcgaagcttcggataatgtttagataaggcgtggtgggggtgggcatggagcgagcttaccggcgcggatgaggccggtgttggccgacgccctgcgcagcgagccggagatcgccaccaccctcaggacggtcttccccggcgcctgtgccgccgagccttccatgcgtgcgtgatgaactcggagcccggttggtactggtggtgcctcaccttgctcctcgtacctttacaaaa

SEQ ID NO: 147862 - DNA, 103 bp, Zea Mays
gttgctgtgctgccagcctgccacggaattctcaggctgaaaacttcgggggcacatggatggaatggaaccaattggtcattggtctctgggattttacgtc

SEQ ID NO: 147863 - DNA, 459 bp, Zea Mays
atgacaaaaagagatcggcctcaccactgtaaggataggtggtccacaatcaaccgcaaggtcaccctgttcaatgacatatacaaccgcttatctccatcacgatcgagcggagcaaatgatgaggacatcctgctcctcaaggacacgctcaagccatctaccgcgggactcccttgtcccatcggagacgaagccgatggcagccagagagccgcctcgcctcttgctgcccctactccacgcccgattcgtctgggaggagggcctttagccgacattccatggggtcagcgcgcgggggcccgtgtcggcctcgcctcgtggcggtcagtcgatggaggcgtcgcggacggctgcttcaacaacggctctacagatgttaggcgacagcttccattcatgatacttcgtccaaagttcaagaatcaagacacatattaccatttatgtgcatag

SEQ ID NO: 147864 - DNA, 1980 bp, Zea Mays
taggagaagacggggtagttgtggttgtagccttgtaggtgtagcgtaggccatggcgccagcatcccgcccttcacgccaagccaagccaagccaagccgaccgaccgaatcggaatacggagcccccggtttcttcgccacctactcctgacttttggaaccaaggggactgacagcaagattgcaagaagcaaggaacaagtatagtggatcatctggtgtggaagcaaggactcgcgtgcacagcacactccccgtgctctgctctctgctccgctcttgcattgcaagccactacaaaaacttggcgtctactacctgtgttctgctctctccctcaacgcttgagatcgatcgagacacaagcacaacaacctctctctctctctctctctctctctctctctctctctctctatctctccgtgactgccatggagttgccggtgagctttctgcgcgaccaaggcggaggaggaggagcagaggagcagagcggcacccagctggagcacgaggaggatgtcccctgcgtgctggacatcttcgtgcacgaggcgcggggcacccacaagaccatccgcgtctacggggaccaccaggacgtgtacgcgaggctggcgctgacgtcggcgcccgaggccggcgccagcgcgcgtctcggcgagcgcctcccgccgctgcgcgtcgcccgcgggaggctggccgtggacgtgctcaagtgcgagctctggatgcgcagcgggggcgtcccggacgaccagctcctcggcttcgcgctcgtgccgctcgccgccgtcgccgcggccgacggcgccagggtcatcgcggccgacttcgagctctcgtccaccgacctcctccactcgcccgcgggcgccgtgcgcctctcgctcgccctccgtccggggcacgccgacgcgtgcgagccgtcggaggcggccgtcctcggcctcggccccgcgcccatggccgttgaccttgaccactcgaggatcgagttcacggaccttagagttagagtggagcaggagaagtcggcgtcctctgacggtgacggcagcaccagccggaacgctgccgcctcgacggccagcacggtgagcgaggaggacagggcgttctcttcttccgccgaggcggcacagcagccgcccgacgtcgaggaggccaccacggcgtcggcgcccgtgtcccggcgctcgccggacacgccgacttcgcgcggcgggaaggccaaggccaaggccgacgtcgacgtgctcccgtccccggccggggacatcgtcgacgtggaggcggagcagagcgcgatgcagcggcagatcatggagatgtacgtgaagagcatgcagcagttcagcgagtcgctggccaagatgcagctgccggttgcgctcggcggcggcggcggcgtagtagagaaggaagagacgcccgatgacaagaaggtgatcgagcggcagcaggggaagaaggacggggcaagggtgttctacgggagcagagctttcttctgaactggtaaaaaaaagataccagggaaaaatgacataatctcttgcaaacttgttcgagttcggcatagcattcatcccatcccatggtttgttcatcattagtttccgcttgcccattcgtattcgtaacttaattcattcgattaagtagaacaagatcacataatttaggagagagtaacatgtacttacgtgagtttttacggactcgcttcggagacaagcgacggggaaaagcgagattttacccgtgtcactgagaatctgattatcagtacaaatgcggctaacatacttgaagctgcgtttgggagaatccaatgaagcaaaattcgtttggcagggttattcccgattctcgcttttcttcgtccagaagctgattataatcgtatccaaacatgcccagaatttgacggtctgttgccaaagatgtttagatgtgtacaaatgaaagg

SEQ ID NO: 147865 - DNA, 4857 bp, Zea Mays
  misc_feature (4857)..(4857): n is a, c, g, or t
ctaaagctaaagctactctcgctccatcaaaccaaccctcccaccatcaccaaagatatatactattactacatagttaacaaactttatctgcctcctgtcctgctaatctatatatcccctctccactactgctaccttctctcgcgcgtctctgctcaaagaataatgtcagcgtagcctagctagctcatagggattcctctttcatccctcctgagatcgacgatctcaccaattaagaacacacacgcacacagcagctacgtacgtacctagctagctagcatgatggaccatcagctgttcgacgaccccttcgggagcagcatctcgtcgctggaggcggaaatcttctccgccgccgcccagctgccgccgtcgccgccgtggccagacatcgacctcgacgacgactacgacatccacgacctctccgcgccggccgccaacgccgctacgtcctcgggcggcggctacggctccggcggctccggcggccacaggaagctcagccacaacgcgtacgagcgcggccgccggaagcagctcaacgagctctactcctccctccgctccctgctcccggacgccgaccaaactaagaagctgagcatccccaccaccgtgtcccgagttctcaagtacatcccggagctgcagaagcaggtggacaacctggagaggaggaagaaggagctgaccaacgccaactgcaagccgggagttctgaaaaccaccaaggccgtaactcccattgtttctgctacctgcctcaacgacacggagatcatggttcaggtcagcctgcacagcgatgtggccgccacagctctccctctctccaagtgcatcaaggtgctagagaacgaaggccttcatctcgtcagctcatcaacctactcctccgcctttgagaacaagacattctacagcctccatcttcagttccaagctccgaatcctcaagcaagaggtgtcactggatcactgagcatcagtagaatcagagaacgaccacaacagacaaaataaatacagacaggaaacaaatgaactcatcaaactaattaaatatgcaaacaagctataagcatgatcactatgattaaatctagaaagaatccattgagtaagtacaacactaaaccaaaagaacactagtttaatttcaaatttggtaaactactcattagtgattgaggttccacttaccttttgaagatcccaaacaatcgaccattttacagcacatgatgcttagaacattcacccaacatctagattatgcaaatataattaaaatgcccaaaatttccttccagaagactagaacaaggtttggaaactcgactcggcacgaaccgagctcgcgagttggttcggttcgtgagccacaccctgataatataattgaattataaaataaattaaaatatataaatataaaacataaaattatcattcaatattatgagtaatctaaattatgaattgtcatatactccctccgttataaaataacaccgttataaaataatattcattttagcctcatatatcattcaatattttagcctcatatactccctccattatgagtaatctatattcaattggatgatgatgaatctagcctcatatataaaacacatacaaaacacatacatcaagtgatgtataaatctattaatttactaaaataaaatttttaatttaggacagagggagtattcatcatcaaaagctaaacaagcctattatctgtaaatttatccaatatttattattatttggcatattaattagtttggcgagccatcttggctcggctcgctgctctaatgaactcaaaaaataggcacggctcacacgaggctcgcaagccgctctgagctcgagccggctcacaagcctcgaccttttttaagccctaactagaacgacgtagaatatatgaatccaacattacattaacttggtacaaattaatcacaccaaatattatactacttagtatcatatcatgcttagagatacatttcactaatatacgtccactacacaagaactgcaagaacatatctctatcatctgcctcgaatatctatacaccaatcaactaaagctattatcgataaaaaattattatgctatgcacaaagaacttaaaactccatagcttagggatctgcaataataatcaggatctggagacatgaagcagtcgatgcacctagtaagagtgtgccctaacttacagaagccccactatctcgctcaggtgcaccaccgctcaccactcttgcgcgtcgcctatcgcccgtctacacgcaacccactcgcgtcacacgtcgttggactcatcactggttactattgtgctctattttctaaaccgaccatataccttcttatacgtgtcatgcctcgtgccatggcctaggcggcccgaggcccaaatctatccatgtctgtctccattaaccttaaaagaactagcccgaacgtccaatctagcccaagcttaggtcctgatctaggccacacgtcgttaatatgcgtaacacagacatccatctacacacgatcaacatcgacaacatatatttgactgtcgccatcatcaattcacatccatcatcattgatctacatgttgtcattattgatctacatgaccaagccatcaatctacatgccactgttgttgattcgcacgctaccactagatctgcgtgggaggttgagagagagagagagagagcacaagtagatgagggataaagatggaaagggaatagatcttacctgcttttagggttgataatggtctttgaccagtggcgaagctagagtaaattaggggagggtgcatataccttgagggtgcatgataacaatttacaggtggtgcatatatggtgaaaatttggtccaaaccactagatttccaatttttcgtgggtgcatgtgcaccccctaatttctacgtagctccgcccctgtctttgacatgtcaacgagaagggttggagggtgtgtgtagggcaaaaaatagctcgaggcttgcaggccggctcaagctccatacgactcgctcggtttatagtgactcacaaactctgaccgagtctatcatgtttctcaagtttgatccatgacttagccgagtcagctggctgtggctcgtgaactaagtccaaactggcataacagagaacaagagcctaagatgttgtctaactagacaaagcccaagacagacccaaactagcctaacaaagcccaagactgaccaaactagaatttgtatgcaaagtaggatgtatcgtgagccagagtcgagtctctatctcgagctcgtacaccaaaccgagtcaagcatgtctcttctcgacttgtttccaccactaggtgtgtggtgacaacctccatcagtgctgacctcctcgcattctttgcgacccatttaggcatagatcggcacaggtggagggtgtgctcacagctctagccttaagacttcttgcgctctttaaaactgtgtccaacagatcgtgtatatggtcgtgcaaaatatattttttgcactagagatataacacaatttgtagaacgaagtttaaaacaggaggtgagatagataataggataggagtgcttttgggcacaatatccgtagactccagcaaggatgtagagctgaagactatgatggagaagaggggcggatgcgtgatagagaaagggccacgatgcatgagggagggagaggctcaatgtgtggcagagtgtagctagcgtcgggtgcagagtgggtatgagaagagctagggttcatcgtctcttataaattctaggttgatttgggtcaacgactatttatttaagaggcctatctccgttaattgattttaagagacaatcaagttttaagtgtctttgtaaatggtttgtctgtctccaaaaaatcaggggacattttagaagacagtgagattttatgtccacctctgttaatcaaatcgtttgtcttccaaaatcatctatgtaatagtgataatatgataatttattctattgagctaggctcatataaatttagtcaagtatgcttaaatatttctcttattaatatgcaaagtggactctatttgaactcatctaaaatcttcgtattccggttaaaaggttataacacattataatttatttttttttgtaaacgctctaatgtgtttaaggaaaaaatatggctacaactgaagttttattataggaaaattcaacgtcctgtccactgcagtggaagccaaaacacttgtctacaccactctttgtaactaggatgcaggacctaagagcatgtacaatctagatattatgttacggttctctaagcactaatacatctaagaaacttcttcatacaattcaatgtatacaagtcttctatcttattcactagaatctcttaacatatggttcatttatgtgggttgtatggatggaactgtatctaaacttagagaaccgtgctagagacgttcattcaccaaaatatatcttatgttttttacacttatctccttagtaactcttaaaatacagatcatttatgtgggttatacattgccctaacacctatatcttaatgacatccaaaggaaggcatgtaataagaggtacaaacgagctctaaggttttagcctaccatgcatacgaaaaacacaagtatatagatatgtagttttgggcttatttaatctggaacgatagggaaaaaaatgttgtccaacgtaaggattttacttgtaagaaaaaaaaaaagacactgttcatatccacaaaatn

SEQ ID NO: 147866 - DNA, 744 bp, Zea Mays
atggaccatcagctgttcgacgaccccttcgggagcagcatctcgtcgctggaggcggaaatcttctccgccgccgcccagctgccgccgtcgccgccgtggccagacatcgacctcgacgacgactacgacatccacgacctctccgcgccggccgccaacgccgctacgtcctcgggcggcggctacggctccggcggctccggcggccacaggaagctcagccacaacgcgtacgagcgcggccgccggaagcagctcaacgagctctactcctccctccgctccctgctcccggacgccgaccaaactaagaagctgagcatccccaccaccgtgtcccgagttctcaagtacatcccggagctgcagaagcaggtggacaacctggagaggaggaagaaggagctgaccaacgccaactgcaagccgggagttctgaaaaccaccaaggccgtaactcccattgtttctgctacctgcctcaacgacacggagatcatggttcaggtcagcctgcacagcgatgtggccgccacagctctccctctctccaagtgcatcaaggtgctagagaacgaaggccttcatctcgtcagctcatcaacctactcctccgcctttgagaacaagacattctacagcctccatcttcagttccaagctccgaatcctcaagcaagaggtgtcactggatcactgagcatcagtagaatcagagaacgaccacaacagacaaaataa

SEQ ID NO: 147867 - DNA, 1251 bp, Zea Mays
caacatcgcgacctctctcccctcccctgcccctgcccctcccacctccctgcaccgccaaacccctcgctcccgcctcctcctccgccgctctaagatctggtctctcgcggccctgcggcgcgccccgagctcgtcgcctcgcgcgcacgcgagcttccctgcccacccggacacgagccgacgagcgagccccccattgcggcgccccgtttcccccgcacgcggcggcagggcgcggagagcgagtccggcagtccgcgcgcgcctgttcgtgatggggcggtgctggcgccggggctgatgcggaggccgctgccatgtcggacgtctcgttggatctcggcggcatccgggcggggcccgtggagcgtgacatcgagcaggtacgtgcagcgtgctgctaactcttctccgcctggattgatttctcctcctccatccatggttgatggttctactgtgggtgcaactgagatgtggatgtgcagatcatcatctatcgcctgcgtgctctcagcccgcgttgggcggattgatttcccctccccggtccatggttctaccgtgggtgcaactgagatgtggatgggcagcgcctacgtgctctctgcccacgcgtagcgcggaattttgggccagctcgtgctctttgtgtgcggacgtgaaatggtgcctgattccggcggaattcatggtccttgatgctgtggttcgatggttttcttcttacgtgctacattgaagctcagactggacattacaggtcgctgttccccttcctctgctgaaattccgggaggtaggaaggttgttgacttgtttggcgtccaaccactaattcgggtgtatagaggtcaagccgggactattatgcttctcattccctgttttctggagctgaggggatcagtcgacagtggcatacttcggtgaacagaagattcattctgggagcgaggacccttacttgttagtctagttctttgacttgcacgctcgtgccttttccccttgctgttttggccttggtgctgtgcttgcccattctgttgtagctgctacatggcgcgctgaagtcgagctgaggtttgacggatgtcgcattgggttttgtggaattgtgaagaattgtttggggatggttgccgtggctttgtggttttgcggatttcaactcctgtatgttttgagaggcatgtccgaccacatggcacacaaatggacagtttaagctgattctactactgt

SEQ ID NO: 147868 - DNA, 4067 bp, Zea Mays
cccctgcccctcccacctccctgcaccgccaaacccctcgctcccgcctcctcctccgccgctctaagatctggtctctcgcggccctgcggcgcgccccgagctcgtcgcctcgcgcgcacgcgagcttccctgcccacccggacacgagccgacgagcgagccccccattgcggcgccccgtttcccccgcacgcggcggcagggcgcggagagcgagtccggcagtccgcgcgcgcctgttcgtgatggggcggtgctggcgccggggctgatgcggaggccgctgccatgtcggacgtctcgttggatctcggcggcatccgggcggggcccgtggagcgtgacatcgagcaggccatcactgctctcaagaaaggagcatacttgctgaagtacggacgtagaggaaaaccaaagttttgtccatttaggttatccaatgatgaatctgtactgatatggttctcagggaaagaagagaaacatctaaggttgagccatatatccaagataattcctgggcaacggactttgaattccattgttaatgaacaaaaactatatgtttccttagaagtatttccattttccatccgtgatgaaattggttgtcttactttactaactagacctttttttatcattcagtcaatttttcagaggtatccacggcctgagaaagaatgccagtctttttctctaatttcacatgataggtcattggatgtaatatgcaaagataaagatgaagctgaagtatggttcgctgggctgaaaacactgatttcacgttgtcaccaaagaaaatggagaactgaatctagaagtgatttgctttcctctggtgcaactagtccgaggacttacacacgacggagttctcctttgagttcacctttcagcagcaatgacagcatccacaaggatggcagtgacaattatcgactccgtactccatatggaagcccaccaaagaatggattggagaaggcattttctgatgtcatgctgtatgcagttcctccccgtggtttctttccatcagattctaatgctggatctgtccattctatgtcttctggacactcggataacacaaatgggcaccctagaggcgttccaatggatgctttccgagccagttattcaagtgcagttagttcatctagtcatggttctggtcatgacgatggtgatgctttaggcgatgtttttatatggggagaaggaaccggggaaggaattcttggtggtggtggttcaagagttggaagctcctcaggtgcaaaaatggactgccttgtaccaaaaccgttagaatttgccgtgcgacttgatgtgcagaacatatcttgtggaggaaggcatgctgcacttgttactaaacaaggcgagatatactcatggggtgaggaatcagggggacggcttggtcatggtgttgattgtgatgtgtctcagccaaaacttattgatgctctttctcatatgaacattgagcttgtagcatgtggtgaatatcacacttgtgctgttacactatctggagatctttacacatggggggatggcacatttaaatttgggcttttaggtcatggaaatgatatcagtcactgggtaccaaagcacgtgaatggaccattagagggcatacatgtttcatcaatttcatgtggaccttggcatacagccgtagtaacttccgctggacagcttttcacatttggtgatggatcttttggggttctgggccatggagatcgtgagagtatctcggtccccagggaagttgaatctctcaaagggctacgcacggtgcgggcagcttgtggtgtttggcacactgctgcagttgtagaagtcatggctgggaattcaagttctagcaattgttcttctggtaagatatttacatggggtgatggtgataaaggtcgcttaggtcatggtgacaagggaccaaaacttgtcccaacttgtgtggctgctttggtggagcccaatttttgtcaggttgcttgtgggcattgcttgacagtagccctaacaacttctgggcatgtgtatacaatgggcagtgctgtctatggtcaacttgggaatgcacaagctgatggtatgcttcctgtgcgtgttgaagggaagctacacaaaaactttgtggaggagatttcatgtggcgcttatcatgtggctgtattgacttctaagaccgaggtgtacacatggggaaaaggtgcaaatgggcggttaggtcatggcgatactgatgataagaatactcctacattggtcgaagcactgaaagataagcaagtcagaattgttgtttgtggaattaatttcactgcagcaatatgcattcacaaatgggtatctggagttgatcaatcgatgtgctcaggttgccgtcagccattcaacttgaggagaaaacgccataattgttacaactgtgctctagtattttgtcattcctgcagcagtaaaaaatccctgaaggcttcattagcacctaatacaaacaagccctaccgtgtctgcgatacctgctacagcaaactgacaaagggacttgagacggatatgcattcttcagcgaagcgagctgctactgtaccgggagtcagtgatgcaaatgaggaggatctggaaacaaggtcaaatgctcaactatcaaggttgtcttcaatggaatcttttaagcatttggatagcagatattccaagaaaaataagaagtttgaatttaatagcactcgtgtttcccctgtgcctaatggaagttcacattggagtggactaaacatttcaagatctttcaatcctgtatttggatcttcaaagaagttcttctcagcatcagttcctggatctagaattgtttctagggcaacatcaccgatttcaagaagagcaagccctccacgatctacaacaccaacacctactctgggtggtctaacatctccaagagttgttcccaatgatggcaagccaacaaatgatgcattaagccaagaggttctgaatttgaggtctcaggtggagagtcttgctaggaagtctcaactcctggaagtggagctggaaagaactaccaaacaactgaaggaagctatttctattgctggtgaggaaactgcaaagtgcaaggcagcaaaggaagtaatcaagtcactcactgcacaattgaaggggatggcagagagattacctggaggagcagccaagaacactaagttgccacctcttcctggaattttcattccaagtgacattccgtctatgcctacggagagtgagggcagcccaagcagctctggagaacaaatcataaatggtcataatggattgcttacttctaatggacaaagttctattaggaataaaacgagccatccagaagttggcaagaatggaggtaggctgcctgatgctgaatcttgccacgatgctgaatgggtagagcaagatgaaccaggtgtttacattactctcactgcgttgcctggaggcgccagagatctcaagcgggttcggttcagccggaagagattcagtgagacacaagcagaacagtggtggcaacagaaccgggcgagggtataccagcagtacaatgtccgcgtgattgacaaatcgaccgccagtgtcaacagtgacattgcggctaactgacactagattgacctggagaaacatacctgattacaagcggagctgaggccatgtaacctgaagggctctctcgtcagtcaagctgggttgctaacgtggctaccattttacctacccccctgagaagaggtggtttctgctcccaggaaaacaggaagttttttttatcttcagttttacataattctttactcttaccccgacccccccccctttttttttctcattgtgtgaaaagtagagtgcttgagcagaggtaatgtaaatgcttagtagaagcaggctaatctatcttgtaaatgcataagcaagcatcggttttagaatgccttgggaatcttccaatatgattgcaaatgcaaatggcaaatctgggccaa

SEQ ID NO: 147869 - DNA, 117 bp, Zea Mays
caccatcgcaacgtacatatatacgcttctgtgacgacagatatgagtgcatacccccgaattttttgtattttagccattaaatagaagtaaaatcacgtttagactaaaaaaaaa

SEQ ID NO: 147870 - DNA, 156 bp, Zea Mays
gtttacaatcactttatgagcagtgatacatattgtttccagtatgaaacaatctatttacaatcagttacaaactctatgagcaatcaattacaagattccatcacaagtcattttacaaatcactagcctatgtcggcttcaggacatttgcac

SEQ ID NO: 147871 - DNA, 204 bp, Zea Mays
atggcgagctcgaacagccacatggacagcgctggcaggggacttgagcacgcggcggataggaccggcggggaggacgacgatcgatttgggagcagagcgcagggtgcctggttcagtccggtccggtccacgggcaaaccagagactacaggacctacgtgggagggtgtatctgtaaaaatgtcgctggacgttggatga

SEQ ID NO: 147872 - DNA, 105 bp, Zea Mays
gtggattcatcatcatctagttgaatataaacataaaaaatcaagagctaaaacaaatactattttgaaacggatggagtattcgataagcaattgagacattag

SEQ ID NO: 147873 - DNA, 114 bp, Zea Mays
ccatgtgagcaggttaatacagtgtcatcgcctcatcgggaagatcacccccaccaacctaatgtaataaaacgggttcacagttgcacccacacacaaaaaaacaaatgtaaa

SEQ ID NO: 147874 - DNA, 1514 bp, Zea Mays
gcaatgacatgcaaatcgaattgaaccctggaaaacaaatcctttactattgaatatttaagctaacaagatttcatgtttgtgctcaaagtatatatgataaagtggaaaagcaacaaaaaaaacactatgactaacctcatgacgaggtcagagaaggctcccgagctgaacccctcgacctggacatggtcacagagcacggttgcagtccctcggtcggagctccgattaccaatgactatctgggtacatgacaatcaccataggacctaggaagaagcatagcgttatcctgcaagaagcacaccatggccatcaaatgcagcacggacaacacctcataccaaggatctgccaatgccatggatgtctcctgcactctagtcatgtagtactcttaaaacattcagaagaacttgcataggtgcatatacaaggggactcaattctcacctcagccacatcttcttggttagcccgtacaaactgctgcaatattgatgtccgaatcatgataaattatcaggaaagcaattttttagtgtaaacagcaacagtagggacatttcgcacgtataatcaccttccaccagttctagcagagcctggatagaggagattagcagtgctagaccctcttgcagatcaaaggccacaaacaaagcaagaattctgttattcacatttagtatgaataaccacggcagggttcatatgctacaacaaccattgtgctcttgtacctagaataattagagcatttgtgccagaaattccagtcacctgaaaaattcaagcggtagaaaagaaaacaaacaaaaaaggcaactaatgtaccattttgcttgttagagtaatatgttgggattttttttattgtaaacagcaccttatccaccaacttattttgatgtcaaaaggaacccaaacaagatgaatcctggataacatcctctttggggcagaggcgggatattgtacaccaaagttcaaacattgaaacatagcaattgcaaagtgtaaaaatccagattaccctcactacacatgctaaataaattcactacataattatttatcagtgtatttagttgggctagtagcttagattcatgccaaagtttgagtaccgattaaggtttctcacacatgacaaaggcagagaattggcagtgggcgtcttcaaaagattgtcattcgttcaacaaatcactgtcgcttgttcacacttttgtgccatgctcgcctctttcaccttctacattgtctcacttaattcccgactgcaaggaagaagaaaaaaactgtcataaggtgctacatagaaatttttaatctctagttacaaacaactgtggtagaacttaaattacgcacatatagtcataattcttcttcatgtgatagaaagtatgcaaaataatgagctagccaaaagaaagaaatatttttttatcagaaacaggtataaaaccaagttgggttgttcatctttactactctattaagag

SEQ ID NO: 147875 - DNA, 843 bp, Zea Mays
atgacctcttttgccaccgacgtttgccactcaacacatctaacaatcccaacatccgttccacaattccacgccatcatcgaaggaggttcccgaagctgcagagctaagccctcgcccaacgacaaaggtgtctctccgacgaggcattccggtctggagctgagcaagtcgcctcctccgccatcggctccatggtggactgatccttcggtgtcggcgatcggagaccatagttggctgatcctcgaccgcatcgtccaccgcagtcggaagtggtgcggggacgctacgacctcggcgctcgcccacgagcttcccacttgcttcacccgggttcccctttgcttcggcggtggacgcaccgaccccgagttcgataagtggttacaaccgcaccggcgccagcaacagcggaccatgattgaagaagacatggaaatcctctgccatggagacaagggtgaattcacggtggcaaatctcacataccgtttcaaccaagaggtccaactctgcttgttgcaccatcccccttctgcatctgatgctgaaatgaaatggagtgttgagaagctgcagatccctcctaacatgaagatcaacctctactcgtttaagactgatgccgtcgtcatcatcggcgagagcaacaacaggctccgtaatataccacttccatctaaggctttaaagactggccgtgtgtacaaggacggtgaaccagatccgtttcgacgtctcagtgtctgtgatggtggcatcattaagctcgtctgcattattactaaagaacacccttcttttttatcccttcaccatagcaacatggactttggttga

SEQ ID NO: 147876 - DNA, 569 bp, Zea Mays
ctcgcttctagtttccgtcaattatttttgttgaaggtgccgatttggagttggtcaggtatcctaatgctgatacagctagctttcttcatggggggtcatcgtttacttgcaccgaagagggacattgaccattatcccttagccttgcatggtgtatgtagttggtaactggtaaggctgcctattgccgaaaggaaacagaaattgtatggcattggaagactacaacgagtgtatcattgccatgacaaggcttctacatcaccatgttaggtttgctaagctgaatcatttgtgactgtatgttgtctgcaaaacagaacttccatatgctatagtttgaacgattaagaatttagtgttgttgttacttatttggtatgtcactattaactatagtttgagttgcttagcattattattcttcccattagtcacggttgctattagaaagtatgtgtgatatgatatagtgtatttaatatcaatattattgtgttatccattgaagctgtttatgtttatgcgctgcatctataaattaaattctaaagtaaccctttgtt

SEQ ID NO: 147877 - DNA, 1406 bp, Zea Mays
atggcgcggtggccgggcgcgggcgagggcgcggagggcgggcgccgtcgagggtgcggcgggcaggcgagcaagggcgcgagcacggcaggcaagggcgcggcggacgggagccggcgagggcgcgccggccgggcgaggtcgcggcggcgagcgagccaattcctctacccgttctgcccttctcagtttctccagtacaggatcgaggcttctcctggtagcctctccgtcggagcgctccccgccgcctgcacatctccctggcagtggcggttgcctccaccctcagcgccgcccagatccctcgtcctcacctgttctctatcgcggaccctgatctgtccatgctcaagaatcaatccagagttaagttgtatggatcctgctgatgttccagaagggattgatcccaagagtgcgtgcagagtggaggtcactgtcaattcctacttcactatgcaagatggtagaaaggaatataatcgaggcaagacagtaagctatgttgttgattcagaagaatactcagttattgatttagagaaagatattgcttcagaatttaaatgggggagcgaccaacagcctaatttctgggttctaacaaggggtaatatgacaagcaagttggcttcagatgcacaacttcttgacttgttaagggcatctagagtagtgaagttattaatgatagtgggcaactgtgagcacaatgtaggacatgggcatattcctgctacatggaacatacaagaagagatacctgttgcagtgaacatagaagaagagatgcttgatgcaatggataataatttggaggaagcagatggaggatttgcatgggcagaaatacctgaatatggggaaacaactgcagggccaccaatggctaaagaggaagaaaaggagcactttatcactgttgggtgcgatcctaatggagataagccagctggaataaatgaagaatggaggtactttaaaagtgttgatcatgtagctattgatccactgcaaaatcttaaagttgagggacagaaaagaaagagggcaagacctgttttagaaataagagactttgatactgaagctgttcctgaggatgagactactctgcttgatgtttttattgtgcctcacacatcacatgacagtgagaatccagtcattaaggagggtgacacctttgtagacaagattgcttttgtccacactattaagcaatatgccatcaaaaatgagtttgagactaggattgaacatagtgacaaagaaaggtacagggcaaggtgtgtagatgaaaattgtgattggagagtatatgcaaagaagctacatggtggcaacacatttatggtagtcaaactatcagaattggatgtgcacacttgttccagtcaaac

SEQ ID NO: 147878 - DNA, 784 bp, Zea Mays
cagtggcagatttctggaaaaccttgcactcatgcaatagctctatttgggaaacttagaaaccttaacattgaggactttgtggatgactactattcaattgagaggttcaaaatggcttatcagtttgtggtcgctccgatgggtgacaagactcaatggccaaaaattgaccctgggtttaaaatggttcctccaaagctagaaaggcctgctggtagaccaagaaagaaaagaatcaaggctagtggagaggcaggaaaaagaggcccatatcagtgcaaaaggtgttttcagtttggacatatagagaagggctgtactgctactcaagctgaattagaacaagagcttccaccacctcatccaaagaaaccaaaaaaacaaagaaaatccaaatctgaagctgttgaagtctctatggttgatgtcgagccatctcaaaccgacggtgttccaaaagtgatgtctagcccaggtgtaacaacaagaagcatgtcttctgcttctccaactagtccaggtcctacaacaaggaggaaggcatccatctcaccaggaggaattaatcggaggctcattattagctagatatagtagttgtcattctctattttgtgtgtgggcatggctgtgcaactattttgtgtaactattttgccgctatgcaacactatgtctgatggtggtgcttctatattctgaattgcaagaactcatttaaatgttgcagttatggtactgaaatggcatcaaaattatatatatatatatatatatatat

SEQ ID NO: 147879 - DNA, 1519 bp, Zea Mays
cgcgagcacgacgcgtttggttggcgccgccgcaacagtcacccattcctgcaaccgcatgggcattgccacagtttggcgcacctgccaagggccacagggtgtgctttaacgggccctccccttgtagcggattctggcgaggtccgaaggcccaacaggcctcaatctagcccaatctgtccgttcagcccgtccgcgggccagagtcgcgcgactggagtaccgcggcggcgaaccaagcctcgagcgaaggcggcgaacggaaagccgcctggcgactccagatctctccggcctgctcctcggctcctcgctcctcctgcgccgccgcggaggcagatacagcctctggatccagccccgctgcatctccgctgtggcggtgctttggctgcttcctgcaggttggagtttctgaatggccaatcccagggatgcggtggacgtcagctcctccatgtcggagctgagcgtagaagcagcgccttcatcgattgaggttcaagtccccaagcagggtgcgtatccctcacaagcgggcaaccgcgggcgctgtttgatctttttcataggggagttattccgtaccatgtcttgtgcttaattagtagtactgcttgcactagtgctatcttatctcatgttgcagttagttgattatgcaaaactttgtctcagctaatggcggcgatgttgctgctgccgaactcgatgatgtatgggaggatgtttcaggttctcctcggcacgcggataccttagacagagaatggatccacaggcagagtcagtttcagaagatgggatatcgtgatggtgtaacagaagggcagaaggactctgcccaggaaggcttcaatgttgggttcaggcaatctgtaaacgttggctacaaatggggccttgttcgtggggttggcagtgcgctagctagtcttcctgacagcttgaaagaaaaactggtgccggatgttcagcgtagggggaaattacaggacctgcaccgctcagtgcaagaaatatcagcagatgatgctgtccagatgttccacgagagtatctgccagagcaaccgtccttccgatggatcaggatcacacgtaacatcaacctcggatggagctacagaatcaaataggatgaaaagcctatcaaaggaccttgtgttgctgttgcgcgaatgctcggatattaaagtgagtgaagagctggcgtcagattcatgaacaaggtgcccgggaatttcaaccgtgttttctaggtctggcagaatcacatcgagttcccagattactgaacatataaccttagctgtcgatgaacgtgattcacggattctgttttggaaggacctggtactcaaaaggctcgagcttcagagacatggagtgtagctgtagatcctgttattacatatttcccttttgctgcaacctgtaactagaattgtaactgttaatcctataaatttgcagttcttaaacattaaacaatagtaatgcttttttctccctgc

SEQ ID NO: 147880 - DNA, 1359 bp, Zea Mays
cgcgagcacgacgcgtttggttggcgccgccgcaacagtcacccattcctgcaaccgcatgggcattgccacagtttggcgcacctgccaagggccacagggtgtgctttaacgggccctccccttgtagcggattctggcgaggtccgaaggcccaacaggcctcaatctagcccaatctgtccgttcagcccgtccgcgggccagagtcgcgcgactggagtaccgcggcggcgaaccaagcctcgagcgaaggcggcgaacggaaagccgcctggcgactccagatctctccggcctgctcctcggctcctcgctcctcctgcgccgccgcggaggcagatacagcctctggatccagccccgctgcatctccgctgtggcggtgctttggctgcttcctgcaggttggagtttctgaatggccaatcccagggatgcggtggacgtcagctcctccatgtcggagctgagcgtagaagcagcgccttcatcgattgaggttcaagtccccaagcaggctaatggcggcgatgttgctgctgccgaactcgatgatgtatgggaggatgtttcaggttctcctcggcacgcggataccttagacagagaatggatccacaggcagagtcagtttcagaagatgggatatcgtgatggtgtaacagaagggcagaaggactctgcccaggaaggcttcaatgttgggttcaggcaatctgtaaacgttggctacaaatggggccttgttcgtggggttggcagtgcgctagctagtcttcctgacagcttgaaagaaaaactggtgccggatgttcagcgtagggggaaattacaggacctgcaccgctcagtgcaagaaatatcagcagatgatgctgtccagatgttccacgagagtatctgccagagcaaccgtccttccgatggatcaggatcacacgtaacatcaacctcggatggagctacagaatcaaataggatgaaaagcctatcaaaggaccttgtgttgctgttgcgcgaatgctcggatattaaagtgagtgaagagctggcgtcagattcatgaacaaggtgcccgggaatttcaaccgtgttttctaggtctggcagaatcacatcgagttcccagattactgaacatataaccttagctgtcgatgaacgtgattcacggattctgttttggaaggacctggtactcaaaaggctcgagcttcagagacatggagtgtagctgtagatcctgttattacatatttcccttttgctgcaacctgtaactagaattgtaactgttaatcctataaatttgcagttcttaaacattaaacaatagtaatgcttttttctccctgc

SEQ ID NO: 147881 - DNA, 1334 bp, Zea Mays
cgcgagcacgacgcgtttggttggcgccgccgcaacagtcacccattcctgcaaccgcatgggcattgccacagtttggcgcacctgccaagggccacagggtgtgctttaacgggccctccccttgtagcggattctggcgaggtccgaaggcccaacaggcctcaatctagcccaatctgtccgttcagcccgtccgcgggccagagtcgcgcgactggagtaccgcggcggcgaaccaagcctcgagcgaaggcggcgaacggaaagccgcctggcgactccagatctctccggcctgctcctcggctcctcgctcctcctgcgccgccgcggaggcagatacagcctctggatccagccccgctgcatctccgctgtggttggagtttctgaatggccaatcccagggatgcggtggacgtcagctcctccatgtcggagctgagcgtagaagcagcgccttcatcgattgaggttcaagtccccaagcaggctaatggcggcgatgttgctgctgccgaactcgatgatgtatgggaggatgtttcaggttctcctcggcacgcggataccttagacagagaatggatccacaggcagagtcagtttcagaagatgggatatcgtgatggtgtaacagaagggcagaaggactctgcccaggaaggcttcaatgttgggttcaggcaatctgtaaacgttggctacaaatggggccttgttcgtggggttggcagtgcgctagctagtcttcctgacagcttgaaagaaaaactggtgccggatgttcagcgtagggggaaattacaggacctgcaccgctcagtgcaagaaatatcagcagatgatgctgtccagatgttccacgagagtatctgccagagcaaccgtccttccgatggatcaggatcacacgtaacatcaacctcggatggagctacagaatcaaataggatgaaaagcctatcaaaggaccttgtgttgctgttgcgcgaatgctcggatattaaagtgagtgaagagctggcgtcagattcatgaacaaggtgcccgggaatttcaaccgtgttttctaggtctggcagaatcacatcgagttcccagattactgaacatataaccttagctgtcgatgaacgtgattcacggattctgttttggaaggacctggtactcaaaaggctcgagcttcagagacatggagtgtagctgtagatcctgttattacatatttcccttttgctgcaacctgtaactagaattgtaactgttaatcctataaatttgcagttcttaaacattaaacaatagtaatgcttttttctccctgc

SEQ ID NO: 147882 - DNA, 1757 bp, Zea Mays
cgcgagcacgacgcgtttggttggcgccgccgcaacagtcacccattcctgcaaccgcatgggcattgccacagtttggcgcacctgccaagggccacagggtgtgctttaacgggccctccccttgtagcggattctggcgaggtccgaaggcccaacaggcctcaatctagcccaatctgtccgttcagcccgtccgcgggccagagtcgcgcgactggagtaccgcggcggcgaaccaagcctcgagcgaaggcggcgaacggaaagccgcctggcgactccagatctctccggcctgctcctcggctcctcgctcctcctgcgccgccgcggaggcagatacagcctctggatccagccccgctgcatctccgctgtggtgagcgcgtgactgatgtctggctagtctattccaaattcagattcaatttgttagggaacagggatagcaatttttgaatcgtttagcgccttatcttgagttatccttaattactttagtcacctgatatagttttaagtctcagttattggtaaccttttgtgtcaaacagttttaattttaggtctcaaccattgatatctttttatgttaaacaatttcaaattatggtcaaattcttcaatatatgaaatcatgatcaattttgggttatatttttcctacatatattacgcaattttgactatgcagcgttgtacatgttaaatattagccttttggttgtgaaaaaaatttgagcaccccaaatacatttccatctcgcaacaggcggtgctttggctgcttcctgcaggttggagtttctgaatggccaatcccagggatgcggtggacgtcagctcctccatgtcggagctgagcgtagaagcagcgccttcatcgattgaggttcaagtccccaagcaggctaatggcggcgatgttgctgctgccgaactcgatgatgtatgggaggatgtttcaggttctcctcggcacgcggataccttagacagagaatggatccacaggcagagtcagtttcagaagatgggatatcgtgatggtgtaacagaagggcagaaggactctgcccaggaaggcttcaatgttgggttcaggcaatctgtaaacgttggctacaaatggggccttgttcgtggggttggcagtgcgctagctagtcttcctgacagcttgaaagaaaaactggtgccggatgttcagcgtagggggaaattacaggacctgcaccgctcagtgcaagaaatatcagcagatgatgctgtccagatgttccacgagagtatctgccagagcaaccgtccttccgatggatcaggatcacacgtaacatcaacctcggatggagctacagaatcaaataggatgaaaagcctatcaaaggaccttgtgttgctgttgcgcgaatgctcggatattaaagtgagtgaagagctggcgtcagattcatgaacaaggtgcccgggaatttcaaccgtgttttctaggtctggcagaatcacatcgagttcccagattactgaacatataaccttagctgtcgatgaacgtgattcacggattctgttttggaaggacctggtactcaaaaggctcgagcttcagagacatggagtgtagctgtagatcctgttattacatatttcccttttgctgcaacctgtaactagaattgtaactgttaatcctataaatttgcagttcttaaacattaaacaatagtaatgcttttttctccctgcatttt

SEQ ID NO: 147883 - DNA, 323 bp, Zea Mays
tagcctccaaacaaagtgtaatggggttaccaccatatacaataacaaataccacaaagatagaaaagaaaaaaaaacaaagaataaaaaaactcttgatgataaaaaaaaaaaaaacaaaaaaaaaaaaaaaaaaaaaaaaaggaaaaaaaaaaaaaaaaaaaagaagaaaaaaaaaaaaaaaccaaatcgaatgaaaaaaaacaaaaaaaagataaaacaaaataatctaagaacaaaaaaaatagaataaacaataaaaaataagcaaaaaaaattaaaaaaaaaaaataatatataaaatcaaaaataagtttcaataa

SEQ ID NO: 147884 - DNA, 1408 bp, Zea Mays
cggaaaggtccccgcgtacgtgtggctttttcccaccctgcctctctgctcttcccaagctccatccccttgctctcaccactgaaatgagcggcggcggcggccttgggtccggctgctcgtaccagaagttcgtccacttcgcgctggagcagacccgccaccgctccactctcgtcccccacccgtcccaggaaaagttcaggttcataaaagcaaatgaggataacaccgttctcaatgccttgtcattcagcacttccaaaattagactgcttcggagcttgacaattgagcaaaaaaactcggttcaggttcttgattttgctgccttctcaagacctgaatacgaccttcctatattttgtgccaatgccttctcatcccctgcacggagtattgttgtcttggacctcaaccctttgtatgataccactgaacacaaggattacagggaaaaatactacagggctttgatgccccttgtacacaagtacagtgaggtactttgatctggtccttcccccagaacatgacactttcaggaacctcaaacctccctctatttactttacttgtagctccatgtctttaatagatgaaatgcagcttctgccctggggtggcaagattacaagtgagtcgctgagattcttctctcccattgttatctggacggtattcgagccaagcgaagccaaccaccaagctctatactcggccttcgtggattactatatggtctggcttgagttcatggacggagcagttcgcgaaagtagcaaagaaaaaatcgaccgcaatagagaagcgcaacataaatatctcacatggagagcagagaaggatcctgggtacccgctgctaaagaagttgatcggtgagagtggtgccaaggacctggtgagggagttcctcttcgaaggagttggctcgctcggaaccaagtcgtttctggagtatttcgccgagtacgcgcaagaggacgggacggtgaacaagaagcggagcatggcggggaagtcctttggaacccgaccttgggacgcccacggactgttcgtcggcgacgctgtggatggatagcggccaagcgggggctgttttgcttctacataagcagtttcatctcaatccccgttgtttattcacggaggacttgcgtagtggtttcagttgttgtttcaagtggttttgcttcggcaaaagtactggacggttttgctggctcaggtttcagatcatcttcaacctttccccatggcattccatgcgaggccggctacaatttctgttgtctctttacttcttttatagcattgttcatcatctttttcgttgtccggtgacttggctttggttgctgccgctgctcggtcggtggttttaaacttttgattcgagtcct

SEQ ID NO: 147885 - DNA, 1539 bp, Zea Mays
cggaaaggtccccgcgtacgtgtggctttttcccaccctgcctctctgctcttcccaagctccatccccttgctctcaccactgaaatgagcggcggcggcggccttgggtccggctgctcgtaccagaagttcgtccacttcgcgctggagcagacccgccaccgctccactctcgtcccccacccgtcccaggaaaagttcaggttcataaaagcaaatgaggataacaccgttctcaatgccttgtcattcagcacttccaaaattagactgcttcggagcttgacaattgagcaaaaaaactcggttcaggttcttgattttgctgccttctcaagacctgaatacgaccttcctatattttgtgccaatgccttctcatcccctgcacggagtattgttgtcttggacctcaaccctttgtatgataccactgaacacaaggattacagggaaaaatactacagggctttgatgccccttgtacacaagtacagtgagctccatgtctttaatagatgaaatgcagcttctgccctggggtggcaagattacaagtgagtcgctgagattcttctctcccattgttatctggacggtattcgagccaagcgaagccaaccaccaagctctatactcggccttcgtggattactatatggtctggcttgagttcatggacggagcagttcgcgaaagtagcaaagaaaaaatcgaccgcaatagagaagcgcaacataaatatctcacatggagagcagagaaggtttggtcgatcttccacaagaaaagaatcgtttgttccatgcaataaaagatcgtattacatacttgattgtactattgaattcctgttgcttactagcagttcattaccaaagaaacaaaacaaaatactgttgcttagctggtgtcctagttccttgtgtatacatgaaatacaacctgtaccctgctttcttgatcatttttcaggatcctgggtacccgctgctaaagaagttgatcggtgagagtggtgccaaggacctggtgagggagttcctcttcgaaggagttggctcgctcggaaccaagtcgtttctggagtatttcgccgagtacgcgcaagaggacgggacggtgaacaagaagcggagcatggcggggaagtcctttggaacccgaccttgggacgcccacggactgttcgtcggcgacgctgtggatggatagcggccaagcgggggctgttttgcttctacataagcagtttcatctcaatccccgttgtttattcacggaggacttgcgtagtggtttcagttgttgtttcaagtggttttgcttcggcaaaagtactggacggttttgctggctcaggtttcagatcatcttcaacctttccccatggcattccatgcgaggccggctacaatttctgttgtctctttacttcttttatagcattgttcatcatctttttcgttgtccggtgacttggctttggttgctgccgctgctcggtcggtggttttaaacttttgattcgagtcct

SEQ ID NO: 147886 - DNA, 1313 bp, Zea Mays
cggaaaggtccccgcgtacgtgtggctttttcccaccctgcctctctgctcttcccaagctccatccccttgctctcaccactgaaatgagcggcggcggcggccttgggtccggctgctcgtaccagaagttcgtccacttcgcgctggagcagacccgccaccgctccactctcgtcccccacccgtcccaggaaaagttcaggttcataaaagcaaatgaggataacaccgttctcaatgccttgtcattcagcacttccaaaattagactgcttcggagcttgacaattgagcaaaaaaactcggttcaggttcttgattttgctgccttctcaagacctgaatacgaccttcctatattttgtgccaatgccttctcatcccctgcacggagtattgttgtcttggacctcaaccctttgtatgataccactgaacacaaggattacagggaaaaatactacagggctttgatgccccttgtacacaagtacagtgagatgaaatgcagcttctgccctggggtggcaagattacaagtgagtcgctgagattcttctctcccattgttatctggacggtattcgagccaagcgaagccaaccaccaagctctatactcggccttcgtggattactatatggtctggcttgagttcatggacggagcagttcgcgaaagtagcaaagaaaaaatcgaccgcaatagagaagcgcaacataaatatctcacatggagagcagagaaggatcctgggtacccgctgctaaagaagttgatcggtgagagtggtgccaaggacctggtgagggagttcctcttcgaaggagttggctcgctcggaaccaagtcgtttctggagtatttcgccgagtacgcgcaagaggacgggacggtgaacaagaagcggagcatggcggggaagtcctttggaacccgaccttgggacgcccacggactgttcgtcggcgacgctgtggatggatagcggccaagcgggggctgttttgcttctacataagcagtttcatctcaatccccgttgtttattcacggaggacttgcgtagtggtttcagttgttgtttcaagtggttttgcttcggcaaaagtactggacggttttgctggctcaggtttcagatcatcttcaacctttccccatggcattccatgcgaggccggctacaatttctgttgtctctttacttcttttatagcattgttcatcatctttttcgttgtccggtgacttggctttggttgctgccgctgctcggtcggtggttttaaacttttgattcgagtcct

SEQ ID NO: 147887 - DNA, 1302 bp, Zea Mays
cggaaaggtccccgcgtacgtgtggctttttcccaccctgcctctctgctcttcccaagctccatccccttgctctcaccactgaaatgagcggcggcggcggccttgggtccggctgctcgtaccagaagttcgtccacttcgcgctggagcagacccgccaccgctccactctcgtcccccacccgtcccaggaaaagttcaggttcataaaagcaaatgaggataacaccgttctcaatgccttgtcattcagcacttccaaaattagactgcttcggagcttgacaattgagcaaaaaaactcggttcaggttcttgattttgctgccttctcaagacctgaatacgaccttcctatattttgtgccaatgccttctcatcccctgcacggagtattgttgtcttggacctcaaccctttgtatgataccactgaacacaaggattacagggaaaaatactacagggctttgatgccccttgtacacaagtacagtgagcttctgccctggggtggcaagattacaagtgagtcgctgagattcttctctcccattgttatctggacggtattcgagccaagcgaagccaaccaccaagctctatactcggccttcgtggattactatatggtctggcttgagttcatggacggagcagttcgcgaaagtagcaaagaaaaaatcgaccgcaatagagaagcgcaacataaatatctcacatggagagcagagaaggatcctgggtacccgctgctaaagaagttgatcggtgagagtggtgccaaggacctggtgagggagttcctcttcgaaggagttggctcgctcggaaccaagtcgtttctggagtatttcgccgagtacgcgcaagaggacgggacggtgaacaagaagcggagcatggcggggaagtcctttggaacccgaccttgggacgcccacggactgttcgtcggcgacgctgtggatggatagcggccaagcgggggctgttttgcttctacataagcagtttcatctcaatccccgttgtttattcacggaggacttgcgtagtggtttcagttgttgtttcaagtggttttgcttcggcaaaagtactggacggttttgctggctcaggtttcagatcatcttcaacctttccccatggcattccatgcgaggccggctacaatttctgttgtctctttacttcttttatagcattgttcatcatctttttcgttgtccggtgacttggctttggttgctgccgctgctcggtcggtggttttaaacttttgattcgagtcct

SEQ ID NO: 147888 - DNA, 1511 bp, Zea Mays
cggaaaggtccccgcgtacgtgtggctttttcccaccctgcctctctgctcttcccaagctccatccccttgctctcaccactgaaatgagcggcggcggcggccttgggtccggctgctcgtaccagaagttcgtccacttcgcgctggagcagacccgccaccgctccactctcgtcccccacccgtcccaggaaaagttcaggttcataaaagcaaatgaggataacaccgttctcaatgccttgtcattcagcacttccaaaattagactgcttcggagcttgacaattgagcaaaaaaactcggttcaggttcttgattttgctgccttctcaagacctgaatacgaccttcctatattttgtgccaatgccttctcatcccctgcacggagtattgttgtcttggacctcaaccctttgtatgataccactgaacacaaggattacagggaaaaatactacagggctttgatgccccttgtacacaagtacagtgagcttctgccctggggtggcaagattacaagtgagtcgctgagattcttctctcccattgttatctggacggtattcgagccaagcgaagccaaccaccaagctctatactcggccttcgtggattactatatggtctggcttgagttcatggacggagcagttcgcgaaagtagcaaagaaaaaatcgaccgcaatagagaagcgcaacataaatatctcacatggagagcagagaaggtttggtcgatcttccacaagaaaagaatcgtttgttccatgcaataaaagatcgtattacatacttgattgtactattgaattcctgttgcttactagcagttcattaccaaagaaacaaaacaaaatactgttgcttagctggtgtcctagttccttgtgtatacatgaaatacaacctgtaccctgctttcttgatcatttttcaggatcctgggtacccgctgctaaagaagttgatcggtgagagtggtgccaaggacctggtgagggagttcctcttcgaaggagttggctcgctcggaaccaagtcgtttctggagtatttcgccgagtacgcgcaagaggacgggacggtgaacaagaagcggagcatggcggggaagtcctttggaacccgaccttgggacgcccacggactgttcgtcggcgacgctgtggatggatagcggccaagcgggggctgttttgcttctacataagcagtttcatctcaatccccgttgtttattcacggaggacttgcgtagtggtttcagttgttgtttcaagtggttttgcttcggcaaaagtactggacggttttgctggctcaggtttcagatcatcttcaacctttccccatggcattccatgcgaggccggctacaatttctgttgtctctttacttcttttatagcattgttcatcatctttttcgttgtccggtgacttggctttggttgctgccgctgctcggtcggtggttttaaacttttgattcgagtcct

SEQ ID NO: 147889 - DNA, 712 bp, Zea Mays
attctatctgtgctggtactgattccctttgttctcgacatgcaggtctggcttgagttcatggacggagcagttcgcgaaagtagcaaagaaaaaatcgaccgcaatagagaagcgcaacataaatatctcacatggagagcagagaaggatcctgggtacccgctgctaaagaagttgatcggtgagagtggtgccaaggacctggtgagggagttcctcttcgaaggagttggctcgctcggaaccaagtcgtttctggagtatttcgccgagtacgcgcaagaggacgggacggtgaacaagaagcggagcatggcggggaagtcctttggaacccgaccttgggacgcccacggactgttcgtcggcgacgctgtggatggatagcggccaagcgggggctgttttgcttctacataagcagtttcatctcaatccccgttgtttattcacggaggacttgcgtagtggtttcagttgttgtttcaagtggttttgcttcggcaaaagtactggacggttttgctggctcaggtttcagatcatcttcaacctttccccatggcattccatgcgaggccggctacaatttctgttgtctctttacttcttttatagcattgttcatcatctttttcgttgtccggtgacttggctttggttgctgccgctgctcggtcggtggttttaaacttttgattcgagtcct

SEQ ID NO: 147890 - DNA, 884 bp, Zea Mays
gtgtgattgtaatgccaatatggcaattgaaactcgacgaaggtgatgccaaatatgaaaaaaaaaatctcctcgaaaaatgactccctagcattttgggctggctggctccccctccctccctgggatttctccttgcgtgcctccctcgctagggtttagggttctacagccagatagccaccatgcatcaccacttcctctcgcgcctcctcacccaccgtctcctcctccccgccgccacctctccctacgccgcgacgctctccacgccccccaggcgcgcttacgcccgccgcgccaagccgccaccagcgggggactccggagaccacgctgccgcctcctcccctgtagcaccgccgccgccgccggactcggaggcgaaggctgcgtttcagagagagaagctgtcgggcgagctgccgcggccgcccactgtcccgttccagccgcgtgtcgctaacgccgtgcacctcgtcggcaccatctgcgcgcccgtgcacatgcagaggctgcccgacggcagattctccgcggtctccgtgctcgtgcacgaccgtggcatcaactcacccaagttctgggttcccatagttttcaaagataactgggcacaaatagctgcttcccacttgaaagaaaatgatcttgtttatgtgtctgggaaattaacatgtgatggtccaccattcaagcttgctgatggcgaagcaaacattcaggtgttagcaaattcgctaaaatttgtcgatagtaaagctgttgaaatggatgccatactggatgaagatgaaggatttttggagattgttgaggctgaaaagaaagttgaagcaaaaaaaacgacctctacatttccgcctggcacagtttcaggtaat

SEQ ID NO: 147891 - DNA, 1156 bp, Zea Mays
gctgatcgagccaagaaagcagctgctgcgtcggtggcagtcgccgaagcagcaggtgccaaagcgatcgagctgctctctgtccgtgctggtccccgtccccctcgcctctctagtctccactccacctcctctcatccatccatccacccacccaattcggcagcagcctccgccgccacactagctagcactagcagtaccacccgcgccgctagtcgctaccagctagcgactgaatcccagcaaggggggaccgggccaggatcggaggcgggagatcgaccgacccgagtagagtcaggcagcagctgcttggcgcggccgcccgcccatggaggacaccctcaagtcgctgtccatggactacctcaacctgctcatcaacgggcaggccttcagcgacgtcacgttcaacgtggagggccgcctcgtgcacgcgcaccgctgcatcctggccgcgcgcagcctcttcttccgcaagttcttctgcggcgccgagcaggccgccgccgggcccggcgcgctgctgctggaccacctcagcccgcgttccccgtccggcacctcctccccgcgcggcgcctccgccgccgcgccgggcgccgccgtcatacccgtcaactccgtcagctacgaggtgttcctgctgctgctgcagttcctctacagcggccaggtgtccctggtgccgcagaagggggagccccggccgggctgcggcgagcgcgcgtgctggcacacgcactgcgccgccgccgtcgacctcgcgctcgacacgctcgccgccgcacgctccttcggcgtcgaggagctcgcgctcctcacccaggtaaccaataattcgagcgtctccctcgctcgctccctctctccgacttcaattcttgatttgctggtttcttctccattgctggtggctcctgttcttcttcctgctccccttctccgtccagccggacgaaagataaataattaattaaaagggagaaaacggaagaaaaaaacggcttccaatttatttttcgcgtctgctactcgagggaattgaggattattgtggggatcaagatgggagttggggttggttatgttgggattgccgagcattctgcagcattatattgatttgatctcgctctgtacccctcctgct

SEQ ID NO: 147892 - DNA, 1923 bp, Zea Mays
gctgatcgagccaagaaagcagctgctgcgtcggtggcagtcgccgaagcagcaggtgccaaagcgatcgagctgctctctgtccgtgctggtccccgtccccctcgcctctctagtctccactccacctcctctcatccatccatccacccacccaattcggcagcagcctccgccgccacactagctagcactagcagtaccacccgcgccgctagtcgctaccagctagcgactgaatcccagcaaggggggaccgggccaggatcggaggcgggagatcgaccgacccgagtagagtcaggcagcagctgcttggcgcggccgcccgcccatggaggacaccctcaagtcgctgtccatggactacctcaacctgctcatcaacgggcaggccttcagcgacgtcacgttcaacgtggagggccgcctcgtgcacgcgcaccgctgcatcctggccgcgcgcagcctcttcttccgcaagttcttctgcggcgccgagcaggccgccgccgggcccggcgcgctgctgctggaccacctcagcccgcgttccccgtccggcacctcctccccgcgcggcgcctccgccgccgcgccgggcgccgccgtcatacccgtcaactccgtcagctacgaggtgttcctgctgctgctgcagttcctctacagcggccaggtgtccctggtgccgcagaagggggagccccggccgggctgcggcgagcgcgcgtgctggcacacgcactgcgccgccgccgtcgacctcgcgctcgacacgctcgccgccgcacgctccttcggcgtcgaggagctcgcgctcctcacccagaagcagctggccggcatggtggagaaggcgtcgatcgaggacgtgatgaaggtgctgatggcgtcgcggaagcaggacctgcaccagctgtggaccacgtgctcccacctcgtggccaagtccgggctgccgccggaggtgctcgccaagcacctccccatggacgtcgtgtccaagatcgacgagctccgcctcaagtcctcgctgtcccgccgctcgccgttcctcgcgcaccaccaccacccggcaccggggggcggcatggaggcctcgtccgcggccgacatcgacgaccaccacaagatccggcgcatgcggcgcgcgctcgactcctccgacgtggagctcgtgaagctcatggtgatgggcgaggggctgaacctggacgaggcgctggcgctgcactacgccgtggagaactgcagccgggaggtggtgaaggcgctgctggagctgggcgccgccgacgtgaaccacaccgcgggccccgccgggaagacgccgctccacgtggccgccgagatggtgtgccccgacatggtcgccgtgcttctcgaccaccacgccgaccccaacgtgcgcaccgtcgagggcgtgacgccgctggacatcctccgcacgctcacctccgacctcctcttcaagggcgccgtgccggggctcgcgcacatcgagcccaacaagctccggctctgcctcgagctcgtgcagtcggcggccatggtcatgtcccgcgaggacgcgcacacggcggtcaacgccgcgcccatgtacggcgagccttccggcggcggcggctgcggcgtgtacagtgcgagcggcaccagcagcacgagcttggtgaacctgaacctggacaacaggatggtgtacctgaacctagggatggacgcgcagttcggcaagatgggcgacggcgatgacggcgggggcagggggccgtcttctttgttctccccgcatggctaccattgacaagctggagcggccggctgctgctctactatatatctccttgtaagcttagaactaattaattacatgttgttattcatatccacattacaggagatgaagaagatgatgattgg

SEQ ID NO: 147893 - DNA, 801 bp, Zea Mays
ggcaacaccaacgcaaccacgttacgcaccatagaacatacccgtgagaagctaagacccggccgttgctcaccacagcatcatcgccgcgccgtgctagctcaaggatggagaacaacaggcagcagcagcaggcgccgccgccgccaggtcagatcccgatgcgatcgactgagagtccgagtaacatggatgctgagacatgacgtgcatgcaggctacccgacggcggctgcaggcttggagcaggagcagggaggcaggaagggacgacgccgggagaagacgacctcgcgcggggataaaggcttcatcgaaggatggtaactacttactactagactagaagctcttttttttttggcgccaaaaaacctgatcgatggatgagctgacctgtggtatttaatttattcggttcttaattaatgatctgtttcagcatcgcggcgctctgctgctgctggatctgcgagatgtgctgcgactaggcacgcagctagcggtcagctagctctccgtctccggcggctatacatacgaaatacgatgagagagctagcctgccacagcttctgcttctgcttctgcaagagagatctgcttaaattattctatcgtccagagctgcagcaacacctgatatgtttgtttggggtgttattagtagggagagctagctcagctttattattgttaataataattctgtgctgtacgtagctatagcaagcatacgtatgtatacacgtatatgtatgtgttttaccgtgacttgaatgtttggaaatggtgatttca

SEQ ID NO: 147894 - DNA, 660 bp, Zea Mays
ggcaacaccaacgcaaccacgttacgcaccatagaacatacccgtgagaagctaagacccggccgttgctcaccacagcatcatcgccgcgccgtgctagctcaaggatggagaacaacaggcagcagcagcaggcgccgccgccgccaggctacccgacggcggctgcaggcttggagcaggagcagggaggcaggaagggacgacgccgggagaagacgacctcgcgcggggataaaggcttcatcgaaggatgcatcgcggcgctctgctgctgctggatctgcgagatgtgctgcgactaggcacgcagctagcggtcagctagctctccgtctccggcggctatacatacgaaatacgatgagagagctagcctgccacagcttctgcttctgcttctgcaagagagatctgcttaaattattctatcgtccagagctgcagcaacacctgatatgtttgtttggggtgttattagtagggagagctagctcagctttattattgttaataataattctgtgctgtacgtagctatagcaagcatacgtatgtatacacgtatatgtatgtgttttaccgtgacttgaatgtttggaaatggtgatttcattgccttctttttgtcggtggtctttatacacttgcggaccaacg

SEQ ID NO: 147895 - DNA, 399 bp, Zea Mays
atgggcgagtggcttggtcttctgaccgtcaagcaagagctgttctttgtatacttcaagccgagcacgtctctgctttgcaaaagcagcgctcgcttcacgggcgttcctggtagcagcgctcgcttctcgggcattgctggcgccagattggacaacgacgaggaggagagtgaaaccaaggagaggccactggtgcttcgacttcaaccacgcgaggtccagagcggcgctggaccttcaggccccgtcccgtccggctgcagatcctaccgctacttccccgacgcccgcgcgctccagagctgcagatcctacgcgatcctgggaatccccttgatagacacacctccagatcgcgacctccagatcgtcgagatgagcagaggaagagggtga

SEQ ID NO: 147896 - DNA, 1781 bp, Zea Mays
acggtgctttgcacggctctgagtccctgacgacctcgttcccctccgctgtctcgcctctcccttggttcctcgcggcgacgactgggcgagcgcctcctcccctccctcactccctccgtgagctcctcgccggcggcgcgcgccgccgcccgtcgccacgtcttctccgctgacgtgggctcaccagatccaatgaaggctgccaacttgacgcaaggtgttcaagaaatttaaaccatgcactcttcatcgtaggttcaaggcaatatctgtgttaatcttggggaccttcagtagattgctgagagttctccttgatacaggggaataaagatccaaataagtttttgacattgatctgtagccagtactgcaatggctacgaagcttgtggttctcggtatcccctgggatgttgacactgaagggttacgagagtacatggccaagtttggacccctagacgattgtgtcgtcatgaaggagcggtcttctgggcgatctcgcgggtttggctatgtaacattcgcctcagctgacgatgcaaagaatgttcttgattgcgagcatgttcttgggagccgtacattagaagtgaaggtagctactccaaaggaagaaatgaaatcacaaggatcaaagaaagctacaaggatattcgttgctcgaattccgcaatcggtggatgagtcgatgtttcgtagacattttgaagcttttggggaaattcttgatctttacatgccaaaggaacatggttcaaaagggcatcgtggaattgggtttatcacgtttcagagtgcagagtctgtggacaacatcatgcaagagtcacatgagcttgatggtacaacagtagttgttgatcgtgcgactcctaaggatgaagatgtcagataccccccgagtaggccatctcagggtggctatggtgcatataacgcatacatttcagctgctaccaggtatgcaactctgggtgcaccaacgctgtatgaccatcctggatcagcttatggaagagggtattatggaccctctcaagcagtgggcaagaagatatttgttggtagacttccacaagaagcaaacacagatgatctaaggcagtactttggcagatttggtcgaatcgtagatgcatatattccaaaggaccccaaaagaagcggccaccgaggttttgggtttgtcaccttcgctgatgatggtgtggcagaacgagtagctcgtagaagccatgaaattctaggccatgaggttgcaatagacacagcggcaccacttgagaatgattcagctgctggtgggtacattgatccaatggatctttacggagcttatggttcaatgagatctttcggcaggttctgtggcggtctagattacaattatggctatggccccagcagcggaagcagccgatcaagatcggattggcgataccgaccttactgaacgtgtccattgtcagtgatgttctagtttacctccagggaaggaaactgaaatggcgaaaagaaacattttaagaatgttaagtgttacgttaagtggcatgttaatcgtaagagggccgtgcggaatctgtcgatttgttcatgttgtaattttggacatggaaatgcttttatgcaatttctttgccgtgattcacattattgacacacgatgaaggcagcagcctttgtgtagttattgtgtgggagtgctggatgtgtgataaaaaaaaagatcattttcaaaagaagttataagcgatcgacgggcgcccggaa

SEQ ID NO: 147897 - DNA, 1709 bp, Zea Mays
acggtgctttgcacggctctgagtccctgacgacctcgttcccctccgctgtctcgcctctcccttggttcctcgcggcgacgactgggcgagcgcctcctcccctccctcactccctccgtgagctcctcgccggcggcgcgcgccgccgcccgtcgccacgtcttctccgctgacgtgggctcaccagatccaatgaaggctgccaacttgacgcaaggtgttcaagaaatttaaaccatgcactcttcatcgggaataaagatccaaataagtttttgacattgatctgtagccagtactgcaatggctacgaagcttgtggttctcggtatcccctgggatgttgacactgaagggttacgagagtacatggccaagtttggacccctagacgattgtgtcgtcatgaaggagcggtcttctgggcgatctcgcgggtttggctatgtaacattcgcctcagctgacgatgcaaagaatgttcttgattgcgagcatgttcttgggagccgtacattagaagtgaaggtagctactccaaaggaagaaatgaaatcacaaggatcaaagaaagctacaaggatattcgttgctcgaattccgcaatcggtggatgagtcgatgtttcgtagacattttgaagcttttggggaaattcttgatctttacatgccaaaggaacatggttcaaaagggcatcgtggaattgggtttatcacgtttcagagtgcagagtctgtggacaacatcatgcaagagtcacatgagcttgatggtacaacagtagttgttgatcgtgcgactcctaaggatgaagatgtcagataccccccgagtaggccatctcagggtggctatggtgcatataacgcatacatttcagctgctaccaggtatgcaactctgggtgcaccaacgctgtatgaccatcctggatcagcttatggaagagggtattatggaccctctcaagcagtgggcaagaagatatttgttggtagacttccacaagaagcaaacacagatgatctaaggcagtactttggcagatttggtcgaatcgtagatgcatatattccaaaggaccccaaaagaagcggccaccgaggttttgggtttgtcaccttcgctgatgatggtgtggcagaacgagtagctcgtagaagccatgaaattctaggccatgaggttgcaatagacacagcggcaccacttgagaatgattcagctgctggtgggtacattgatccaatggatctttacggagcttatggttcaatgagatctttcggcaggttctgtggcggtctagattacaattatggctatggccccagcagcggaagcagccgatcaagatcggattggcgataccgaccttactgaacgtgtccattgtcagtgatgttctagtttacctccagggaaggaaactgaaatggcgaaaagaaacattttaagaatgttaagtgttacgttaagtggcatgttaatcgtaagagggccgtgcggaatctgtcgatttgttcatgttgtaattttggacatggaaatgcttttatgcaatttctttgccgtgattcacattattgacacacgatgaaggcagcagcctttgtgtagttattgtgtgggagtgctggatgtgtgataaaaaaaaagatcattttcaaaagaagttataagcgatcgacgggcgcccggaa

SEQ ID NO: 147898 - DNA, 1675 bp, Zea Mays
acggtgctttgcacggctctgagtccctgacgacctcgttcccctccgctgtctcgcctctcccttggttcctcgcggcgacgactgggcgagcgcctcctcccctccctcactccctccgtgagctcctcgccggcggcgcgcgccgccgcccgtcgccacgtcttctccgctgacgtgggctcaccagatccaatgaaggctgccaacttgacgcaaggggaataaagatccaaataagtttttgacattgatctgtagccagtactgcaatggctacgaagcttgtggttctcggtatcccctgggatgttgacactgaagggttacgagagtacatggccaagtttggacccctagacgattgtgtcgtcatgaaggagcggtcttctgggcgatctcgcgggtttggctatgtaacattcgcctcagctgacgatgcaaagaatgttcttgattgcgagcatgttcttgggagccgtacattagaagtgaaggtagctactccaaaggaagaaatgaaatcacaaggatcaaagaaagctacaaggatattcgttgctcgaattccgcaatcggtggatgagtcgatgtttcgtagacattttgaagcttttggggaaattcttgatctttacatgccaaaggaacatggttcaaaagggcatcgtggaattgggtttatcacgtttcagagtgcagagtctgtggacaacatcatgcaagagtcacatgagcttgatggtacaacagtagttgttgatcgtgcgactcctaaggatgaagatgtcagataccccccgagtaggccatctcagggtggctatggtgcatataacgcatacatttcagctgctaccaggtatgcaactctgggtgcaccaacgctgtatgaccatcctggatcagcttatggaagagggtattatggaccctctcaagcagtgggcaagaagatatttgttggtagacttccacaagaagcaaacacagatgatctaaggcagtactttggcagatttggtcgaatcgtagatgcatatattccaaaggaccccaaaagaagcggccaccgaggttttgggtttgtcaccttcgctgatgatggtgtggcagaacgagtagctcgtagaagccatgaaattctaggccatgaggttgcaatagacacagcggcaccacttgagaatgattcagctgctggtgggtacattgatccaatggatctttacggagcttatggttcaatgagatctttcggcaggttctgtggcggtctagattacaattatggctatggccccagcagcggaagcagccgatcaagatcggattggcgataccgaccttactgaacgtgtccattgtcagtgatgttctagtttacctccagggaaggaaactgaaatggcgaaaagaaacattttaagaatgttaagtgttacgttaagtggcatgttaatcgtaagagggccgtgcggaatctgtcgatttgttcatgttgtaattttggacatggaaatgcttttatgcaatttctttgccgtgattcacattattgacacacgatgaaggcagcagcctttgtgtagttattgtgtgggagtgctggatgtgtgataaaaaaaaagatcattttcaaaagaagttataagcgatcgacgggcgcccggaa

SEQ ID NO: 147899 - DNA, 1665 bp, Zea Mays
acggtgctttgcacggctctgagtccctgacgacctcgttcccctccgctgtctcgcctctcccttggttcctcgcggcgacgactgggcgagcgcctcctcccctccctcactccctccgtgagctcctcgccggcggcgcgcgccgccgcccgtcgccacgtcttctccgctgacgtgggctcaccagatccaatgaaggctgccaacttgacgcaagatccaaataagtttttgacattgatctgtagccagtactgcaatggctacgaagcttgtggttctcggtatcccctgggatgttgacactgaagggttacgagagtacatggccaagtttggacccctagacgattgtgtcgtcatgaaggagcggtcttctgggcgatctcgcgggtttggctatgtaacattcgcctcagctgacgatgcaaagaatgttcttgattgcgagcatgttcttgggagccgtacattagaagtgaaggtagctactccaaaggaagaaatgaaatcacaaggatcaaagaaagctacaaggatattcgttgctcgaattccgcaatcggtggatgagtcgatgtttcgtagacattttgaagcttttggggaaattcttgatctttacatgccaaaggaacatggttcaaaagggcatcgtggaattgggtttatcacgtttcagagtgcagagtctgtggacaacatcatgcaagagtcacatgagcttgatggtacaacagtagttgttgatcgtgcgactcctaaggatgaagatgtcagataccccccgagtaggccatctcagggtggctatggtgcatataacgcatacatttcagctgctaccaggtatgcaactctgggtgcaccaacgctgtatgaccatcctggatcagcttatggaagagggtattatggaccctctcaagcagtgggcaagaagatatttgttggtagacttccacaagaagcaaacacagatgatctaaggcagtactttggcagatttggtcgaatcgtagatgcatatattccaaaggaccccaaaagaagcggccaccgaggttttgggtttgtcaccttcgctgatgatggtgtggcagaacgagtagctcgtagaagccatgaaattctaggccatgaggttgcaatagacacagcggcaccacttgagaatgattcagctgctggtgggtacattgatccaatggatctttacggagcttatggttcaatgagatctttcggcaggttctgtggcggtctagattacaattatggctatggccccagcagcggaagcagccgatcaagatcggattggcgataccgaccttactgaacgtgtccattgtcagtgatgttctagtttacctccagggaaggaaactgaaatggcgaaaagaaacattttaagaatgttaagtgttacgttaagtggcatgttaatcgtaagagggccgtgcggaatctgtcgatttgttcatgttgtaattttggacatggaaatgcttttatgcaatttctttgccgtgattcacattattgacacacgatgaaggcagcagcctttgtgtagttattgtgtgggagtgctggatgtgtgataaaaaaaaagatcattttcaaaagaagttataagcgatcgacgggcgcccggaa

SEQ ID NO: 147900 - DNA, 1485 bp, Zea Mays
acggtgctttgcacggctctgagtccctgacgacctcgttcccctccgctgtctcgcctctcccttggttcctcgcggcgacgactgggcgagcgcctcctcccctccctcactccctccgtgagctcctcgccggcggcgcgcgccgccgcccgtcgccacgtcttctccgctgacgtgggctcaccaggagcggtcttctgggcgatctcgcgggtttggctatgtaacattcgcctcagctgacgatgcaaagaatgttcttgattgcgagcatgttcttgggagccgtacattagaagtgaaggtagctactccaaaggaagaaatgaaatcacaaggatcaaagaaagctacaaggatattcgttgctcgaattccgcaatcggtggatgagtcgatgtttcgtagacattttgaagcttttggggaaattcttgatctttacatgccaaaggaacatggttcaaaagggcatcgtggaattgggtttatcacgtttcagagtgcagagtctgtggacaacatcatgcaagagtcacatgagcttgatggtacaacagtagttgttgatcgtgcgactcctaaggatgaagatgtcagataccccccgagtaggccatctcagggtggctatggtgcatataacgcatacatttcagctgctaccaggtatgcaactctgggtgcaccaacgctgtatgaccatcctggatcagcttatggaagagggtattatggaccctctcaagcagtgggcaagaagatatttgttggtagacttccacaagaagcaaacacagatgatctaaggcagtactttggcagatttggtcgaatcgtagatgcatatattccaaaggaccccaaaagaagcggccaccgaggttttgggtttgtcaccttcgctgatgatggtgtggcagaacgagtagctcgtagaagccatgaaattctaggccatgaggttgcaatagacacagcggcaccacttgagaatgattcagctgctggtgggtacattgatccaatggatctttacggagcttatggttcaatgagatctttcggcaggttctgtggcggtctagattacaattatggctatggccccagcagcggaagcagccgatcaagatcggattggcgataccgaccttactgaacgtgtccattgtcagtgatgttctagtttacctccagggaaggaaactgaaatggcgaaaagaaacattttaagaatgttaagtgttacgttaagtggcatgttaatcgtaagagggccgtgcggaatctgtcgatttgttcatgttgtaattttggacatggaaatgcttttatgcaatttctttgccgtgattcacattattgacacacgatgaaggcagcagcctttgtgtagttattgtgtgggagtgctggatgtgtgataaaaaaaaagatcattttcaaaagaagttataagcgatcgacgggcgcccggaa

SEQ ID NO: 147901 - DNA, 1882 bp, Zea Mays
acggtgctttgcacggctctgagtccctgacgacctcgttcccctccgctgtctcgcctctcccttggttcctcgcggcgacgactgggcgagcgcctcctcccctccctcactccctccgtgagctcctcgccggcggcgcgcgccgccgcccgtcgccacgtcttctccgctgacgtgggctcaccaggttcaaggcaatatctgtgttaatcttggggaccttcagtagattgctgagagttctccttgatacaggggaataaagatccaaataagtttttgacattgatctgtagccagtactgcaatggctacgaagcttgtggttctcggtatcccctgggatgttgacactgaagggttacgagagtacatggccaagtttggacccctagacgattgtgtcgtcatgaaggagcggtcttctgggcgatctcgcgggtttggctatgtaacattcgcctcagctgacgatgcaaagaatgttcttgattgcgagcatgttcttgggagccgtacattagaagtgaaggtagctactccaaaggaagaaatgaaatcacaaggatcaaagaaagctacaaggatattcgttgctcgaattccgcaatcggtggatgagtcgatgtttcgtagacattttgaagcttttggggaaattcttgatctttacatgccaaaggaacatggttcaaaagggcatcgtggaattgggtttatcacgtttcagagtgcagagtctgtggacaacatcatgcaagagtcacatgagcttgatggtacaacagtagttgttgatcgtgcgactcctaaggatgaagatgtcagataccccccgagtaggccatctcagggtggctatggtgcatataacgcatacatttcagctgctaccaggtatgcaactctgggtgcaccaacgctgtatgaccatcctggatcagcttatggaagagggtattatggaccctctcaagcagtgggcaagaagatatttgttggtagacttccacaagaagcaaacacagatgatctaaggcagtactttggcagatttggtcgaatcgtagatgcatatattccaaaggaccccaaaagaagcggccaccgaggttttgggtttgtcaccttcgctgatgatggtgtggcagaacgagtagctcgtagaagccatgaaattctaggccatgaggttgcaatagacacagcggcaccacttgagaatgattcagctgctggtgggtacattgatccaatggatctttacggagcttatggttcaatgagatctttcggcaggttctgtggcggtctagattacaattatggctatggccccagcagcggaagcagccgatcaagatcggattggcgataccgaccttactgaacgtgtccattgtcagtgatgttctagtttacctccagggaaggaaactgaaatggcgaaaagaaacattttaagaatgttaagtgttacgttaagtggcatgttaatcgtaagagggccgtgcggaatctgtcgatttgttcatgttgtaattttggacatggaaatgcttttatgcaatttctttgccgtgattcacattattgacacacgatgaaggcagcagcctttgtgtagttattgtgtgggagtgctggatgtgtgataaaaaaaaagatcattttcaaaagaagttataagcgatcgacgggcgcccggaaccgtctgatcgttagtctctacggttggttgcacgtggtaactatataattctttgcaacttaggccccctttggaccccgctgactaaaatcctgccgactaaagtttagttacatcatatcagaacactaattagaaatattaaatataacctaattataaaactaa

SEQ ID NO: 147902 - DNA, 1430 bp, Zea Mays
acgtgtgcactgtctcgctcgcacaggtcttccaagtctgcgccttctctcgcaatggctgctttggtggccacggctgcagtgctgcacggctgcaccacagtcctgctccgatccaagcgtacgcaaagacggcgagacgactttctttccatcagctgaccttgtcccggtcttgcggtacgtagtttccaagctccatcaggcagtcagagtcagtcaggcatggatggacggctataaatctctccagggtcgcgtcgtgaccggcatcgaagacgatggctgctcgaggcgtggctcccgtgctcgcagcagcaatggctgttacggcattcgccgccgttgcgacaagcgtgcgagccatcggcgtgtgctacggcgtgctaggcagcggcctcccgtccaagagcgacgtggtgcagctctacaagtccaacggcatcgccagcatgcgcttctacttcgccgaccaggacctcctcacggcgctgcgcggctcgggcgtcgcgctcgccctcgacgtcggcaacggcaaggtcggcgagctcgccgccgacccggccagcgccgcgtcctgggtccgcgacaacgtgcaggcctactacccggacgtggacatcaggtacgtcgtggtcgggaacgaggtcgtccccggcgccgcgtcggtgctgcaggccatgcggaacgtgcacgcggcgctcgcgtcggccggcctcgccggcagcgtcaaggtgtccacggcggtcaagatggacgcggtcgacgactcctcgccgccgtcccgcggcgtgttcagggaccccgccgcgatgtcgcccatcgcgcagttcctggccgccaacggcgcgccgctgctcgccaacgtctacccctacttcgcgtaccagtacagcgacggcggcatcgacctcgactacgcgctgttccagcccagctccacgacggtgacggaccccgccaacgggctggtgtacacgaacctcttcgacgcgatggtggacgccgtccgcgccgcgctggacaaggccggcgcaggcggcgtcgacgtcgtggtgtcggagaccgggtggccgtccgccgacgggaacggcgccaccctggacaacgcgcggacgtataaccagaaccttatcgaccatgccagtaagggcacgccgaggaagccggggcccatggaggtgtacgtgttcgccatgttcaacgaggaccagaaagacggggaccctacggagaagaagtttgggctctttaatccggacaagacaccagtttaccctattaatttcgcaggaaattgagtagagcatgtacgcatgggtacataaaataaagggttattaattaaaaaataaaaacgactttctagatgtaatacatataaatatttttttgccagttgtcttttgacaaagtatttcttgactgtc

SEQ ID NO: 147903 - DNA, 1934 bp, Zea Mays
attctctctctcctttccccactactagctgcccgtcacccgccgctctgttccatccagcctgcgccggtcccattcgcccgccattccgccgcgcgccgccggcagggcgccgcgtcccgggaacgcgcgcgtgcggtgcgggcgcggggggattcgtcgcgcgcgggcaccaggagagggagggggcgcggggggattcgtcgaccgcgccacctgggaactgggatgccgtgatcgacgccgcgcgcctggagcctggggatggggcgggttggcctcggcgtggcggcgggttgcgcggccgccacgtgcgcgatcgctgccgcgctggtggcgcgcagggcgtcggcgcgggcgcgctggcgccgggccgtcgcgctgctcagggagttcgaggacggctgcgccacgccgccgccacgcctgcgccaggtcgtcgacgccatggtcgtcgagatgcacgccggcctcgcctccgacggcggcagcaagctcaagatgctgctcaccttcgtcgacgcgctgcccgccggaaatgaagaaggaacatattattccatcgatctcggaggaacaaactttagagtgttaagagttgaagttggtgctgggtctgtggtcacccgtcggaaggttgaacttcccatccctgaggaattgaccaagggtacaattgaggagctattcaactttgttgccatgactctaaaggaatttgtagaaacagaagatgggaacgatgaacaacgagcgcttggtttcacattttctttcccagttagacaaacatcagtatcttcggggtcattgattaggtggaataaagggtttttgattgaagatgcggttgggaaagatgtggctcaatgcttaaatgaagctcttgctaggaatggactaaatgtgcgagttactgcactggtgaatgacaccgtggggacattagctctaggacattatcacgatgaggatacagtggctgctgtgatcattggtgctggcaccaatgcttgctatattgaacgcactgatgcaattattaaatgtcagggtcttcttacaaactctggtggcatggtagtaaacatggaatggggcagtttctggtcatcacatttgccaagaactccttatgacatctcccttgatgatgagacacaaaaccgcaatgatcaggggtttgagaaaatggtctctgggatttatcttggggaaattgcaaggctggtgctgcatcgaatggctctagaatcagatttttttggtgacgctgctgataatctatgtacccccttcacattgagcacaccactcctcgctgcaattcgcaaggacgattcaccagatctgagcgaagtcaggaagatactgcaagaacatctgaaggtcagctttcctgacctccatgaagtcaaacatgtgttttcctccaacctgtgaaggttctggtgattttgctgcagataccggacactcctctgaaaactcgaaggctggttgtcaaagtgtgcgacatcgtcacccggagagctgcccgcctagccgccgctggtattgtcgggatactgaaaaagctcggccgtgatgggagcggtgttgcttcaagcgggagaacgggagggcagatgaggcggacggtggttgccatcgagggtgggctgtacgagggctacccggtgttcagggagtacctagacgaagccctggtggagatcttgggggaggaggtggcgcggacggtggcgctgagggtgacagtggatgggtctggggccggcgctgccctccttgccgccgtacattcgtcgaatagacagcaaggttccatatagggagaagggaagatggtgatacagccccctctgtgcaaatgtaaaaaggaacattatttgatatctatattcatatatatataatctggtcttgtgcag

SEQ ID NO: 147904 - DNA, 1895 bp, Zea Mays
attctctctctcctttccccactactagctgcccgtcacccgccgctctgttccatccagcctgcgccggtcccattcgcccgccattccgccgcgcgccgccggcagggcgccgcgtcccgggaacgcgcgcgtgcggtgcgggcgcggggggattcgtcgcgcgcgggcaccaggagagggagggggcgcggggggattcgtcgaccgcgccacctgggaactgggatgccgtgatcgacgccgcgcgcctggagcctggggatggggcgggttggcctcggcgtggcggcgggttgcgcggccgccacgtgcgcgatcgctgccgcgctggtggcgcgcagggcgtcggcgcgggcgcgctggcgccgggccgtcgcgctgctcagggagttcgaggacggctgcgccacgccgccgccacgcctgcgccaggtcgtcgacgccatggtcgtcgagatgcacgccggcctcgcctccgacggcggcagcaagctcaagatgctgctcaccttcgtcgacgcgctgcccgccggaaatgaagaaggaacatattattccatcgatctcggaggaacaaactttagagtgttaagagttgaagttggtgctgggtctgtggtcacccgtcggaaggttgaacttcccatccctgaggaattgaccaagggtacaattgaggagctattcaactttgttgccatgactctaaaggaatttgtagaaacagaagatgggaacgatgaacaacgagcgcttggtttcacattttctttcccagttagacaaacatcagtatcttcggggtcattgattaggtggaataaagggtttttgattgaagatgcggttgggaaagatgtggctcaatgcttaaatgaagctcttgctaggaatggactaaatgtgcgagttactgcactggtgaatgacaccgtggggacattagctctaggacattatcacgatgaggatacagtggctgctgtgatcattggtgctggcaccaatgcttgctatattgaacgcactgatgcaattattaaatgtcagggtcttcttacaaactctggtggcatggtagtaaacatggaatggggcagtttctggtcatcacatttgccaagaactccttatgacatctcccttgatgatgagacacaaaaccgcaatgatcaggggtttgagaaaatggtctctgggatttatcttggggaaattgcaaggctggtgctgcatcgaatggctctagaatcagatttttttggtgacgctgctgataatctatgtacccccttcacattgagcacaccactcctcgctgcaattcgcaaggacgattcaccagatctgagcgaagtcaggaagatactgcaagaacatctgaagataccggacactcctctgaaaactcgaaggctggttgtcaaagtgtgcgacatcgtcacccggagagctgcccgcctagccgccgctggtattgtcgggatactgaaaaagctcggccgtgatgggagcggtgttgcttcaagcgggagaacgggagggcagatgaggcggacggtggttgccatcgagggtgggctgtacgagggctacccggtgttcagggagtacctagacgaagccctggtggagatcttgggggaggaggtggcgcggacggtggcgctgagggtgacagtggatgggtctggggccggcgctgccctccttgccgccgtacattcgtcgaatagacagcaaggttccatatagggagaagggaagatggtgatacagccccctctgtgcaaatgtaaaaaggaacattatttgatatctatattcatatatatataatctggtcttgtgcagaagaaatacctgttctcctatctatgctcttgtgattc

SEQ ID NO: 147905 - DNA, 2307 bp, Zea Mays
ctccgccgtcgcattggcaccccaccggaccaaacccgaatctcatacgctctcttgctcgcttcaatcaatggcgggctagtgccgaagcgaagacgcgagaacctgcgatatttctggttctgcttgcctgtcactctatcagcaaccacagcttgggtgcaatgagcaccgcaagagttcagggaagattagattaccttaattcacaggagcctggtgatgcatcacaggctactgccattgacattgtggaaaggctgctggcagaagatgagacagaaacctctcagaagataagtgccgaaccaatgagtgggacaaagtcagcttctataataggcacaaaagtagcccagtgcctggccaaaagaggtgactgcagtagctcactccaaaaggcaggcatttttgactgggttgatgcttcgagtgatgatgaatgcacagccattatgacttccaggaaaaaacaaaggatccaagctaatactcaagcgaagaatttgacctcccagagatatggtggtcgtggatcaattgccactgttggttccatatcagattgtactggcggtaagtcaggcttgaattcttctaaaaagccagaacctgttggttctaccgatgatttatatgatattggtccatatactcagatggcagctgaagccatggaagcactgtccaatgcatcaactgtcaattatgtagtcagggagaatgcacatcctgaaagctcagttcttagaacaaacatgggaaaagaaagcaaagccaataagatatgttttgagttgtcacttcaaaagcgaattggtggaagttcaagctctgtgaaaaagcatcccagcaagttaaaagacaagaagagtcgaaaacagatgacaaggaaagcaaaaggaagcatagacagtaccactatagaaggagatacaaatcatgaggtgtctgaaggagttaagggatctggtgcaagtgattcaaatgttgtaggttctaatgctgtaatgtgccctaaaaggaagaggacctatatgtttatctcaagaagttcaaaagttcaattcaataaagctgggagctcaactacaccaagatccaaaagtaaagaagtagttgatgtatcaacaacaaaaccagttagtgtatctggccctgatttaaaccagcttgccagagtagaaaaacaattcacatctgcacaggaagatcataactccagcttgacaaacagaggaccactgggagagctaaacagtaaatgctcccattttaggacacaagtatcaaagaagccactgaagagaggacttgtgaaatcaccaggttccagagaacttgtcagtctgttaagaaatgaagcatctctagttttgcagacaagcaggcaaagaagaaacatgtccaaagtccatgtcctgttgagccatagcatggataaggaaaccatcaaaatgcaaacaaagatattgatatattttggactacaagtggcggcaactatttcagaagctacacactttgttgccgaaaagtttgcccgtacaaggaacatgcttcaagcaatagctatgggaatacctatagtcacgccatcatggcttgaatgctgtagagaagcaaggtgcttcgttgatgagaaggcatacattatgagagatatgaagaaggaaaaggagctaggttttagcatgcctgtctcacttagcagagcccgcaaaaaaccattgcttcagggtagaagagtattaatcacaccaaacgccaagcctagcaaggagcttctgaagagtttagtagttgcagctcacggtcagccattggagagaatcacagcctctacaatgaagaagaaaatttttgagggggcctttgtactctcttgtgaacaagatcacagtgtttgcatgccattaattgagagtggtctggaagtgtttgactcggagcttctactgaacggtattgtcactcagaagctagagttcgccaggtatcgtctttttccatgaataagccatatgcccatatgagtgcgatctgggtaggtttggttccggcaccatgcatgccagacaaagcactcttgtacatatgcatccttatccttctctagttactctgaccccttgcacactagtgtgtatttattgttcgagcctctggcccttattaccataattatttgcttttgtattggctcttggtacgtaggccatgtgagatttttgtacccttttgttgtatggcagtgaccatgttagcctatattaaagctaagtacctgcatggattggatatatc

SEQ ID NO: 147906 - DNA, 407 bp, Zea Mays
aaaaaatttgctgcagcccggcagcaatccaggatctttacagcccctcacaaaaaagaggatagacctcatgcgcaggtcaataacacaactaaaacgttacctggtggacctgcaggtggggtctatcctcctttttgtgagggactgcaaacctcctggtttgcagccgggctgcaataaagtttttttttccaaaatctgtgcttgtaaggataaggtgatatattccctttacttaatccaacatctgaccttattgccagtataattagttgaggttaaattggcaaattcttttttaattttttcctatgaatactgtttgcattgcttcatacataactgttaggaagagtaagtttatgttttccattacaaagtggatccttttttattggtgggtg

SEQ ID NO: 147907 - DNA, 821 bp, Zea Mays
agaggcttgcatagggcgagatagttatggttagttcaactaccggagaataatccagtgctccatttattttccaacaacttacaactacaggtaggaaatcctatcgctgacgagctaacagtaacacagcatggtgttgtcatatggtacaatcatatactactagttgagagcccatgaaaccaaaatagcctcttggatgtctacatgatgtttgtggtattgcagcttacgccgccaggatgcagggcgatgctccctgccgctggattctttttctcctcgcgctatgcaccataacgagcctgctagtacgatgaaaggagtacacgggccggccaacatcagcaaccgccgccgctgtttgtacgtgctaaagaggaccgaccgcacgggtctcccaccggcaaggcgaccatcagaagaccataacgagctcgcccctcgttgcttggtagctgtcagtttgtcgctgcatgtaaatattggatgggtttacaaaaccgcgagacgcgtggtggtcaaagccacagggggtggcaggcccttgtccagcgtgtgtgtagtgctgctgccgctgctgctgattctcaagtctgaattcggcagacgcggcctcgtcaaaagtgtaaagaacctccagttccggagggttcgttccgcatctatccacgcgctcagttttgctgtggcggtagttcatgtgtctgtgcttaccgtgtcgtataaagttgtaatatcagctaagatcgtggagtcgtagaatcaagcaaaatagaagtccaaacgacagaatcgagatttttttgttttgtttt

SEQ ID NO: 147908 - DNA, 898 bp, Zea Mays
acagtgaagcgtccacccaccatcgcacggcgatccatgcccgcgtgggcgcgtcgtccattctattccactccccccttccctccctcctgcgcgcgcaagcagcggcccagcatgccggccggccgctcgtcgtacctagcgactatgggcagccggagcttctcctaccacaggctcaagaagctccccgtcgccgctccctctcctcctcccgccacgacggcccccgctagccgcggcctagagcatgaaggcgacccgcggcgcgccgccgccgccatcgaggactcgtaccggtcctactaccgcgcgctggtggcgaggggtaggcggcagcggtggcgggacggcggcggaaggcagcggcctcggcctcggcctcggcggcgcctgagggcctggggagccctggcgcgcgcgctacggcggagggcggcggccgccggggccctggtgcgcgcgtcggtcgccagggtggcgcggcggctcagggagggccggccctacgtcggggacctcttcgccgggaactacatgttcctgcaggtggcgccgtcaccgacgacgaccgcaccgccgcggggcgccgtggtgccctttgcggactactactacggctgcaaggccaaggccagggccagggcggccgggcagctgcaccctgctgctggggtgctctacaaggtgtagctgtatcggacgtccagctcgcactgcctgccggttacttatccggtggccgggtgggtcgtgcgagcccacatgtctacatctccgttccgttgtgcagccagcgcttcgtgtgcgtgcgtgatgtcggaactgcgatgacatcatgagttgttgtgtgcactatcgagtcattgacctgatgcttacttggtttttagtgttg

SEQ ID NO: 147909 - DNA, 5010 bp, Zea Mays
tctcatgatgcttcggtctttatcagaagctagtagctggtatagcagatccgtacgattgatggattggtacttgctcatcctcgataccttgggacagttgtagtgagaaataacacaaaacggcccaaattcatcgatagatcgatttagggtgttcgaatttcgatacccttccttgttccttcacacagacacagtgacacagcgcacgccacatgctttgtgtcatgccaaggccaaggctctaacgggacggtacaactgccacggacaatgaacagggaggaggggttgcatgtggccagcctgtgtgcgagcaatcagaggatgcacaatacttgtcagactgtacgattagtcctcttccaatccggccgttaatccaaaagcattccaactcacacaggggcgcagaggagaaagagacagacaggcagcgagagagagagagctcaaagcaggcaggcaggcaggctcgtcgggctcatgagttgctttcattcagttcctgacgaactggaggccgttggcccgggagtaccgctccatgaagcgcatgaagcggtcccactcctgaggcgtgcgcatcacgtacttggcctcgatccgcgccggcttgccgttcacgaacttggcgctcacgtccacggactgcagcacgccctcgtcgtccaccatgtaaaagcccgtgatgtcgcccagctccgccgacgagtcgaacaccgacggacgctcgaacgcgaagacggccacgccgttggtgccgtcgcgggacttggtcagccgcacgtccgggaccgtctgctcgtccgtgccctggatgaactggatcgcaggccggcccgccatcgccaccacctgcgcccgccgccatcgcccagggcactgaaccgacgatacgccgtggaacaacgactgcaggtgcaggctcaagttctgctgttgatgctgctggctagggacacctgcgacgtggtaccgacggggatgctgtgctgcccgtgccgacaccggcgaggcgacagcaagagccttcatcactgcggccatccctagctaggggtggtctctgtgactctcgagtgagaggcaggcagctagctgtccggggaagctgcagccagaaagggagcgctggtgtggtgtctgggaggaggtggaggacgggtgaaatgcagaggggagcagcgggtttgagtggtgcagagtgggacgagatactacgatagtgattgggtggcggtgtgttcaaaagacagccatccatcatccagattccagagggattctattgcaggcaggccctatcttcttctcctcctcctcctcctcctcccgatgacaattgacaactgcttgcttctgctctccggtttcgcatatttgcacgtatgctcctgtttcttggtgggcccaccgcccttccttttcttctcctcacacatctcagcctgtcttcttcctttccttggatcatgagaaggcatgcatgcagttgtggctgtgtggtgccctcgtggcccatggaggcaccaggaatgacaaccggcgcttgagcggccagcagctttggcgggggtaactcgcaagcagtatcggctgccagcagttcctatattatctgcagccgccgcccaaaggccgtctccgttcctctctgcccttcatcttcttcgcccaaacaccatccagctgcccagcacaccatgttggaggaaggcaccctttataaaattaccatgttctggcagtaattttcaattagtgaagtgaaacatacacgacctggagtttttcctccgcagttgtatgcttgcacagttagttaaaaaaaaactggtcagaaacagcagtggaatttaagtactagtattgcataatttgcatttgaagaaaaaggagaagtagaaaagttatgccatgtaggatttggatcatggtctagctaaaccttatgaacacagggtacaaagagtagacagcgtacttacgaataagataccactataccagcgtgcaacttgcagctcataattgagacggcttgtgagaagaacttgggaagttgacaaacattcatggcgattcgtcatattgtatggcttccatggtttatgacccaccgcttaaccaacagtgctacgaccatggggcttcaccagccctttatcttgcaaaacgctcctaacttgggccacaccactccacatgtctttgtatgcataaaggtttgctgcagttacataataaccgctatttccaggctccaaatgtagcaaatgttttgcgatggattcgcccatcttgagttcactcctgctactgcaagcatttaacagtgcgccccaaattccgtgtgtttgttgagacggcaagctctccacaaacttgtgcgcttcctgcagccgaccagcccgcccaagcatgtctacaatgcagacatggtgctctggggctggtgtgatcccaaacttttctgacataaggcaataatacttccacccttcatcaacaagtccagagtgactgcaagctgacagtagagcaataaatgtgcttttcgtggctttcattccagaatcatgcatcttccagaaaagatctatagatttcatcccatggccatggaatccaaaagctgatatcaaggagttccacccggcaatcgatttttcggcagaagcttcaaatactctgacagcaatgtccagtctcccacacttgcaatacatatcaacaagtgatgctgaaataaaaacattattgtgcagaacagacctgaacacatgcccgtgtatgctctttccttgtctataaccaccaagctgtgtgcaagcacagatgataccgacaacagatatttcattaggttcgaaatcctccatcttctgatagaactgcaatgctctccagcctttgttattctgtgcaaagccagagatcatacagttccaggagcacaaatttgtgtctcccatgctataaaagactaactcagcacttctagtatctccaaagcgaaaatacatggtcaataatgaatttttcaccctcaaattggaagcaaacaagtgcttcaggatcatgcagtggatggatttcccaagtgctagtagattaagatctccacatgctgataagacactaactattgtaatactgtcagggtttatggccaaagaacaatacatgaaccgaaagatttccaatgcatctttatggagttcattttgcagacacccaactatgaccgtattccaggaaatgatatctgataccggtattattctttcaataagcgaaaaggcggccagtggatcaccacagctcatatacatgtgtatcaaagcattaacagccgaaaccccactagatgtaaatccacacttcaggctgaaagagtgaagtgctttcccaaagctaagttcttccggaatggagcatgatggtatgacagctagcatagtggccaagctgcacgatgaaccttcagaaagtaatcctttgaacattaactgagcctcttctctcagtgggccatatcttgagtaaccagaaatcattgtgttccacgatatcaagtcccttcttggcattgtcataaacaacaggcctgcattagatggttcgtcacatttcaaatacagatcgagtaagctatttcccatggaaggctcctcacgaagaagtccttttctgattacgtatccatggagtgtttccccttcagaaagtaggccttgatcagcacagcctgaaactatggtcaccaaagtggcgacatctggctggttctccaatctcatttgcctcaaaacagcaagggcctcggttactctttcattctggactagacccttgatcatagcattccatgataccaaattcctgttcaaattgctggcgaagaccttcttcgcagcctctggcattccaaactcagagtagaacgtcacgagagaattcgctactgagcaagacgcggtgtcctcataaccgagtttgactgcacagctatgcacagactccccaaaggagaagagatcatccagacgagagcaggctgagaggacagaagagaggctcacctcatctggctggaagatggagcaactcatttccctgaagtagcacgctgacacctcagcgagcccgttaaaaatgctcccacttatgacagagttccatgaggtggtgtccctgcacggcatgctatgaaacacaacctctgcggacctaaactcaccacactttgcatacatgtcaacgagagcgttccacgcgccgagacaatgagcgccgagacaactcttggccgccatgccatggagctccattccacgccgaaggttacccgcgcgggacgcccccgacagcatgacgaccacggtggtggagtcaaactccccgagctcgcgcgccatccgccggaacagagccgcggcgtcgtcgtaccggcagctcgtcgtcagggcgccgacggccgcgttccacaggatcacgtcgggcgcaacggcctcgcggaagagcgccagggcggcgcctgctccggctcccgctcccgcgccgcggccggccctggcgtacgccgcgagcagggacgtgcgcactggcgggtccagcacggcgcctgacttgagggccgcgcagtggaggcacgcgatgcaggccgtgtcaccggaggaggaagacggtgcggacgtgagggcacgtacgatggcggccgccctcccgcgcggcgtttcgtcgagcaggcggtgggcgtcgtccggcgcatggtggagcaaggccgcgcgggcggcgaggacggacgggggtctgaggagcgacgaggcgcggaggagattggcggcgagaaggccgggggtgtggcgtcgcatccaccgccgcggcgcgtcgagcttaggcggcggctgcggcgccgctcctgcattggaaggccgaggccggttatttgtgatcgttgagaattgacagctcagaagaggaaaggccggcgaagaaaag

SEQ ID NO: 147910 - DNA, 1326 bp, Zea Mays
catcgatagatcgatttagggtgttcgaatttcgatacccttccttgttccttcacacagacacagtgacacagcgcacgccacatgctttgtgtcatgccaaggccaaggctctaacgggacggtacaactgccacggacaatgaacagggaggaggggttgcatgtggccagcctgtgtgcgagcaatcagaggatgcacaatacttgtcagactgtacgattagtcctcttccaatccggccgttaatccaaaagcattccaactcacacaggggcgcagaggagaaagagacagacaggcagcgagagagagagagctcaaagcaggcaggcaggcaggctcgtcgggctcatgagttgctttcattcagttcctgacgaactggaggccgttggcccgggagtaccgctccatgaagcgcatgaagcggtcccactcctgaggcgtgcgcatcacgtacttggcctcgatccgcgccggcttgccgttcacgaacttggcgctcacgtccacggactgcagcacgccctcgtcgtccaccatgtaaaagcccgtgatgtcgcccagctccgccgacgagtcgaacaccgacggacgctcgaacgcgaagacggccacgccgttggtgccgtcgcgggacttggtcagccgcacgtccgggaccgtctgctcgtccgtgccctggatgaactggatcgcaggccggcccgccatcgccaccacctgcgcccgccgccatcgcccagggcactgaaccgacgatacgccgtggaacaacgactgcaggtgcaggctcaagttctgctgttgatgctgctggctagggacacctgaacgaatgaaccaccatagtagagtacagagacagtattatggggaacttgacggaacacatgcacatatttgatttgtttccctgcttggtgcgagatagtatacctgcgacgtggtaccgacggggatgctgtgctgcccgtgccgacaccggcgaggcgacagcaagagccttcatcactgcggccatccctagctaggggtggtctctgtgactctcgagtgagaggcaggcagctagctgtccggggaagctgcagccagaaagggagcgctggtgtggtgtctgggaggaggtggaggacgggtgaaatgcagaggggagcagcgggtttgagtggtgcagagtgggacgagatactacgatagtgattgggtggcggtgtgttcaaaagacagccatccatcatccagattccagagggattctattgcaggcaggccctatcttcttctcctcctcctcctcctcctcccgatgacaattg

SEQ ID NO: 147911 - DNA, 570 bp, Zea Mays
atgagttgctttcattcagttcctgacgaactggaggccgttggcccgggagtaccgctccatgaagcgcatgaagcggtcccactcctgaggcgtgcgcatcacgtacttggcctcgatccgcgccggcttgccgttcacgaacttggcgctcacgtccacggactgcagcacgccctcgtcgtccaccatgtaaaagcccgtgatgtcgcccagctccgccgacgagtcgaacaccgacggacgctcgaacgcgaagacggccacgccgttggtgccgtcgcgggacttggtcagccgcacgtccgggaccgtctgctcgtccgtgccctggatgaactggatcgcaggccggcccgccatcgccaccacctgcgcccgccgccatcgcccagggcactgaaccgacgatacgccgtggaacaacgactgcaggtgcaggctcaagttctgctgttgatgctgctggctagggacacctgcgacgtggtaccgacggggatgctgtgctgcccgtgccgacaccggcgaggcgacagcaagagccttcatcactgcggccatccctag

SEQ ID NO: 147912 - DNA, 1096 bp, Zea Mays
ggagcatgtaattgaggaccaaattcgagcttcacgcaaggtagtaagcacagtgcttcgtagctgagcaatcaactagcacgaatacggaaccacccgtccagttttactgcaagaatcacccaaataataatctccgctgaacaaaagttaaaaacaaaacaaaaaaagtctatagcgaaatcgccggccgtaaccccacccgaaaagtaagctaagatttacaggagatatagagaagtaaaagctgatgagatgtagcagcagaagcagcagttcttcacgaggacgcagagagtagtggcggcaaggcgagctgcagagccagccagcccggccgaggccgaccaacccgcgaggaccacctttttccgtgcaccctgcacgcctgccgccgagacatgcacatgacatgatccacgaggagcagcagctgtgtggagaggccggcgtggtccacggcaggcaggtcgcgcacgccgctagaccgaaccgctacaccaccaccaccagcagcagccacggcacggccagcagcacgagcgccgacgccggggccggcgcggcggcgggggactgcgcggcgacggcgggcgcggagccgaacggcgccagcgcccacgcgggctccagcgcgtccgggttgggcgggctggggctggacgggatggtgggctcgtccgcgtcgggcggcggcgcggcgccgtcctcggccggagacggcagcacgggcattatgtccggcgccagcgcctgcgacggcgcaagcgcggaggggcgctggtgctggttcgggaggcgcgggagcggcgccccgtactcgggcgccgcggagatggacggcgacgcccggggcgcggacgcgggtgcgggcgcggcgtgtcgggccgccgtggagcctgtgccggcgaggaacgccacgaggaggaggaggaggagagggaggcgcgccctcgccatcggtcgttgtggctcccggagcgcgcgtgtggtgccggcggccgggtgggagaattgagatgggggagtgaccgagtgagtggtgttctggttgtgggggggttttggaaaggttggttggggtggggaagcaggt

SEQ ID NO: 147913 - DNA, 1468 bp, Zea Mays
caacgtactcgctacataaacagctgcagcacgagcagacgagcccaaccagatgcaatgcaagctcctccgaggaagatgccgcggcgcaaccccctcctcccactattcctcctgcccatctcggcgctcgtgctggcgtggccggcatcgtgcaccgccgaccccgtccccgtgctcttcccggtggccaaggacccagccacctccctctacaccatccccgtccgggacggcgccagccacgtgatcgacctcgccggcccgctcctctggtccacgtgcgacgacgaccacctgccggccaacatctcctgccgcgaccggctctgcaagctcgccaacgcctaccgcgcgccgagctgcggcggcggcgtcgcgggccacccgtgctcaaagcggtgcaaggcgtacccgtacaaccccgtcacggggcggtgcgcggcggcggacctcgtccacaccaggctcgtggccaacaccaccgacgggcggaacccgctgagccaggtcccggtccgcgcggtggccgcgtgcgcgccgcggacgctcctggaccaccggctgcccagggatgccacgggcgtcgcggggctgtcggccgccggcctcgcgctgcccgcgcaggtcgcgacgtcgcagcgcgtcgccaacgccaacgcgttcctgctctgcctccccaggtccggctccggcgacggtgtggcggtgttcggcggccggggccccttcttcctcaagctcttcgtcaccggggagccgtcgagcggggacctcacgcggacgctgcagttcgccccgctccgcagcaggccgggcaaccctctgtactacgtccccgtgagcggcgtcgccgtcggccgggcgccggtgccgctcccgccgcgcgcgctggccgccggcggcgtcgttctgtgcaccagggtgccgtacaccgccctccgccccgacgtgtaccgccccgtcgtggaggctttcgacaggggactggtacggagcgacatgagggtggccgccgtgccgcccttcgagttctgctacaaccggaccctgctgccgcccacgcggctcggctacggcgtgccggagatagccctgctgctggagggcggcaagcaggagtggacgttcgtcggcagcagctccatggtggacgtggacgcgcgcaccgcctgcctcgcgctcctcgagatgaagggggtcaaggccggggaccccagcgcggcggcggtggtggtcgggggtttccagatggaggaccacctgctgcagttcgacctggataagaagcagctagggtttgccagggtgcccattccttctgcgtgcagcaacttcaatttcaccagggggcgacagtagcagaataaagaagagtaggcagtgtcggcgcgcgcgcgcaggttctatatcatagtcaactggacattgcatgctagcgacctcccatggatgtcatcgccggttg

SEQ ID NO: 147914 - DNA, 1711 bp, Zea Mays
ctccgacgcctcccctgccgctgccgcaactgggaggcggtccctgtcgcgcgcgacgacgagccttcatgacggggacacgctgctgattcatagcgcaccacccgccgcctggcgcgtctgctcgcggccgatacctccgcggccggcggcgatgggccaggacctcgtcgagatccatccgagcgagctccagttcacctttgaggtgaagaaacaaagttcatgtgtcgtccacctaatcaacaagtccaacgactatgttgctttcaaggttaaaacaacatctcctaaaagatactgtgttcgaccaaatactggggttatccttccaaggaaaacatgtgaattcacagttaccatgcaagcgctccgaactgctccgccagacatgcaactaaaggacaagtttttggtacagaccacaattgttccttatggtacatctgacgaggaactcgttcctgcctttttctccaaagaaactggcagatacattgaggaaagcaaattgagagttgttcttgttagtgcataccaatcccttgaagagcaaccgactaataaaattcatgacactgagccagttgttgaagttcctgtactgaaagaggtgccaaatatagagaacgaagtgccagatgctgcaaaagaagttcctgcccctctggtacaagctccagcgattgtgactggaataccttcacctgtcgaagagactcctggcctgagagaattccgtgtgccgctgaatgaagcaccagctgtattggcagaatctccttccgctcaaaaagacccttctgttattacagttgaacatgcctctactgttataattgaacattcccctgctatttccattgaatcccctcctttgaaacaaagtgtcacagtttttaaggaatctcctccttcgaaacaaagcattgcagctttcaaggaatatcctcctccttcgaaacaaagcattgcagtttttaaggaatctcctccactggaggaaactagtcctaaagaagctgttgtgctaagtgaccgaggactcttcagtgtgcagaaccatcaattatctcatgtaacagaagatgttcagaatctgaaatcaaagctcaacaatctcgaatcaaaattggaagaggctggaaagatgataataaggctaaaagaagagagcagaagtaccacccaggagcgggataagctacagcaagaaatggtattcctaagaaagaagggaaccccaaggagccaagtgggtttccccttgctgtttgttgtctacgtcgcgcttcttggtaccttactcggttacctgctccgtctatgaattcagaactctaagaaaacaaaaaagttcagcagctgggatgcctcatatgcggcaagagaactgaattgaacggcagttgcactctaaaatgttggagaggtgaatttatttgcattattagttcaggacttcgtatggttttttgcacataacagcagtaccaaactaccagcagttgcgtgcatatatagaacagtttttttttttttttggcgttgtatagaatagaaccgacccaaaagatgcctgctgtcttgtagactaattatggggattcttcctatgcctaagctttctcttttcttctgtctcttttacagtttgctggattcgcttgtcctgaatcggtattgaactgtcgtgtgactatttacacct

SEQ ID NO: 147915 - DNA, 357 bp, Zea Mays
gcggcgggggagactttgcgcgccgacgcggccgcgccgtctcatctgtatggcgcccggtgtctccacgcgctctccactctcccgcagcccgcaggagtgcaggacccggctgccgcaaccgccccgtcgcagcgccaaacatcggtctctgcccccctcctgattttcccaagctagcagcttctactgattctgcaagaatcacaagattcaacaatgaaaatgaagctcaagctgatgcgctgaacttcggacagtcttcaggttcactaaaaaacaagaaagtgacttcagctttcagcatactgctgtacattcttgattcccattaaccgagaatatagaggtcgaagc

SEQ ID NO: 147916 - DNA, 1176 bp, Zea Mays
atgacactgccaaccccggtggtagccggcgttgcggctggcgccgccgcgctgctactggccgccgccctcgccgtggcgtggtggtggctcgtgatcgtgaggcggcgccggcgccgtgaccggagctccgacaccggatcctcgtcggaggctcctcctcccacgctggcggagtggggccggtgcggccgcacctcgtcggcgcccgagttccacggcgccaggcagttctcgctggaggagctggcgcacgccaccaacggcttcgccgaggccaacctggtcggcgcgggggcctttggcctggtgtacaagggcctgctgctagacggcaccgtcgtcgccatcaagcgccgcgcgggcgcgccgcgccaggacttcgcaaacgagatcaggaggctgtcagagatctggcaccgcaacgtcgtgacgttgatcggcttctgccaagaaggcggtctacagatgctggtgttcgaatacctgcccaacgccagtgtcagcggccacttgtacgacaccggcaaggagacgatgaccaggctggagttcaagcagaggctgtcaatagccattggagcagctaaaggtctgagtcacctccacagcctggcgccgccgctgatccacagggacttcaagacgagcaacgtgctggtcgacgagaacttcatcgccaaggtgtccgacgccgggatccacaggctgctgcgagggcctgatggtggcgccgtcgccgctctggcgagtcgcggtgtcttccaagacccggaggtacattcatcggcgcaggcgcagctctctgagactgagagcagcgacgtgtacagcttcggggtgttccttctcgagctggtcacaggcagggaggctgcggggctgatgccgccggggtccagcaaggactctctcgctcaatggatggaggcgcgtttcgcctcgaacgagctggtcgacccgagactgggagggagcttcacctcggagggtatggcggaggtggtgggcctggcgtccagctgcctgagcccgtcggcgaggcggcggcccaggatgcggctggtggcggcggagctggaccggatcctggagaaggagatggccctgaccaccgtcatgggcgacggcggcaccgccatcgtcacgctcggcagccagctcttcacgtcctga

SEQ ID NO: 147917 - DNA, 1268 bp, Zea Mays
tcctgtcctccgctgtgccgcaatcctacccttccgccgccccgcagccacacgaatcgtcaggtttgattgttcatccatcgtctgacgggtggagctgcacgatggtccatttacggtctccaatccattccctgttttctcgtcggattttgatttcgattctcacgttttctcccttggttttttttgtcgcttcatctgattgactgaaggctgtgatgaccaaaaacacctacctattttctgactcctgacgatagaaaccaatggatccttctgagcctttattaagatctcgcttttctgtttgattaatcttcgctttttctctggttcggttgtcatctgatatttttttacccctaaaaatgatgcgcgagggtaggatttgctttgttgatgggatgataagccttgacagaaacttcagtgttgacccaaatatcagactacaattatctgatcgactccaaattcttgccttttgaacttgttcgtagtatttattttgctcttgaagtcgaacgttgccgtttgttttttgtttcaacctggtatgtgtttgtgtgttgtccgtgcacaataagccgatgctctggatgatgaacacaggaaggaagcatggtagtgtgcacggagaaggaggaggtctgcatgtctgctcgctttgatgccctcgggctctgatctcgcgggcctggattcgacctacacgcgcgctagcttagattctcttgcgaactgtgacgtctttttgaatggattttaatgagcgacgattcaggcagcccctttgtccgatctcaatgtcaatggaggtgttgcgttgctcggagaagaaaatcttttggtcttcagatcggttgaggtggggaggtcacttccccccgttgaggctggtctagtaaatcttaagaacataccctaacattatcaatgttgctgagccttgttagctgttttgttgttcgctggatccttttgtgctggttttcgttgtggctgaggagagctgtttggattgagattttgtgccgatggatcatgttcttcgttccaattaagctagagtctgtattcatgtttagatgaaaccgtactgatcacaagaaactagttgaacatcctaagtcaattactaatgaactttgtatagcttcggtaaaataatgtgctgatggtgcaaatcttctccatgaacaaaatattgaaggccaaaatgcatatatagaaatagaatttcagttggcaacggaaacctaaag

SEQ ID NO: 147918 - DNA, 535 bp, Zea Mays
ccattcttcaggcgtccaactaaaatttaatgaacaagagttaggcaaggagggttatatcagaagttgccctccacaccaccttccgtcgatcatctggcagtcaccaaaaaaaagaagaaaatgtttagcccttcacaccaccttccatcgtcgccacttgagaagagctcctgcttctcatgtctgtgctgttggcaacagaagtataaaagaaatggaagaaagattgctagtgctgaagtcaaaagagaaacgtgttacatgtatggacaaactgattgcagcatcaggagagtaaccgatatatatgaagaagacgcaaacaacaaactagcatctccaataactatctcagctaacacactctgcaactaaaggcaatatcgcctgtctccatatccgaaggaacacaacaacaatagaagcatgcaagaagagaggaagaaaccttacggcttgtttctattttccttaccccactctctcttttcccaccccatattatattaattggacatatgattgtgtttgt

SEQ ID NO: 147919 - DNA, 255 bp, Zea Mays
atgagctcagggacgacgacaacggaggaggagagcggcaaggggccgccgccgcagcaccagcaccacttcgtgctggtgcacggcgcctgccacggcgcgtggtgctggtacaaggtggccacgctcctggcctccgcgggccaccgcgtcacggcgctcgacatggcggggtgcggcgccagccccgtgcgcggcgaggacgtggcgtccttcgaggactacagccgcccgctcctggacgcggtgggagcg

SEQ ID NO: 147920 - DNA, 1774 bp, Zea Mays
gcatccccgagccgaggacgaccaatggcaacaccgtgaataaccacgatctccagccccatttaccctaccccaccctgacctttatcactacatcccgcaccgccccccagcagccccgtaacacggcgcaaccctacgtccctacctaccttaccgttctgccctcgtctcgcccatggagccgcccgcctcctcgccggcaccgccaaaccctaacccagtccccgacgatcggccgctgcagcagcaggtggaagaggcgcgggcgccggagccggagccggagcgggagacgtcgccgacgtccctgaccacctcaatcgatcccaccccttccggcggcgaggagagcgagagcgatgactcctcgtcagtctcgtcggcgccctcctccgcctccgctcccgcggccgctgcgcccttccccacggccaaggacctcctccacatctccttcaaccaggactacggctgcttcgcggcgggcaccaagtcgggcttccgcatctacaactgcgaccccttccgcgagatcttccgccgggacctcgccgccgatggcggcggcgccgggggagggggtatcggcgtcgtcgagatgttgttccgctgcaacatactcgcgctcgtcggcggcggcgataacccccactacccgcccaacaaggtgatgatctgggacgaccaccagagccggtgcattggggagctctccttccgctcccccgtccgaggcgtccgcctccggcgcgaccgcatcatcgtggtgctcgagaacaaaatcttcgtctacaactttgcggaccttaagctcgtgcaccagatcgagacggcgcccaaccccaagggcctctgcgctgtgtcgcagcagcccgggtcaatcgtgcttgtttgccccggtgcccagaaggggcaggttagggtggaacactatggggcaaggaagaccaagtttatcaatgcacacacttcccgcgtctcgtgcttcgcgctgtcgcaggacgggaggctcattgcaactgctagcaccaagggaacacttgttagaatctacaatgcagctgaaggcaatctcttgcaggaagtaaggagaggtgctgatagagcagaaatatatagcttggctttctcgaataatttgcagtatttggctgtgtccagtgataaaggaacaatacatgtcttcaatctaaagataaatgtgggatcgactgcaaatgataaacctatacctgctccagatcctgaagtttcgcatataagcccccctctttcgttcattaagggtgtgttgccgaaatatttccactctgagtggtcagtagctcagttcaggctccatgagggggagcagtacattgttgcatttggacatgagaagaataccgtgtcagttgttggtatggatggaagcttctacagatgtcaatttgacccagttaatggaggagaaatgctgcagctggagtgctacagttttctaaaaccgtcagatcaaccgtagcgacacacaattatcatctatcaattgatgccctcctccccgtaccaagaactgtacagtatctttgtgcgccctcgttggccggaggtctaagctaaatatgataatattttctttgtgtatatatatttcttgttggctctgggtgatgtatgttctgtctgtggaagggctaaaacacccatctgcagatggacgttatagaacgtgtcgttattatttatgaatggattgaataaaatagcctaacaatgtttctccaatgtt

SEQ ID NO: 147921 - DNA, 737 bp, Zea Mays
atgttgccatgtcgtcgtcacggatcgagatcatgatccagcgagcgagcgagccagcacttcacttccattagcagttagtctcgggctcgttggccgtctttgctggggcagctacctagcagacgcatggcacacgtcgaccggccacggagccgcgccgtgctcgcggtcgccgtcgccgtcgccgccgcggcgctcctcctttttgccgcagcgggcgtcccgcgtgcggccggccagacgacgacgacagcggtggtggatctggacagctgggccgatcgcggcgcggcgtgcacgggcgcggtggaggcgtgcggcggcatcggcgcgacggccaggagggagctgggttccggcgggtacatcagctacgacgccatgagccgcgggcgcgtgccgtgctcgtaccgcggcgcgtcctactacaactgccggccgggcgcgccggccaacccttactcccgcggctgctccgccatcacccgctgcagaggctagggcagcgagcgatgaccatccccctccccctccccccggccacgcatatgatctgctctggtggttttgtgttctgtagttagctgggcttttgagaggttggttgttgatcagctgacatagagcaagctgcatcttgctctatgattttgtaattggcattggaaaaagggaacatgtgtggatcaagaactcctggtccattattatattcgtgtgcattgtctttcatg
